United States Patent Application Publication US 2005/0228172 A9 - sequence listing, part 167

SEQ ID NO: 744198 - DNA, 536 bp, Homo sapiens
ccccaccttccaggcagatgacagctgcaaggtagggtacttctcctaagactcatgccaggttgcacattttctggatgtgacagcaacagactaggtcctcagaaaatgaaccatcgagatggactatctacttttgtmaagttaattaatccaaggaaaatcagggggttgtaaatacacacagtcaaatatggaaccccaggttccagtctcctaatattatggtcaaatcagactacagcacaccaatcatttcttttctgttactgtcatgatcaatactaattgtcatgggccaattcaagctcaggacaagctgcacgattagaagcagaaagtgaataaatgatctttgttgcatttcatttgttttacacatacgggggacaggatgtgagttccacgtatttgtcccatgtgcgagccaaccaagctggcccaatggggaacaggacatgggagatttcaaagcagaaggagatggcttctgttccagtattcctttccctcttctgtgactgtcattcccattg

SEQ ID NO: 744199 - DNA, 584 bp, Homo sapiens
ccccaccttccaggcagatgacagctgcaaggtagggtacttctcctaagactcatgccaggttgcacattttctggatgtgacagcaacagactaggtcctcagaaaatgaaccatcgagatggactatctacttttgtcaagttaattaatccaaggaaaatcagggggttgtaaatacacacagtcaaatatggaaccccaggytccagtctcctaatattatggtcaaatcagactacagcacaccaatcatttcttttctgttactgtcatgatcaatactaattgtcatgggccaattcaagctcaggacaagctgcacgattagaagcagaaagtgaataaatgatctttgttgcatttcatttgttttacacatacgggggacaggatgtgagttccacgtatttgtcccatgtgcgagccaaccaagctggcccaatggggaacaggacatgggagatttcaaagcagaaggagatggcttctgttccagtattcctttccctcttctgtgactgtcattcccattgcaagtggcaataaaccacaaagaagctcctcttaactatttaagagct

SEQ ID NO: 744200 - DNA, 536 bp, Homo sapiens
ccccaccttccaggcagatgacagctgcaaggtagggtacttctcctaagactcatgccaggttgcacattttctggatgtgacagcaacagactaggtcctcagaaaatgaaccatcgagatggactatctacttttgtcaagttaattaatccaaggaaaatcagggggttgtaaatacacacagtcaaatatggaaccccaggttccagtctcctaatattatggtcaaatcagactacagcacaccaatcatttcttttctgttactgtcatgatcaatactaattgtcatgggccaattcaagctcaggasaagctgcacgattagaagcagaaagtgaataaatgatctttgttgcatttcatttgttttacacatacgggggacaggatgtgagttccacgtatttgtcccatgtgcgagccaaccaagctggcccaatggggaacaggacatgggagatttcaaagcagaaggagatggcttctgttccagtattcctttccctcttctgtgactgtcattcccattg

SEQ ID NO: 744201 - DNA, 609 bp, Homo sapiens
aaagttataaggaacctccagttaagtacatatgttcctacaaaggaggctggtcagtaaattaaccattttttttttaaacatagaatggaatattattcaggcttaaaaatgaggaaaccttcccattgcaacaatatagaggatattatgctaagtgaaataagccagagacagaaagacwattctgtatatgatctcatttaaatgtggaacctgttaataaaataggcaaactcatagaagctgagagtagaatggtagtggctaggggttgtagggaggaggaaatggagaggtgttgattaaagggtccaagttatgccagatacataagttctggagattcgttacagagcatagggcctctagctaacaaaatggtattatatacttaaactctgctaagagagcagatcttacgtcaagtgttcttaaccaccattctttatgtattcttccatttactttcaacatcttgatcgctatcttgtaaacccttccatggttctagaaaaaattcagagtgactagtgacaagaactaaaactgcatatccagggaaaacattggggcacaccaaggaaatgaaatgcaaaagatataaat

SEQ ID NO: 744202 - DNA, 427 bp, Homo sapiens
tagtgacatgagatcaacctgccacaaaattggtatgagatttcagagggaagttaggaaggcaaagtgattgctttcttctggctccaatcctgattacccagcagctcctctcggccccctggctcccccgagaagctgaagaagtgatggaaactktctggcagaactaattctgagtgaaactgcactggactatgtctctgaatggctgtgatactgatatcccagcctacttccaattccactcgaattaccacatacgagaccaggattaaaaatttgtacagaaacaaaacatacttcactgagttattccaattaaacccaaaaaggggagtccaacataagcacacattatcctcagatgatctgggctcagaatcttcacactgcagtaatccaagggtcagtcttttaatcttta

SEQ ID NO: 744203 - DNA, 616 bp, Homo sapiens
agcagcagagcctgcaggcaaagccaggtagtcaggctgtagagcaggtattcttttttattttctttaaaaaaaattttattttatcttaagtttcaggatacatgtgtaagacgtgcaggtttgttacacaggcaaacgtgtgctatggtggtttgctgcacctatcaacccatcaccttggtattaagccccacatgcattagctatttatcctagagtacatattcttaatcaccgtgcaacatgaccttgtatgcattgccttctagtcctctcaataaactctcaataaacccaaagtttggcctgctgaatatttctaaaattagcatttcaaagtcaggagacttcatagaaaagccagatttgtggactctcttaataaatcaaaacatctggccacctaggcctgctctcttgaaggcctttgacaagaggcctcrgttggggggcacagaccctcctcactcatttgaccacttgtgtggttcctgaggcatttgagattgagaccctggcttagctgttttgcagacaaagatgctgaacccaagagatgttaaagaacttggccaaggccccaggcctagggaatagcagaggctagctttgc

SEQ ID NO: 744204 - DNA, 608 bp, Homo sapiens
  misc_feature 607, 608: n = A,T,C or G
ggcagctggtgatgagagagagagagcaaaagaaaaaaaagggagagaggccgggcgaggtggctcatgcctgtaatcccagcactttgggaggcccaggcgggcggatcacgaggtcaggagattgagaccatcctggctaacatggtgaaagcccacctctactaaaaatacaaaaaaatagcgggcatggtggcaggcgcctgtagtcccagctactcaggaggctgaggcaggagaatggcatgaacctgggaggcggagcttgcagtgagccgagactgtgccactgcactccagcctrggcgacagagtgatactctgtctcaaaaacaaaacaaaacaaaaacaaaaaaaaagagagtctatgacaaagggttcaccagttggaacccacagcctttttatcacctactattgtgatgtgccatcacttttgctctatggtgttgagtagaagtaagttgctatgttgagtttacacccaaggggagggtgttacacaggggtagaacaccaggaggtggaaaccactgtggatattttagaggctgctcattccactactttttattgcccactccctttgtctcttctaggtatctann

SEQ ID NO: 744205 - DNA, 608 bp, Homo sapiens
  misc_feature 607, 608: n = A,T,C or G
ggcagctggtgatgagagagagagagcaaaagaaaaaaaagggagagaggccgggcgaggtggctcatgcctgtaatcccagcactttgggaggcccaggcgggcggatcacgaggtcaggagattgagaccatcctggctaacatggtgaaagcccacctctactaaaaatacaaaaaaatagcgggcatggtggcaggcgcctgtagtcccagctactcaggaggctgaggcaggagaatggcatgaacctgggaggcggagcttgcagtgagccgagactgtgccactgcactccagcctaggcgacagagtgatactctgtctcaaaaacaaaacaaaacaaaaacaaaaaaaaagagagtctatgacaaagggttcaccagttggaacccacagcctttttatcacctactattgkgatgtgccatcacttttgctctatggtgttgagtagaagtaagttgctatgttgagtttacacccaaggggagggtgttacacaggggtagaacaccaggaggtggaaaccactgtggatattttagaggctgctcattccactactttttattgcccactccctttgtctcttctaggtatctann

SEQ ID NO: 744206 - DNA, 496 bp, Homo sapiens
taattgactagtaaattccctcactaacaaagtaaactattaggctataacaaatatgatacatacttagactatttttatctttatatacagacactgctaaatatcataaatcataaagcttaaagattttttaaaatacatgtatatatttttaatttttatgcttagctaccactatgagtwttgaaattaacaacagcctcaaatcaagcagtgaaaaatgctagtgaatgatcacattttaatgctgcttaatttttaggcttctggtgtgaattagctatgagatacagcaatttaaaggataatgactaaactctttcctatttcctgcttaatttccttttaaagaaaagtattggactttaaaaaatattactcattctttaaataaaaaaaaccaaggaattagaattctcttaacaagtgcatcttctagagcagcagtctccaatctttttagcaccagggactggtttcacggaagacaatt

SEQ ID NO: 744207 - DNA, 502 bp, Homo sapiens
gtccatcccaaactaggtcagttgcccctggtgaactctgttcacccagttccttccttcgtggtgctcattaccattggtaatgacacatttatttcctaagagtatttgatgaatgatctcccatgctaaataatagctatatgaggagagcagggctggatttcattcctcctcactgtgtccctataatatgacattacacaagagacttgctaatgtgtttgtggaatctgagcaaaaccagctactcattaagtcattcttatccttattgactgtacttytgccgccattctttctgtttcatcctctcaattgcctccacattttctttgggaatggattcgatgaggtcacacagttctaccaggcgagattctacttttaccagcttttgaattgggttgaggccgtcatcctcagcatctccaatgcagactttgtatacttgagtaatctttttactaagtgagtctatcagtatttcctgagattgaga

SEQ ID NO: 744208 - DNA, 665 bp, Homo sapiens
aaacatcatgttgtacatgataaatacatacaagtttatttgttaattaaaaaacagaaatggattagttctgcctaaatatactagactcagaagttaataataaatgtgcatccacccctttgtttaatttgccttggctattaagttaacatttatgctaagaacctttggctgttatagtttcctatcatttatttggtaaaaagattaattggagaggtgtttcaatggctccattaggagatatgaagaaagccccaccattgccagtatttgggaactcaaagcgtttattttctaaagcaggtgatgctacatgaattgctgtccacaccttctgctactttcctctgttggccagaagaataattttaatgtcgcccaaatggattatgctgacctcaacccagatccccctgggagatataaacttcttayatgttcctggctgggtcattgtaaataatatctacatgtatcccaaagctctgaattatcctcatctgtaacagacacaacgactaaatggtatctggaacgtagttaattttctggaaaatattcaaaggaacaaaatgagcactgcaatacaaaattgctgtcgacttaacttttgccagtttccctggatgtgtaagtagaattatattttcacagaactt

SEQ ID NO: 744209 - DNA, 599 bp, Homo sapiens
aggccccaccagagcagctagatacagagtgtcgattggtgcattcacaaaccttgagctaaacacagggtgctgattggtgtatttacaaaccttgagctagatacagagtgccgattggtgtatttacaatccctgagctagacataaagactctccctttgggaggccgagacgggcggatcacgaggtcaggagatcgagaccaccctggctaacayggtgaaaccccgtctctactaaaaatacaaaaattagccgggcatggtggcgcgcgcctgtagtcccagctacacgggaggctgaggcaggagaatggcgtgaacccgggaggcggagcttgcagtgagtcgagattgcgccactgcactccagcctgggcgacagagcgaaactccgtctcaaaaaaaaaaaaaaaaaaaaagactctccacgtcctcaccagagcagctagatacagagtgttgattggtgcactcacaaaccttgagctaaacacagggtgctgattggtgtatttacaatccctgagctagatataaagactctccaagtccccaccagactcaggagcccagctggcttcacctagtggatcc

SEQ ID NO: 744210 - DNA, 543 bp, Homo sapiens
tcattagtttttgcctgtttcggagaggatattaattgtagtttctttgatattttcttctgctccctgcattgtatgtttcttatgaatttctttttttctgtttattttgttctctcaccctagaggttttcttctaacgtggctgcacgtcatagttaagagggaggcactaaaatcctaatgggaagttctttgtgcatggtttgtcagtgatcttcacttcaaggatttaagagaccakcgaactttttctctgtggtagaaagcatgcttggattagaatcctggatctgccacttactcaactatgctactgtgggcaagttactttttaagcttaaagtgatcaaattaacactgccagtaattagacatattggcatctcatatcccctgatatgacacactgataagggcatatcacctctgtgatattattgtcccaaattcataccctttatctaattaagagaaaacataggccaacaaaagtgaagagtgttctacaaaataactaatcaatattttaaaaaagaatca

SEQ ID NO: 744211 - DNA, 601 bp, Homo sapiens
cagaaactgcagcccagagaggttagttacttgcctaaagttacagtcaataaaaggcaaacccaggtaaccctgatctagaatctgtactgttaatcatatttctactgatagatcaaaaggcatggacccccctcactgaaccccccattttgttttcttttttacagatcatctcatggaacacactttggcaaatgctgttacagaagttccttcatttatttacttacatttatctatgagccagcattgttctgaaagttctaggcattgccaaaggcaagaaatagaaatgagacattatcatttgaaaggaagcaaaattatttttatctataaactggataattatatacctagaagatgcaaatgaatcaagtctaagagctactagtatttattagtaccagtataaaaatttagaaagrtggccagttaaaaatgaaatacataaaagccaatagctagaaaccaccaacaaaatatgatatggaaaaaatccttttcataataccaacaaaaatataaaaacttaatacagactttaatataatccttaatactataaaagattataaagcaaggcagaaagtacatt

SEQ ID NO: 744212 - DNA, 660 bp, Homo sapiens
aatcctaactggcgcttctcaaactttagtgtgcataaaatcacctagaaaactggttaaaacacacattcagggccccacccctcagatattctgattcattaagtctgaggtgagccccaaaatttgcttttctaataagctcgcaaatgatgctgattctgttggtccaggaacyatgctttgaatagccctgcaaatcgtaattttttattcgatatttgtaaagagatgaaagaaaattaaaaggcttggcaagcaaaaagaaatgaaaagtaatgtgtactcggtgttcatataggaaataaaacagtgtaatgactacttcgaaggaaaaaaattcttccaaaacgtaggccacatctacccaacagtatgcaaacatttggagaggaaattaattggtacatatggctgtaggtgttcatttctaactaaactaaacagtccatcaaagcctttctttcagacatttaattaagtaattctgaggagattatgtcatttaaatatttcttgtctgggggtcagggacccacttaggttcaggtatctcttctgctcatctctaaatccttgtttagcaactccacccagaccattaacaaaatccagggtaagcttgtcagttaggagtaaaggagagctgtttgggacaaa

SEQ ID NO: 744213 - DNA, 660 bp, Homo sapiens
aatcctaactggcgcttctcaaactttagtgtgcataaaatcacctagaaaactggttaaaacacacattcagggccccacccctcagatattctgattcattaagtctgaggtgagccccaaaatttgcttttctaataagctcgcaaatgatgctgattctgttggtccaggaactatgctttgaatagccctgcaaatcgtaattttttattcgatatttgtaaagagatgaaagaaaattaaaaggcttggcaagcaaaaagaaatgaaaagtaatgtgtactcggtgttcatataggaaataaaacagtgtaatgactacttygaaggaaaaaaattcttccaaaacgtaggccacatctacccaacagtatgcaaacatttggagaggaaattaattggtacatatggctgtaggtgttcatttctaactaaactaaacagtccatcaaagcctttctttcagacatttaattaagtaattctgaggagattatgtcatttaaatatttcttgtctgggggtcagggacccacttaggttcaggtatctcttctgctcatctctaaatccttgtttagcaactccacccagaccattaacaaaatccagggtaagcttgtcagttaggagtaaaggagagctgtttgggacaaa

SEQ ID NO: 744214 - DNA, 500 bp, Homo sapiens
aagtcactttgcaaaacagcctcgtagtttctcaaaatgttgaccatagcattaccatatgacccaccaactctacccttaggcagatacaccaagagaatcagaaagcttatgttgacataaaaatttatacgtgactatttatagcagtattagtcacaataggcaaaaagtgaaaaccactcaaatgtccattaactgatgaatggccaaacaaactgttgtgtatccatatactggaatacttttttatatgaccattaaaataaattaagtacagatacatagtacgacatggataaatcttgaaaacattattgtaagtgaaaraagccacacacaaaaggctacatattgtataattccatctatatcaaatgttcaaaataggcaaatccataaaaacagagcagaatagtggttgccagggactggggaaaagggggaaaatggtgaatgactcccggtggatatggggttttgagagagagagataaaaa

SEQ ID NO: 744215 - DNA, 664 bp, Homo sapiens
aattactgaagactgtgccattctatatgttcaggactacgcagcgacaggttaacaaacaatcctagggtttctacctgaaattgccctcctgtccttacatgaagcagctaattttctgggacaaggcagaatgaagatgttctttcagaatataaatccttgaagaccataaagatgttccattaacttattttgacattttctcaactccaaaacatgtattctttttgtaaatgctgtatcgtttcaattaaattttaagcacctgtgarcaaggagaatctaaacaaatatgctttgctagctagcaaaaaaaagcaaaaataataatagtggaagatggaaatgttaaattcgtcaatatttttggtgatctgaaaactatacaccttaggaaattatctagaaaataacatgtattttgtcgctttcatctagaatgtaacttcacatcacataaatcataatactaatgaaaattataacaaattcattttcctcccccacaataaaagtagtataaacttccactgagagatcattggatttaaatcaaattgcataatcaaaattaaaaacaataaacacttgcacaaaaatgtgtctcatggaaaaccgaaactggagataaattgtcttgtaaaatgcattaaaatacaag

SEQ ID NO: 744216 - DNA, 558 bp, Homo sapiens
atattaaatgccttctttttaactcagacatccttcctccaacagattccaaatagatcctaaggagataaagaatcaaacatacaaaaatgtaggaacaaaaacgtccttcaaagcatgattaataataggagcaggaaagaaatggaaataagcacaatgtcatcagtgaaatagttgttaaacaaattaaagtatatctataccatgaacaaatatatagacttaaaaatgagtgatatattgacaaaccatatatctcataaggggttaatctgcaaaatatacaaggaactcctacaactcaatagtaaaaactcaaaactcaacttaaaaatggtctaaggacttctccaaagaagwcatacagatggccaacaggcatatgaaaaaatcctcaacatcactagtcatcagggaaatgcaaatccaaatcacaatgaaacatcacctcatacctgtcagggtggctattattctttttaaagaaagtgttggcaaagatatgggcaaacagcaaccctaacacactattggtgggaatgcaaatggtgcaac

SEQ ID NO: 744217 - DNA, 620 bp, Homo sapiens
aattgtgtaaccatatctggcatctatttgtgctttcgaacatcagtcagtcaaatgcattgggtgttatgatgatctgagcactattccaagttccaggaaagataaagttattttcaagaagctggtatttatatatttacttagtaaacttggtgttgttgctaattagaagctaatgaaaataagaaaaaaaatccctatgtattctaaatccctttaaaagataactggaaaactttaattaagaaggctaaggagattctggtttaaaataytccttattcatattgaatattcccagaaaatatgttttatttttaaggtactatctttaaaaacttcactccttttcttaaacaaagaaataattgatggctatcattttgtgagggttattaatttggtgatgtagctgtttctcttggtttttcagccttgctttgttagtcttaatgagcattaggaaacttcagataagcataattttgttccctttgactttcaaaataacaatacataacgtagaactttgcagattttacttagtaaagcatatcaaagagtttatgatttattgcaagaaaattcatttaggaaattcatatagtaaagtaatt

SEQ ID NO: 744218 - DNA, 649 bp, Homo sapiens
cggatttcaagagcactcctccattgggaaggccctgccctcgtctgtccctgcatttcctccacctggacttgcttaggccctcaggactgtcagcccagcccacggacctctccacgtgagctggactcccacctgcacaggtccctgtccgtgggtggccgggtctgggatgctgatggttttctcccatgccccggctccaacgtgtacatcctattccatggagaaagccaccgtccccccagagcgccaggttcctggcagctctgaacgctgctgcctccacgtggcctgcctttctctccccttcctggcctgatgaaattgtacttccactgctggggaagctccctggacactccttgtgtcccagccatcctgctcacggctcggtgagctccagaaagcagagcccgcaggttgtgtccctgggcctggctcccrgcacagtctctggcacaatttaggggctaaactgtgtctgcccctggaggagaatgttcttgtacatccccatggacatccccctacctgtcccccagagccaggaccacgtccctgtgcatccagcaccagccatcaccgagatttagatggctcggtgacaaccgcctccccagccacatcctgtttgactcagctgagt

SEQ ID NO: 744219 - DNA, 484 bp, Homo sapiens
tgggatccaccattaactctttcgtgcacgttggcttccagcaggcatcctcacactccccaaccaggcccgcagggtggaaaggcagccgccgagctcaactcaactcccacccagccgtggaagccagtgtggatggcaaagtacccatgcataaacacacacacgaggctgaggccaagagaacacgcgctcagttctcccttggtcctccagcaacgtctccatgctctagccctgcctcaagccctaaacggtgtaaggtttttccaggtggaggaatggaagcccctaagargtccgtgctttagggattacacagaggcagggctcaggagcaaaggcctccagatcccgcagtgcggcgctggcaagcttgcgctgctgcattcacactgtcctgggatgaaggcgacatgctgacctccctcaggtggctgcaggacagccaggaggaggtgagatgccagccaaaggcagccac

SEQ ID NO: 744220 - DNA, 558 bp, Homo sapiens
tccttattgtattgtctagtttacaatgtgtatggatgtagtaaatatctaacaaccatcacatacaggatggaaagtggtaaatgaacccataggattgcctagttcttacactttttttccatgaagaaaaacaatgttaattctaagtagactgtgaaaagctaagaatgtgcaatagaatctrtaaagtaactactaaaatagcaatacaaagagatacaattaaaaagtcaaaacaggccgggctcagtggctcacgcttgtaatcccagcactttgggaggccagggtgggcggatcgcctgaggtcaggagttcgaggccagcctggccagcatggtgaaaccccgtctttactaaaaatacaaaaattagccggccgtggtggcaggcgtctgtaatcccagtatactagggaagctgaggcaggagaatcacttgaacccaggaggcagaggttgcagtgagccaagatcatgctattgcactccagcctgggcaacagagtgagactctgtcttaaaaaaaaaaaaaaaaaaaaaacataaattaaaa

SEQ ID NO: 744221 - DNA, 614 bp, Homo sapiens
ggtggatagtctctgctgaaactgttcaactcagccattgtagcaggaaaacagcattagacagtctgttaataagttatgcctcaaatggtgatgttccaattaaactttaattgcaaaagcagacaaaggggtgaattttgtctgtggttcatagtttgctgacctctggtctagactacttttgatttttgcagtttagtgacttttaagcactttaatatatggttaacttttataaatattccctgatcactagaaaagaaggtatgttctatctacacatggtacaatttttayctcttaaatcttatttcatataatgtaggccattttagctttttttttttttggtcaagtttcttagcctttgacaaatcagttcatttctatcaattataacaattttatgtggtacaaataaaatatttgccagttgtccttttaaaaacgttccaggaggcgagtgctgaaacgtctttttatgaaacattataaactggtagctcagttactttttattgtgggggggctttacagtggggttttctgtttcgttttgcttgaatcagttaccaacatttagctatatggagattttataaaattttata

SEQ ID NO: 744222 - DNA, 659 bp, Homo sapiens
actggatgtccagaattctttatttctatttttagttgaatccctggatccagatcttttatattggtttgactacctatatccacccaacctgtcagaaatgtcttgctaggatttcttctagactccaaactgataaattccagcagagattctgattcagaaggttggttagggaaggagatagggtgagagagaactccagggaaccagagcctagaaactgcctagaatcccatgtgtttctgatacaggtggatcatggatcagacactctgaacaacactgatcaacactgaagtttctggaagtctgactttcatataaagggaaatattgtcatattggccaatagagatttaaagtcgcaaggtttaagaccaggtaagaataacttaagacatcagatcttctttgcaggtggcaaacaatttaatttcctaagtaagctaaatgttctctccctaagtttgtctcttttaagtattktcttgattagctgtttcttcagaggaaactcagaggtgaacttcaggcaatgttttgttcaaattacttttaaattttgaatgtgttcatgtctgtgtttatgacctgtgcctgggcttacagagtataaagtgtattctcatcaggccccattgtcactttccccttcc

SEQ ID NO: 744223 - DNA, 643 bp, Homo sapiens
taaagcaacgagctatcctgccacaagcccaggttcacaggcattttccaggagatcatcagttagtggaaggcacagacaaaggctcagatattgaggttaacttccagtttctgagcctggcatttgatccccaaaactcacaggtatgacctgtataaaccagggacaaaatgttacatagtgaaggccttctattttgttacttccatcaatatgagtctcaccttctgtgatggttaagtttatgtttcaacttgaatgggccatggaatgcccagatatctggttaaacattatttctggggatgctggagagggtgtttctggacacagttcgcatttgaatgaatggactgagtaacgcagatggtcctccccagtgtgggttgcatcagcgacctactgagggcctgartaaacaaacaagtggaggaaggtggaatcctctctctctctctctgcctgactgctggagcagagacatcaatcttctgcctttcaactgggatttatgccattggcgctcctggttctcaggcctttggtttttttttttttttttttttggccttcggtcttacatcatcattccccagttctcagcacttcacacttggactaggattaaaacacactattg

SEQ ID NO: 744224 - DNA, 642 bp, Homo sapiens
atccctttcctatcccacctcccagatagtcattgatctttttttgtcactatacattagtttgcattttctagagttttttttaagtaaataaaagtatacattgagcattccttttaactgccttcttttgttcagtataaatattttcagatttattgatgtgttatcaatagtttttttttttttttttttgagacagagtctcgctctgatgcccaggctggagtacaggggcgtgatcttggctcactgcgagctctgcctyccaggttgacgccattctcctgccttagcctcccgagtagctgggactacaagcacccgccaccgcgcccagcttattttttatatttttagtagagacggggtttcaccatgttagccgtgatggtctcaatctcctgactttgtgatccaccctcctcggcctcccaaagtgctgggattacaggcgtgagccaccatgcccagccatcagtagttcatttttatagctgcataattttacattgcatggctatcctacaacttgtctatccattgatctattactattaatttaggttgcttcaaattttgagtatgacagattatttgcatatttgtatatgtgtttttatatggatgtgtattttttat

SEQ ID NO: 744225 - DNA, 642 bp, Homo sapiens
atccctttcctatcccacctcccagatagtcattgatctttttttgtcactatacattagtttgcattttctagagttttttttaagtaaataaaagtatacattgagcattccttttaactgccttcttttgttcagtataaatattttcagatttattgatgtgttatcaatagtttttttttttttttttttgagacagagtctcgctctgatgcccaggctggagtacaggggcgtgatcttggctcactgcgagctctgcctcccaggttgacgccattctcctgccttagcctcccgagtagctgggactacaagcacccgccaccgcgcccagcttattttttatatttttagtagagayggggtttcaccatgttagccgtgatggtctcaatctcctgactttgtgatccaccctcctcggcctcccaaagtgctgggattacaggcgtgagccaccatgcccagccatcagtagttcatttttatagctgcataattttacattgcatggctatcctacaacttgtctatccattgatctattactattaatttaggttgcttcaaattttgagtatgacagattatttgcatatttgtatatgtgtttttatatggatgtgtattttttat

SEQ ID NO: 744226 - DNA, 606 bp, Homo sapiens
tgtggtggttcctggagcaagaagtccacagtgtgagtctccacatgctgttctgtccatccaagttaagagctgcaggtcagccctgtctcctatccaccatcttgaacaatcatgccagaaggcaaagaggaatcgggcatgactacgtggacagagaaggaggaagaaagctgtgtatacattttatattcaacaagacaggaaatctcgcatatcaataaggaaaaggtagacaacacagtagaaaaacaggcaaaacacttgaacaggtattkcacaaaagaagatactctgttcattaatcatatgaaaagatgctgacattcattatttttcagtgaaacaaaactaaaactactttgtggtaccactatatcactgtggtatcactggaatggctttaatcatagacaagttataccaagttccaatgttgagtcactatgagctacttagtgttatgcagccctgggacctctccggttgccagtgcctccatctatgcataccaaatccttgtccactcagtcttctgaatgagattaagatcttgactccagaggcaaatgggcaaaatgtttaataaggttataaagtcacaca

SEQ ID NO: 744227 - DNA, 655 bp, Homo sapiens
tctcacttcatatatataaaaacttcaaagcaatataattccattcttccattcatcatttgtgttatcatatctttgatttctatacctacattatacactcaccttataatgctagtttttgttttcacaatcagttttcatttaaggaaattacaggaagagggatgcagccttgtatatttacctacctacttaacatttcyggtggcttgctttcttttctacagatttgcatctctatctggtatactttcccttcagcttaaaggacagtgtagtgcagaactactagtggcagattctcccagctttttgttatctgaaaatgttttatttatttatttatttatttattttttggagaaagagtctcactctgtcacccaggctagagggcagtggcacggtctctgctcacggcaacctccgtctcccaggttcaagcaattctcctgcttcagcctcccaagtagttgggattactggctaattttttgtatttttagtagagactcggtttcaccatgttggccaggctggtcagaaactcctaacctcagatgatccacccacctcggcctcccaaagtgctgggattacaggcatgagccaccacacccggcctgaaaatgttttatttcttcctcatttt

SEQ ID NO: 744228 - DNA, 592 bp, Homo sapiens
ctctacaatgacactttgggaggctgaggtgggtggatctcttgaggtcaggagttcaagaccaacctgggcaacaaggtgaaaccccatctctaccaaatatacaaaaggtagccaggcatggtggtgcgtgcctgtaatcccagatactcaggagggctgaggcatgagaaccacttgaaaccaggaggcagaggttgcagtgagctgagaacacaccactgcactccagcctgggcgacagagtgagtgagactgtgtctcaaaaacatcactatcactatcacctgtaaggcctcccargccatgtggaacttaagtcaattaaacctctttcctttataaattacccagtcttgggtatgtctttattagcattgtgagaacatgctaacgcaatgggttaaagacttacatgcaaaactcaaaactataaaaaccctggaagacaaactaggcaataccattctggacataggaactggcaaagatttcatgatgaagatgccaaaagcaattgcaacaaaagcaaaaattgactaatgggatctaattaaacttgagagtttctgcacagcaaaggaacctatct

SEQ ID NO: 744229 - DNA, 636 bp, Homo sapiens
tctcattatagcaaggggttgtaagcacaaatgagataaattatgatcctttgaaaagtacaaagtattacagagaaagcaatagcattaattctggcagcagtctggaatggagcagtaattccagtcatctggaaatacaggcagtagtgagtcacggctcgtagactcagagcagggaactggtttggataaagtgtgtgacaagttgtgggggatgttaaaaggagctaagcagggccgggcgtggtggctcacacctgtaatcccagcactttgggaggccgaggcgggcggatcacctgaggtaggaagtttgagaccagcctggccaacatggggaaatcccgtctctactaaaaatacaaaaataagccrggtgtggtggcgcatgcctgcaatcccagctactcgggaggctgaggcaggcgaatcgcttaaacctgggaggcagaggttgcagtggccactgcactccagcctggacaacagagcaagactccctctcaaaaaaaaaaaaaaaaattggagctaggcaggttccatgcccagagctagtggtcaggaatcaaatggcaaggaatcaaaactggtcacacaagccacagttggggcaaacctgaaaagacagttgca

SEQ ID NO: 744230 - DNA, 594 bp, Homo sapiens
tactagtttcctaagtccaacatcacattcagatatctcttaactataaattggtgtagtaactgtgatatatcagcatagagatggctccatccattaaaaatatattggtggcttcaaaaagttttatatttgttactggcatataaaacaaataaatgcccagatacaaaattgtgcagaacccagattagtatctaataaagaattaataaagaatatgtattaatatagatatatttatttacatattaatkgttttttcaaattggccaaatttttcaaaacaattacatattaaaaattgagatatatgaaaattctaactaatagatttatagtcattcctagggtaggcattaacacctcttggtaacttctgtaagttaattatagtttaacttcctaattaattaattctgtaagttaatttatagtttaacttcccagaggctttggtgtctttttttaccctcactttaaaatacacacaatagtatataatatatcacatttggtcaacagttcaaatttttttattctttaaagcatgtacaaaaatatactagttagaattcctgtgaaaaattctaa

SEQ ID NO: 744231 - DNA, 594 bp, Homo sapiens
tactagtttcctaagtccaacatcacattcagatatctcttaactataaattggtgtagtaactgtgatatatcagcatagagatggctccatccattaaaaatatattggtggcttcaaaaagttttatatttgttactggcatataaaacaaataaatgcccagatacaaaattgtgcagaacccagattagtatctaataaagaattaataaagaatatgtattaatatagatatatttatttacatattaatgkttttttcaaattggccaaatttttcaaaacaattacatattaaaaattgagatatatgaaaattctaactaatagatttatagtcattcctagggtaggcattaacacctcttggtaacttctgtaagttaattatagtttaacttcctaattaattaattctgtaagttaatttatagtttaacttcccagaggctttggtgtctttttttaccctcactttaaaatacacacaatagtatataatatatcacatttggtcaacagttcaaatttttttattctttaaagcatgtacaaaaatatactagttagaattcctgtgaaaaattctaa

SEQ ID NO: 744232 - DNA, 594 bp, Homo sapiens
tactagtttcctaagtccaacatcacattcagatatctcttaactataaattggtgtagtaactgtgatatatcagcatagagatggctccatccattaaaaatatattggtggcttcaaaaagttttatatttgttactggcatataaaacaaataaatgcccagatacaaaattgtgcagaacccagattagtatctaataaagaattaataaagaatatgtattaatatagatatatttatttacatattaatggttttttcaaattggccaaatttttcaaaacaattacatattaaaaattgagatatatgaaaattctaactaatagrtttatagtcattcctagggtaggcattaacacctcttggtaacttctgtaagttaattatagtttaacttcctaattaattaattctgtaagttaatttatagtttaacttcccagaggctttggtgtctttttttaccctcactttaaaatacacacaatagtatataatatatcacatttggtcaacagttcaaatttttttattctttaaagcatgtacaaaaatatactagttagaattcctgtgaaaaattctaa

SEQ ID NO: 744233 - DNA, 594 bp, Homo sapiens
tactagtttcctaagtccaacatcacattcagatatctcttaactataaattggtgtagtaactgtgatatatcagcatagagatggctccatccattaaaaatatattggtggcttcaaaaagttttatatttgttactggcatataaaacaaataaatgcccagatacaaaattgtgcagaacccagattagtatctaataaagaattaataaagaatatgtattaatatagatatatttatttacatattaatggttttttcaaattggccaaatttttcaaaacaattacatattaaaaattgagatatatgaaaattctaactaatagatttatagtcattcctagggtaggcattaacacctcttggtaacttctgtaagttaattatagtttaacttcctaattaattaattctgtaagtyaatttatagtttaacttcccagaggctttggtgtctttttttaccctcactttaaaatacacacaatagtatataatatatcacatttggtcaacagttcaaatttttttattctttaaagcatgtacaaaaatatactagttagaattcctgtgaaaaattctaa

SEQ ID NO: 744234 - DNA, 698 bp, Homo sapiens
ctgtgaagctcctcccagactttagccaacttcaatctcaagccacaggcagagagtcttcttggtgtagttatagtcctttcctgccctgttttatgttggttagctccagcttgagttcctctcttggagcctttactaaaagtagcaagaagcaagcatcttataccagacacttgaaatgttttcctccatgttctttggagttagaggttcagatgccatgtgctctaccttccatgacatcatagatggtggttttaacaaacatttgtccatggcctagcaaaactcaccagctttatcactgtcacatgctgcggaattctgagtaaatgccatgtatttcagattatcttctgttcagctcctcttccaggtacaaagttttgtgttagttaagatgcaggtttggtggctgtgatagaagttcaaaataagagtggcttagacaagaaaagagactatttsccagtcacataatagaacaagttgttaaggtggcatagctttacaggggaggtcagtgcttgggtatcttctatttttcttttatccagtcactatggcatggcctttgtggcccaaaagagctcatcaccacatctgcatgttagctagggaaaaggggaaaatactcccttcactgacacacagcagtcaccaaagctggtcacgtggctattgagaaggtgcaa

SEQ ID NO: 744235 - DNA, 574 bp, Homo sapiens
gaaagggacaaattccctaccggtcagcaagctatccccagtatggatccccactgggaccttgactcagatcatggggactggaatcacaaacatctgttgacctgtgttctagaaggactaaggagaattaggaaaaagcccatgaattattcaatgatgtccaccataactcagggaaaggaagaaaatccttctgccttcctcgcgyggttacgggaagccttaagaaaatatactcccctgtcacctgactcactcgagggtcaattgatcctaaaagataagtttattacccaatcagttgcagatatcaggagaaagttccaaaagtgagccctgggccctgaacaaaatctggaggcattattaaacctggctacctcggtgtagggaccaagaggaacaggcccaaaaggaaaagtgagatcagagaaaggctgcagccttagtcatggcactcagacaaaccaaccttggtggttcagagaggacagaaaatggagcatgccaattacctggtagggcttgttaccagtgtggtttgcaaggacactttaaaagagtgtccaat

SEQ ID NO: 744236 - DNA, 589 bp, Homo sapiens
catgctaatcacagttacttgggaggctcaggtgggataatcccctgagccctggaggtggaagctgcagtgagctgagattgcatcactacactccagcctggggaaccccagtgagacactgtctctaaaaaaagaaggaaaagaaaaaaaaaaaaatcagccagttgtggtagcatgcacctgtagtcccagctaccaaggaggctgaggtgggaggattgcttgagcccaggaggtggaggatgtggtgagctatgattgcatcactgcactccagmctgggtgacagagtggaaccttgtctcaaactcttatgactcaactacaaaaaagcagcttaggttggtggtctggctcaggatctcttgcaaggttgaaatcataaagaactctttttgggctgggcacggtagctcacacctgtaatcccagcactttgggaggctgaggcaagcagaacacttgaggtcaggagttcgagaccagcctgaccaacccagcaaaaccccgtttttacaaaaaattcaaaacttagccgggtgtggtggtgggcacctgtaatcccagttactcgggagactgaggc

SEQ ID NO: 744237 - DNA, 632 bp, Homo sapiens
gctcctctggtttcagtgcaacttttttaaaatttaaatttaaatttttattttttgagacaaggtctcattctgccacttaggctggaatgcagtggcataatcacagctcactgcagcctcatcttttgggcacaagtgatcctcccacctcaccctcccgagtagctgggactacaggcatgcaccaccacacccggctcatttttgtattttttgtagagatgggatttcaccatgttgtccaggctggttttgaactcctgggctcaagtgatccaccccacttggcttcccaaartgctgggattacaggcgtgagccactgtgcccggcctcactgcaacttttaattggtgtataacatagagcattaatattggctatcttttaagcagcctctacaaggcctgcgctccctgaaattaaagcagcctttagttggaaggtcccagacaagatgacactgttagctcctatttttccgagttttgtttcagaacagtgtcacaaaaacatattcctttgtaagaccccacccccaccactccttaaactcactgagaatcagcttgttgggaccaacttctcaggtgccaccaagggaaaatatgaaagataatggggagtcg

SEQ ID NO: 744238 - DNA, 645 bp, Homo sapiens
gttggggctccaggagaagcacggactgtccccagcttataaatggttgtttgcattccacaactttgcctgtaggttgatcatttcaaatgaaaacctaatgttcagtcttcggactaatccagatttcaccttacgtagtaaggaacaggatcaatatttctgcagctgtcctctctccacataaaattgtgctcatctaataatgccttcttgaaaacaaccaatcaacaaaaaaccccttgttcacacgcgtctccctagttcctgccctcttcctgcctgctttccacggccacacttttctaaatggtgtgtgaagtggcagtgactcagcgtcaccaaatccagggggcatttttcattctgcgtgatattcatcttccttagcagtgtctggcagccatgtctccatctttaaacgttcagtcctcctggctttcctgactcygcaccctctggttttcccctgtcctgtgtctttgctggtcttcagcctcctttttctgtgctgctttcgctactcattccttgaaggttggtgaccgcaaggactgtgtcccccatcttatctcactctccactctcccaccagcccagggtttcatttaccattgatgttttcagaaccttcaaattcctctt

SEQ ID NO: 744239 - DNA, 619 bp, Homo sapiens
atatcaattcatgtagaaaaagcacttcagaaaatccaacattcatttatcatttttttataaaagctctgagtaaaatgtaaatacaggagaccttcctcaacttaataaagaacatctaaaaagaacctactgttaacatcatacttaatgatgaaaaagtggatactgaccccgtagtatcagagacaaaacaaagatgtcctctctcagcacctgtatttaacactgtaccataaaaaccttatttcatagatttgcattaaatcaaaacaaatgtgtgtgtgtgtgtgtgtgtgtgtgtgtgtgtggttaagaaggaaagcataaagctgtctttgcagacaaacatatgattgtccatatgaaaaatctaaacaatcaatcacatacttactaaactgataagtaatayagcaaggtcacaagatacaatgttaatatgcaaaagttaatttcttttctatatagcaacaatgaacagttggaacttaaaattaaaaacacaatataatttacaaagcacacaatttaaatacgtatgcataagtataacaacatatgtacaagatttctatgtggtaaacaataaaactctgatgaaagaaatcaaaaaagt

SEQ ID NO: 744240 - DNA, 621 bp, Homo sapiens
aacaatacacgagttgtttcttggaccagtcataccagaggcagcactattaactgggcaaaagaaacacaaacaagaacctaaaggcaatggagaacaagaaaaaagtagccaaacactggagaagagccaatgcttagaagaaaggaacagcactggggttctcagtttccagcttttcgtcagagggcaggccccattccatgtcctgggccgcggctaaaattcagatagatcctatactgtktaactgcgttggagaaccaaaggacacagcagctgcaaaaggagggtgttatctcagaaaggagtgagcagtagaggagagctccaggccctgtgcatgaactctgcccaaacctctggccgacttctgtagggaaggctctgagcagcccattacaggctgaaaaaactgggcagcgagttctgctgctgcccaccacagtaaagaagacagagtttgcagtctgaatcaagccaaaataactacttgcttaaaaataaaacttttcagaggcataatggaatccagattctctacaagtgtcacgtacaatgtcaagtacaatccagtattaccaggccatcttgatttgattgacactgtacccagtaact

SEQ ID NO: 744241 - DNA, 562 bp, Homo sapiens
atttcaaccttggagaatctgatgattatgtgtcttggggttgatcttctcgtggagtatcttaatgatgttctctgtattccccgaattttcatgttggcctgtcttgctgggttggggaagttctcctgggtaatatcgtgaagtgtgttttccagctcgtttccattctccccgtctccttcaggtactccaatcaattgtaggtttggtctttttatgaagtcccatatttcttggaggctttgttcattccttttcattctgttgtctctattcttgtctgcatgtcttatttcagaaaggtggtcttcaaattcttaatatcttttcttccacttggtcgatttggcagttgatacttctgcatgctttatgaagttcttgtgctgtatttttcagctscatcaggttattatgttcctctctaaactggttattctagttagtaattcctctaaccgtttatcaaggttcttagcttctttgcattggattagaacatgttcctttagctcattgtagttttttatcacctgtcttctgaagcctacttctgtta

SEQ ID NO: 744242 - DNA, 524 bp, Homo sapiens
gttcaagcgattctcctgcctcagccacccaagtagctgggactacagtcacacactaccagacccagctaactttttgtatttttggtagagacggggtttcaccatgttgcccaggctgatctcaaactcctgacctcaggagatctgcccgccttggcctcccaaagtgctgggattacaggcttgagccacagtgctctgccttggttttttttttttttaacaaaagtgtgtatagtgcaaaaagtcatttatctgaaggtagcaagcctctctatatttttttctatatagatatatatatatatakagagagagagagagagagatgtgtatatatatatacaagatgtgaaaaaaatgcctgattttcttacccctatcttccctaatgttctcactttctatatttttaaaagtttaaaatgataacgtggaggagtgctgaaagataattgtttaaatttgtcaaaaccaaagaactgtaatgggctcgattctactatcattagctccagtgt

SEQ ID NO: 744243 - DNA, 628 bp, Homo sapiens
atttcatgtggttttaatgtcatgactgaattatgtaattggcgaataaagtgtagaaattttcttttaagaaaaatgaaaaaaatgctgtacatgttggtaatcagggaattctttgggatgaacaaaaagtggaggtgggaaaaaaataatcaagggattttaacataaatttcatgcacttcttgaggacctataactaggttctagatcaataagatggaagtaggtacaggcacgatggctcatgcctgtaatcgcagcaatttgggaggcagaggcaggtggatcacttgaggacaggagttcaagaccagcctggccaacatgttgaaatcctgtctttactaaaaatacaaaaattagccaggcgtggtggtggcgcctgtagtctcagctactcggaaggctgaggcaagggaatmgcttgaatctgggaggcggaggttgcagtgagccaagattgtgccattgcactccagcctgggcgacagagtgagactcccatctcaaataaataaataagtaaataagtaaataaataaataaataatggaggtagcatgatcttccccccaaaaaagatgtgcatgccccaatcctgggaacctgtgactatgtgatgtta

SEQ ID NO: 744244 - DNA, 628 bp, Homo sapiens
atttcatgtggttttaatgtcatgactgaattatgtaattggcgaataaagtgtagaaattttcttttaagaaaaatgaaaaaaatgctgtacatgttggtaatcagggaattctttgggatgaacaaaaagtggaggtgggaaaaaaataatcaagggattttaacataaatttcatgcacttcttgaggacctataactaggttctagatcaataagatggaagtaggtacaggcacgatggctcatgcctgtaatcgcagcaatttgggaggcagaggcaggtggatcacttgaggacaggagttcaagaccagcctggccaacatgttgaaatcctgtctttactaaaaatacaaaaattagccaggcgtggtggtggcgcctgtagtctcagctactcggaaggctgaggcaagggaatagcttgaatctgggaggcggaggttgcagtgagccaagattktgccattgcactccagcctgggcgacagagtgagactcccatctcaaataaataaataagtaaataagtaaataaataaataaataatggaggtagcatgatcttccccccaaaaaagatgtgcatgccccaatcctgggaacctgtgactatgtgatgtta

SEQ ID NO: 744245 - DNA, 553 bp, Homo sapiens
cccagattcaagtgatcctctcacttcagcctcctgagtagctgggactacaggagcacgactacacctagttaatttttgttttttaatagagataaagtttcactgtattgcccagactggcttcgaatttcttagctcgagggattttcctggatccacctctgcctccgcctcctaaagtgctgagattatagtcatgagccactacacccagccaagattattattttcttaatttcctttttggatagtttgttgttwatatatatatatatatatatatatatatatatatatatatatatatatatatatatgcatatgaatcaagaagaaatagagagcgtgaatctcgcagtaaaaggaattagtaatctaaattttctttttcacatatattttattattttttattatatttatatatatctcttctaataaaaaaatgggatacatgtgcagagaacgcacgtttgccgcatatgtatatgtgtggcatgggggtttgctgacctattgacccgccctctaagtttttttccctcacccg

SEQ ID NO: 744246 - DNA, 650 bp, Homo sapiens
ccaaaatctctgggatgcaataaaagcagtgttaagaggaaaacttatagtgctaaacacctatgcaaaaagtttgaaagatctcaaattaatgatctaacatcacaccaagaagaactagaaaaataagaacaaacgaatcccaaagctagcagaagaaaagaaataaccagaatcagagcagagctaaacaaaattgagacccaaaaatctatacaaaggatcaacaaagccaaaagcttgttattcaaaaggataaacaagatcaatagaccgttaactagattaacaaagaaaaaagagagaagacacagataagcataatcagaaatgacaaaagtggaattacaaccaatatcacatacaaaagatactcagagactattatgaacacctctacacacacaaactagaaaatttagaggaaatggataaattcctggaaactcaaaactcaagattgaatcaggaaaatattgaaaccatgaacagaccaatatcaaattctgaaaacraatcagtaacttaaaaaacctaacaaccaaaaaaaaaaaacaaaactggaccagatgaattcacagctgaattctaccagatgtacaaagaagaactggtaccagtcctactgaaactattttaaaaaatcacag

SEQ ID NO: 744247 - DNA, 593 bp, Homo sapiens
atcctcctgcctcaacctcccaagtagctgggactacaggcacacgtcaccatgcccagttttttttattattattatttttggaagagatgggagtcttgctatgttgcccaggctggtctcaaactcctggcctcaagtgatcagcctaccttggcctcccaaagctccaggattacagatgtgagtcaccatgcctggccaagaaaacaaatattcttcaatgacacctctgagccaggcattgctcaaaagtgaacaagataaagtcccwgagctcatgaagttaacattctagttggaaagccagtgaactgtaacagatgtgaaactagaatatgcaatatgacataaccccaggtaacagtaagtactaatgataaattaaacagtgtaaagggataaagaaaacagggagggggtgctggagaggccagacggggtcagaggccttttttcatgagagtttgccagaggcttaaatgaaatgaagtgaatttatttgaagatgtggggaaaagcttccagcagagacaccagctgtcatgaagctccagaggtggaaatacgctggatctgcatgaggatcagaa

SEQ ID NO: 744248 - DNA, 593 bp, Homo sapiens
atcctcctgcctcaacctcccaagtagctgggactacaggcacacgtcaccatgcccagttttttttattattattatttttggaagagatgggagtcttgctatgttgcccaggctggtctcaaactcctggcctcaagtgatcagcctaccttggcctcccaaagctccaggattacagatgtgagtcaccatgcctggccaagaaaacaaatattcttcaatgacacctctgagccaggcattgctcaaaagtgaacaagataaagtcccagagctcatgaagttaacattctagttggaaagccagtgaactstaacagatgtgaaactagaatatgcaatatgacataaccccaggtaacagtaagtactaatgataaattaaacagtgtaaagggataaagaaaacagggagggggtgctggagaggccagacggggtcagaggccttttttcatgagagtttgccagaggcttaaatgaaatgaagtgaatttatttgaagatgtggggaaaagcttccagcagagacaccagctgtcatgaagctccagaggtggaaatacgctggatctgcatgaggatcagaa

SEQ ID NO: 744249 - DNA, 406 bp, Homo sapiens
tggtaatacactggggggaactagaaggcctgtttgttcagctccttcttggtgtccctgtgtgactttccttccctctaggtataagacaggacagctgtcacatgacggtcttcaggagagaagagagggaggtcagagagtggcctttctaggttttatggcctgcttcagggacaaagcrtgaggcggatggtgaaaatgaccttcctgcttctgctgttttctcaaatgccaaagtgccacaatgttggtagcatgtcctgagtcccatcaccctttttacaaggacaccatttatgggattagaggctcaccttactccagtatgacctcatcttaactaattacatctacaataaccctaattccaaataaggtcacattctgaggtactggggggtta

SEQ ID NO: 744250 - DNA, 406 bp, Homo sapiens
tggtaatacactggggggaactagaaggcctgtttgttcagctccttcttggtgtccctgtgtgactttccttccctctaggtataagacaggacagctgtcacatgacggtcttcaggagagaagagagggaggtcagagagtggcctttctaggttttatggcctgcttcagggacaaagcatgaggsggatggtgaaaatgaccttcctgcttctgctgttttctcaaatgccaaagtgccacaatgttggtagcatgtcctgagtcccatcaccctttttacaaggacaccatttatgggattagaggctcaccttactccagtatgacctcatcttaactaattacatctacaataaccctaattccaaataaggtcacattctgaggtactggggggtta

SEQ ID NO: 744251 - DNA, 529 bp, Homo sapiens
ggaagatggaggacaagaagcataaatacttcagtgagagctcttgttggccctgggaactggctgaatgtgatgtgtccctgccatgacagttgtccccagaaccagaggtagagttctgaagatagctgtgaggatttcttcacttccaactgctagagaggcagtacctccaactgctacccctgaagtactgatgttctcagctgtccccacccctccaccccarcaactttcccatgcagagcagttaatctgctatttaagatgcagacctagctttcttttcacagcctgctcagccacattttgcagttttgattaggaaatagcactgtgtgtgcaagaattgggttgggttacaccatttaataaagctatcatgactgatgtgagcactactcacaaaaaggaacaggagaaacacagctgtactctctgtggcatgatatcacgcagcttgcacttgggtaaggacctttctgatgtcaccgggtgagggattaagtcataattatgtagatctaaa

SEQ ID NO: 744252 - DNA, 456 bp, Homo sapiens
gttttcctgattatagcctaacagagaaatcagaaagtgaccaatataacatgttttgttgacaaactaaaagcatacacattagcagcatatctctgtagaaccttcacttcatgcttgactatcatgtattttgagtttgcaaagaaatagctggacagtccagaagctatctggctcagacatccatttatctcargctgtgtagagtgctacacaggaagaccacagcagcagcatcacctggaacttcatagaaatgcagattcttgggctccattgcagacctaagaaatcagaatctgcattttaataagacccccccaaagcaatttgagtgcacattaaagcttaagaaacactggttggtctaggccgggcgtggtggcttatgcctgtgatcccagcactttgggaggccaaggcgggcagatcacgaggtcaagagattgagaa

SEQ ID NO: 744253 - DNA, 475 bp, Homo sapiens
gtcacttcagatagccaaaatgggagacttgactcctacacactaatacaagttttgctaacatgcaactgtttccacctccctacccttgccattctaccaccaaggcagagttgttcaaacttttttgacagtgaactacagtgagagatacatttttcatcataacttaatacacatcaacatatgcatcccaaaacaaaagtccacaaagcaaactataycctgactgtgtgtcatacactatatcttacaatctattttttagcattttttatgtaatgttttttgcaatccatgaaattgatttcataagcctttaatacattgcaagcctcagtttgcaaaacatcaatgtaaagcaatttctgcctatgccagctggatctctgaattttgggggtgacattgtaagaaaaaatagagaataagcctggaatacaataaaatgaagcaaaacattagcaaggatcct

SEQ ID NO: 744254 - DNA, 475 bp, Homo sapiens
gtcacttcagatagccaaaatgggagacttgactcctacacactaatacaagttttgctaacatgcaactgtttccacctccctacccttgccattctaccaccaaggcagagttgttcaaacttttttgacagtgaactacagtgagagatacatttttcatcataacttaatacacatcaacatatgcatcccaaaacaaaagtccacaaagcaaactatatcctgactgtgtgtcatacactatatcttacaatctattttttagcattttttatgtaatgttttttgcaatccatgaaattgatttcataagcctttaatacattgmaagcctcagtttgcaaaacatcaatgtaaagcaatttctgcctatgccagctggatctctgaattttgggggtgacattgtaagaaaaaatagagaataagcctggaatacaataaaatgaagcaaaacattagcaaggatcct

SEQ ID NO: 744255 - DNA, 641 bp, Homo sapiens
tcctacttcttatgtcagaaaaaattgagattgatcaagcacttaaatattataagtggaatcaaaaaattactaaaagaaaatatggataaacatattttgtagtatgagggtgtgggcagaccctcctgaaagttatctagaacaagcttagttaaactggacaggtaaaacatcttaaatttccayagggggcaaaagacataaataagacagaaagacaactgataaactttaggaaaactttgtactattttgacaaaactaagactttaatatattaggagctttaaaaagtcgataagaaaaaaatctttattaatactggtttaaccccgttgggtgggagttgactggggatgggaataatcctccccagaaattgtctacaaaaaaaagccttatcacaggttgaaatgttctacaaacacaaagaataagaacccaaaagtagcatctactgctcatgtcaaagttgaaaacaaagctaaatgaacattgtgggagttaaataaatgatggtatagcctaacttgctgtctttaaaacatatcacacagatctggatatactcattgaaaagtttctaagacaaattaagtggaaaactcaagtcctggatacaaaactcaaaatccata

SEQ ID NO: 744256 - DNA, 626 bp, Homo sapiens
aaatgggtcatggttgagaacacagaaggcatcaaacttgatgtagagaggaggattttttaagagtcaggcattaccttgtagcaggcatggctcatgatagctatcaactggagtggattcaaataaagacagggggtgagagcactgtaatttattagttggccaaggcacaaatcttgagaaggagggtttggccaccatgggagaaatgatcaggggacaagctgttttgcagagtgggacacatttctttcaagacagaatggaagagagaggagtcaggtggtatcagattgagaagggcttgtccttgtagcttcacagcctggctgaagttccacacagacgtgaaagatsggaagtagtatagatggcagaaggcaaacactagtgtgcccagattaaattatttgatcacatgtggaagtgtacagacctcaaaacagcaaagcatacaagatgtatgtaaagacttagaatgatatgaaaataaaaataacccttttttccctaactagttttcctcacatttttttaagagatggggtctcactatgatgtccaggctagactcaaactcctggattcaagcaattctcctgcctcagcctccggagtagcta

SEQ ID NO: 744257 - DNA, 512 bp, Homo sapiens
ttcttatattgggcagaatcaaacctgaggaggaaacccaccaggtaagaattgttctctttcctggagcaaactcactggcaaccattcagagaatccccccattagatcagccaagaagtaaaaggggaggggaaccagacctycccaatgccaggaagtgaatgtacagcatttctcacattctctcttgctgcaatggtctaactccttcccaaggacaatccactctagaaccaggaagaaaaagaaaaagttattgctcatgtatatctacctggaggtataatgcctgcaggaggacttaacatcttggatttatcactgatgtgggatggttataagagccaggagacatctgaaataccaggctcaatggtgcagtcaatgaaataaaagtaggtgatgtaggaagtatgtgacgttacctcaactttgtggagaccaagacatctgaactggaggctgacacaggggttggatcctaagaggctgaggttagggcaggaagt

SEQ ID NO: 744258 - DNA, 573 bp, Homo sapiens
cattttaccttataaattttctaatttttaaaatgttttgactcctttgtaataacacttagcttaaaacacaaacgcattatacagctgtataaaaacattttctttatatccttattctataggcttttttctattttttaaattttaattttttttttacttaaaaaawtttttttttttaaacaaagacacaagccaggcatggtggctcacacctgtaatctcagcactttgggagcctgaggtgggctgatcatgaggtcaagagattgagaccagcctggccaacatggtgaaaccctgtctctactaaaaatacaaaaattagctgggtgtggtggtgcatgcctgtaatcccagctactcaggagtctgaggcaggagaatcacttgaacccaggaggcaacgtttgcagtgagccgagatcgtgccactgtactccagtctggcgacagagcgagactccatctcaataaaaaaaaaaaaaaagacacaaacatacacattagcctaggcctgcacagggtcaggatcatcaatattactgttttccaccttccacatcttgt

SEQ ID NO: 744259 - DNA, 573 bp, Homo sapiens
cattttaccttataaattttctaatttttaaaatgttttgactcctttgtaataacacttagcttaaaacacaaacgcattatacagctgtataaaaacattttctttatatccttattctataggcttttttctattttttaaattttaattttttttttacttaaaaaattttttttttttmaacaaagacacaagccaggcatggtggctcacacctgtaatctcagcactttgggagcctgaggtgggctgatcatgaggtcaagagattgagaccagcctggccaacatggtgaaaccctgtctctactaaaaatacaaaaattagctgggtgtggtggtgcatgcctgtaatcccagctactcaggagtctgaggcaggagaatcacttgaacccaggaggcaacgtttgcagtgagccgagatcgtgccactgtactccagtctggcgacagagcgagactccatctcaataaaaaaaaaaaaaaagacacaaacatacacattagcctaggcctgcacagggtcaggatcatcaatattactgttttccaccttccacatcttgt

SEQ ID NO: 744260 - DNA, 573 bp, Homo sapiens
cattttaccttataaattttctaatttttaaaatgttttgactcctttgtaataacacttagcttaaaacacaaacgcattatacagctgtataaaaacattttctttatatccttattctataggcttttttctattttttaaattttaattttttttttacttaaaaaattttttttttttaaacaaagacacaagccaggcatggtggctcacacctgtaatctcagcactttgggagcctgaggtgggctgatcatgaggtcaagagattgagaccagcctggccaacatggtgaaaccctgtctctactaaaaatacaaaaattagctgggtgtggtggtgcatgcctgtaatcccagctactcaggagtctgaggcaggagaatcacttgaacccaggaggcaacgtttgcagtgagccgagatygtgccactgtactccagtctggcgacagagcgagactccatctcaataaaaaaaaaaaaaaagacacaaacatacacattagcctaggcctgcacagggtcaggatcatcaatattactgttttccaccttccacatcttgt

SEQ ID NO: 744261 - DNA, 635 bp, Homo sapiens
atgtgcagccatatttgaaaactattgctccagaatttatgatcagagccataaggaattagaatgtgtttctcttacttccactagccctggccataataatacctcctctctgttattctggatgtgacacacagagagagagagagagaatttgaagattaggagaaggaggaaaaccagatgaagctaggaaacatatgtgtatcataacagatctcttattttgtgagtgcctagtgtgcgctatacaygcacagaaatgcatgttttttcagacccatgtaagattatattgtaatgcctccttactttgcaatgccaaatactttcatgtatgtttcttagaaacaatgactacacacctattagaatggctaaaatccaaaacagtgacaacaccaaatgctgatgagtatgtggagcaacagaaactctcattcattgttcctgggaatgcaaaatggaaaagacactttggaaaatcatctgccagtttcttacaacactgaatatacttttatcatgtgatctagaaatcatgctccttgatatttacccaaatgatttaaaaacttttatgtccacataaaaaccaggacattaatgtttatggcaactttattcacaattgc

SEQ ID NO: 744262 - DNA, 623 bp, Homo sapiens
tggttaccaggggttgggaggaagaaggcaaaaataggcagagtatacaggatttttagggcctatgatggtgaatacatgtcattacacatttgtcaaaactcatagaatgtacaacaccgagagtgaaccctaatgtaaactatgagctttgggtgacaatgatatgtcaatgcaggttcattgtttgtaagaaatgtaccactgtggtgcaagatgtcaatagtgggggaggctgtacatatgtgaggacaggggtatgtgtcctatctgctcaattgcactgtgaaactaaaactaaaagtttattaattagaaaacaagggcaagcgcattcttttacaagcacagtttaattatcaaaatcaagaacttactatttatgtgactattatctaatctacggaatttagtcaaatktcactaattattccactaatgtccttgatagcaaaaaagaaagaaaatgtcttttttttctgatccagaattatatattgcatttagtcgtcatgtctctttatcaccttataattcctcaatctttctttgtctttcatgacctcgacattcaaggtatacaagccctcagtttggggttatctgatgtttcctcataaata

SEQ ID NO: 744263 - DNA, 678 bp, Homo sapiens
tatatttcaaataatgaaatccagatatctcacagcaacaggaattacaaataaggatggggaagtttcctttgatgttggatacaaatcagaggtagcataaaaatagtttttaataatatgcagacacagaaatacaaatatgtatgtgtacatatacataaaagggtatgtaaatgtgtggtgtgtatttgctcactagaagggtcctgaagtaatagcactcatatcttggttttcaaacakcatcctctaataaaaagaaccagggctctttggacaaatttctgattccaaagctcgggcagggatattacaagatgagcttgggacaccttgtggtaccaaaaagaaaaagtgatcaaaaaaaaaaaaaaaaaagtagaggcatgttaataggacaaaagagccttcttgagggagctcaattatttattgaaatataaataacagttatggattatagcccacagaaaaagttaactgccacttgttcacaccatttacataatatataaataaatgaggaagaagggacaactcttatttataataaaattctaatttgtaaatgtaaaaagaattaatgaaatagacaaacccaggaataattgacaaacaccacagtaacacttgtaggcaagaagcatttgatggttgctaaaattagtggacaaa

SEQ ID NO: 744264 - DNA, 678 bp, Homo sapiens
tatatttcaaataatgaaatccagatatctcacagcaacaggaattacaaataaggatggggaagtttcctttgatgttggatacaaatcagaggtagcataaaaatagtttttaataatatgcagacacagaaatacaaatatgtatgtgtacatatacataaaagggtatgtaaatgtgtggtgtgtatttgctcactagaagggtcctgaagtaatagcactcatatcttggttttcaaacatcatcctctaataaaaagaaccagggctctttggacaaatttctgattccaaagctmgggcagggatattacaagatgagcttgggacaccttgtggtaccaaaaagaaaaagtgatcaaaaaaaaaaaaaaaaaagtagaggcatgttaataggacaaaagagccttcttgagggagctcaattatttattgaaatataaataacagttatggattatagcccacagaaaaagttaactgccacttgttcacaccatttacataatatataaataaatgaggaagaagggacaactcttatttataataaaattctaatttgtaaatgtaaaaagaattaatgaaatagacaaacccaggaataattgacaaacaccacagtaacacttgtaggcaagaagcatttgatggttgctaaaattagtggacaaa

SEQ ID NO: 744265 - DNA, 678 bp, Homo sapiens
tatatttcaaataatgaaatccagatatctcacagcaacaggaattacaaataaggatggggaagtttcctttgatgttggatacaaatcagaggtagcataaaaatagtttttaataatatgcagacacagaaatacaaatatgtatgtgtacatatacataaaagggtatgtaaatgtgtggtgtgtatttgctcactagaagggtcctgaagtaatagcactcatatcttggttttcaaacatcatcctctaataaaaagaaccagggctctttggacaaatttctgattccaaagctcgggcagggatattacaagatgagcttgggacaccttgtggtaccaaaaagaaaaagtgatcaaaaaaaaaaaaaaaaaagtagaggcatgttaataggacaaaagagccttcttgagggagctcaattatttattgaaatataaataacagttatggattatagcccacagaaaaagttaaytgccacttgttcacaccatttacataatatataaataaatgaggaagaagggacaactcttatttataataaaattctaatttgtaaatgtaaaaagaattaatgaaatagacaaacccaggaataattgacaaacaccacagtaacacttgtaggcaagaagcatttgatggttgctaaaattagtggacaaa

SEQ ID NO: 744266 - DNA, 667 bp, Homo sapiens
atttataataaaattctaatttgtaaatgtaaaaagaattaatgaaatagacaaacccaggaataattgacaaacaccacagtaacacttgtaggcaagaagcatttgatggttgctaaaattagtggacaaagatagatgagaagcatgatatttgcatagtctccaaatatctctacaagatacttatttttttatatggtgtatgccccataatgcccccttttttattattatactttaagttctagggtacatgtgcacaacgtgcaggtttgttacatatgtatacatgtgccatgttggtttgctgcacccatgaactcgtaatttacgttagctatttctcctaatgctatccctccccyagaccccatgccccaacaggcccctgtgtgtgatgttccctgccctgtgtccaagtgatctcattgttcagttcccacctgtgagtgagaacatgtggtgtttggttttctgtccttgtgatagtttgctgagaattatggtttccagcttcatccatgtccctgcaaagaacatgaactcatccttttttatggctgcatagtattccatggtgtatatgtgtcacatttccttaatctagtccatcactgatggacatttgggttggttcctagtttttgctattgtgaatagtggt

SEQ ID NO: 744267 - DNA, 520 bp, Homo sapiens
ccatgaaaaaacttgtacacaaatatttatagcagcattattcataaaagccaaaaagtagaaacaatccaaatgcccatcttgtaaagaatggatacatataacattctatatctataaaatataatattataataaaatgaatgaagtagtaatgcatgctacaatatggatgaccttgaatatattgacatatgttaaagaagccagtcaagaatgcatattcaaggtggctgaatagaggaatgtggtactcactcctccacaaaaaagaacctaaacagcaagcagacaatggaacacctaacagagaacactttcagtagagaagtaacaggaaacacctaaggcaatgaargggagaaaagcaaggtaacatgctctgctgggatcaactggaagcctgtagaggttcccaactgtgggaaaagggtaagtgaacaacccccaattgctacagattcccaccacagactcctgcagtcttagccactgtggagtctcttaacccttgtgagtc

SEQ ID NO: 744268 - DNA, 563 bp, Homo sapiens
caaactaacactgaaacagaaaaccaaacactgcatgttctcattcataggtaggagttgaacaatgagaaaatacgggcacagggaggggaacatcacacccgggcctgtccgggggttgtggcagggaaggggaggcatagcattaggagaaatagctaatgtggatgatggggtgatgggtgcagcaaaccaacatggttccatgtatacctaygtaacaaaactgcatgttctgcacatgtatcccagaacttaaagtataatttaaaaaaagacataaaacaaatctcaacagacttttaaaaatcaaaatcataacaagtatctgctcagaccactaaaactcagtaactagagaaactttggaaattgtacaaatatatgtaaatgaaacagcatgttccagaatgcccattatattacaactgataccacagaaatggagaaggtcatcagagactattatgaacaactatacacaaataaactggaaaacccaggggaaatatataaattcctagacacatgcaatctacttagacttaatcaagaagaaatag

SEQ ID NO: 744269 - DNA, 632 bp, Homo sapiens
gactgaagcatagtagcctcttgaggcatctcataagctattcttcagatatcctgctacagttaaaagattttgattggtaaagatcgtgtaattgttttaaaactattggttgacaattttgtggtactagctatgtaaataycctccctgatgaatggaagggaaatgatggagcataagatacacctattcaataaaatactacagacactataagtgaacttttaatatgcctgtaataggaattaaaagttttttgtagataacctatcatgctatttattaatttaacatttagtactgctctttactcatcgtgttttccatcagtggttctctacttggggcagaactgttccctagcaggcatttggaattatttaaaagtttttggtttgccataattaggggttacctctggcaattaatgagtggcacaaggatgttttggcatctgtactgcctcagacaatcctgaaccacaaaacacacagacacacacacgacaaaacttgttctgttgaaaacaccagtgtcacccatcgaaaaacacaagcatctttagacatggtcttactcataattgggagcaggtgactggcatagtatctagtccctcgtagacaaac

SEQ ID NO: 744270 - DNA, 656 bp, Homo sapiens
cgtgaggttggcaaatttcttctgtaaagagccagaaagtgaatatttgagactgtggttcatacagtctctgtcactactgctaaactctcttgttgtagcaactaatttggcacaaaagcagccacagagaatccataaatgatttggtgtggctgtattccaataaagcactatttgtaaagacagayagcctgatgaatttgacccatgggccgtggtttgctgacccctgcttgagactgataaagaataacagctctctatccttctcattcttgagttcccctcagaagcaagtacttcaatttctttttttttttctttcttttttttttttttttaagaaataaggtgtcgctctgtcacccaggctggcgtgcagcagcacaatcacagttccctgcagcctcaaacacctgagcacaagcaatctttccacctcagtctccagagtagctggaactataggtgtgtgtcaccaggcccagctaatttttgtattttttgtagagacgtggttttgttatgttgcctgggctggtctcgaactcctggactcaagtgatccttctgcctcggcatcccaaagtgctgggattacaggcatgagtcactgtgcccagccaaaattttttttatctattggttcctac

SEQ ID NO: 744271 - DNA, 625 bp, Homo sapiens
agcagagctattccagtgagctggtaaggggcagacttagggctggaattccagaccctggatcccagccctttactgagctgtcaccgtactctgaaattgttcctttaattctgcaaaagtgcattaacccatttgagtgaattagtcattagaccttctcagtgacacacagatcatgaagatttttttttgttttttgacaaacaaaggagctaaaaattcaaacacaagcagtgacttatctaaggtgacaaaatgatggrctgagttgaaactagaactcaggtcttctggtttacaaaatatatttgcacaaatgtcacctccaatacaaagtacagttggacccatatgttattatgcaaattcttatgtcattaaaatttattttgtctgctgttgtttttggatggggaacaaggaataaaacctctaaagaaaatgaggggaaaagatcaaacagagacaaaagttctaggtgattgtttagggagaatggagcacaggggtagaagtaatccaagttcctctgagagtttaaaaccccaagttaaaacctggggttttaaactccaaatttgtacttgataaaattgccattcctagggctctttctgtttga

SEQ ID NO: 744272 - DNA, 644 bp, Homo sapiens
acatctccgattctcaatctcattctctgactcaagtacctcctcctcctctgagcacccttcacccttaatctgaacataatttctaactgtattactattttcaaacttgaattatagatgtatgcatatgacccttactaccaggatctatgttccttcagggcaggaactctatagtmatctaaatacttcctacaagtttaaacttatttgtattgtgtttgtgtgtgcacacatatatgtacatgcacgtatgtatatatttatatacatacacatatactcagtaaacattttttgcatcaatgcatacatacttatgggcattttaattttttatttacacactctctctctcagctatcccttagtggcctcagattttttctgcatgtagtcaaataggtctctgtgcttgtgaaaatgtttctatcaactgtggatacgcataacctgattgttaaggtgttactttgagagatctagacagtgtgactgcatttttttcaacttaaagactggcagaaatctaaagcattcaactcaattaattttctctaaaaaagaagaaatttattactccaacacaaagatacctattacaatggttatgctttataaataagcaaacatggatgtca

SEQ ID NO: 744273 - DNA, 557 bp, Homo sapiens
tttaagtgcatacattttaattagtaagaagagggctccaaaaacatgtaaataggcagcaagacaatacatgcttttggcaagtgctattatgaactatgaccacacagtaagagatgaatatgggtggtagagaaggcttctttttttttgagacagagtctcactctgtcgccaggctggagtgcagtggcacaatctcggctcactgcaacctctgcctcctgggtttaagtgattctcctgcctcagactcccgagtagctgggactacaggtgcgcaccaccatgcccagctactttttttkttttttgtttttttttttttgtatttttagtagagacagggtttcaccatgttggccaggatggtctcgatctcttgacttcgtgatctgcccacctccgcctcctaaagtgctgggattacaggcatgagccactgtgcctggcctgagaaggcttcttagatgacttatgtgttgagaaataaatgacaagacagtgaacaaaatttggggggaattctttacaagcggaagtaacaacaaataaaa

SEQ ID NO: 744274 - DNA, 549 bp, Homo sapiens
acttatattttaaaacaaagaaatgaacaaaatgtatacttttaacaaatgcttttatattttgaagttaaaaatgtcaaaccatataatagaaagataagaaaagcatacaaaatagctctcaaacagagaaaatcactgtaagtatatacttatagcaatggtttttcatttgtctctaaattttttaatatgtagaacaagtaaaatgaaattattggggacttaatatattgatcttttataaactccactaggtttttcctcaaacatgcatrtttcctgtctttctggagattcactaacttatttagctaccattttttaagcaatagagtatgtttaaactttattttattaaaaaggtgttgagtaaatgtatagaattatgatttttaaaattgtttataattcatttcagcctcttgaagtactttaaaactaaataagcttcatcagtttccttacatgagcaaagtaattttgcagggaatcatgacagtatgtaagatttttgaaaacgaaaaccaagaatttatgacagccagt

SEQ ID NO: 744275 - DNA, 603 bp, Homo sapiens
gatggtaccaaaagctatgagagtggatgaggtgacccaaagagagagtacggagctctgtgaagtatgtttgagtcgcattaaagtggagcagtcagggagaggaagagaagtggctggtcaagtaagaagaaagtcatcagagagtatggtgttctagaagcctgcttaagaaagactttgcagaaaaatggagggactcactctattatatgctgctagtagatcaggtataagaaaaacttaaaattgaccactggatttagcagatggaggtcctgagtaatcccgataagaaaattttcattctcactcagttgagttcccattgastgagaatgggagaagtctgagagaaatgagctcaagaagagaatatagagatggtgacagcccttttgagaaggttttctgtaacaaggactggaaagcaggttactagatgaaagtcagatgaagaaattttgaacatgaaataatttgcagcatgtttgtatgctaaagtgaatgatccagtaaagatgggaaaatggataactcagtagagtaaataattaatttgctagagtgacaatcttgagtagactagaggaaagtggattt

SEQ ID NO: 744276 - DNA, 642 bp, Homo sapiens
tttaaacttggtatttcctcttctcagaatgcccattcctttccctttattcattagttgaataccttgcaatcctttagactcagctaaaatatcagcccctctggaagacctaaaatacaaagtttatattaataattttagctaataactttttaagttgttttcatgtactatggtaccttgctaagttctttatttacatttcctcattaagctgtatatcatcaccctctatgcctagctattgttgatgtccccattttataaaggaggtagataccaaggcttagagtagttagtttgttggccaagttcataggayggtaatggtggacaaaaggttcaaacctagatctactagaccctctcaaaacgggaatctaagagcccagactctagggtcctccctggattggcagctgaagctaacccatccttcccgcacagacattataatgaagcagcatcctctctgctccatgtccaggcagatctctaggcatttagtgtgaccacttgcttgaatcagcagcctgagctggcccatccttcctttgcatactgtggtaaagtgccgccttccctgccccaagttcaggtgtatttacctgtataaaaataattcaaagcacacatttg

SEQ ID NO: 744277 - DNA, 602 bp, Homo sapiens
aaaatatatatgggaataattcaagaaaattctcctaatcctgccagagaggtacaaatctagatagaagaaatccagagaacacctgccagatacaatagaaaatgaacatcaccaaggcatatagtcttcagattctccaagatcaatgctacagaaaaaaatcttaaaggaagctggagaataaaattwaaaaaaattaaaaaatgaaaaggaagctggagataaggtcagatcatgtacaaaaggaactccatcaacctaacagcagacttctcaacagagatgttacaagacaggagacattagagggctattttcagcattttaaagaagagaaattcaaaccaagaattttatattccccaaactaaggctcataagtgaaggagaaataacatttttccagacaagcaagcactaagggaatttgttaccactagacctcccttacaagagatctctaagggtgctctgaatgtggaaatgaaaggacaatatctagaatcacaaaaacacatttgagtacatagcccacagaccctataaaacacccacacaatagaaacaatgaagtaatcagctaagaatttcataatagg

SEQ ID NO: 744278 - DNA, 327 bp, Homo sapiens
gaataaagtaaacatctcactgaaatacctcaataaatccctgtgtttttgatttgataagatcatgagcatgcattgtacactagaatggcttaccttatctgcttggaaaagtagcttgagttatttctaaaattcmcaaattatatagaaaaaacacaagtgtgctctctgttttcttggtcatttttaaagaagttgataaactatgtagatgttgcatttatatgtttgacttctctttgtcccttgaagtttaaactcacaaaatcaattacctgcctgtcgtcttctcttagtggtcataaaggcacattaacttaatag

SEQ ID NO: 744279 - DNA, 541 bp, Homo sapiens
gtttgaactgctttgttgttgttgttgttgccattgttgttatttgcttaatgggaattctttagcaaaagatctaatcagttattcgtactgattggttaattggaatgcatttaaccaagtgcaaaacatctggtcaatttgactctattatttaagctgccaattttattttaaagaaagaaaactgatagccacacttgcatcattacagccccaaattcctaaatggtttgaattactccctttcctcttttggtgagaatgtytggtagacttagcaaccagcataagtattcaagttcaattatctaaatagaaatggtaccccaaatttgtgtacttcaaactaaaacaaagccagcaaggacaagaaaacatgttgctaaaaatagttgactctgttctgatctctcaaagcagatggaccggaccatggtaagggtggggagagcaacctaggcaacaggcttgctccatgattgctttaatcccagcccagctaacacattacctcagaagaaagagcctctttctctgc

SEQ ID NO: 744280 - DNA, 541 bp, Homo sapiens
gtttgaactgctttgttgttgttgttgttgccattgttgttatttgcttaatgggaattctttagcaaaagatctaatcagttattcgtactgattggttaattggaatgcatttaaccaagtgcaaaacatctggtcaatttgactctattatttaagctgccaattttattttaaagaaagaaaactgatagccacacttgcatcattacagccccaaattcctaaatggtttgaattactccctttcctcttttggtgagaatgtctggtagacttagcaaccagcataagtattcaagttcaattatctaaatagaaatggtaccccaaatttgtgtacttcaaactaaaacaaagccagcaaggacaagaaaacatgttgctaaaaatwgttgactctgttctgatctctcaaagcagatggaccggaccatggtaagggtggggagagcaacctaggcaacaggcttgctccatgattgctttaatcccagcccagctaacacattacctcagaagaaagagcctctttctctgc

SEQ ID NO: 744281 - DNA, 558 bp, Homo sapiens
atggttgaataatattccattgtgtatatatgtaacattttctttattcatttatctgttaatggatacttaggttgattccatatctttgctattgtggatagtgctgtgataaacttatgggtacaggcatctttttgatataaggatctgttttcctttgggtagatacctagtagggggattgctggatcaaatgatagttctatttttaattctttgagaaattttcatattttttccatagaggttatactyatttaaattcccatcaatagtgtataagagtttccttttctctatgtccttgccaacatttgttattatttttttctttttaataatagccattcttgactggtgtaaggtgatatcttattgttgttttaatttgcatttctctgatgattagcaatgttgagcgttttttttttttttccacatgcctgctggccatttgtatgtcttcttttgaaaaatgtctattcatgctttttggtcactttttaatgggattattgggatttttttgttggattgtttgagttccttgtaaat

SEQ ID NO: 744282 - DNA, 644 bp, Homo sapiens
tacatgcatttaatattagattggtgcaaaagtgattgtgtttttttccattaaaagtaatgacaaaaaccacaattgcaccaatctaatagatactgccaacctacctttcagatatctgtagcaatctacctgtccactgtaaaataaaaataaaattctaagctccccaactgactgaatggaccttctttggccaaggggaccccagagtaaccttgaaaactgagttcttggccacagtgggatagaagaagatggggcatgcttccttatgcccyctccttcattaacttctattagactttcttctctaagggttcaacagaaactaactctttcaaaagactccacactgatatcaactaacaacctcatgccgcccctccttttttgcctgataagagaccactgaccatggagtggctctggccagtctggagagggcacagtaaagccctacatgtactctgcttcaccttttgacagcagagggctgaaaactccacccttagatcatgctaatgctgctatttttgtcacatgagacccatgaaagggcatgaagctcaactgcatgtgcgtacatttctcctttcatatatattcatgctcctcctatagcttgttgaatatgtatattt

SEQ ID NO: 744283 - DNA, 620 bp, Homo sapiens
ttacatcaatctttgcagaacttgtgagtgcaaaatagtacctcacagtaggtttgaaccatgcttcttaacagaaaagaattttgacaatctcagtaccacaagaatgtgacataggctgggcacggtggctcatgcctgtaatcccagcactttgggaggcaaggcgggcgaatcatgaggccaagagatcgagaccatcctggccaacatggtgaaacccccatctctactaaaaatacaaaaattagccaggcrtggtggcacctgtagtcccagctactcagtaggttgaggcaggagaattgcttgaacccgggagccggaggttgcagtgagctgagattgcaccattgcactccagcctggcagcgacagagagagactctgtctcaaaaaaaaaaaaaaaaaaaaaaaaagaatgtgacatacataaactgtggttgtattttccagccaaatcaattcttaaaacgataatgtatgttaaggaacaaagagtagaatatttgaaattatgtgtgctcaccaaatccaggatgcatgcttgtatacacatgtgtaattttgttaaaatgctggccacctagaaggaataaatgaattgatgtttcctaaat

SEQ ID NO: 744284 - DNA, 620 bp, Homo sapiens
ttacatcaatctttgcagaacttgtgagtgcaaaatagtacctcacagtaggtttgaaccatgcttcttaacagaaaagaattttgacaatctcagtaccacaagaatgtgacataggctgggcacggtggctcatgcctgtaatcccagcactttgggaggcaaggcgggcgaatcatgaggccaagagatcgagaccatcctggccaacatggtgaaacccccatctctactaaaaatacaaaaattagccaggcatggtggcacctgtagtcccasctactcagtaggttgaggcaggagaattgcttgaacccgggagccggaggttgcagtgagctgagattgcaccattgcactccagcctggcagcgacagagagagactctgtctcaaaaaaaaaaaaaaaaaaaaaaaaagaatgtgacatacataaactgtggttgtattttccagccaaatcaattcttaaaacgataatgtatgttaaggaacaaagagtagaatatttgaaattatgtgtgctcaccaaatccaggatgcatgcttgtatacacatgtgtaattttgttaaaatgctggccacctagaaggaataaatgaattgatgtttcctaaat

SEQ ID NO: 744285 - DNA, 536 bp, Homo sapiens
gctacaataatactagcttttacagttgcccatatattaacttttattgagatctatatttcttcatatggctttgagcaagtgtcctttcattttaccttgtaggactccatttataatttcttgcagggcaagtctagtggtaatgaattccygtagcttttgtttatctgggaatatcttattttttcccttacttttaaaggacagtcttgccagatatgttaatagaattcttggttgacagtgtttttctttcagcactttgaatatatgagcccacagacttctggcttccaaaatttctagtgagaaatctgctgttaattttattgagtatctcttttatgtgacaagtagcttttctcttgctactctcaagattctctcttaatgtggcttggtgtaattctctttgaattcgtctttctcggagtttgttgagcttcttggacatctatgttcatttctttcatcaagtttgggaagttttctattattttttcttcaaatattttctttacctatccttcttt

SEQ ID NO: 744286 - DNA, 653 bp, Homo sapiens
aatgtggagtcattaatacaaaccaaagttacaataatacttgcttttagactattaactgtttttcttaaaatgtattagtctcttaaatcatgtagaatacagaaagaagttacccttgctacaataatactagcttttacagttgcccatatattaacttttattgagatctatatttcttcatatggctttgagcaagtgtcctttcattttaccttgtaggactccatttataatttcttgcagggcaagtctagtggtaatgaattcccgtagcttttgtttatctgggaatatcttattttttcccttacttttaaaggayagtcttgccagatatgttaatagaattcttggttgacagtgtttttctttcagcactttgaatatatgagcccacagacttctggcttccaaaatttctagtgagaaatctgctgttaattttattgagtatctcttttatgtgacaagtagcttttctcttgctactctcaagattctctcttaatgtggcttggtgtaattctctttgaattcgtctttctcggagtttgttgagcttcttggacatctatgttcatttctttcatcaagtttgggaagttttctattattttttcttcaaatattttctttacctatccttc

SEQ ID NO: 744287 - DNA, 528 bp, Homo sapiens
cttttttatgcctcctaaaatctgccttttaattgctttagtgagtttttatttcaattgtacttttcagctccagaattttttgttttctttttaggttttctacatctttattgctatttctattttgttaataacatgattttctggactttctccacatattccttaagttctttgagcatctttgtgtagtgaatctgtcatcagatcttttcaaggccagtttctgttgattaatttttttctcctttgaatgtgccatacattcttgtttctttgtatgtcttgtgattttttttgttgaaaacagtatttgaatttgataacgtatctttggaaatcagattctcctctttgcmcaggtttgctgtttttttgttattgtttattgtttttgtttttttgatggttttaggctaactctgtgccagtttgagatgtaaacttaagatcttctcaagtcttttctgagcctttgcctttctacgggaatatgagataattttttaatttttcctgtatatt

SEQ ID NO: 744288 - DNA, 506 bp, Homo sapiens
ttgcccacgctggagtgcagtggcatgatctcagctcaccgcaacctccgcctcccaggttcaagtgattctcctgcctcagcctcccgagtagctgagactacaggcacatgccaccatgcccagctaatttttgtattttaaactttttaaacagaaatcagaatacayaccttccctgctctcccacagatcctcactgcactcatgatggagacccaagtcctcgttctggctgatgaagccccgccagatcaagccctcctgcttcccggcgttcccctcgtatcactcatccatctgcaccatgccccaggagcgccagcctgctctgcattttcttaaccagaatgttcctgccccaatcttcacatgtcttgctcctttcaaatctcactcagtagagcaattccagctccaacatgctgagaactaagctccgattttttaaatcttgcccaaattcctacctaaggggtctggggagtcatgccctacaaaccatg

SEQ ID NO: 744289 - DNA, 506 bp, Homo sapiens
ttgcccacgctggagtgcagtggcatgatctcagctcaccgcaacctccgcctcccaggttcaagtgattctcctgcctcagcctcccgagtagctgagactacaggcacatgccaccatgcccagctaatttttgtattttaaactttttaaacagaaatcagaatacacaccttccctgctctcccacagatcctcactgcactcatgatggagacccaagtcctcgttctggctgatgaagccccgccagatcaagccctcctgcttcccggcgttcccctcrtatcactcatccatctgcaccatgccccaggagcgccagcctgctctgcattttcttaaccagaatgttcctgccccaatcttcacatgtcttgctcctttcaaatctcactcagtagagcaattccagctccaacatgctgagaactaagctccgattttttaaatcttgcccaaattcctacctaaggggtctggggagtcatgccctacaaaccatg

SEQ ID NO: 744290 - DNA, 506 bp, Homo sapiens
ttgcccacgctggagtgcagtggcatgatctcagctcaccgcaacctccgcctcccaggttcaagtgattctcctgcctcagcctcccgagtagctgagactacaggcacatgccaccatgcccagctaatttttgtattttaaactttttaaacagaaatcagaatacacaccttccctgctctcccacagatcctcactgcactcatgatggagacccaagtcctcgttctggctgatgaagccccgccagatcaagccctcctgcttcccggcgttcccctcgyatcactcatccatctgcaccatgccccaggagcgccagcctgctctgcattttcttaaccagaatgttcctgccccaatcttcacatgtcttgctcctttcaaatctcactcagtagagcaattccagctccaacatgctgagaactaagctccgattttttaaatcttgcccaaattcctacctaaggggtctggggagtcatgccctacaaaccatg

SEQ ID NO: 744291 - DNA, 716 bp, Homo sapiens
gagcaaacagcctgctttgtttggagaagttgtgggcaggggaggagggttggcaaggaacctgaaggaacccactgctcagccagtcagaagtcagcagccatcctccattttcaacatggaccgcctggacacagccagacttggagcagtgcaacgagatcacagaccgaatgaccccagttcacacttggtacaaggagtggggctggcctggcgagggccgagcgcgaggccctgcagctgcggggaaagtggccatctttgcacgagcaggaatgtccaccactcccagcactcatctcagccttatccactccgyttgacgtagggactgaggggttgggaggggcatcctgcctgtttcctgcagaggagctctgatcggggaacagggcagaaacgtccagagccaactcattccaaagggacctgttggcaccctttctctcccagccttagcctcctgggccctagtcctgcttagaacaggaaattggaaccagagggtggaaggagaggaagcccccacagatgaacccctctcgtacacacatacacccaccatatggttcttattaaggaaaaggaagtgggagccgtcttcatcccccagctcgcgtgcaccttgttcagagggccaaacgagaggtgctctgccttggggatacctggctggggtgacaaggatcctcttacaattttgtattgagaaa

SEQ ID NO: 744292 - DNA, 716 bp, Homo sapiens
gagcaaacagcctgctttgtttggagaagttgtgggcaggggaggagggttggcaaggaacctgaaggaacccactgctcagccagtcagaagtcagcagccatcctccattttcaacatggaccgcctggacacagccagacttggagcagtgcaacgagatcacagaccgaatgaccccagttcacacttggtacaaggagtggggctggcctggcgagggccgagcgcgaggccctgcagctgcggggaaagtggccatctttgcacgagcaggaatgtccaccactcccagcactcatctcagccttatccactccgtttgacgtagggactgaggggttgggaggggcatcctgcctgtttcctgcagaggagctctgatcggggaacagggcagaaacgtccagagccaactcattccmaagggacctgttggcaccctttctctcccagccttagcctcctgggccctagtcctgcttagaacaggaaattggaaccagagggtggaaggagaggaagcccccacagatgaacccctctcgtacacacatacacccaccatatggttcttattaaggaaaaggaagtgggagccgtcttcatcccccagctcgcgtgcaccttgttcagagggccaaacgagaggtgctctgccttggggatacctggctggggtgacaaggatcctcttacaattttgtattgagaaa

SEQ ID NO: 744293 - DNA, 716 bp, Homo sapiens
gagcaaacagcctgctttgtttggagaagttgtgggcaggggaggagggttggcaaggaacctgaaggaacccactgctcagccagtcagaagtcagcagccatcctccattttcaacatggaccgcctggacacagccagacttggagcagtgcaacgagatcacagaccgaatgaccccagttcacacttggtacaaggagtggggctggcctggcgagggccgagcgcgaggccctgcagctgcggggaaagtggccatctttgcacgagcaggaatgtccaccactcccagcactcatctcagccttatccactccgtttgacgtagggactgaggggttgggaggggcatcctgcctgtttcctgcagaggagctctgatcggggaacagggcagaaacgtccagagccaactcattccaaagggacctgttggcaccctttctctcccagccttagcctcctgggccctagtcctgcttagaacaggaaattggaaccagagggtggaaggagaggaagcccccacagatgaacccctctygtacacacatacacccaccatatggttcttattaaggaaaaggaagtgggagccgtcttcatcccccagctcgcgtgcaccttgttcagagggccaaacgagaggtgctctgccttggggatacctggctggggtgacaaggatcctcttacaattttgtattgagaaa

SEQ ID NO: 744294 - DNA, 612 bp, Homo sapiens
aacatctccacaaaatactaacatgtaaaatttaagaacacattaaaacaattatacaccgtgaccaagtagggatttactcctgggatacaagggtggtttaacatacacaaatcagttactgcgatgtactacattaacagaatgacggaccaaaaacatataatcatcatgatagggcagcagaagagcatctgacaaatttcaacactctttcatgacaagaaatgctcagcaatttgatttagaagtaacacacgtctacacaataaagggcatatatgaagagcccatagctaacatcatactctaaggtgaactgctgaaatttttcctttaaattcaggaacaagaccaagatgtccgctttggcaatttgtattcaatakgcttctggaagtcttagccagagcaattagacacgaaagataaataaaatgcaaccaaattgcaaaggaaaagtaaaattgtctctgtttgcagatgacattatattaaatattaaaaattctaatcgcaccaccaaaaacttattagaactaataaattcagtaaagttacaggatacaaaatcaacatacaaaaatatttttcattttatacactaaaaat

SEQ ID NO: 744295 - DNA, 546 bp, Homo sapiens
ctcactatcagggaaacagcaaaggggaactccaaccccatgatccagtcacctcccatcgggtccctcctccaacactggggattacactctgacatgagatttgggtggggacacaaattcaaaccatatcacctggactgaaagagttccacctaaggtagttgtttttcaacctgggagccttaggaaagttgtagggggcatttsgaaatgtctgaccacctttttggttttcacaacactaatgtaaggcatttccaggctctaaagtgctttgagtcccttggcctcttcccctgaaacccatcccttcatttgtcaaacagtgaacatgtcaatcactgtgctggtcactacaggcatggaaatgaaataatttgcacccttagggataccagagtgttgtgagggaggctatctgtgcacagattattatcaaatgaactctaaatcaatgaattaatgaatttaatatcaaaattatagaaatagcctcaatatgtcagggaaaacatgtgaaggtattgcaacaatgggtattaa

SEQ ID NO: 744296 - DNA, 546 bp, Homo sapiens
ctcactatcagggaaacagcaaaggggaactccaaccccatgatccagtcacctcccatcgggtccctcctccaacactggggattacactctgacatgagatttgggtggggacacaaattcaaaccatatcacctggactgaaagagttccacctaaggtagttgtttttcaacctgggagccttaggaaagttgtagggggcatttcgaaatgtctgaccacctttttggttttcacaacactaatgtaaggcatttccaggctctaaagtgctttgagtcccttggcctcttcccctgaaacccatcccttcatttgtcaaacagtgaacatgtcaatcactgtgctggtcactacaggcatkgaaatgaaataatttgcacccttagggataccagagtgttgtgagggaggctatctgtgcacagattattatcaaatgaactctaaatcaatgaattaatgaatttaatatcaaaattatagaaatagcctcaatatgtcagggaaaacatgtgaaggtattgcaacaatgggtattaa

SEQ ID NO: 744297 - DNA, 589 bp, Homo sapiens
aaagagatagtgtttctacaaaaaatttttaaaaaattagccagacgtggcagtgcttgcctgtggtcccagctactggggaagctgacgtgggaggattgcttaagcccaggaatttaaggctgcagggagccatgatggggccattgcactccagcctgggtgacagagtgagaccctgtctaaaagagataagtaaataacaactttgcattttctgccacattgcaaaatggtgagagagtggtttctagactctagactctttctatgactaccttctagttatgagatcctacaacactcacctaacctctctgtgtcatatttcctcctctataaagcaaaaatgccccatatagagaggactgtgatataaaacaagaaccaagaaaagtaaagcttttctaatctgtcacagactaaagagtgctyagtatatgtgagtcattattcctggtgctggtaggagtgtatgttacaactttgagtcaagtaatatggtaccatatattaagattaacaacaacctcggcaatcccagtttggggtatgttcccaaaagaaatgaaagcaccaggatataagg

SEQ ID NO: 744298 - DNA, 636 bp, Homo sapiens
ctattttatttatatgtgtctgtgtttctgagtatgtcctgagttgcacgataatactatatttcttactgggtaacattgtcagaaaagtttctaaaaactttctctgctgcacttattttatacattttatttatgttaataatctcacatttaacacacttatgatttattctcaacagaaaaaggtggtatttctttcatttagtcttttaaaaagctcacattatcaaatgattgctcaatcatttaatctctttgcttctcttatatgcattgatttaataaatatgtatactagtttctccatcgattctttagatttgaamcttattttccttttattcttacaaaactgacttgtctataggcccacttctacttcctttattctatcatcttcctcaacttattctgtggtcaaagaatggagaaataatattaataatatgtttttctcatcaatgacttccacctgttctctgagaaattcagcttcaagaactttagtttgatatgactgcaaagataatacacagtctaaatcataaaaatgtctcaaaggttttttttttatttgtttctttgaaatatccatgaacaggcatgtttctcccctgtagtgcaatttgtgtg

SEQ ID NO: 744299 - DNA, 580 bp, Homo sapiens
cctgctggaggcctggtccctggacttcagatttgcctagtgttaccccacaatcacatactccagttcttcgaaataagcctcttaatatttatcttccattggttctgcttctttgcctgaaccatgcctggtgcacaggggtgtccacggagaacaaactcagccatctcagagcacattcctctcatcactccctcctggttgagatgtctcaagatgtgaaggaactgcattggaatgggacgtgcaaaggagaatgattctgggagagcccctgctgccaaaatgccccctgttcgcaggccagggatgctttgtatcttgggcaagtgtcaggagtctggtggttttataaggtactcaaagttcmtgggttctaaacttgaaggggatccttccttccataggtatttgtaggagaaggaggtgtatggtgtatgttttgtttggagtcccaaggaatcttcctgagtttctcagttctctaagaaagtccaaacctcagaattttgatttttggcaagctttcttagtttaaatgggcctttgctttagtctagaaataaaatccataatt

SEQ ID NO: 744300 - DNA, 511 bp, Homo sapiens
acataaatgttcaatccatagcaactttttttgtgaaatttcataaacaggatgctatgcattaaaggaagagatttgaagtatagtggggataacgagcatgaaaatacatatccctcttatctgcaaacccagaaggaagtttctagtcttttagttaaacactaaggggcagcagcaaggcagaataaggaagaaacttttacagctcatcaaactcctgcagcccataaggaaataaagggaggggtttggttgtataagtatacactaataacttacctccaaagataataataataatgaatatcattacgttcttctatgtgcttgctacgcttctggttcttttatgcaatttaaccatcacaataaccttatgacataaaaatattatgtcctctcctgggttggatactgtcccctgcaaattcatgtcctcctcagaacctcataatgtgacctcattkgaaaataggatccttgtaattagctaagctcaaacaacgct

SEQ ID NO: 744301 - DNA, 539 bp, Homo sapiens
aacaaagcattcctccataagttaaaaaaaaaaaaaagtgatcagtactggttagagagataatttatgaattattttaacaaagacacaagtgttcttactatttttccacccagggaacgggtttggctttcttgttctctccgctacttcccgcactggcagctactcctcgatccttggtcagcgggggtttagtactgatggatgtacctttaagaaatgcttgcatggtacttcaccctggtcaggtgcaagacagaaaaaaaaagcttttattgaaacttttattgcgaatcagcaccataggaaagcgggggtggtggtggggaaccattatgagaaagtacagcccgaaaatamacttagccttgtgcaaagatgttacataataaaggacatcaccccatgacctaggacactctgaatgcactgtactgagggctacaagaacagaaaagtggtcaaagtccctaacgaacttagaatctatttctagtgcaggagttatagaacaaagatcatatgtcacaaaaatg

SEQ ID NO: 744302 - DNA, 573 bp, Homo sapiens
ctaatattcagaatctataaggaacttaaatcaacaagcaaaaaacaaataaccccatttatggcctttgcttactttttgggcagtcctcaaaagaagacatccaagtggcaaacaatcatatgaaaaaatgcttatcatcactaatcatcagagaaaagcaagtcaaaaccacagtgaagtatcatcacacaccagtcaaaatggctattattaaaaataacagatgttggcagtgctgcagagaaaagggattgcttatgcactgttggtgagaatgtaaattcatttagctactgtggaaagcaggagatttctcaaagaactaaaaatatatatatcattcaaaccaacaattccattactagatatatatccaaaggaaaataaattgttctatcaaaaagacacatgcacctgtrtgttcatcgcagtattattcgcaatagcaaatacatggaatcaaccaaggtgttaatcaacagaggagtggataaagaaaatgtggtacatatacaccatggaatactatacagtcagaagaaagaatgaaatcatggcctttgcagcaac

SEQ ID NO: 744303 - DNA, 647 bp, Homo sapiens
gacagttacagtatcacagttcttgtattcaagtcacccatatttttcttgataatggccctaaagcacaaaagcagtgatgctggcatatttttatgaattgttctatttagttattgctgttgttaatatcttactgagcctaatttatttttatttctatttttatcttataatttataaattaaactttatcctaagtatctatatatagaaaaaaacatagtatatataggatttggtgctatctgtggtttcaagcattccctggagaactcggaacatatgccccccagrtaagaggaaactactgtgtatccacataagggagtattaagcaattgaaagaaataaagtactggtaaatgctataacatggatgaaccttcaaaacattatactaagtgaaagaagccagtcgtgaaacatcatagtgtaatgcattacatgaaatgtccaggctaggcaatctataggaacagaaactagattagtaaaagctaagactggaggatttcagaggaaatgaggagtagctgctgataggtatgaggtttcctttggggatgataaaattcgtctaaaattggttgtactgatggtttcacaattctgtgaaacccaaaaagcattgactggcaggagag

SEQ ID NO: 744304 - DNA, 647 bp, Homo sapiens
gacagttacagtatcacagttcttgtattcaagtcacccatatttttcttgataatggccctaaagcacaaaagcagtgatgctggcatatttttatgaattgttctatttagttattgctgttgttaatatcttactgagcctaatttatttttatttctatttttatcttataatttataaattaaactttatcctaagtatctatatatagaaaaaaacatagtatatataggatttggtgctatctgtggtttcaagcattccctggagaactcggaacatatgccccccagataagaggaaactactgtgtatccacataagggagtattaagcaattgaaagaaataaagtactggtaaatgctataacatggatgaaccttcaaaacattatactaagtgaaagaagccagtcgtgaaacatcatagtgtaatgcattacatgaaatgtccaggctaggcaatctataggaacagaaactagattagtaaaagctaagactggasgatttcagaggaaatgaggagtagctgctgataggtatgaggtttcctttggggatgataaaattcgtctaaaattggttgtactgatggtttcacaattctgtgaaacccaaaaagcattgactggcaggagag

SEQ ID NO: 744305 - DNA, 552 bp, Homo sapiens
ccaggccggagtgcaatggcgcaatctcagctcactgcaacctctgcctcctgggcctcccgggttcaagcgattctcccgcctcagcctcctgagtagctaggattacaggcacccgccatcatgcccagctaatttttgtatttttagtacagacggggtttcaccatgttggccaggctggtcttgaactcctgacctcaggtgatccacccaccttggcctcctaaagtgctgggattacaggcgtgacctacctcacctggccagcctttattttcttagaagatgctcagatgcagtcgcattgccggkcctggctgtgcatttgaaagcaatagaatgtgttctcctaatatacctctgaaactggtccaattgtcccatagaactgatatttatggcttcttttgaataaacatagaaactgatcctcccagtcttgaaacttgaggaagttacatttgtctttgctcagtttctttctcaggcatccaaccatcaggcttcctagatagtgtcaataaactgaaatttaccagatcactgcat

SEQ ID NO: 744306 - DNA, 552 bp, Homo sapiens
ccaggccggagtgcaatggcgcaatctcagctcactgcaacctctgcctcctgggcctcccgggttcaagcgattctcccgcctcagcctcctgagtagctaggattacaggcacccgccatcatgcccagctaatttttgtatttttagtacagacggggtttcaccatgttggccaggctggtcttgaactcctgacctcaggtgatccacccaccttggcctcctaaagtgctgggattacaggcgtgacctacctcacctggccagcctttattttcttagaagatgctcagatgcagtcgcattgccgggyctggctgtgcatttgaaagcaatagaatgtgttctcctaatatacctctgaaactggtccaattgtcccatagaactgatatttatggcttcttttgaataaacatagaaactgatcctcccagtcttgaaacttgaggaagttacatttgtctttgctcagtttctttctcaggcatccaaccatcaggcttcctagatagtgtcaataaactgaaatttaccagatcactgcat

SEQ ID NO: 744307 - DNA, 645 bp, Homo sapiens
atttttcttaaaaagtcatgatgcaattgaaggtttttagtaacactgattcactgcctcgatcaacatgtttcctaactcctggttctattttgagactagatggaacattaatacacttaacacgattcttttaggatctgtcccacctacagcaaactgttcaggagctgaaaacacaaaagaaccttggtaatgtctcaggaattgcagacctcaaactaggctcaggtgagaagtggagccactgcgcttccctctttctactccttggttttcttggtagcaaaccaaaagcacctaaagtgatacatggtaatggagaaccatccaaaggtagggctaataactcgatcattctcctagctctcagcactggccttctttyttcatcatccaagatctatacatagttaaaagtgagtgaggtctatcctgcctttgaagaacccatagtctagtgggagatgctgacattagtattattactgtaatatagtgtcataaataaaattctaggggatattctgctagtgcagaggggaaagcatcaaccaatgaagtgtagagggcaagggaatgtttggtaagagaaggattcttggagacaaataggaaatgtttccctgatggaaagaggctttg

SEQ ID NO: 744308 - DNA, 643 bp, Homo sapiens
ggtgtctattttatatctttcctgctttctcttgtgggcatttagtgctataaatttccctctacatactgctttaaatgtgtcccagagattctggtacattgtgtctttgttctcattcgtttcaaagaacatctttatttctgccttcatttccttatttacccagtagtcgtacaggagcaggtttttcagtttccatgtacttgtgtggttttgagcaagtttcttaatcctgagtactaagttgattgcactgtggtctgagagacagttagttgtgatttgtgttcttttacatttgctgaggagtactttacttccaactatgtggtcagttttggaataagtgcgatgtggtgctgagaataatgtgtattctgttgatttggggtggagagttctgtagatgtctattagatctgcttggtgcagagctgagttcaagtcctggatatcctygttacacttctgtctcgttgatctgtctaatattgacagtggggtgttaaagtctcccattattattgtgtgggagtctaagtctctttgtaggtctctaaggacttgctttatgaatctgggtcctcctatattgggtgcatatatatttaggatagttagctcttcttgttgaattgat

SEQ ID NO: 744309 - DNA, 552 bp, Homo sapiens
aagtagttattaggcaataaagaaaaatatttccttcctgagtataggtttacattgctctgtccctgaaaattgatatcaccacaagataggactgtatatatttgatttaaaaggttcaatagttaaggaagtaggaatgtctgcatttcacatttctctatattgtttactgttataattcaagtctccagaacagaataatgtccagtaggtgtaaaatattttttgttatgtaaatgaacactttattttgtagatgaagattcatacctgatacaaactacaattcatatatacattaaataaaacattcatattgaatgcacccatgtaaatgttttggtaaattaatcaaagttaatttcacactgtgaattattattgtttttttctggagttttsgtttgcctccagcagagtgacttagagtctccccttcaccaaccctgccctccccaccatgaaattcatttcacaggcaggaggtgatgctgtgattgaagagaatttcccatctgcatatgttggggttagcataagaatgctgca

SEQ ID NO: 744310 - DNA, 647 bp, Homo sapiens
aatgtctcaaaactattgaaaatcaaagtcaagatgcaaatttggggcttcagtaaaagaaatacataatatttgtgaacttattttctcactacattaatggtgagttatttcattcatgggcaaatatttgtggtgtttaggggtaaagtgaaggttaagagaagattgtacaagttgctgtcatttatctgcatgcatcaaaatcacttcatgctgtttctttttattaacagagtctaaagtgattctcttgccagagatatctttatcactggctttcaacatactggggattttcattatacattatgattttaccctattttaaaagcatatttatgttatcttagactgtgatcttctattagcacatttgcgtgtatttagattgattagcgattttagtcactgaattactttcagagtctgaagagaaatattacaaatgccaatgatgtttttctgtgctcrtgtccccttgttagagaatctgtatcatatagttccacctgccctggaccatgtggcctttctctcataacccacaacccttacagtttattgaatcagtcattggtgtaatacgaaaaagctaacctaagtgttgggcttattggatcaattttttctctcgagaatgtcaa

SEQ ID NO: 744311 - DNA, 578 bp, Homo sapiens
gcaaatgaccctgtggtcaaatggagattctgacaggttgagcactgacaggcatttcctggcttgcacagcctcagataatttttcactgaagacagtttgaatgatgagctaattaatgctttctgatgctggtttatcttcaggttagacacatgagatgctgcaacaagtctgtaaattcaaaggaataaaatcatacaacttcttatccctttttccatgcttgaattgtacaatttgtgagatttttttcaggtagaaggagtatattatgatcacagataatcatcataaggtaccttaactatgcatgaatkacccttttttaacctatataaagcatttcatatttatagtattgtttaatcttctcaacaaatgtatgagaagaacaactaaattcagaacaactaaaattaatcaaatgattaagaaatacaatttattctctcatataaataggaagatggagataggacaaattttaacttggataatcccatggcttagccaaatcaggttatatatttttaccttctttttttctactcatcttcttgcctttggactcaggg

SEQ ID NO: 744312 - DNA, 557 bp, Homo sapiens
ttaatttgatggagttcagttactcaatttttatggatcatacttttggtatcatatctaagaaaactttttctaattctaacttagattttcctttatattcccttcaaatagcccaacttactcaattgtgtttggatccttgtcaaaaatcagctgaccaaatagatgtgggcctgtttctggatgttaaaatctgttccattgatctacatgtctacctttatgctgagattatactttcttgataacttcagcttgatagcaaatctaaaattagatattgtgagtcatccaattaaaaaaawgttttggaaattcaactgcctttttctttatacaaatttagaatcagcatgttcattactgcacaacaatttgctgggattttacttttaaatattattgaatctatacatcagtttagggaaaattaaaatctttataactttgagttctccaatcagtaaacatggtatttatttccactcacctgtgtctttttaatttgttttttagttttcagcaggcagattgcacatattttgttaaattta

SEQ ID NO: 744313 - DNA, 529 bp, Homo sapiens
gaaaggcttttcctcagaatacagtaggaatttcattggttgtgcatgctatcaggtcaaaatgcaaagaaaaatatgagtaaaaaggtgggagtgagtaacttgatttctaaagagagctatggttgctaccatacagtgcaggtagggagaagtacgtctggaactcaggaaattcactaggtttatctcttgctgtttctatgccctgagttaataatgaataggcaattatatcaatcacttccttaaaagttaaagataattaaggacttagtgtctcaggggcgaagaactacatcacctctccagaaattataaataakttggaatgctaacaaaagtgagaaaagtctaatgtggatagagcaagagagagataatacaaattaattactgccttggggccaattgaaacagcaaggacttcagtttgtttacctaatccctttgtattaagtctttaaatatattgtggttggccactaccttgaagcaggcagtgtgacagcttagatttaacggatag

SEQ ID NO: 744314 - DNA, 626 bp, Homo sapiens
gtttttctggaaaaaggtgtttttctgtcaactgaattatttttccccattttgtcttgccactatttatgcatgcaggagaggccctaaggtaacttctgagggcatgggacttggcggtaaaaacagagaaggtgctgtggaccccattttcggaagaaaactgttttcctcacagaatcccaggaattgaaagctgatggatacctctcaaaatctgtttttgtcttctggctatgcctgtttattaggctgtagaaattgcatgctctcctagcggtgcttttgaaagcctccaycctgaggccaataatccaattatgagattggcaaatgaaaaatcttacaattactgtatcttcttctatctgtctgtatagttatatatgtgttatatgtgtgatatttataaaaaagagctctaattgattagcctaaagaaaaacaagtgcttagaccaaatattttgaaggaaaaataaaagctgtaatgccttttagttcacgtgactttaatctttgagaaataaaaacagttttaaagataattggtaaaatacaaatgtcttcagaatgtaaacaagtggtctaaattatgtgggttagatactaggtttgcgaaatgtt

SEQ ID NO: 744315 - DNA, 351 bp, Homo sapiens
tgttaagttaccttaaaaacaaatgaaccgtaattagtaatttgatagttgaagtgaactcagttctcaaaaggaattagtcaatacttggatgaattatgtgtaattgctgatattcaatggtttttgacctacaaacatgatcatttcttttktttttttttttttttttttttttttttttttttttttgaggtggagtgttgcactatctcctgggctggagtacaatggtgccatctcagctcactgcaacctccgcctcctgggttcacgtgattctcctgcctcagcgtcccgagtagctggaattacaggcacacaccaccacacccagctaattttttgcat

SEQ ID NO: 744316 - DNA, 603 bp, Homo sapiens
cctgcctcagcctcccaaagtgctgcatttacaggcttatgccactgcaccccacaacattatttttaaaccattttacttcttaaaagtagaaatttcaggaactgacagaggaactaaataagtggcaaatcttccttacaagagcaagcataaaactgggaactggataaccacaaattgagaagtgcttatttgtaagctctaggtaagaacaatggaagtgggagtttcttgcctggtgcagttcccagctccatggataaggtggttttatcaggacagggctgaccatgaatatcagcagatttgcttcatgaggtaactgaattgctttggagtggagggaaaacattmatccctagcaagaagaacaaatttgataggaaaacgtggggatagccacagctcagctagtttgaagttgctgtaccatttgaggcaagtggaggaccagatagaaactttacggggagatcctggaagtgaagaagccacatctttgtctgactgtgaaactatgaaaatgtgtaatggaggaccagagtctctggaagaacgtaaaatctgaggctgacattaaaatttcctaaactttgaatg

SEQ ID NO: 744317 - DNA, 365 bp, Homo sapiens
catgccaccttcctatttacttcaattggcattgcccctttaggcagctacaatggtaaacaattgctgctgattgtttttgacaaatgccctgggtgatctctgaatcaaatcaaatgaacacaagctctgtaaatggggtttttctagggagcactcatttcaggtgtaatagtaaaaattccttatggacagggttttcgaaagctccaaacacattctycctccagcatctactagactactgttttccacagctacaaaagttttaagactgctgttttcaagactaccaaatttgtggagtgaggatactgttcaattccaatgctaattcaaatgccatcgatctcatccctttttag

SEQ ID NO: 744318 - DNA, 571 bp, Homo sapiens
ctgtccaaatgaagttatttcagaggcaccgggaaaattgccagatctactttcccaacccctctgcaaaagaacttgcttgctcattgacacctgaagctcttagtaaagcatgaaatctttctttcatccaatgcatagttattgatcatctatgragtgaccggcacatttttattttcatttaatctttgtactcatgtgagaaattatgataaaacagagtctcttcgttgcttcccaggaagtagactctgagaagattcgtgtacaaaaaatatagtaggatgtattctggaaataagcacctaaggacgggaagaaccctgaacagattgaaaaactggatataatttaatattaacaaaggcctctcaaaaccctacataaagctctcaaactggaatgaatgttgaaagttgttcctagttgtggcaaaggggctgtacatttataatcttgtgttgactagtaattagaaacaagccaccttgggaaggggctgagatatcggacaatgtgatgcttttcagataacacaatttctgaagagggctgaaagctgaagcag

SEQ ID NO: 744319 - DNA, 571 bp, Homo sapiens
ctgtccaaatgaagttatttcagaggcaccgggaaaattgccagatctactttcccaacccctctgcaaaagaacttgcttgctcattgacacctgaagctcttagtaaagcatgaaatctttctttcatccaatgcatagttattgatcatctatgaagtgaccggcacatttttattttcatttaatctttgtactcatgtgagaaattatgataaaacagartctcttcgttgcttcccaggaagtagactctgagaagattcgtgtacaaaaaatatagtaggatgtattctggaaataagcacctaaggacgggaagaaccctgaacagattgaaaaactggatataatttaatattaacaaaggcctctcaaaaccctacataaagctctcaaactggaatgaatgttgaaagttgttcctagttgtggcaaaggggctgtacatttataatcttgtgttgactagtaattagaaacaagccaccttgggaaggggctgagatatcggacaatgtgatgcttttcagataacacaatttctgaagagggctgaaagctgaagcag

SEQ ID NO: 744320 - DNA, 609 bp, Homo sapiens
ggcttaaatggcaacagtgacaatattgagaaatactgccctagaacacctatttgaatagttaaagagattctaaaaagctagcagtagaggaatttaaattagcatgtgaaagctaatgagcttacccaaaagaaggtataaatggagggatagaagaaaaagaaaaaataaagaggtggcaactggaaagcaaatagtaaatggtagacttaaacttcactatataaataatgatattaaatgtaaataaattaaacactccatttaatagcagagattgtcagttgggataaaaaataaaactatatggtatttatatgatatataatttaaaataaggaaagataaaatataaaatgaatatgaaatgayaaaaataaaagcattaaacttaattctgtagcatctatattaatataagaccaaaaagcgttagacaaaaatactaacatttaaaaattgagatatgatgactaaggggcattttggaaggagggcataaaatctgtatattcacctaattgagcttcaaaatatatgaagcatggagtgattacctatagggagatatcagcagatctgtaatcacatttggagctttttatc

SEQ ID NO: 744321 - DNA, 621 bp, Homo sapiens
ctgaatgggacattattatataatgcaatagacttaatgttttctgttcccttccttccaaattcattcgttgaaatcctacccccgaatgtgatgatattcggcagtggggcttttggaaggtaattagatcatcaggatggagccctcacaaataggattagtactcttataaaagggacaccaaagagtcctcttactccctttctgcgatacaaggatacgatgtaagactgctatttgcaaaaagagtctgcaccagaactgaactatgctggcaccctgatcttggtkgggacttccagcgaccacaattgagacaaatgaatttctgtttataagccatccagactgtgctacttagctacagtagcccaaaatgactaagacatatggtgatgtatatgtattctgctttgtttctgtggatcgctattttaattgggtgagaagagtaagtaggcaaattcatgtgttctgcccagcattaagaaccagaactaaaaaatcctctttcaaatgcaaatttctctactctactctttgcttgaattctggaagataaagagaaataagaaaggggaggccaaggtaatgttttaaatgagtaatgactttcca

SEQ ID NO: 744322 - DNA, 658 bp, Homo sapiens
tcgtatgcttgttggctacatgtatgccttctttttagaagtgtctgttatgtcctttgcccattttttaatggcattgtttggtttctgctcccatatttgttcaagttccttataggttctggatattagacctttgtcaggtgcataatttgcaaatattttctcccattttgcaggttgtttgtttactttgttgatagtttcttttgctgtgcagaagttctttagtttgattagttcccacttatctatgtttttgttgcaattgtttttgatgtctttgttacaaaatttttggcagggctgatgtccagaatgctattttctaggttttcttctaggatttttatagatataggttttacagttaagtatttaatccatcttgagttcattttgtatatggtgaaaggtaggggtccagtttcaacttctgcatatggctagccagttattccagcaccatttattgaatagggagtccttccctcratagttgttattcttggctttgtcatggatcagatggttgtaggtgtgcaggtgtgtagctttattctgggtcctctaacctgttccattggtctatgtgttgtttttatactagtatcatgttgttttagttactatagccttgcggtatagtttgaagttg

SEQ ID NO: 744323 - DNA, 564 bp, Homo sapiens
agtgtatttacaagtatatatctgtctatatctacatctgattctaagtctataatagtatctccaactgcctaagatgatgtcaaaggagagggagaactgaaaatattatgtgtgaggtggaacttagagaatgttcaaaggcaaattattctactactgtgcaaactcattttcaaggcagtggcccaaaatatttaaaagctggaagtcatctgtatcaacaaatgaggagaatataaaatcaacctggggtggagagtttgattgctggttctgagagctctagataaaaaaaaacaaaaaacaacaacaaaaaaaaacaagccactccaagatgaagcagttccaccatgaatgctaagtctaagacatgcacctacaacttgtttatttgcttacctgtccacraatctagcttccagactgtcctcaccatctgtggaagtttcctaatttcatcaacactaagcaagtcaatgcacacgtaagggatcaagtcccttttataaaaaggaaggtaataaacaccttgtaaggatgttgcagtctccagctcttatt

SEQ ID NO: 744324 - DNA, 596 bp, Homo sapiens
attcattgattttttgaagcgttttttgtgtctctatttccttcagttcttctctgatcttagttatttcttgccttctgctagcttttgagtgtgtttgctcttgcttccctagttcttttaattgtgatattagcatgtcaattttagatctttcctgctttctcttgtaggcagttagtgctataaatttccctctacaygctgcattagatgtgtcccagagattctagtatgttgtgtctttgttctcattggtttcaaagaacatctttatttctgccttcatttcattatgtacccagtagtcattcaggagcaggttgttcagtttccatgtagttgagtggttttgagtgagttattaatcctgagttctagtttgatcgcactgtgatctgagagacagtttcttgtaatttatgttcttttacatttgctgaggagtgctttacttccaactatgtggtcaattttggaataagtgcgatgtggtgctgagaagaatgtatatcctgttgatttggggtggagagttctgtagatgtgtattaggtctccttggtgcagagctgagttcaattcctggggatcct

SEQ ID NO: 744325 - DNA, 625 bp, Homo sapiens
taaatgctgtcattttgatctacttcatcattgccagactcaattctggatgtctctgtgttaaaaccattttctaaacagatgtggggttcccttctcaagcacatttctgctcagctacatggggtttctgaatattctgtttcaaccctgactggcggatggtaattcagttctgacaaccgcctagagttagcgtcagactccacgggcttaaggatgtggttcccaacaagacggcccccacttcagataccagctacaagttcaggggtccccaggccacctgcacttttgactggctaccaattcaggagttcccacaaacccctcaggttcaacaaattgctacaacaactcacagaactcagggaagcactgtacttatgataacagttttgttataaaatatacagatcagcaccggccagatgcagagatgtgcggggcaaggtcarggggagtcctgaacaccgagcctcatgtcctctctctggggaaccaggcagctcagctacctgtgacatccatgtgctcaccagcctggaagctctcccgagctttggtgtccagagttcttaaagggtttcactggggtgattccagttcgaggctgtcttaagta

SEQ ID NO: 744326 - DNA, 598 bp, Homo sapiens
acagaaagagacaaacaagatatctttaaacagagggaaagatggagtcagcttaagacaagaaatagcagacacttattccaatagtatcaacagaatatgtaaaacatatgtgagtgctttgtgaattttaaatacatgcatctaaactagtcagctcagggaagtcaatactagaggtagtagaataaattgtgaagactctctttgcagtgggaaagtcgctctggctatctcttcaacactaactgtacaatccagttttgttcctagaaatgctctttaatatagttgccttctggaaatgtaatattgcattatcctattgtacccaagcaattatctgtattcataatccttcctccttagtgggtattctgaaagtgtaatcgccctttattgatctttatactgggtgatatggtttggttgtgtccccagccaaatctcatmttgaattcccacgtgttgtgggagggacgcggtgggaggtagttgaatcatggggcgggtctttcccatgctgttctcatgacggtgagtgagtctcatgagatctgatagttctatgagaggagtttccctgcacaggctctct

SEQ ID NO: 744327 - DNA, 598 bp, Homo sapiens
acagaaagagacaaacaagatatctttaaacagagggaaagatggagtcagcttaagacaagaaatagcagacacttattccaatagtatcaacagaatatgtaaaacatatgtgagtgctttgtgaattttaaatacatgcatctaaactagtcagctcagggaagtcaatactagaggtagtagaataaattgtgaagactctctttgcagtgggaaagtcgctctggctatctcttcaacactaactgtacaatccagttttgttcctagaaatgctctttaatatagttgccttctggaaatgtaatattgcattatcctattgtacccaagcaattatctgtattcataatccttcctccttagtgggtattctgaaagtgtaatcgccctttattgatctttatactgggtgatatggtttggttgtgtccccagccaaatctcatcttgaattcccacgtgttgtgggagggacgcggtgggaggtagttgaatcatggggcgggtctttcccatgctgttytcatgacggtgagtgagtctcatgagatctgatagttctatgagaggagtttccctgcacaggctctct

SEQ ID NO: 744328 - DNA, 631 bp, Homo sapiens
aggtgttttaatgccaaagaattttgcttcttccctgggggttgttttaccttgtcattttcacaatgaagactatttttctttatttctcttctctattttcctcttagagcttcttgaagtttctttaaaactttattttaaaaagcttctatttcagaagttaacaggtaaaattcaagtaaattcctattttatagaatttttatatgccaacatagatctgttaaataggtttctatgattttggttatactgtggttatgagacttgatttatcattcaatacactgtttatagttcatgaaagtgcaattatttgaactaatgatttcacttacatgaaatacctagaggagtactcataaaactcagagacagaaagtagaatggcagttgccaggggctgtcggtggggcatgaggaatggggagggattgtttaaygactatagagtttcagttttgcaagatgagaagtttctggagataattagttgctcaacaatgtaactatgcttaacactaacgagccatatacttaaaaatggttgagatggtaaattttatgttatgtgtatactatcacaattttaaaattatgtgattttcaatatagtactttattaaac

SEQ ID NO: 744329 - DNA, 602 bp, Homo sapiens
cacaattcaacagctttgagggtcaaagtaggtaatgtaattgtgtgcagaagcccaagtataagaacatttaacttccagaaatagaatcaaacagtctttatttttactaaattagaactaaattagaagtgcatggcataatgtaagcagatatgatattttggattatatattaaattcaaaataaaaagattaactgaaaattttcaaactccaattattctgatttataattagaaaactaacatcttttttctatataacatggattagactttgtattcctctttaaaatagatgtacagaatttggccttgaatcccttaaatgagaacaatattttgttttattttagctcataacggagaacacatgcttttaatataggtttacttccaaacatagtttgcttttatgtttagagtaactactttcamgacattgaagacatctaattttctaacaccatcatattttgctgtcagtatcatattataatgctacttggtttatttgataaccattcattctatcagtattaattgtgaaaaacaaagtgaaaaacatttgtttatttttaaaaagtttgaagttagaga

SEQ ID NO: 744330 - DNA, 636 bp, Homo sapiens
gatgaggtcagtccaacctgagcatccctttgtctgctggcctcttctggggcccagactggttgcacttgcttgcagtgcagcccccaagtacctcctgggagccttcattatagctcctgagctggtggacttcacctgaccaatacagtgctccaacagagcagccctcatggacatgtactagcctgcccgttccctcccaagtgcagcctctcccataccattttgctgatatacactcacccatgatcacccctgactttgcyttgtttgcattcctcccccaccaatgtgcatgtgcacacgcaccctagcatgccactactgctggcatgagtgcacatcacgcccctcctccctgccacactgccactgtcattgaagtgtttgcaggcagagggcccaccagcccagctcctgctagtgccttgctcctgtgcccgtgccaacactgttgctgacgtaacactagccatggagaacagcagactcacccctgccctgagtggccactgccatccacatgaatgtgcagagggcacacatggtcctgcacccaccagtcccctatccccatgctaacatcacaatcggcatgaaagcatacagtcaccagcaggggccccctgtccc

SEQ ID NO: 744331 - DNA, 631 bp, Homo sapiens
gctcactgcagtctcaacctcctgggctgaaacaatcctccctcctcagcctcctgagtagctgggactacaggcatgcaccacaccctgctaattttttttgtattttttttagagatggggttttgcaatgttgcccaggctgaaagatcatatttcttaaagtcattctactaactagtccttccagttattacaaattataaatctgcaataattaaaatggagtcatattgacaagaatagctttcagtgaaatagaatagagagcacagaaagtcacaagattttaaaacaactcaacatataataattaccaatcaacaggaaagaatgaaattgttctatttattgcataaatagcattgtagaaattggcttgctatttggtgataaaataaataataagtcgggtayggtggtgcacgcttgtattcccagctactcggtagctgaggcaggaggatcgcttgagcctaggaattcaaggctgtagtgcaccatgatcacacctgtgaatagtcgctgcagtctagcctagacaatatagtaagactctgtctctaaagataaataaataaatcccagccgaattagagatccaaatataaaataaaaccaaaaactatat

SEQ ID NO: 744332 - DNA, 584 bp, Homo sapiens
atctccatactatcctccatagaatttgtactaatttacattcccccgatgggtgtataaagcatccccttttctatgcatcctccccagcatctgttatttggtgattttttgttaatagacattcggggccaagtgcagtggctcaagcctgtamtcccagcactttgggaggccgaggtgggaggatcacttgagcccagaagtttgagacaagcctaggcaacatagcaagacctcgtccctactaaaaatcaaaaaaattagcagggcgtagtggcttacacctgtagtcctagctactcaggaggctgaagtgagaggatcacttgagcccaagatatcaaggctgcagtgagctatgatcacaccactgcactccagcctgggtgaagagcgagaccctgtctcagcaataataattactattagcaatctggactgctgtaagatgatatctcactgtgattttaatttgctttctctgatatcagtaatgttgagcattttttcacatgcttgttggccttttaggttatatccagaagaaaaattactaggtcacaggattataatttttccta

SEQ ID NO: 744333 - DNA, 584 bp, Homo sapiens
atctccatactatcctccatagaatttgtactaatttacattcccccgatgggtgtataaagcatccccttttctatgcatcctccccagcatctgttatttggtgattttttgttaatagacattcggggccaagtgcagtggctcaagcctgtactcccagcactttgggaggccgaggtgggaggatcacttgagcccagaagtttgagacaagcctaggcaacatagcaagacctcgtccctactaaaaatcaaaaaaattagcagggcgtagtggctyacacctgtagtcctagctactcaggaggctgaagtgagaggatcacttgagcccaagatatcaaggctgcagtgagctatgatcacaccactgcactccagcctgggtgaagagcgagaccctgtctcagcaataataattactattagcaatctggactgctgtaagatgatatctcactgtgattttaatttgctttctctgatatcagtaatgttgagcattttttcacatgcttgttggccttttaggttatatccagaagaaaaattactaggtcacaggattataatttttccta

SEQ ID NO: 744334 - DNA, 633 bp, Homo sapiens
gcaggaggctagttgaaaacaatggcctctcatcaactttgtttaacaaaggtcacataaccattaagtggcagagccaggattggaatttaggtctcaccatactctgcaacttcttagtttctccaacttgttttcttgtgcagcaaagtaaagaaaggtcatggtgagctggagagaatagggaaagtaaaggacacagcattgattctgaaaaaagtgctgatgctattgggaaaatcagaagagtattagcaggaggggaattaaagaaaacatcatttaaaaaatctcaggccaggcacaatggcacaggcctgtaatcccagcactttgggaggtggaggcagaggtgggcagatcatttgagcccaggagtttgagaccagcctgggcaacatagtgagttcccattgttaccggggtgtccttgctcccagagctcccaagatgaaggcaggccgcttccaagayggtggcaagccttgtgttctctgacctggggttcttggcctcatggattccaaggaatggaatcttgggctatgtggtgagtgttatagctctattagaagccgtgggtcacggaagagaaccgcgtaacccagtaactagtgttcagctccattagga

SEQ ID NO: 744335 - DNA, 554 bp, Homo sapiens
cgggtctcctcaggggaatgacgccacctggctgatactgaccaggcaccactagaagcatccaagagagaacgtgtcaggggccaggggaggtcagggagggggaaaggaagcctcagagagtgtgtcagccgtcaccagaaacaagggtgactgggaccaggaggcaacagagtgaaaagagggaagtggatcgacttgggagagactccagaaagcggagtgaccgacctgcagacaggactaagccatcgggagcgacactaaggcttctggctttgctggcaaggtgggtgttagtgcccgggatggggaaagcaggagggggccgctaagggacatccaggaataagcccacctgcagaggctgagggctgagtgccaagctgcccrcacccagcacctgccaccaggactcacggtgctattgacagctgccatgtagctggcgtcgggatcgatgtgggcggacgtgatggagacctcgggctcagggatcagctgctcgttgtggtctgttttcaagtcccagatgtggatagccccgctctggt

SEQ ID NO: 744336 - DNA, 553 bp, Homo sapiens
tgcgtacgtagagtttgagaatccagatgaagccgagaaggcgctgaagcacatggatggaggtgggtgaccctgccacataaccctgacctctcagagacccgccgccgcgaggggctttcaaactgatttccaactgggctgcacttctttttgtttgtttgagacagagtttcacacttgttgcccaggctggggtgcagttcctggaccaaactgaggtttgggctgctmtttctcatggcccaataacaagatgcacattaactgagtaggtggagtttttatttctgcaaccagttgcagggaaaaggcctggaaattattgccagaccaacttaaaattacaaagtttttcagagcttatatattttttaagctatatgtctatacatatgtgtacatttatgtaaagacataagttactgacttttaatctattaactaaggattgagtcttgaagaccttcctctggagcctcagtaaattgacttaatttaaatggctgtgagtgctggggtaattacccttgctttgccttctgctaaatca

SEQ ID NO: 744337 - DNA, 553 bp, Homo sapiens
tgcgtacgtagagtttgagaatccagatgaagccgagaaggcgctgaagcacatggatggaggtgggtgaccctgccacataaccctgacctctcagagacccgccgccgcgaggggctttcaaactgatttccaactgggctgcacttctttttgtttgtttgagacagagtttcacacttgttgcccaggctggggtgcagttcctggaccaaactgaggtttgggctgctatttctcatggcccaataacaagatgcacattmactgagtaggtggagtttttatttctgcaaccagttgcagggaaaaggcctggaaattattgccagaccaacttaaaattacaaagtttttcagagcttatatattttttaagctatatgtctatacatatgtgtacatttatgtaaagacataagttactgacttttaatctattaactaaggattgagtcttgaagaccttcctctggagcctcagtaaattgacttaatttaaatggctgtgagtgctggggtaattacccttgctttgccttctgctaaatca

SEQ ID NO: 744338 - DNA, 535 bp, Homo sapiens
tttgggacttttctgaagggccatccaagtgacaaaagtgagctgcttccagtaaaattttctttgttttatttttattttttataaaaaggaatataactagtatctaccttttgaaaatatggggaatatcatatgaattaatacatctaaagtactttaatagtgcctagaagatagaaagtgttcaagaaatgttacccgaagattacttaatttaaattgtttgattaaaagctgaagagggcactttattaagcttattgtatttctgattgcttcaagtaccattaagtgatccagcttacctatttgtttaaagtaaaaaagtatttggaagaaggtattacttatcaraaatctgtttttcactgataaagaatatcttgcaaccatcagcttttgattcattttcaatcatcctatgtttccatgcacgtcctcctgttcagtcttccaaatgatctcaaaagtgttcttagtgaaaggtgacatttgtagaccaaatgagaactggcaatggtctcttcagcat

SEQ ID NO: 744339 - DNA, 619 bp, Homo sapiens
acaaaaatcaacttaaataatttaaatacttaaaacctcaaagtgtaaactcgtagaagggagcatagagaaaaagtttcagaacactggttttgataattatttcatagatatgataccaaaagcacaggaacaaaagcaaaaatatacragttagactacatcaaattaaaaacttttacatggcagaggaaatattctgtaggtataaaggcaacctacacaatgggagacaatatttgaaaaccgtatatatcaaataatgggttaatttccaaaatatctaaggaactcctacacctccataacaaaaaaccaaatagcatgcttcaaaaatgggcaaaggacttaaatagacatttctccaaagaagacataaataaaagcatacaggtgtatgaaaaggtgttcaataatgccaacatgagggaaatgcaaatcaaaaccacaatgggatattacctcacacctgttgggatggctgttataaaaaataatataatgataagataagcttgtttgttgatattgtgcagaaatagttcttgcacattgttggtgagaatgtaaaatgatgtagctgctatggaaaatattatggaagttcctcagaaaaaaa

SEQ ID NO: 744340 - DNA, 564 bp, Homo sapiens
cacaccaagaggatgactacatccagtttttccactcagatatggctctgcctaaaagacctgtaactgatgttcaaaaaattaggtgaacttccaactaaatatctgagtaggttatttcaattttgaatgtcatataaaccaaataccatagtccctctatacttacatatggagagatgagtagcagaattttggcagaatctgsaatagaagatgtttggccaggataaaacagaagcatgagcaattgtgtcaagttatttgaaaactaatagctattaggttggtgcaaacgtaattgtggtttttgcattgttggaatttgccattttatattggaatacactcttaaataaatatggttatgttatatatcattttaatgggcctttcttactttatgatttttagttaatgacttattacttgctgtttattttagactatggaaatgatgttagacaaaaagcaaattctagcgatttttttattcgtgttcaaaatgggttgtaaagcagctgagacaacttgcaacataaataacgcatttggcccaggaac

SEQ ID NO: 744341 - DNA, 580 bp, Homo sapiens
  misc_feature 404: n = A,T,C or G
cagtgagcggtgatcactccactgcactccagcctgggcaacaaagcaagaccctatctccaaaaaaaaaaagaaaaaaaaaggccgggcgcggtggctcacgcctgtaatcccaacactttgggaggctgaggtgggtggatcatgaggtcaggagatcgagaccatcctggcaaacatcgtgaaaccccgtctctactaaaaatacaaaaaattagccaggcgtggttgcgggtgcctgtagttccagttacttggggggctgaggcaggagaatggcatgaacccgggaagcggagcttgcagtgagctgagattgcamcactgcactccatcctggtagacagagtgagactccatctcaaaaaaaaaaaaaaataaaaaagaaagaaagaaacaggaancggtgcagaatatatgtctgaccttgtcagcagggtgagcagggtggggtgaataccccagaagccgcaaagggaaagagggtcagcaggtttgaccacgtggaatcagagagaggcagtgccccccagccccagccccatcccacccattgcctatgcctgctccccaccttctg

SEQ ID NO: 744342 - DNA, 580 bp, Homo sapiens
  misc_feature 404: n = A,T,C or G
cagtgagcggtgatcactccactgcactccagcctgggcaacaaagcaagaccctatctccaaaaaaaaaaagaaaaaaaaaggccgggcgcggtggctcacgcctgtaatcccaacactttgggaggctgaggtgggtggatcatgaggtcaggagatcgagaccatcctggcaaacatcgtgaaaccccgtctctactaaaaatacaaaaaattagccaggcgtggttgcgggtgcctgtagttccagttacttggggggctgaggcaggagaatggcatgaacccgggaagcggagcttgcagtgagctgagattgcaccactgcactccakcctggtagacagagtgagactccatctcaaaaaaaaaaaaaaataaaaaagaaagaaagaaacaggaancggtgcagaatatatgtctgaccttgtcagcagggtgagcagggtggggtgaataccccagaagccgcaaagggaaagagggtcagcaggtttgaccacgtggaatcagagagaggcagtgccccccagccccagccccatcccacccattgcctatgcctgctccccaccttctg

SEQ ID NO: 744343 - DNA, 487 bp, Homo sapiens
ttagatgactgtttggctgcccgtcctctttggttgttagatcaagggtgataaattctgtctttcttccaatgatactttgggacatccatgttagcctgttttttcatctttggggcccagcagtcactttctctctctagacctctgttttcttatctgcaaagtgggaatttggatggatgaatatcttcattgctttcagttctaatattggtgacagctcagtcacaaagcaagcgcaaaaaaatctmtctctgcaaacagtagttgttacagttaacgtgaactaagcactttttgcagactacctcagtgagctctcacaccattttacaaatcaggaaagagaaacccagagggtagtttccttgctcaagatgactttgagaggtgtgcttctcagctggaggaaaagtttgcaccccagaggacatttggcaatatctgaaagtatttttggtttcacagctcgctggggagtgct

SEQ ID NO: 744344 - DNA, 645 bp, Homo sapiens
atatttccgaggagtatttgcacattcgttgatttgtattcagaaggctgcagtaccccattctggggaagtgtcttatgtaatattttctcacaggccacgcttccactctgtgtgttcttttttggcacagagttgtttgcagaatgttgcattccttcagcagcatgagaccacggccaccattttaacctgcatccctctgtgtgaattggttgacctgagacagaatctcagtgagccttctggaactgggctgagcttaagtcttccagtctaaaagggaaatggtaataataataagggttggtatttattacgtgcccactagtctgcaccacgtactgtgctgaacattttaggcagtcttttattatgaagaacgaatgtggcattgtccacagtgagccttcatcataaagcaatggtgtgggtgttagtattatcatccccagttgacactaagctagaaagtggcagagctgggatttsaacccagacagtctgcctccaacacccacagtgatgaacaccttatgttgtccttatgcaaatatctacaggtatgaagatgtgtctactttctccctccagaacagccctgtccaggagattttgtgtgatgatggaagtgttctaaatcag

SEQ ID NO: 744345 - DNA, 667 bp, Homo sapiens
ctaatgtctcccctgagcattggatccctgtgtccattatgttctatgcatacctcatgctcaaaggggctacagtgggagagaggactccttttatgtcccatagtctgtgtaaatggttcctccacccaccaaatacatcacctttgactcatctctttcccttgttccatccttacaatggatgggtcttaattacctcttggatctgtccccatctccatctgtccttctcctcctctgctccatttccccctccttgtctctgctttctctccatccacaggtctgttctcctgccctggtatcatattctgtttgagccactataacaaaacaccacagactgggtggcttatacacaacagaaatgtataggtcacggttctggaggctgggaagtgcaaatcaaggtgtcagcagcttcagtgtctgctaagggcccacttcctagatggccrtcttttcaatgtgacatcctatgacaaaggatcatacgagctctctgggatctcttttataagggccctaatcccattcatgaaggcttatgcctgtgacctgaccacctcccaaggggcctcacctcttttaggggacacaattatttagaccacagcacctgggaggttagcaatatcttcctatggtgcctctctgcttccat

SEQ ID NO: 744346 - DNA, 644 bp, Homo sapiens
cacaagaatcctcgtaagagggatgtaagagagtcggagtcagaggcgatatgatgagggaggcagaagcagggcaggggagacagagagagagattaaaagacactacgctgttggccttgagatgaaggaggaagctaggagccaaggartgtgtgctgcttctagaaggtggaagaagacaaaggagacagattatcctcacacggcctccagaaggaactttcaaactttcccaacatcttgatgttagcccaggaagagccgttttagacttttgacctccagaactgcaaggaagtacatttgtgttgctttaagccattacatttttggtaatttgttatagcatcaatgggaaaccaatacactaaccaagcctttgaatcaccaaggcttgggacttctttgctcctgggaagaactggcaagactttattttctgactctgactccctttgacttgacagaggtgggctttctaaaaggggaaaagcctccagaattggaagagatgggagtttactggggagtgttctagggctcagcacttgctgggagtgagggaagcaggacccggcagagggagcaggtgaactgttaacatcataagctacctggggctgggatgaccctgaaggtcc

SEQ ID NO: 744347 - DNA, 644 bp, Homo sapiens
cacaagaatcctcgtaagagggatgtaagagagtcggagtcagaggcgatatgatgagggaggcagaagcagggcaggggagacagagagagagattaaaagacactacgctgttggccttgagatgaaggaggaagctaggagccaaggagtgtgtgctgcttctagaaggtggaagaagacaaaggagacagattatcctcacacggcctccagaaggaactttcaaactttcccaacatcttgatgttagcmcaggaagagccgttttagacttttgacctccagaactgcaaggaagtacatttgtgttgctttaagccattacatttttggtaatttgttatagcatcaatgggaaaccaatacactaaccaagcctttgaatcaccaaggcttgggacttctttgctcctgggaagaactggcaagactttattttctgactctgactccctttgacttgacagaggtgggctttctaaaaggggaaaagcctccagaattggaagagatgggagtttactggggagtgttctagggctcagcacttgctgggagtgagggaagcaggacccggcagagggagcaggtgaactgttaacatcataagctacctggggctgggatgaccctgaaggtcc

SEQ ID NO: 744348 - DNA, 595 bp, Homo sapiens
ttctcccacagcatttttaatctttgctaactgtggagtaaaagcccgactttttaaaatttttggctaaagatattctaggcatgggcttttaggaaagatagtttttgaagtgggggtgctaagaggagactttccaggaacctttgaaatcatccctgcctcccgtgatccagcctctctcagctacaggaaaaggcctttcccagcagcatgcttggtctcagcccattcaatatttaaaattamgtgcacaacatttaacatatataggtactgaacttaaatggattcaattcaattcaaatggttatattgaggaactactgtgtgctgggtgttgtactggacccttttaaagaggggaggaagcaacatgaatcagacctcagtccaggacctcaccactgaattgcagaagacagaatgttataaagaaaacagtcatgcttctgtcagttgttaatctggacaaaggatctactgtgtgctgtgcccttaacatgggccatctcattctgagatagcaattgttttatttatgtatttatgtatttatttattttttatttgagttggagtctcactctgttgc

SEQ ID NO: 744349 - DNA, 595 bp, Homo sapiens
ttctcccacagcatttttaatctttgctaactgtggagtaaaagcccgactttttaaaatttttggctaaagatattctaggcatgggcttttaggaaagatagtttttgaagtgggggtgctaagaggagactttccaggaacctttgaaatcatccctgcctcccgtgatccagcctctctcagctacaggaaaaggcctttcccagcagcatgcttggtctcagcccattcaatatttaaaattaagtgcacaacatttaacatatataggtactgaacttaaatggattcaattcaattcaaatggttatattgaggaactactgtgtgctgggtgttgtactggacccttttaaagaggggaggaagcaacatgaatcagacctcagtccaggacctcaccactgaattgcagaagacasaatgttataaagaaaacagtcatgcttctgtcagttgttaatctggacaaaggatctactgtgtgctgtgcccttaacatgggccatctcattctgagatagcaattgttttatttatgtatttatgtatttatttattttttatttgagttggagtctcactctgttgc

SEQ ID NO: 744350 - DNA, 586 bp, Homo sapiens
gttttatttatgtatttatgtatttatttattttttatttgagttggagtctcactctgttgcccaggccatagtgcagtggcttaatctgggctcactgcaacctctgcctcgcaggttcaagtaattctcatgcctcagcctaccaagtagctgagattacaggcacccaccaccatgcctggctaatttttgtaattttagtagagatggagtttcaccatgttggccaggctagtctcgaagtcctgacttcaagtgatctgcccaccttggcctcccaaagtgctgggattagaggtgtgagccacygcgcctggtgtaattgttttatttctaatttatagtggaggacactgagtcacaacaggtcaagtcacctgctctgagcctcgtggctgagaagcggtcgggccagggccgcagctcccgaccactgtgcttgattgcttgtgttttgagagacagctctgacctcgctaccaaagagtcatgagaagagttatcctggtagaggggagggggcggttcattttacaagaggaagatctttctccataccctgtccaacaagacagcataagcc

SEQ ID NO: 744351 - DNA, 640 bp, Homo sapiens
gggagctggccagtgtggatggctcagccactccgaggaaggaaaggttggccgaagcttctgccggccattgcctgcttcaggaggtttaaaaagaagagaaaatagatactttgccatttactttgctttttatcatttcagatttatatctataatgagaaaattgtaaatggacacctgcagcctaacctggtggacctttgtgcttccgtcgcagagctsgatgataaggtagcacctagagctaactcaagtagaaaccggggtccagtgttccgatgggcctagcaacttgccgatttggttgaaatgtgctgcggagacacgccattctgtggaatgaaatgttaactgttcttcagttttattttaaataactttgggtggttttcttgatgatgaatttttaaaaatgcatcttcaaaaggccctgccagtatcaattgatagtcacaagagttctcttcaagccgtatttgctttgaagtcccatcaggcttttactccccactcaccagtttccctccttacacaatctagtaggctccttaatgagagcagaattgttaaggtgatggctttttacacctgtgagccctcgaacttgactcggtggggcctttgtgagcattcttta

SEQ ID NO: 744352 - DNA, 492 bp, Homo sapiens
acagtggggttagagccctggtggatccatcacggggcgctgccctgcaagacctcgtctctgcagacagaccacagaaatctggccccggagtgggctgggggcacctgttcttatgaggatggggctgcaggaggcaaagaggcaaggacagagggaagcagggctgagccctgtgctgcacaaggtggccaggcacttccgggttgcaggtccaaccctgcctccagcctctatcttcctcccgtcctgccttgctgcygtgtcctcatcctcccagagtgagcccacagtgggggcacaggaccagacatgcaatgcaacccttcacctcctcttctctcagatccagcagggtcagaggtcatggcaggaggcgtgcccaaccctctaaccctacctctgctcacctttgaaaaagacaaaacgaccgtcttggcgctcgtaggcagcactgatgtcaccgggcagaccacgccagaagtgcccgat

SEQ ID NO: 744353 - DNA, 624 bp, Homo sapiens
tttttaagacggagtttcactcttgttgaccaggctggagttcaatgatggcgatctcagctcactgcaaccttcatctcctgggttcaagtgatcctcctgcctcagactcctgagtagttgggattacaggcacatgccaccatggcccggctaatttttatatttttttcgtagagacggggttttaccacattggccaggctggtctcgaactcctgaccctcaggtgatccgcccacctcggcttcccaaagtgttgcggttacaggcatgagccttttttacaggcatccagccctkttttcttttttttagagacagagtctcactatgttgcccagtctggtcttgaacacctgggcttaagcaaccctcctgcctcagcctcccaaagagctaggattacaggcatgagccatggtgcctgcgcctactttttttcctagaagctttattgtttcactttccacatttaagtctgtgatgcatcttgaataaacttttgtatatgttgttaagtagggggtcaaagttcattctttccatttagatcatagttcactgcagcctcaaactccggggctcaagtgatcctcccacctcagcctcttgggtagttgg

SEQ ID NO: 744354 - DNA, 694 bp, Homo sapiens
gtcccctccctgaaaaattcctgtattgaaatcctaatccccttaagaggtgggacctttgaggaggtgatgaggtcagaaggcacagcagcagagccctcatgaatgggattagtgcccttataaaagactccagagagctgccctgccccttccaccatatgaggacacagctagaaggtgccatctatgagccagaaattagccytcagcagacactgaatctgccgctatttagaagctgcccaggctatggtattctgttatagcagcctgaaaggatgaagacacaacaaaataaaagaagtggacaaaatatctgagcagacacttcaccaaagaagagatgcaaactgaatgaaaatcacatgtaaagattctcagcattattgatcattaagtaaatgcaaatcaaaaccacgtgatactactgtacccctattggaatgactaaaaaagaaagaaaaaccaacaataccaagagtcagtgagaacgcacagcagccagaattctcctacattgctggtgggaatgcaaaatgatactgacactttgaaaaatagtagagccgtttcttataaagtcaaacatatgctttcagacaacataacaatcccacgtatacgtttttacccaagtgaaatgaaaacctatgttcacacaaaaacctgtatgcaaatatttacagcagtt

SEQ ID NO: 744355 - DNA, 572 bp, Homo sapiens
aagaaaagtccggctaaaattcatccttcgcttgaacactttcttaaaggactaaaacttaagatgtctgcccagtagttagtaatgactccaacaagtttcaaagttttgtttaggttggcttatttttatttttagtccttaatcataattaaaagatatggccatttctgatgaactgcactacttggaggtctacctgacagatgagtttgctaaaggaaggaaagtggcagatctctacgaacttgtacagtatgctggaaacattatcccaaggctgtaagtaattacaaatcagagaacttttgtgtctgtatttctcactatatgttacgtcttttatgattatcagcttaagaaaaagttttaagggtaayttcttaacaaattgagatgaacattttggtagatattctcttacttgttttagagtaactagatttacgttttatgtagatatttgaggaattttggaaatagaaaaaatggacatgcttgctattttttttaatgtcttgactattagaaaaattaatataattgttctcttcctaatatgtttaaaggta

SEQ ID NO: 744356 - DNA, 629 bp, Homo sapiens
atgtaggaagaagggcaggtaggcaataaagcgaatggttatagtcctgggagactttagtgtccagtaattctgtattttacatagataaggtgagtgtttgaaggaaaaagagaattaaaggaagaatcaatgacacagatgtctctgggtaagtggwggaatggctgatcttatctttgttctgcatctggggagatacactcgtaatggaaattatcaatcagtgtgcaatccaacggactttagttttaggagctagacttggattgcagacctgaagttacgattgacttgtccttgtttatgggagtccagtaaagaatgtgaaaccacctttccaaaaattataacaggaaattatgacagtgaaagagatcagacctaactgactccatcttgcttctaacctataagctgtccttgttcattcctgggcagaggccaaactaactttggaaggaattcagttcatggtttgactctgaaacaaaattgataacagccctttcccaaaaagacccccttattgcctggggaccagtctgcttttgtaggcctaacaaattagctataatattagacattgcagtttaggggtcatgcagcctctgactccaagagtctga

SEQ ID NO: 744357 - DNA, 613 bp, Homo sapiens
tcctatctaactgaaattttgtgtctttctgaccaaatatatctccaatctcctaccacccccatcccagcccctggtaatcaccattctattctctgcttcgaagttacacttttttagattccacctagaagtgagatcatgcagtatttgtctttctttgcctggcttatttcccttaacacaatgtcctccagttccatccatgttgttgacaatgacaggattttattttttctcatgactgggtaacatttcactgtggttatatgtcacattttcttcaaccgttcattcactgatagatacttaygttgattccatgatcttggctgttgtaaatactgctgcaataaacatggggtgctgatatctcttcaacatactgatttcatatcctttagatatttacccagaagtaagattattggatcatacagtagttctacttttaattttttcagaacctccaaaccgttttctgtaatgactatagtaacttacattcccaccaacagtatataagtgttcccttttctccacattctctccaacacttgttatctttcatcttttttataatagctatttgaactggaatgaggtggcgtct

SEQ ID NO: 744358 - DNA, 589 bp, Homo sapiens
gcttctttggaggtgtgttatcaattctttaagacaaaaaaagtatcagcccagaaattcctattgcatatcaattaattagtattccaggggccttatccctgatacattgatgattctctagctggcaatcagctctctrttgagtaacaggaaccagcctgatagctccaattattataaaactggctggaagacaaatagagggaggctgggagaatactggtgtgaaacacagaaaggaaacgtaaaaatggactagacccagaattttagtaaatatcttgccatgatcacggagtcctctgataagagttagacgagcccatgttctgggaagggatctgtatttcactctactgataaaccagctcatcacatcataaataaaaaataggaacacttttacactgttggtgggactgtaaactagttcaaccattgtggaagtcagtgtggcgattcctcagggatctagaactagaaataccatttgacccagccatcccattactgggtatatacccaaaggactataaatcatgctgctataaagacacatgcacacgtatgtttattgcggcattat

SEQ ID NO: 744359 - DNA, 631 bp, Homo sapiens
cacattctgggccaaactcctgttgttggggcgggaggtgggaagaggaaaaaagtacaggaattcacatgaatctgctgtatggaaatgtgctccagacgatctggcagggagagtacgctgacatggcaatgtggcccagtggtgacaggccagggctgtgagctagggacctcagtggaaacatggctctgtttcaaatactctccgtgtccttgggcaagtggctaaatatctctgagccttggtctcctcatgtatctcccatggtttgtgaggatagatgagacaatgcatccaagcccctagctgtggcctgagcacacagtagccttctatcactgatggcaaaattgctacataagaacctcctggttaggcaatttgctcctctcaaatctctgaccaaactaaacccagtgaaatatttccrttccctggaactgcacctagttaatttatccacgttatcaaatccaggcacatctgatttatagaaaactggaaagtcatccaggtttctgccaattttccttacgtagagaatgtttcttcctaagattctccacccgttaaaggggaggatcttcaaaatctctaaagatgctcaatacgctcaaccccagagcaa

SEQ ID NO: 744360 - DNA, 655 bp, Homo sapiens
atcatatttgtaaaagtaattaacttcaagtacatattttctgatcattttggccattgtttgtaatgtaaaaagataaattatactgctatgctatataaaagaataaaagaagtggtgttattttgattgtgtatttttaattttaaaatgtagattattttaatgttatattcagtaatatttttgaagttgcttgtatgtgattcagttatttatagcaggctrggaccagacctagaacaaaatcttcctgtataggaggaacaggcgctgcttatagaaactgaatagcagatgctgaggggaaggacagtctgaaggacagaatgcagtattcagagcagtgtcctgataaggaggtttgaggagggcatagagacaaattccaacagcagcattcaggattccaggagaaacgcctgaaggacacctgtcagcaggtagctcactggattgcaggcactggcctgagtttcaacgttaaactttaagcagggaacctggagaagcaaaataagccacagtcttagagaagctggggtcacagacatgtcacaaagactttttaggcacaagaaacaatctaaatatccagttaccaggtctagtatattgggaggacagtgagttcaaagaaaagcagtagttcaaa

SEQ ID NO: 744361 - DNA, 568 bp, Homo sapiens
gtttagaccaatcaggatcttttatctattttacagaatattccattttttttaattcccaaatattctactcagaatggcaaataggtacttacttctaaaagtatacactaaacatcagtaattaatgcaacaggacagggttaactttcagcactctttctgttttggttttaaacaccatagtactaaatctccctcakgctctccttcctcttatgaaactaagcagtgccttcagtttcaatttcaattaactgcttttaggcttcactaactagaataattttaaacaaaaaataaagcctaaagtgttttcaaaaatcacaaaacacagaacaaaaattggaggtttctagaataaactacaatgttgatgttttaaaaatacttgcagacatatttctccttagtatgaaaaatatgttgaaatcaagtgcttcagatatggcataacatttgtttttttaaaataataaaatgtgcaaatatattgtcaaaattataatggcaggatagattgctacaaatccaacattagcacatatagcatgtccaaaatgaatag

SEQ ID NO: 744362 - DNA, 557 bp, Homo sapiens
atctggtcctgggcttcttttggttggtgggctatttattactgcctctatttgagagcttgtaattggtctgttcaggatttcaatttctttctggttcagtcttgggagggtgtatgtgtccaggaattcatccctttcttctaggttttctagtttatgtgcatagaggtgttcataatattctctgatcrttgtgtgtatttctctagtgtcagtggtaatacgcccttgttgtttctgattgcatttatttgaatcttctcttttgttctttattagtctagctagtggtctatctactttactaattttttttttcaaaaaaacagctcctggatttgtttatcttttgaatgatttttttttgcatctctgtctcattcagttcagatctgattttggttatttcttgtcttctgccatgtttggtatttgtttgctgttggtctctacttcgtttagttgtgatcttaggttgttaacttgggatctttctaactttttaatgtggatatttagtgctacaattttttctattaacactgccttcactg

SEQ ID NO: 744363 - DNA, 557 bp, Homo sapiens
atctggtcctgggcttcttttggttggtgggctatttattactgcctctatttgagagcttgtaattggtctgttcaggatttcaatttctttctggttcagtcttgggagggtgtatgtgtccaggaattcatccctttcttctaggttttctagtttatgtgcatagaggtgttcataatattctctgatcgttgtktgtatttctctagtgtcagtggtaatacgcccttgttgtttctgattgcatttatttgaatcttctcttttgttctttattagtctagctagtggtctatctactttactaattttttttttcaaaaaaacagctcctggatttgtttatcttttgaatgatttttttttgcatctctgtctcattcagttcagatctgattttggttatttcttgtcttctgccatgtttggtatttgtttgctgttggtctctacttcgtttagttgtgatcttaggttgttaacttgggatctttctaactttttaatgtggatatttagtgctacaattttttctattaacactgccttcactg

SEQ ID NO: 744364 - DNA, 557 bp, Homo sapiens
atctggtcctgggcttcttttggttggtgggctatttattactgcctctatttgagagcttgtaattggtctgttcaggatttcaatttctttctggttcagtcttgggagggtgtatgtgtccaggaattcatccctttcttctaggttttctagtttatgtgcatagaggtgttcataatattctctgatcgttgtgtgtatttctctagtgtcagtggtaatacgcccttgttgtttctgattgcatttatttgaatcttctcttttgttctttattagtctagctagtggtctatctactttactaattttttttttcaaaaaaacagctcctggatttgtttatcttytgaatgatttttttttgcatctctgtctcattcagttcagatctgattttggttatttcttgtcttctgccatgtttggtatttgtttgctgttggtctctacttcgtttagttgtgatcttaggttgttaacttgggatctttctaactttttaatgtggatatttagtgctacaattttttctattaacactgccttcactg

SEQ ID NO: 744365 - DNA, 497 bp, Homo sapiens
aacttctgttcttcaaaagacacaattaagaaaacaaaaagataagccataggctgatagaaaatatttgcaattcatatatttgataatggacttgtacccacaatatataaataactctaaactcaataataagaaaacaacatttcagtttaaaaataggacaatgatttgtatagacagttcataaaaaaagatatatcaatggaaaataagcctatgaaaacataatcaatctcaataggtattagataagtgcaaattggacccacaatgagacaccataacacatttattagaatggcmatattaacaaacaaacaaacaaaaactggcaataccgtgtgctggcaaagatgtttagagcaattggaactctttttacattgctgataggaatacacaatggtacacccaccttagaaaactctttgtcagtttctgataaaattaacatacacttattatatgatccaatgatcctactcctaaatatt

SEQ ID NO: 744366 - DNA, 529 bp, Homo sapiens
gtacctagaaggctgtcaactagctcagcatctaacaatgggaagccccaacttagaacctagaatcaactctcttaggacccagaggaaaaatataggtcattttctactccaagccatgacttctttcctgcaggaggaattctcttccatgatgttgacagcctcaattacagcagaagctaacaggggaagtagtaaacctgaacagcagtaatcctggctggaaagtcactgatggtcaattatgaaagatctgtcacaggagaagccttcaatagaagcaagtgagtaatagaagacagaattgattgggytctagtgtcagcatgggttgaatctcagatctatcacttattaatactgtgactgtgaggaagtcactacaactctgtgcctgagcttcttcataactgaagatgacattagcatctgtatcataggattgttatggagattgaatgagataatgcacatgaagtacttagtataatgtctgcctactctaagcactcactacaagtatttg

SEQ ID NO: 744367 - DNA, 633 bp, Homo sapiens
atacctaaaattaagttttcttcaataaagtcaacaaaaatatatacactggggaaaggacaacctattcagtaaatggtgttggaaaaattgtattgccatgagcagaagaaagaaactgggccccatctctccaggctagctgatgaagtaccaaactgtatactgtatacaaagactaactcaagatggattgaagacttaaatgtatgatgtgacactatataagtcttagaaaaaaaaactgaggaaaaactcttctagacgaattggcctargtaaataatttatgaccaatttgtcaaatgcaacaaaaacacaaatagacaaatggaacttagttaaactaaaaagcttctgcaaagcaaaatatatgatcaacatagtaaatagacaacctacagaatgggaaaaaatatttgcaagccatgcatccaataaaggcctactatgcagaatctacccaaacaactggacaggaaaaaacaaacaaccccattaaaaagtggacataggacatgaacagatatttttcaaaagaaggcatacaaaaatccaacaagcatatgaaaacatgcttggtatcactaaaaataagaaaaaatgcaaattaaaaccacaatgagatatatt

SEQ ID NO: 744368 - DNA, 633 bp, Homo sapiens
atacctaaaattaagttttcttcaataaagtcaacaaaaatatatacactggggaaaggacaacctattcagtaaatggtgttggaaaaattgtattgccatgagcagaagaaagaaactgggccccatctctccaggctagctgatgaagtaccaaactgtatactgtatacaaagactaactcaagatggattgaagacttaaatgtatgatgtgacactatataagtcttagaaaaaaaaactgaggaaaaactcttctagacgaattggcctaggtaaataatttatgaccaatttgtcaaatgcaacaaaaacacaaatagacaaatggaacttagttaaactaaaaagcttctgcaaagcaaaatatatgatcaacatagtaaatagacaacctacagaatgggaaaaaatatttgcaagccatgcatccaataaaggcctactaygcagaatctacccaaacaactggacaggaaaaaacaaacaaccccattaaaaagtggacataggacatgaacagatatttttcaaaagaaggcatacaaaaatccaacaagcatatgaaaacatgcttggtatcactaaaaataagaaaaaatgcaaattaaaaccacaatgagatatatt

SEQ ID NO: 744369 - DNA, 610 bp, Homo sapiens
aacaaaactatttactcatatcttcaaaaaaataacaaggcaaagcttacttggagcttctctgccatctgagatctttaattcagtgtctgccagaaccagtggtatggtaatatatctcagcactcccctggctctccctgcatggacaccagcagaattagctatccatcttggttattgtattgtgaggactccttagacacttcgttgcttctcatttttagcctatttattaacataaataaatatcatttaccaaaaagatggtggtttcattcatcctttcagccacacattcttttatataaaataataattttctctttcttttcatctcttgaatgctttgcctcctccaaaaaagctttggatgaaagagaagtcatttatttattccctcagaaaatatttatgtatgcctgggatatmccaatccctgttctaggcactagaagtaaataataaaaagaaatgaacatctgtgttcacatggagctcacatctcagtgggaagattacctgcaaactgtcatttcaggaacacagtccccattggtacaaccaactctactgagaccagatctccatagaagctatcacatgtgtt

SEQ ID NO: 744370 - DNA, 628 bp, Homo sapiens
actttgatatacccacttaggtgagttcttaaaacttgcaaaatagagatccacatatactacaataaatcttggcaactgactagatatgaggcaagagaaagtaggtggagtcaaagacaactgagtaagtgggggaattgtgaggccattaatcaaaagcagagtattggaataagaaacgaatactggagtgtggttctgtggtatttttttaatgtcaagaaaaaaaaaacatcggcaaggacccccaaaatgaaaagactttacaagattagagctgtgaaagtgaagaaacaggaaatggcaatggaacttctgtttggggaaattagaaaagatgttgagcaatttgttatgtggatcacaatagaaaactaacaagatattaatagraaaatgaagtaatgggcctagataacgctgacaatacaaccttgttgtatatctctttgttatggtttggggattttctaaattcatgcccatggcaatgtggagtaagaaagaaaaaacaactggaggggtttgcacagaactgggaactagcaaacttggaaagtctatagaacttcagcaacaagtgactatagactggctattattatatttctgaatctagtaaggt

SEQ ID NO: 744371 - DNA, 566 bp, Homo sapiens
tccttcacttcaacactagagaaactcatttagaaacatcctctttgaagtgtttctaaagcattcagttagagatatttagaagccagttagaacaagaagttctctatgtataaggagaatggttatgactggagattcagctttatgagtcatttacttaaatatggatgtggaaatcagatcaatctagtagagtagagagaaagaaaagaccaattcctagggtcctttaacatttaaggagtgagatgaagatgatgatttagtaagggatactgagtcaatgtttttttcttccaacagcatttcaaattcttgctttttatgtattcattattccactcaaattggacctttctaaatatgcccatattttctaacttacatgctyctgttcatgatgttcccaggaatgctttttgtacatttctattcaatgaatagtgtgttttttaatactcgttgaaaatacttcccttgaaagcctttttgaacttgctcaaaagttttctcttagactatgcattccttgagagaaaaaggaagtattcttcaacattact

SEQ ID NO: 744372 - DNA, 611 bp, Homo sapiens
aattaaaatgaggtcaccagggtgggcacaaatccaccatgactggaggccttgtaagaagagatgaagacacagacatgtacagagggggaccgtgagaagacacagggagaagacagctatccccatgccagagagaggcctcagaagaaattaaccctgctgatagcttaatattggacttgtagcccccagaattgtgagaaaattgatttctattgtttattcagcagcccccrtccccaacctttttggcaccaggggctggtttcatggaagacaatttttccaccgattggggtgggggggatggtttcagaatgattcaagagcattacatttattattagattctcataaggagtacaaaacctagatcactcacatgtgcagttcacaatagggtttgcactcctataacaatctaatgtcgccactgatctgacaggaggcggagctgaggccataaggcttgcccactgctcaccgcctgctgtgaggcctggttcctaataggccacggtctggggattggggacccctgatttaagtcacccagcctgtgatactttattatggcagcccaagcaagctaataattactctccatc

SEQ ID NO: 744373 - DNA, 611 bp, Homo sapiens
aattaaaatgaggtcaccagggtgggcacaaatccaccatgactggaggccttgtaagaagagatgaagacacagacatgtacagagggggaccgtgagaagacacagggagaagacagctatccccatgccagagagaggcctcagaagaaattaaccctgctgatagcttaatattggacttgtagcccccagaattgtgagaaaattgatttctattgtttattcagcagcccccatccccaacctttttggcaccaggggctggtttcatggaagacaatttttccaccgattggggtgggggggatggtttcagaatgattcaagagcattacatttattattagattctcataaggagtacaaaacctagatcactcacatgtgcagttcacaatagggtttgcactcctataacaatctamtgtcgccactgatctgacaggaggcggagctgaggccataaggcttgcccactgctcaccgcctgctgtgaggcctggttcctaataggccacggtctggggattggggacccctgatttaagtcacccagcctgtgatactttattatggcagcccaagcaagctaataattactctccatc

SEQ ID NO: 744374 - DNA, 527 bp, Homo sapiens
ataaaatcaagagaggaatatttagagaaaaagttgagaatgtagggagatttactgatgaccacatccttaagtgacagagaatacaaaaaaggctttttttttttcaataaactgtcatttccccatttctctacagaaaatgatcactgttgtcaattgtgtaagttctcaatatattaaggattccaaycaggtcattttgtgaaacatttcaaatgatagcttagcttcaaggtttgctcataagatttccagacagaatattgctcattcccatctaaatatttaatgcctctgaaagttttttggtttatataaggtaaacagacgcccccccaacaggtgtgttataaacacacttccacaaataaacgagccgtgcaaggagtttcactcaacatcccaagagactgatgtttccccacagctcaccccagagtctgaggcagagagctggcttcagggcattcacctatgcagtccacagggccctgcgctcagaagagcttctgcttgctttaatg

SEQ ID NO: 744375 - DNA, 408 bp, Homo sapiens
gattgcctggcatggaatgagatgcttcatcaatatttgtggagggactgaatcatttatttgcactcacgtgtgttgacaacaggggcaaaaggtcattaatgttcatactggcattcacaggatttacatcaaaagtctaacatttcatcattaakgaggcacatgtgcatatatatacacacatgtgtatgcacaaatgcaaatataggtttgcatatccctctagcactgtaaagacagatttctctatgggttatacaacaaacaaacatgcttttatgcacataaaaatattaatcattattttagatgccttatatgtatatattttcatatataattactaacattagctaatcttgaaatattcttgaaaatgaaggaaaaacgcactcttcatgaaat

SEQ ID NO: 744376 - DNA, 503 bp, Homo sapiens
gcctttgtagtttttttccttagagacagggtctcactgtgtcacctacgctggagtgtagttacaccatcatagctcactgcagccttgaactcctggccttaagtaatcctcttgctttggcctcctgcagcgctgggattacaggtgtgagccaccatgctatgcccatttgagttttgatatgtaatctacttgccttttgaaagtgccttgtaagagtactactagtgtgtttacttttttaccttttatcctacrtttgtctttttatacctcctctccctttttcctacaaaacttcctgtaaggagatcttggttctgctgcagtcaaaaattatattttttccttgagggttagctctgctctttggcctgctaatgagtcttacagggtctctgtgggtccttcagaggagatatatttttacgaaacattctccggtgcagcagtttacaaacgcaacttctggagtgtgagctctttgaaggtaggagctg

SEQ ID NO: 744377 - DNA, 524 bp, Homo sapiens
tgacataaaaataatatatcacatttccaaatctatttggctatggagacctttttgtgcagaaggtttttatagcacatactttggaagccacttaaccaaagtattcaaaacacacaaaatatatacatatttgtttttatgtatattacatgtatataatatacaacaaatctgaatawattatttactcatccacttacccacccattccaacagccatccaacaaatagtatatatagtgcctatatatgtgaacactcttgtgcatagtgataggggagaggaaaacacttgaaaatatgtttaacaaatttttctatactcctcttattaatctgcaaataaaatgttagagttttttaaaagccaattaatagagtataattcttaaaaatctagtaatggaaagcaacagatcccccttaaaaagtgataagtagcaaaccaaggaaatgttatatactttacaaaagtgctttaatattaaaggacacatatattttgagatatttttattcta

SEQ ID NO: 744378 - DNA, 626 bp, Homo sapiens
agtgttttatacagagacaaagagatgacatacgcaaaagtaattttaaaagaagcttaaaggtactaaaaatattatagaaaaagtctcatatagctagtatagcgaaataaaaagttttctaattaacttgagtaacatttgcctcatttttctttygagtcctttacatttaatgaagattccctccgttttttacaatgttctctccccaccaaattttcctctgtattccacatgcctttcctcttctcccatgctgaattttagttttgttctctatggcctatgttttttgccttctctcttgctaacactttttctcccttctcactcttatcagcctcctccttctagccccgttgtcacctacactgtcttatacgatgcttagtttaacccaactcaaatagttattataccttgcctgttataggaaagacataccagatgagtaaaaaccagtaagccaattataaatattataccattctagtgagctaactaatgccattgcacttgttttcctgtgggtatttggttattcttagctatacctgatattattcattaggttctaaaataattagagtgctagcatactacaagattggactttccaccac

SEQ ID NO: 744379 - DNA, 563 bp, Homo sapiens
cctggaaccacctgtctctaattaatctctcctgtattcccttagcacttacacctcataattatatttatgattgtaattgtattatattacagttcagatctccttatgataaataccatcataatgaaaacttcactattatcaaaagattccccagccttagccaataaactacttatttcggaaatccaataaaataaggttctaktgaaatacaataatttggatgttccttcaattatgttgtaaaggaatttgaccttgcggctatattctttgtcatgtgagagtgcacgggcccttcctctggatcataagatccttaacaaaatagtccctaagacagtttcttacgtagtagatgcttaataaacactagaacaagtgaatgatttgcaatagatgtgtaatggaaactggatcccccagtatagagcaaaggcatcactaaaattattgaactgcaattagcatggccttcattcttcattaccatttttatcagtatttgaatgaattaagtgtgaaactgtagccctgatgtgaaatcttttagactt

SEQ ID NO: 744380 - DNA, 544 bp, Homo sapiens
tctctcatctactttaggacattgcacaagcattctccttgctgtcacttgcgtcatccatttttctttctctactgaattactcctatcagcatgcaaatgtattgttaatttgctcgtctaaaaataactttttaaatcycacttgtcccaccagctaacattcatttctcttcatcccttttcagtaaaagttcttataagtattgcgtatacccactgatctgatctctctccttccattccatcacaaacacatcattcaagtttccgcctccactgctcccctgaaactactctttttaaggtcaccagtgaactttgcattgctaaacctgacgatgatttcccagtcctcaccttacttgacctagcagggtcactctttcctgcttaaataccttctttgcttgccttccaggacttcacatttgccttgttttcttctgacttttctagctgctcattctcaatctcccttgcttgttcagcttcaaaacatatcacttctagccccaccctgcctgtccctacccttatataa

SEQ ID NO: 744381 - DNA, 406 bp, Homo sapiens
tgtatacatatgtaactaacctgcacattgtgcacatgtaccctaaaacttaaagtataataataataaaattaaaaaaagaaaaaaaaagaaaattagaaaataataggaaagaatcaagaatttatcatatatttcttgtatgaactttamcattagatagcctatactagaaggcagaagtatcactttatgaaactatttcagtaaatttaaaaaagaattgcaacttccaatgaattaatagacctaggccatgtgtatggctgctaacatcaccgaaagagaaacaactggatcttatgtgtttcctgctgagagaacataaaatcacccacagttttgcaacaggtattaaatattagtctgatcaagactttggatccagctaccaatttcaggatgt

SEQ ID NO: 744382 - DNA, 406 bp, Homo sapiens
tgtatacatatgtaactaacctgcacattgtgcacatgtaccctaaaacttaaagtataataataataaaattaaaaaaagaaaaaaaaagaaaattagaaaataataggaaagaatcaagaatttatcatatatttcttgtatgaactttaacattakatagcctatactagaaggcagaagtatcactttatgaaactatttcagtaaatttaaaaaagaattgcaacttccaatgaattaatagacctaggccatgtgtatggctgctaacatcaccgaaagagaaacaactggatcttatgtgtttcctgctgagagaacataaaatcacccacagttttgcaacaggtattaaatattagtctgatcaagactttggatccagctaccaatttcaggatgt

SEQ ID NO: 744383 - DNA, 612 bp, Homo sapiens
tcatatgtcatgcagactttgttcattctttttattcatttttctttatttgtgtctgggttatttccaaagacttgtcttcaagttctaaaattcttccttctgtgtaatccagtctattgctgaagctttcaaatatattttgcatttatttagtgaattaattagttctcagatttctttttttaatggcatctattattttggtaaatttctcaattgtatcctgaatwattttttctgatttctttgtattgtttatctaaattgttttgtatgtcattgaacttctttaatatacttatttttaattcttcattcaggatttcataattttaaaaattggaatctgttgctggaaaattattgtgttcctttggaaatgtcatatttctttgcttattaatttttttgtgtgtccttaagttgatatctgcacatctgttgtaaagtcaatttttccaggtttttgaatttgctttcataggggaggactttttccttaagatatatctatgatgttttggatagggcactttggccttaattctgggggcatgcagtagtgtagtctttgtataattttttaacccacagacagcttcggtagtg

SEQ ID NO: 744384 - DNA, 612 bp, Homo sapiens
tcatatgtcatgcagactttgttcattctttttattcatttttctttatttgtgtctgggttatttccaaagacttgtcttcaagttctaaaattcttccttctgtgtaatccagtctattgctgaagctttcaaatatattttgcatttatttagtgaattaattagttctcagatttctttttttaatggcatctattattttggtaaatttctcaattgtatcctgaattattttttctgatttctttgtattgtttatctaaattgttttgtatgtcattgarcttctttaatatacttatttttaattcttcattcaggatttcataattttaaaaattggaatctgttgctggaaaattattgtgttcctttggaaatgtcatatttctttgcttattaatttttttgtgtgtccttaagttgatatctgcacatctgttgtaaagtcaatttttccaggtttttgaatttgctttcataggggaggactttttccttaagatatatctatgatgttttggatagggcactttggccttaattctgggggcatgcagtagtgtagtctttgtataattttttaacccacagacagcttcggtagtg

SEQ ID NO: 744385 - DNA, 433 bp, Homo sapiens
gacgctctatgtctagttctctcttccctgttttctactcccccaaattctagctcccttgggcttctcattgtctgaccttactctcttcagctcagcaatacctggattttgcttgcatttttattccctgtgatactatgtgaaaactgcctcccagtagtaatctgaggcaawaactgggttcccctcatttgttttctttctcttatgaatcataggcatgtattgcctgttgtccaatgtctaaaaactgctgcttcatatagttttctggttttctagttgttaaatgtgaacaatctctattccttcatcatgatgggaagcagaatgcaatattatttgttagtattttaaaataatgctgaaaaaacattctaaaggtttccttgaaagcacatatctattatatagatatggatatgcttat

SEQ ID NO: 744386 - DNA, 615 bp, Homo sapiens
atagcaatttttttcccctgttcgtcaagctcttactaatagtttcctcactggctgcgcagactctgcctggttccaatactaatacccaaaacatattttaggtttttgttgcagcaacacccaatttctagtatcaatgactgttcgaggtatctattgcttcataccaaacccaatccaaatgyttttagtttaaaacaacaactttttcagattctgcaagtgggcaatgctcggcagaaaagctctgtctctgttccacttggtgttggatgctacaatttagtgaagctgcagtatcctagagagctttactgacaagacaggtgcctaagttgggctagctagaatagccgatggctgattgagtctcttgttttctcttctcagtcttgtatccttcagggctcctccctatagctgatggttgaaactctttacaccgtggctcagtactgaaagacagtaagggtggaagctacaagacctttaaggagtaggcccagaactggtgcgatgtcacatccactgcatactcttggtcaatggcaaatcacaagaccaattcagcttaaaaaggggagaaagctgactctacttcttgatagaagt

SEQ ID NO: 744387 - DNA, 569 bp, Homo sapiens
aaaggtatgatggtgtgacaaaatttgataactattgtctttaagtatttctcaaacttctctcattcacatactacccttgttacccgggggttcttgctcccagagctcccaagatggaggtgggccgcttccaaaatggtggcgggccactttgaagatggtggcaagccttgtgctctctgacctggggttcttggcctcacggattccaaggaatggaatcttggtccatgcagtcagtgttatagctctattagaagccgtgggtcatagctctattagaagccgtgggtcatggaagagaaccgtggaacccagtgactagtgttcagctccattaggaggaacccacttagcgatgcagaacaatggcaagcctttagcccgatcgggaggggcaawggacgcctcgctgaatcaggagcacagccgacacccagccagggtggaagtcagcggcaggcagcaaaaagcagtggtggatggcgagtgaaaactcagctccagccctaacaaacacggaccagaagagagtgcagttgcaagatttaatagagtgaaaacag

SEQ ID NO: 744388 - DNA, 511 bp, Homo sapiens
ctgtcatctacattaggtatttctcctaaagctatccctcccctagtcttttacataaagttttaacagaaatgaatatctcaaatcaatattgttactcaactgatctgaaagttgaaccgtgaaaatattcagtttattctaactatatggtaaaacatcaaattaaagataacaaaatttaaatggatttttcaaaaaatcaacatagatgactctggatacatatcaatttttatttaatcaatttttcagattaaaacaacttggctaattctacaaatttgaaaattatataaaatacaaaawtcaggaaataatatctaaccccactagctagaggcaatgactgtgattattggcatattttttctagtgccgttcatgtatttttcacgtaatattaaccatactatagttaaaatgtagcaattaattttttacctgtaagtattttcttggtaattacatcaataaatatatcttttaattttctgaacaaatatgaaaa

SEQ ID NO: 744389 - DNA, 636 bp, Homo sapiens
  misc_feature 1, 2, 3, 4, 5, 6, 7, 8, 9, 10, 11, 12, 13, 14, 15, 16, 17,18, 19, 20, 21, 22, 23, 24, 25, 26, 27, 28, 29, 30, 31,32, 33, 34, 35, 36, 37, 38, 39, 40, 41: n = A,T,C or G
nnnnnnnnnnnnnnnnnnnnnnnnnnnnnnnnnnnnnnnnntggtgacattaacaccccactctcagcattggactgatcatctagacagaaaaacaataaacattagatttaaactatagaccaaatggatctcacatacatttatataaatttttattcaacaactgaagaatacatgctattttcatcaacacatggaacattctccatgakatatcatattaggccacaaaacaagtctcaacaaaattaaaacgattaaaatatttcaactattgtttgtgaccacagtggaataaaactataattcagtaacaagaggaacattagaaactgtacatatacatggaaattaaacaacatgctcttgaatgaccaataggtcaatgaagaaattaagaaggaaatttgaaaatttcttgaaacaagtgaaaatggaaacacagtataccaaaaacaatgggatacagcaaaagaggtaaatttataacaataaatgcctacatcaaaaaaaatagaaagacttcaattaacctaatgaaacatctgaaggaactagaaaggcaagaacaaatcaaacacaaaaaatagtatagggaaagaaataataaatgtcagagtagaaatggacaaa

SEQ ID NO: 744390 - DNA, 629 bp, Homo sapiens
caagatcttctgcttaataattagaagtaacaatgtgaactctttctacatatcaagaactgttctaacaactttgcagtttagagggaggtatagtaaaaaaataaaagcagtttattaatattcactatgaaaatggctttagaggaggtatgcaccygattgtgtgagtgcttaatagactctccagtcttgggtggttttgtcactggataatcttctctaagactttgagccaattttgaagaaaatgaggaaataattgtatttatctatgtatttattcaatggtgtgtatatatgtgtgtattgaaaacaggtggaaagagagaaagttaatgagggtggaaaaggaaatgggaactagatgactgaggaatgtgtgcaaagacatggaggccagtgtatatgggactgtaacattgtatttatggaagtagagttgaagatgctgggtggccagaaattaaggtagagttgcaaactggatatgaagaggtttctattacagactaatgaattttggacttatccttaaagatttgatgacctacacaatatgcaaaacaaagaagtggcatgataatatttgcattttaggaagatcattctggcattattatgtcttg

SEQ ID NO: 744391 - DNA, 629 bp, Homo sapiens
caagatcttctgcttaataattagaagtaacaatgtgaactctttctacatatcaagaactgttctaacaactttgcagtttagagggaggtatagtaaaaaaataaaagcagtttattaatattcactatgaaaatggctttagaggaggtatgcacccgattgtgtgagtgcttaatagactctccagtcttgggtggttttgtcactggataatcttctctaagactttgagccaattttgaagaaawtgaggaaataattgtatttatctatgtatttattcaatggtgtgtatatatgtgtgtattgaaaacaggtggaaagagagaaagttaatgagggtggaaaaggaaatgggaactagatgactgaggaatgtgtgcaaagacatggaggccagtgtatatgggactgtaacattgtatttatggaagtagagttgaagatgctgggtggccagaaattaaggtagagttgcaaactggatatgaagaggtttctattacagactaatgaattttggacttatccttaaagatttgatgacctacacaatatgcaaaacaaagaagtggcatgataatatttgcattttaggaagatcattctggcattattatgtcttg

SEQ ID NO: 744392 - DNA, 543 bp, Homo sapiens
attaagaccagtggatagttaatcttaactttagccaagacaaaccccaattcagttacttaccaagggatgggtctcaggctgaagattgctttctaccatcctagaagcaggcaaaaaactcatcttgcctgtttggaagcaagcttaaactccataaaggagttacctgccttccattgtcatggaagcaggaaaaaaacttgcctgccttgtgttggaagaaagtaaaactccccgccctcccctgcaaaaaaaagsttgcagagcaaaataaactttagatcttgaccaaatttcgggagatcaaggattctctggtggaggtgcttccaggtctctgcaaattgttctattgtccctaaaggtagctcaagctggtaccaagcaccaataggagatttgccaaaagttggggcacctccattcagaatcccttcatggttactaaaatgtgaacccccaaaatctgagacagatatcagttaatttagaaagtttattttgccaaggttgaggatgtgccctgtgacacagcctcag

SEQ ID NO: 744393 - DNA, 624 bp, Homo sapiens
gtatgtaagcagaaggatggttcatagctagtcactttattcctccaggtcattctagagagaattttaatgtggatttcacattgcatcactggtatgggtggcttattttgtctgactctctaaatagactcatgctggaaccttactccatttgtgatgtccttcaacatttgaccaagcatactttgtcagattggtctaaactctatagtggtaacaaaattaaaacattttataatctagtacagcccactcagacatcatgctcttcttttatctctactgaataaatgctcatgacttggcaagtattaaagatttatctatttattaacatyttactcatgaggataaaactcttgaaatattacagctcattttcaagaatgtccttgggatggaaagcagatatattttttgtcacattacattttcaaaccatgtaggtcactgtcataaagcagtcactagaaaagttaaatgaaaccgcattatgcaatagatttttttcatattttagatacatatacatttatataatacttgactgtaaattttgatggcagggctaagtactctgtggagagattgctaagctcttaagaaggtaaacaatttttg

SEQ ID NO: 744394 - DNA, 624 bp, Homo sapiens
gtatgtaagcagaaggatggttcatagctagtcactttattcctccaggtcattctagagagaattttaatgtggatttcacattgcatcactggtatgggtggcttattttgtctgactctctaaatagactcatgctggaaccttactccatttgtgatgtccttcaacatttgaccaagcatactttgtcagattggtctaaactctatagtggtaacaaaattaaaacattttataatctagtacagcccactcagacatcatgctcttcttttatctctactgaataaatgctcatgacttggcaagtattaaagatttatctatttattaacatcttactcatgaggataaaactcttgaaatattacagctcattttcaagaatgtccttgggatggaaagcagrtatattttttgtcacattacattttcaaaccatgtaggtcactgtcataaagcagtcactagaaaagttaaatgaaaccgcattatgcaatagatttttttcatattttagatacatatacatttatataatacttgactgtaaattttgatggcagggctaagtactctgtggagagattgctaagctcttaagaaggtaaacaatttttg

SEQ ID NO: 744395 - DNA, 579 bp, Homo sapiens
ttggccacaaccaatggaagtagaaataaaattagccaagaatgtgttctctaatttaattttaatcttttgaattctccgatagaaatttggatctctttcacaacattgactgtggagaaaacattcttcacttccatgaaccaaaggcctgagaagattgtttttttattagcttttttttcttttcttttcttttttttttttttttgagatggatttttctctcttgttgccccggctggaatgcagtgacgcgatytcagctcactgcaacctccacctcccgagttcaagcgattctcctgcctcagcctcccgagtagctcgattacaggcatccaccaccatgcccagctaatattttgtatttttagtagagacagggtatcaccatgtttgccaggctggtcttgaactcctaatcttaggcaatccacctgcctcagcctcccaaagtggtggtattacaggcatgagccaccacgctggctgtttgtttttttttttaagttcctgagggtaatttctaaacatgtcttatattctattccaccattctccacatattggacatcc

SEQ ID NO: 744396 - DNA, 579 bp, Homo sapiens
ttggccacaaccaatggaagtagaaataaaattagccaagaatgtgttctctaatttaattttaatcttttgaattctccgatagaaatttggatctctttcacaacattgactgtggagaaaacattcttcacttccatgaaccaaaggcctgagaagattgtttttttattagcttttttttcttttcttttcttttttttttttttttgagatggatttttctctcttgttgccccggctggaatgcagtgacgcgatctcagctcactgcaacctccacctcccgagttcaagcgattctcctgcctcagcctcccgagtagctcgattacaggcatccaccaccatgcccagctaatattttgtatttttagtagagacagggtatcaccatgtttgccaggctggtcttgaactcctaaycttaggcaatccacctgcctcagcctcccaaagtggtggtattacaggcatgagccaccacgctggctgtttgtttttttttttaagttcctgagggtaatttctaaacatgtcttatattctattccaccattctccacatattggacatcc

SEQ ID NO: 744397 - DNA, 622 bp, Homo sapiens
tttttcaactatgggtctaccaccacagatataatgaaagtcaattctcaaatgtagggtgttcaattatcaaaatcactaggatattgtttaatatcatctttccctatcatcaagtttcacaaaactttaaagtttcacaaaagttatcctttaagctttgttagacatcatagatttctttccctaattctcccccagtgtgtatctacctgtgattttggtggcttctgagagttgcaaagtccagtttattacaaaatgtattatagaaagctcaaaagtcctgttaaagtcccaggactgagaatgctgtgctgaatacaccagtaaactgtgcccagtaccccagagtgttgctgcaatacacagatgcacagatgcagtccagggccaccctagccttggactcttgatagttcttgtattagttcattttcatgctgctaataaagatatatcmaagactgggcaatttacaaagaaagaggattaatggacttacagtttcacatgcctggggaggactcacaatcatggtagaaggcaaggaggagcaagtcacaacttacatggatggtggcaggcaaaaacagagcttataaagggaaactcccctttt

SEQ ID NO: 744398 - DNA, 618 bp, Homo sapiens
ttcttaatttgttgacactctcaacaattctcattattctttgagattcatgttcccctttacttaagtataatgagtcatctaggattacataataatcacagacattttcttttcatttgctaaatgcttatccattaaatagttttgtcacctcacatgttcataagtgacaatccaggagataagattattatctagacattgagagactctctttctcatttaaatttttggtgtggttttatgtttgtttgtttgtttttttggggttgtgggggatagagtcttgctctgtcacccaggctctagtgcaatgtcgagatctcagctcactgcaacctccacctcctgggttcaagcaattcccctgcctcgacctcctgagtagctrggattacaggtgcacaccaccatgcctggctaaaatttttggatttttgtagagacgtgttttcaccatgttggccaggctggccttgaactcttgacctcaggagatctgcctaacttggcctcccaaagtgctgggattacaggcgagagccaccacacccggcctttggtgtggtatttaaacaacatttatgggagaaaaagaatcaggcattcgcatca

SEQ ID NO: 744399 - DNA, 623 bp, Homo sapiens
ttcaaccctgtggagcccctaagatataaaaagttggccatctaaatcgacgggttttacattccatgaatactgtattttcaattgcatttggttgctaatgtcaaatctgtagatagtggagggcaaactatatattaaaaaaaaaatctgcatataagtgaacccatacagttcaaacccatgttgttcaagggtcaactgtagtaggaaatggagatattcaatttggaaacctaaatgcaataggagtaatgctattctgggagtaataaaagtaattggatgtaagtggaggcaggcactcaatggccaaaggcaaggtgggcacrcttactgtaagggacagcaaaggcaaagcagcaattggatagtctgacttgtgcagacctatgacattgatttattgattatggtgttcctacaataatcaattagtcagatagataggaagcctactaaagtcttacttgatctctatatgcaaaaatgttctaagtcaagtgaacaaaattctaacccaaatcatgaaaacagagagtcatacctgacaggccacagacttcagaaaagaaaaaaatgtcatgaccccttaatgagggtcttgggcctgtatacagact

SEQ ID NO: 744400 - DNA, 591 bp, Homo sapiens
cctaaatacctcccattaggccccacctccaatattagggatcaaatttcaccatgagattttgggggacaatcatccaacttacagcaatgacctaaatgcccatggtctccactctggttccaacactttctatttctcagcctgcacctatggcctcatggggagtacactaccatcaggtgagtaaggaatagaagactttggcctggtttacagatggttctgcatgatatgcagttaccactcaaaagtggacaactgtagctctgtagcccctgttgcgggacatccctgatggactgsagtgaagggaaatccttccaatgggcaaaaattgcaaaaattcaaatggtgcacctggttgtttactttgcttgaaaagagaaataaccagatattctatcatatactgatcaataaactgcagtcaatggtttggctaaatgaccagggacttgaaagaaatatgattggaaaattggcaatggggacatttgaggaagagttatgtgggcaaaaaatgtgaatatatttctatgccatataagtgttcaccaaggggtgatcttagcagagaaaaagtttaat

SEQ ID NO: 744401 - DNA, 666 bp, Homo sapiens
gggctctaccccttcatggtttcatggtaaaatttcttcatcagataactggagtgcttggcatgggccttaattgttaaggtgattgctcccttgggtatcacaggaaatttgcacccttgccttactcctttctaccttttctttcaggtagaattcttctaagagccggggtatatcctcagcatctgcttaatatgtctccaggaatctctgcatcttggtaaccctatattaagtgtctgacaacatttcaagtttatggctggaatataacattcctgggctacctcccagtcaccctgccttgccaycccatattcatgcacatagacaaagacaaaatcctgcatttctactctaattatctttttttttcatttttgagacagagtctcagtctgtcgcccaggctggagtacaggagcatgatctcagctcactgcaacctctgcctcttggttcaagtgattcttatgcctcagccttccgaatagctgggactacaggcgcacaccaccatgcccagctaattttttgtatttgttaagtagagatggggtttcaccgtgttagccaggctggtctcaaactcctgatctcaggtgatctgctggccttagcctccccaactgctcagattacaggtgtgtaccaccgcgcctg

SEQ ID NO: 744402 - DNA, 614 bp, Homo sapiens
ctcatcatcatagcactaccaccaaagtaagcatgacaaaaatttctacctattaaatacccataaaaggaaatgatatcatttttacaagaataatcttaccaactgggcttctggtaatctattgatatgctggttgtacttcaacttcagcaattcatatgccataaactgaagggcaccatgcgatgttccaaacagcccaggaacaaatccctacaagggaatgatttttaaaaagcaaaacaacataccgtttgaagaacaatatatttaagtaaaatactttctcttctctctcattacagcactttaagcaaattcatttaattttgcacaaatcacatttttaaaatatggggttaaaaacttrtaatataaagacatgggtagtattctcttctactttatttttaaaggtttggatgttcacatattagtttttctttaaacagtatacatataaagaagacccacactgtcaagacttgaggtgtgagtgggaaactaaattctggaaagttaagaaactaaaggtaatggtaaatcaatgaactgagcataggtattctgaaagaataaggcagaaagtgacgaaaaaacataaaaataat

SEQ ID NO: 744403 - DNA, 629 bp, Homo sapiens
taatcctcctcagcctctggagaagctaggaccacagacacacaccaccacgcccaggtaggttttgttttttttttttgtatttttcatagagatggagtcttactatggtgcccaggctggtcttgaactcctaggctagaatgatcctcccacctcagcctcccaaagtgttgagattataggcgtgagccacagcacccagcaagaatagtgtattttwaaaaaatctatttaacataagttgtaaaaacttacactgtataagtactctatgtctaaatttacacaaatctctaaagatttttcccaaatcacagtcttcaaatttaaatttcagttttattgtgagtcaaagcactaagaataaataaagggtcagcacattttacatactattggagaaaaaaggagttaaaaacatggcccatgtcatcaagtagtttccaatctttctagcaaagcataaaaaacaagtagttgtctgcactaactgtaaggccagagtgatttcagaaatatgaggcatctatattaagagttggaataactggaaaaaagtctcattctggctgtgggacttgaactgaactttgaagatgagagaatttagaggggagggaagcagt

SEQ ID NO: 744404 - DNA, 625 bp, Homo sapiens
cccagagctaccaagtcccacagggactccatgccaactccctggcatcctaacttcccaggctgactgtggccttcagaaatcctgccatgggcaagcaggggaggcagccccagggaaagatgccacctcttttcakcattaagtcactgaaaggctgtggacctgaaaagacccacataaatacaggaaactgatctttgacaaaggagcaaaggcaatacaatggagaaaggactgtcttttcaacaaatagagctggaacaatgggacatccacatgcaaaaacaaaatgaatctagacatagatcttaaaaactcttcacaaaaattaactcaaaatggatcacagacctacatgtaacaggcaaactacaaaatgcctagaagatcaatgggggggaaatcaaaatgaccttgagtatggcgatgacttttgaaatgcaacaccaaacacatgatccacaggagaaataattgataagctagactgcattataattaaaaacttctctgggaaagacactgtcaagaggatgagaagacaagtcacagactaggaaaaaatatttggaaaaacaaaacaaacaaacaaaaaccccatgcctgacaaaggactgttatc

SEQ ID NO: 744405 - DNA, 659 bp, Homo sapiens
ccttcttctgtaatgcctcctgaaggacttgcctaaagctgttttttttgtaagtagaaggagtacactctaaaataatgataaaaagtatagtatagtaaatacataaaccagtaacatactcttttactattgctatcaaaattatgtattgtacataattgtgtgccatgcttttatatgactggcagwgcaataggtttgcttacacctggatcaccacaaacatttgagtaatatgatgactgcagtgtctctaggaattagaaattttccagctccattataatcttagaagttgaccatccatatgaggtctgttgctgactgaaatagcattatgcagtacatgactatatctgtgtattttcacgaagttaacacactcatataattagcatgcagatcaagaaacagaatagtaccagtgccccccaaagtctccctcatactgcctattagtcatcacctacacccacaaggctatccctcagcctgacttctaataccatcgattagatttaaatatttttaaatgttatataaattgaatcatacagtgtcactttgtgtctggattcgtttattcaaaaatatgttcgatggcataatgacagaaatatagaccaacagaatagaatagagagctctgaaataaa

SEQ ID NO: 744406 - DNA, 595 bp, Homo sapiens
tagcatgcagatcaagaaacagaatagtaccagtgccccccaaagtctccctcatactgcctattagtcatcacctacacccacaaggctatccctcagcctgacttctaataccatcgattagatttaaatatttttaaatgttatataaattgaatcatacagtgtcaytttgtgtctggattcgtttattcaaaaatatgttcgatggcataatgacagaaatatagaccaacagaatagaatagagagctctgaaataaaccctcacatatatggtcaaatgatcttcgacaaggataccaagaccactcaatggggaaaggacaatgtcttcaacaaatgatgtgagaaaactagatgtccacatgtaaaataatgaggtcagactctgacattattataccatatatgaaaattaactcaaaatggattaaagacctaaatatagagctaaaaccataaaactcctagggaaaaaaacattgaagaaaaccttcatgacattgggcttggcaataatttcttgaatattacactaaaggcataggcaacaaaagcaataatagacctatgggactatatcaaacttaaa

SEQ ID NO: 744407 - DNA, 590 bp, Homo sapiens
aaaacattgaagaaaaccttcatgacattgggcttggcaataatttcttgaatattacactaaaggcataggcaacaaaagcaataatagacctatgggactatatcaaacttaaaaacttctatgcatcaaaggatacaaccaacagagtaaaaatttctccctgcagagtgagagaaggtatgtgtaaattctatatccaataagtggttaatggccagaatatataaagaactacaatgcaacagcaaaataaataaataaataaataaataaataaataaataataacacaaaaartggctcacgctgctagtcccagctacttgggagaaaggctgaggtaggagaatcacttgagcctaggagtttgtgtccaccctaggaaaaatagcaagaccctatctttttaaaattaaaatttttaaaaattaaaaacaaaaaatgggcaaaagactggaatggacatttctccaaaaatgatatgcaaatggataacaagcatatgaaaagatgttcaacatcactaatcattagagaaatgcaaatcaaaaccacaataagatgccacctcacactcattatgatgg

SEQ ID NO: 744408 - DNA, 590 bp, Homo sapiens
aaaacattgaagaaaaccttcatgacattgggcttggcaataatttcttgaatattacactaaaggcataggcaacaaaagcaataatagacctatgggactatatcaaacttaaaaacttctatgcatcaaaggatacaaccaacagagtaaaaatttctccctgcagagtgagagaaggtatgtgtaaattctatatccaataagtggttaatggccagaatatataaagaactacaatgcaacagcaaaataaataaataaataaataaataaataaataaataataacacaaaaaatggctcacgctgctagtcccagctacttgggagraaggctgaggtaggagaatcacttgagcctaggagtttgtgtccaccctaggaaaaatagcaagaccctatctttttaaaattaaaatttttaaaaattaaaaacaaaaaatgggcaaaagactggaatggacatttctccaaaaatgatatgcaaatggataacaagcatatgaaaagatgttcaacatcactaatcattagagaaatgcaaatcaaaaccacaataagatgccacctcacactcattatgatgg

SEQ ID NO: 744409 - DNA, 590 bp, Homo sapiens
aaaacattgaagaaaaccttcatgacattgggcttggcaataatttcttgaatattacactaaaggcataggcaacaaaagcaataatagacctatgggactatatcaaacttaaaaacttctatgcatcaaaggatacaaccaacagagtaaaaatttctccctgcagagtgagagaaggtatgtgtaaattctatatccaataagtggttaatggccagaatatataaagaactacaatgcaacagcaaaataaataaataaataaataaataaataaataaataataacacaaaaaatggctcacgctgctagtcccagctacttgggagaaaggctgaggtaggagaatcacttgagcctaggagtttgtgtccaccctaggaaaaatagcaagaccctatctttttaaaattaaaattttwaaaaattaaaaacaaaaaatgggcaaaagactggaatggacatttctccaaaaatgatatgcaaatggataacaagcatatgaaaagatgttcaacatcactaatcattagagaaatgcaaatcaaaaccacaataagatgccacctcacactcattatgatgg

SEQ ID NO: 744410 - DNA, 628 bp, Homo sapiens
aaacaatagaggctaatacaatatggccaagaattgcaacattttcagaaagatcatactttaaacatttttgtcaggccccaaaggaaaattgtttaatatggtttgggtttcaatttgagatgtcatattgacggactgatatgggtgtgaagcttgggactgagagttattttgttatttactaataaatgagattacttcatcacaagaaaatatcacagcatttctttttaatatttggcttggaaaaaawtggcgagccccagcagatgacaaagcccaatttctcatgtttttgcaaagatattatatatactttttccctttgagacagaaaggaaaccattctaagctgctccctatgtagaatctaagcttctcactgtctctgggtggtgcattttttccctcgcagagtgacatatgagttattagagcaaattggctactcagatgtggtgagattcatgaggtgccctgacccttttgctctgaggacacatcatttcctccccagctccagaatctgcacagaattccgtatgaaatgcactggaaccgatgtagcttctgttataaacagcactacctagtcaccacgctttgtcatctcttgccatttaaa

SEQ ID NO: 744411 - DNA, 479 bp, Homo sapiens
gttaagaggaaagagttgtaagtctaaaataagtaaggtagaaataaactattttacctttattttgatacaacagtatgaattctgatttttttctctccaaagatgtattctctaattctagctactgaaaataccaataagcaaaaatgaagccacagcaatgaatatatctgctgtcttgacagtggtttctaccatttctcagtaatagaactcagcttgttgggagagttgactaattcctagatggggtaggaaatgtataagatgmgaagaagcactttgttgtgctagaaagtaaacaagctcaaagataagtaaggttatgttaaaaagacaagagtcaaactaaagggattcccagacaaaagcgaacattttgaacaccaaaaacagtaatgaatacaatagattgaagcatactgaatatataaaatcgacgaattcatattaatattccaaagagacagatacat

SEQ ID NO: 744412 - DNA, 571 bp, Homo sapiens
aagtcatccaatttgtcattttagtcttagaaatttctctttactgttgagccctgtctctatctcacctctcagttcagacagtttacatctctgatctggacaaccacaaaaatcgtgtccctgccactagcctctccccagaataatgtaacacycatagtgctaacaaaattaatttttcttcttattatttttttggagatggagtcacactctgccgctcaggctggagtgtagtggcgcaatctcggctcactgcaacctccgcctccagggctcaagcaattctcctgcctcagcctcccgagcagctgggattataggattatagcgtgccaccatgcccggctaatttttgtattttagtagagacaaggtttcaccatgttggccaggctggtctcgaactcctgacctcaggtgatccgccctcctcggcctcccaaagtgctcagattgcaggtgtgtgccactgggcccggccaacaaaattaatttttctaaagggtacacctatctatactaacactcttggctcaccaatgtgcatataatattaggaattctt

SEQ ID NO: 744413 - DNA, 624 bp, Homo sapiens
aagcactaagattaaaaatacatattgttaaattttctattattatcttacaccaatggattgttttctatagccctggaatgttgttcactcactctagatagtatgaatcaagaagagttgttctcaaccttatctgtatattggaatcaccaggctgcctttcaaaacaattatttctgaatctaggtgtgagacctggacattgaaatttttctgtctccccaggggatttcagtgtgcagtcaaggataagaaccacttaaagggattagaggaatgattttaacccctgagcacagagaaaataarggagaggagtggtatgttatgttagaatcacatgggaaactgtcaaactacacccactgcttcacttttctgaagcttttatatacccacttggggttagagtttgtgctttgaggctacctagatagaattaaatgttagagttaatctagatgaagaagttggctagcatctaatttaacatgtgaaattggagtcggagagaaggtgactaatttgagagaaaattgtgtgataaatctgactatttggatatgggactgatagagcaggagaattacagattgactctagggtgttctggcttactta

SEQ ID NO: 744414 - DNA, 604 bp, Homo sapiens
tggtggaaacaaggtatttaactttggttatggaaaattcaccgtggcagtgaattagcattgagtgaggaacaacttaggtagtttgggactattcagacttggatgagatacatctttaaaacatatgcagctgggcacagtggctcacgcctgtaaccccagcactttaggaggctgaggcgggcggatcacctgaagtcacgagttcgagaccagcctggccaaggcggtgaaaccccatctctattaaaaatacaaaaattagtggggcatggtggtgggtgcctgtaatcccagctactcagggggctgaggcaggagaatcgcttgaacccgggarggggaggttgcagtgagccgagatcatgtcacagcactacagcctagatgacagagcgagcctccgtctcaaaaaaaaaaaaaaaaaaaagcatatattgatatagtattaatacatctattattgggtttgatattaattacctgctttcagtgttctctagcacattctaataacctaccttttaaaacaatttaatagcacccagtgccccaccccaaggtgtaactgtatccaagaatgatggaaacggaactgcaa

SEQ ID NO: 744415 - DNA, 596 bp, Homo sapiens
gcaaatgaatggggtaacctcaaaactaagtcactggctaggaaggctcctcccaacagctctattatatgagagtcccattcaagcttttagggaaaaacttgctgtctctatcatagccataggctaaaatttgatttttgcactcatgttaccactaaagaacttatccatataactaaaaacatcctgttctccaaaaactatgaaaatattttttttwaaaaaaaccaatgattatatatagaaataaaacttttaaacaaaaatagctcctggtttgtttcaagcaacacaagaaactgtaagaaaataagttgcttgatgcatctgttgaacgtttatatgagatgtggaggaaaacagtttatattgagaaaatagttgatagtcaaatatttgcccaattttattaaatttcaatattaatttatgaacattgaaataagttaacactgtgatgactctatatattgttgttgtttacctatttttatgactgaagattatttagttctgttttttggaagataaattgggaaaatgactatgtataattttatttatttaagattgaaaccatgggggctttaggg

SEQ ID NO: 744416 - DNA, 599 bp, Homo sapiens
aaatgtaaattgtctaaatacactatgtaaaagaaatagattggcaaagcagattttaaaacataatccaaaaatctgctgtatataagaaactgacttcaaatatgatatacataggttgaaagaaaaaggataaaaatatttattattcaaacattaattttaaaaggcaagagtggttatgtaaatatcagataaagtaaacttaagagcaaaaaaaattaccagagacagagagasacattacataatgatgaaaggatcaatccaccaagaagatatggcaatcccaaatgtatatataccaaacaaaaaagctgcaaaatatgtataattaaaactgagaaatgaaaggagagatagacaaatccacaattatacttacagacttcaacactcctttctcaacaactgatataacaatttataaaaaatcaatgaggatatagataagcacagcaacaccatcagcccaaagaatctaatcaatacttatggaacacttcatctagtaacagcagaatacacattcttttcaagtgcccacagaacatgtaccaaaatagaccatatcctgagccatagaccaaatgtcaaca

SEQ ID NO: 744417 - DNA, 619 bp, Homo sapiens
agtcagggtttctcaacagcacactattgagatgttgagtgggttaatttcttgttgttgggggttgtcttttgcaatgtaggatattttgcagcatccttggcatgttcccactagacaacagtagtaccccactccctagtttatgaaatcaaaaatgtctccakacattgccaactggcccctgggaggcaacagtcccttgctgagaaccactgcagtagagaatagaatagtaatacaatgtaaaactttgactatcaaaatggatgttagtatcaaactactatggtatttaattccatctgataatatttaaaacagtgatagttactgtaaaatgacattttacaatgcactggaaattacattatttgccattacttaaaataatggtcaagaactttaaatgatccactggttgaaagcatcctgtagtttataggaaaggtgagtaatgcacattaaccttcacttagagtttttttttttggaaacggagtttttgctctgtcgccaaggctggagtgcagtggcgccatctcggctcactgcagcctccgcttcctgggttcaagcaattctccagcctcagcctcccgagtaggtgggactacag

SEQ ID NO: 744418 - DNA, 619 bp, Homo sapiens
agtcagggtttctcaacagcacactattgagatgttgagtgggttaatttcttgttgttgggggttgtcttttgcaatgtaggatattttgcagcatccttggcatgttcccactagacaacagtagtaccccactccctagtttatgaaatcaaaaatgtctccagacattgccaactggcccctgggaggcaacagtcccttgctgagaaccactgcagtagagaatagaatagtaatacaatgtaaaactttgactatcaaaatggatgttagtatcaaactactatggtatttaattccatctgataayatttaaaacagtgatagttactgtaaaatgacattttacaatgcactggaaattacattatttgccattacttaaaataatggtcaagaactttaaatgatccactggttgaaagcatcctgtagtttataggaaaggtgagtaatgcacattaaccttcacttagagtttttttttttggaaacggagtttttgctctgtcgccaaggctggagtgcagtggcgccatctcggctcactgcagcctccgcttcctgggttcaagcaattctccagcctcagcctcccgagtaggtgggactacag

SEQ ID NO: 744419 - DNA, 610 bp, Homo sapiens
gatcctcctatgcttcctctctctaccaggtaccttattatatgctcagggtgtcctgtttcgggaaacttccacttacatattgactaataagggttaattcctctgtctttaatacacttgacatgtctctttggtatcttaatctatagattctctcttctctcactatttttcctttttctcttcttttccttgaattttattttcgaagaaactggattttttgactaggtaggtgtatttctataaacgacaagtgattttgcttcagagatctaggcaggtttttcctcccaaggagcaatgtgacattcagaatctggaatcttaaatgtgacttaatgtttagagataggatttttaaatagtgtttggcaagtctcaactcactaaaatgtatttaacctgtatcctttaattgtagcttagaaatcaaaccaaatgtaaaacaccttgcaggatgtakcttggcagagaaatgtatacaatagaaataacttcagtggtaaacaaggttgctgtatagctgtatatttttcttcattctgctctgttggttcacaagccattagaatacttgttcacattggtagttactattcttcct

SEQ ID NO: 744420 - DNA, 605 bp, Homo sapiens
taataagtcccacaatagaacattattctgcaatgagaatgaaaagatccacaatcagcacaatacagaggaatctcacaaatgtaaggctgagagaaagaagccaggcacaaaagaatacatactgattgattctatctrcataaaagacaaaaccaggcaaagctagtgaatgatattagaagtcaggatagttgttgttctgggagtaataaagtgacaaggaggtgcttttagagcgctggtactgctctgtttcttacaggtgctggctacagggccattgttcagttaaagttaagtttattgaactgtatacttatgctttatgcaatttatgtacatatgttatagtatttctgtaacttttttttttaaaggcaaatgggcatttttcaagagacagggaactaatactcatcatttagatagaaattccctgctttcatcttttgttaggaaaaataagaattttggaagtgctcctcttttgtaaaatcttaatcaagtaatgaacgaaaatagtcaatacaacaggaaaagagaggaacagaagcctcaaaagatgaattcctatcaagcagtaaacagttcttttccagaac

SEQ ID NO: 744421 - DNA, 593 bp, Homo sapiens
cttacaaacttcaccatgaagtttctgcagtgacagctttaccagacatctccgtgtgggattttaaaacaaacacaaggctgtttggaaatacttggtatatataaatatgcaaaatatgctgaacagcgctaacagctgtagggtgaactccctcatccttgagcagaatattttggtggcagtgtggttattttttccatctttgcttttaattcccgcccccccccccgctcttttctccacccactcacccatctacaatccactccaaaagcacaaatttaacacccttccccctacttccacactgcttccaagaaaatcattttagtagattcccactggaaaaggtgggtggtggcttgatggaatgtttytgagttacacgatgttgtaaagcctgagcttcggggaacttgcttggacttgatctgacatcaggctcacacacagcccagacactctgcaggccagattccattaaggcttatcattgcaagaagaggaaaagtcctgttgtgagtggccctccagccatgatgattccaaagatggcaaaataatcattttaagtgtgtgctatcaggttc

SEQ ID NO: 744422 - DNA, 593 bp, Homo sapiens
cttttatattcaaatattcatttaagtcttagaagtaagctctgaatatctgtttggtgagaatatttctcataataattatgatggctcatctatgtaagcttaaaaatatagattttcaaaaactatggtgtttcaatacagcattatactcttgatctcaaatatttcctaattgaatgtctgtatagataggcagcaagataggatatttgattttaccttcttgaatataatagtttmaattacttgaagcatatctaatattaaaggacacttacttgccacccccacatcaccatgccattcatctttctggcaaatgtcaatgaattttaatagtaggaggtaaagaaagatagtcttttttttttaaatgttaagggtttaggatgaaacaaataaatgtttaagtaaaaaatgcattttttaactgtggcaactatatatgcgaagcataggaaattttttttagtgaaacacagaatggatgaatttctcatttgcaatatgctaatgttatgtaagacacatccaaatagttatctagcaaaaatgtgtacgctgtgatttttgtaagtttaaattaacaa

SEQ ID NO: 744423 - DNA, 593 bp, Homo sapiens
cttttatattcaaatattcatttaagtcttagaagtaagctctgaatatctgtttggtgagaatatttctcataataattatgatggctcatctatgtaagcttaaaaatatagattttcaaaaactatggtgtttcaatacagcattatactcttgatctcaaatatttcctaattgaatgtctgtatagataggcagcaagataggatatttgattttaccttcttgaatataatagtttaaattacttgaagcatatctaatattaaaggacacttacttgccacccccacatcaccatgycattcatctttctggcaaatgtcaatgaattttaatagtaggaggtaaagaaagatagtcttttttttttaaatgttaagggtttaggatgaaacaaataaatgtttaagtaaaaaatgcattttttaactgtggcaactatatatgcgaagcataggaaattttttttagtgaaacacagaatggatgaatttctcatttgcaatatgctaatgttatgtaagacacatccaaatagttatctagcaaaaatgtgtacgctgtgatttttgtaagtttaaattaacaa

SEQ ID NO: 744424 - DNA, 618 bp, Homo sapiens
ttgatgaaaaaagggcttgatttttcctcagcagggcctgaacccagcttgattaaagaactcagtggctcatttaaaggaagctctcttcattttgccttgtatttcatccaaaccacatgctgggagggtatcattgattttcttgagaaacaggggaaatatgtatgcagaaaaatgctaatgtcagagaagcagaaaaactggctcaaaatatagttatcatgaaactgactctctatagactttaatatttggaaaagtaccactcatgttttttttttttttttccgacctgaaactttctttatggtaggcaattttmtgcattttataatacacattaacaaacatggttgaaactttaaaacaacagaacaaaacaaaacccaaaagaaacatttctgcagcagtccaaacaccctagactacaacaaactttaactctgaccacatgcaaagcatgttgcctagaaacccagagcaaagatgttgcccagcaactttagatcccaccagctgccctggtgacgaaactgatgttggtcaccacaacattaaaaatatgtataaattgaagtcatctgaagaggataataaaagtaacataagcaggtc

SEQ ID NO: 744425 - DNA, 615 bp, Homo sapiens
aacaaatgaaagataaagacagaaggaagggcccaggcatcatggactttttgagtaacagtcaacaaatatttattgagggtgtacagcatgccagatactgttccatgggtagagcaggtctataatgctgaagtccaagcaggtagataatgtaataatccaaaaataaatataaaagtacaacaatactacatactctgaaggaggggtagataaatcatgctataaaggcatgatcaaaataaaaagtttgratctgcacagagaggtcagaggtttctctgtggaagtaataagagaattaagaactgaaggaaaagaaggggttaactatagaacgacaaagaatcacattctaaggaaagcaaataacaagcactaagatcctgtggttggagagaatatggtattcagtagagccacaagatggtacctgtggctagaatgctagagagagagtagaacagataatacctctgtagattcttcaagatttttagtatttttttccctaaatgcccagtgaaataatttaagtagggtagagagaagggatgaaggatatgtgtcgttgaaaggtcattcttgcagctttgcagagagtggcttgaa

SEQ ID NO: 744426 - DNA, 615 bp, Homo sapiens
aacaaatgaaagataaagacagaaggaagggcccaggcatcatggactttttgagtaacagtcaacaaatatttattgagggtgtacagcatgccagatactgttccatgggtagagcaggtctataatgctgaagtccaagcaggtagataatgtaataatccaaaaataaatataaaagtacaacaatactacatactctgaaggaggggtagataaatcatgctataaaggcatgatcaaaataaaaagtttggatctgcacagagaggtcagaggtttctctgtggaagtaataagagaattaagaacygaaggaaaagaaggggttaactatagaacgacaaagaatcacattctaaggaaagcaaataacaagcactaagatcctgtggttggagagaatatggtattcagtagagccacaagatggtacctgtggctagaatgctagagagagagtagaacagataatacctctgtagattcttcaagatttttagtatttttttccctaaatgcccagtgaaataatttaagtagggtagagagaagggatgaaggatatgtgtcgttgaaaggtcattcttgcagctttgcagagagtggcttgaa

SEQ ID NO: 744427 - DNA, 651 bp, Homo sapiens
aaggtcattcttgcagctttgcagagagtggcttgaaggggtcaatggtaactcaaggaaatcagtagaaagaatttcttggaaagaatggaatttaagatatatgtgttggaggatttcaaatgatggaaagaaatagggttcaaaagagactgaaatayatgctgcaaatcctgaaacaaggagtatacctgtacagtttgaagagtgttaattcaatagagaaatggaagatgcttgcaatggtagaagtggcagggaaggcagttcagaaaccaactgaaggaccttgttaacaaaggtgagatggtcagattaatcctataaatcatgagtggttactaatgatttttagtagaaacataatataaggcaaatattgttttttaagttcaatctaatgtcacaaatacatagtccaagctaggggattatagattcaaaattgtgaaactaattaaacatttactacagtacaattagtgtgtggaggtaaaggtgtgatttacaaatttagttttgtaaagaatggcagtagaaagaaaatccaatgaaaataagaatgaaaggagcaaagaagaggttagaaaacaaaaaaaaaaaacaaatcatagatcaagttaaaggggataaagaaagaagtccaaggaa

SEQ ID NO: 744428 - DNA, 669 bp, Homo sapiens
gggatgaaggatatgtgtcgttgaaaggtcattcttgcagctttgcagagagtggcttgaaggggtcaatggtaactcaaggaaatcagtagaaagaatttcttggaaagaatggaatttaagatatatgtgttggaggatttcaaatgatggaaagaaatagggttcaaaagagactgaaatatatgctgcaaatcctgaaacaaggagtataccygtacagtttgaagagtgttaattcaatagagaaatggaagatgcttgcaatggtagaagtggcagggaaggcagttcagaaaccaactgaaggaccttgttaacaaaggtgagatggtcagattaatcctataaatcatgagtggttactaatgatttttagtagaaacataatataaggcaaatattgttttttaagttcaatctaatgtcacaaatacatagtccaagctaggggattatagattcaaaattgtgaaactaattaaacatttactacagtacaattagtgtgtggaggtaaaggtgtgatttacaaatttagttttgtaaagaatggcagtagaaagaaaatccaatgaaaataagaatgaaaggagcaaagaagaggttagaaaacaaaaaaaaaaaacaaatcatagatcaagttaaaggggataaagaaagaagtcc

SEQ ID NO: 744429 - DNA, 580 bp, Homo sapiens
catcagataggccacagtgaccgtcactgagcggctgatgcctgccaggcagtgcaccaggacaccacacttcttggagcgggcttcgtctgaaacacattggcatgggtcagggaggtgcctccttcaaggagccttcccacatgggtgggcaggtggggctggggcacagagggcagcatggtggctggctggtcttgcccgacccytgagggacctggccaagcccagtgtgggtagggcagcaacttggaatagaggtcaacagcactgctgtggagagggctctgcacactttagccccaaggcactggacacccgtgtctgtttcctcatctataaaatgggcctatttatgcacagtggtctcataaggacctgagccaagtgaggggtcaacaaacatgaactactgtaatgcctgtgatcatggctagtcctaccactgccatgtgcgttaacgactgctgtcacgggtgtcacctgcatcctcttgggtcatctgcaccatggccagtaagcccattttatcaacgaggaaacagacacagagacaaagtggcaagcccaaggccacaca

SEQ ID NO: 744430 - DNA, 563 bp, Homo sapiens
tacgctacaataatggtacattttagaggtgggattatgggatttattattattattatttttgagacagagtcttactctgtcacccaggctgtagtgcagtggcgcaatctcaggtcactgcaacctccacctcctgggttcaagtgattctcctgcctcagcctccagagtagctgggattacaggcacacaccaccatgtctggctaatttttgcatttctagtagagatggggtttcactatgttggccaggatggtctcaatctcatgaccttgtgatccgcctgcctcagcctcccaaagtgctgggattacagcgtgagccaccgcrcccagccgggattatgggattatgagtgatttttattatactgtatgttatatggtttctaaactaagtatataatacctttaaaatcaactagttttattaaatactacaggtgtgtgtttacaaaattcagtatgggatgaacagtaatccagacatctcgtacctctttacagaaacaacactattaacaatttcttgtgtatccttccagatattctatgatat

SEQ ID NO: 744431 - DNA, 582 bp, Homo sapiens
  misc_feature 453: n = A,T,C or G
attttacctctctggatcctgttgatatttctagaccattccacctagtggggccatttcctacctgagtcacccgtggtgtcaaatagaatgtcatgtggcctcctgagttgggtagaattggctgctcatctcaaccccgctactgactatctctgtgatttacccttcctccagccttagccttgctacatataaaatcaagacaataatrtttcctatctcacagggttgtcctgaggattaaattaagtaattaatataaaatgtgccttgtacatattgggccctaaataaacagtagctactatttatccttaaagtacaaatggtagtttcagagcttcaaggctgatggctatttatcttactcatactctttgtttagcttcatttttttcccctaatttcattagattttcttttctatttttttttttttttttttttttnttttttgaggtgaagtctcactctgttgcccaggctggagtgcaatggagcgatcttggctcaccccaacctctgtctcctgggttcaaacagttctcctgcctcagcctcccgagtagctgggattac

SEQ ID NO: 744432 - DNA, 607 bp, Homo sapiens
aaacatgcaaaccacctaagcatggaagaagcttcctgagctgatccctgcaaactcacacaagtttccttccttctccacctcacttcccctcacgctccacacatcctgaaacctatgtgctggtacatgcccaggcatcttccactgtcccaggcacactccacgtgtgctatgtctttaccgtctgtcttctctcttgttcagagcaccttgaaagtggaggccaaatcctatttttccttgttccctagcacttagcacacagtaggcattgttgctgggcattytgaagagcttgaaattcaccttatagatacaaaagccctcaggctacaaatattgttgttatttataattgagtacccaccaaaattattaggaaccatgaagagagaagttttcctgaaaattcacccccaatgcaaaatggtttttccttccctcatctcttgctgccaggataatgtttctaaatcctgcattcctcctgtgaccctcccattcaagaatccactttggcccactgcctccagtctctgctcctctgccaagcccaccacaatgcaaaagcagcagctgctggcgctcacattttcagaactct

SEQ ID NO: 744433 - DNA, 506 bp, Homo sapiens
ggagagccgtgaagtggtatgggaaatttcctaaagaacgctgataatattctcatcttgaaacaagaagtggaaaaacacactaaatatattttagtatacaacgtgtttagcttcaaaaagttgctaacagatgaaacttagtgttcatatgtaaaaaagagagagattgaactaaaaattagttagactctatagctctctgaactagtcttaggagaaaatcaaccaaaaataaataccagaataatamctgcagaaaatttgctggaggtagggttgtgaattttttttaacattttgccatatttactttttttcttttaaaatatttttaattgatacttaatatttgtacatatgtatgaggcaaagtgtgatgttttgaaacatgtatacattgtgtaataatccaatcagggtatgtagcatatccatcacctctgacacttatcatttctttgcaatgagaacatgcaaaattgtctcttacagctattttaaaa

SEQ ID NO: 744434 - DNA, 639 bp, Homo sapiens
aatctaatgaaatcagtgagaactttgatcagacacaaatgataatggcctcatacaaaagatgacattcaaagtttttatgcccattagaataacagtatagaaaaacaacatatgttttagaaaagttcttaaactatcttggcacataaaggcagaaactaaattaatagtgtttattaccattttgattaagctttcatcatgtactatggcrgcaaatcctgcaaaatcaaaatcaattaagtagtttaatgaaaattttggaattgacacactctcattccccacccaactattgtcatcaacagcagagaaattgtattttaaatcatttagttttttataaatggcatttacacttgctactattacacttcacaaatattagttaagtgtcatatgaaagaggtgtaaaaaagcatagtttgtgtaatacaaataacaaatgcctggaaatttgaaagttgcattctagacaatgatatatgtgactctggttatgcatacctctgggcatcaaatttgttattggtttcttttttacctttgtcaattgagcaaaatgacaagacaaatctcaatcattttaggagatttatttgcaaaagttaatgatgtgtgcttgggagacaggtc

SEQ ID NO: 744435 - DNA, 639 bp, Homo sapiens
aatctaatgaaatcagtgagaactttgatcagacacaaatgataatggcctcatacaaaagatgacattcaaagtttttatgcccattagaataacagtatagaaaaacaacatatgttttagaaaagttcttaaactatcttggcacataaaggcagaaactaaattaatagtgtttattaccattttgattaagctttcatcatgtactatggcagcaaatcctgcaaaatcaaaatcaattaagtagtttaatgaaaattttggaattgacacactctcattccccacccaactattgtcatcaacagcagagaaattgtattttaaatcatttagttttttataaatggcatttacacttgctactattacacttcrcaaatattagttaagtgtcatatgaaagaggtgtaaaaaagcatagtttgtgtaatacaaataacaaatgcctggaaatttgaaagttgcattctagacaatgatatatgtgactctggttatgcatacctctgggcatcaaatttgttattggtttcttttttacctttgtcaattgagcaaaatgacaagacaaatctcaatcattttaggagatttatttgcaaaagttaatgatgtgtgcttgggagacaggtc

SEQ ID NO: 744436 - DNA, 614 bp, Homo sapiens
attatttttattggtcagtacttcaaatatttggctaggataaactattctccaattactatttaaagtatgttaaaagaagttcaggttttatggaaaaaataatttgtagaaactccatcaagtaactaatatatatgcattgctgtaagatggtaattcattcacatttgttttaattttcttctacttcctgcctgctacttaatcacataaatgtcagtgcttctgaaatatttagactatgktctagaggttattagtcgtgcatcacataatgacattttggtcaacaataccttatttttactacaccttttctaagtttagatatgcttacacatgcaaatacttaccattgtgttacagtcccccacagtattgagtagataacatgctgtacaggtttgtagcccaggagcaataggctatgccatatggcctaggtctgtaataggctataccatgttggtttgtgtaagtacactataggatgtttgcacaatgatgaaatcacctaatgatgcatttttcaaaatatatgcctgttgttaagcaatgcatggctgtgtatgcatctagtaggcataaaatgactactgatcccctgtatt

SEQ ID NO: 744437 - DNA, 597 bp, Homo sapiens
tgagctcacctgattcttccacctcagccttccaagtagctgaaactacaggcacgtgtccctgtgccctggtcttttttgtaataaaagaatttattcaaaagcatgctttaaaaaaggttaaagttttcagttttataagggtggggtatgagtatttaggaatctgcaagttttatttaaatttatagttgagtattatccattctcttgtaacacaaactctgtgggataatgataaaattttattgatatttatttaatgagagacatgaatgtgtacaataatccctgagatcatggctgtcagtttctgctaaaccacagcctttttagtcaagcaattggctgagtttttctgtatttcactgtcagaaaccttcattyatgttaggtaaagatgatagacctaaatggaaaattaacactttccacttgtcataattcttaatgatagatcctaaagatcacagagcgggacactgaagggacaagcaatgtccatgttctctgggccccaagagctctgtgtgttttgcttctctccattcttgacctcactttcacaagccagtgcttgctcctcagtttttctga

SEQ ID NO: 744438 - DNA, 447 bp, Homo sapiens
tctacttcaatacatcaagaacctaaattttttttaactgtaactgcttgacttgttttaatttagtcgtctttttgccatttattatattaatgataggtatcaaggtgccttctataacatgcaaatatgttattaatttattccaaaatagggattattggttttacctgctgtgcagtaaagtcctaactcagcaggcttagcgtattcaaattctgcatgttcsaaagaaaggcctggcctttgatccactcttgcgagatgataacttctaagttcttaaaatgataagtgtgtttgcatacctgtagtcttggaacataccaggtagtttatgataacaatgcacttcatggtggaaaatttgggatacactgtatcagtttggtctctggagggactgaagggtgaagacccagtaaataggatcagtagtaacacagg

SEQ ID NO: 744439 - DNA, 562 bp, Homo sapiens
ggcactctaagtcaaggtacgttgtgactcttgctgacgctcagatacacagctatggtaaatttggggaaaataagagcaaatttcatggttcccaggtaaaatccctcattctcttccagttctttccccctaggataagaaatttttcttctggctaggctgcctggagttgggacagggctgatgtggctcccagagttggcacggcactggctcacccacaaagctgagaacctccctgaccaacatagtaccaggcaggattcacccaagacctgtggctgctactgcctggcttttgctaatgtttattcaaggtccaaggctactttagtcagcaggtggtgaatcctgttaggactctgttacaccagggcagcagattcctttctggcatggtgtgggcctagaattcccaytggggagcagaggtctaaaactggaggcctcaggattcttcctggttctttatttttctgtctgagctggtatctggttgcaagacaaagtccattgtactcttccctctcctttccccagatagaagtttctttgcacc

SEQ ID NO: 744440 - DNA, 601 bp, Homo sapiens
agttggtctgaataggctgcattttatatgattccagttgtatgacattctgaaaaaggcaaaatattgaaggtagtaaagagataaatggttgccagaaattaagggggagggaaggaccaataggcagagcacagaggatttttaaggtggtgaaactactctggtatgatactcgatatagttgggatatgtgtccccatccacatctcatgttaaatcgcaatcctcagtattggaggtggagcctgccaggaggtgattggatcatgggggtagacttctcatgaatggtccawcaccatcctcttggtgctctctttgtgatagcgagtgagttcttgagagatctggttgtttaagtgtgtagtacctccacttttctctcctgttcctgcttttgtcatgtgatgtgcctgctcccccttcaccttctgccatgattgtaatactacatgtggcattcaattgcatcaaagtctttagcacagggtatgttaagaatagtgagaaattgcttcttttctagacatatgaatcgaataagtaaacatgtagaggttgcaaaataataagctatattttgagtggaactaacaat

SEQ ID NO: 744441 - DNA, 673 bp, Homo sapiens
aaattagcattgagacccttggatccattgcctagatcattcagcagaggacattttggagttctttctattaattaggtctcagtaatactaagataattaaaaggggacatagagcttggttttatgttaggaagatagctcaacaagcatcctagttaaagggcttatcttcatgagtaggtgacaccacagacatggtgcttacttcagaattagctctattattttcagaacattgcttaayatgttggttgagtccggcagacaaattaacatattcttgtgcataaaaattagaacaaatttggtatggccagtggaaactatggagtccaattgctttttaatctaattttgatttaagtaaatgcagttatacagaggttgcaaggaacagaattgtttttattttattctattaagtcatggtataacatgtatttaaaagattatctgtcttaccaaatgtacaatttttgtacaattattggccttggaagtagagatgacagaattccactccctatttcactctcagttttccacatgtgaggctacggttatcttaactgtacatcttaaatggaaaaattcttgagagaaaaaatgtttttccctgcatattcctaaccatgaataatgttgcaaacttaattggtgttaaaactaa

SEQ ID NO: 744442 - DNA, 609 bp, Homo sapiens
aacccaaacatcccaggacatacctcaaaacatatcaaggaaaacagtttcattgtgcacacatgtaggcaaacagccagcatataagcttaaaagcagtttagagataagaggcagggtgactctagagctgcccagaaatgtccagtaggtaagtcctagtaaactcatctattcatcaagctggtcttgcccaaattattctttggtctctcaatgccttcccaatttacagtcccaagttttccttctaacaaccgccacattcatgattcgaatccaggccaatgacaggagggaatattaaaatatcyaactattacaccatcagaacactaaggacatcttgaaaagatggaatatttttccacctgagaaatagttattcttaacaaacctgttcacgtgcttctttagtaactgccataatgtgaaatctattacatctcttccccctgaatatatttttcctaaaaaaaagaacattttaatgaatataaactgtcaacaaaattatgagaaaaaaatttaagtgaaatattctatgtaaaaattcaaaataattccactgacgtacatcaaacatcttagctaaattgccacattttt

SEQ ID NO: 744443 - DNA, 419 bp, Homo sapiens
tcaaatctccactcaaagatctcctcaacggaggctctagtaccatgtggcacatttcttataaaagtcatagctagaaaagacgctgtcttgcctcaaattgttaaacgtaacagcaaaacaggtttcctcttttctgtgatttaacgcaaaaacaaacaaaaactcctggctaaattctgtgacccgcagcatcatttatctttaggttctcctttaattcttattatttaactcttgatcttttacattcctttacagctttatggtttgycttcattgcacacctacaaaaagtgatttctaggttagctgagtatataaccaatactttaacccacagcaatcagcgcctttgcacacagccactccaaaaaaaaattttgatgaatatacaaatgagtgaataatgaattgtg

SEQ ID NO: 744444 - DNA, 621 bp, Homo sapiens
gtaactttaagggcacacaagaaggcttctgactttattcaggatttatactcctgcagtggtttgtgaactctaaaaatatcgcatccaagctccaaaattttatcaataacaccttaggattttatcaatttgaacacaaaatatttaaagcatatgarggcagactgtattcctaatgtagcatagaaaaagatgagactaggttatcaataactcagtgagcccagcctattgtagaaatgattataaccatactgactgaaagttcgaaaatgtgctgcattcaaataagatattttaatatgcaaaatagaagggtaaaatttatagttatagagacctctaacaggaaatacaaaatgttgcagcagaatagtttaaagtctgttctcagctggatctcccttgaaactaatgccgcagaaaattaaagagagctacaggtctgtcacagaggacatgtgattctaaagaactatctcagctcatcctttaagcttttggatggttaccataatgctggaagctatgcttggctcacaaataaccaaacgataaacaacttcttctcagcagccaactggtcaagtgtattttgtggtttaaaataatcttctt

SEQ ID NO: 744445 - DNA, 560 bp, Homo sapiens
atgcacagcgggacatggaagttcattagtgattctagtttcgccctgaccttgtgacctcgccctgacctcctgccttgcgatcttttgttgcccttaaagcatgtgatctctgtgacccacaccctattcctacactccctcccctttgaaaattgctaataaaaacttgctggctttaccgctcagggggcatcacggaacctgccgacatgtgatgtctcccccagctttaaaatttctctcttttgtactctttctctttatttctcagactggctgacacttagggaaaatataaaagaaactacgttgaattatcggggacaggttcccccgatatgtggaggcsatgaaggggtagggggaagtggcaactacatagcacagacacaaagacacaaacacaccatatcaccatgtagaggaatgggggagctggacaatgaagtggaatatgtgatggcaatgggcaaatgctacctgagagagaaggccggtagaccaaggctcttgcaaggtgagcaactcccaaaaaacgacatcatcccacaacaaac

SEQ ID NO: 744446 - DNA, 648 bp, Homo sapiens
agcagtgaacagacattttgtgtatctcctagaaatttttatgcctatattgtagatgataccacactcatcattctgtccctactacttttctttaactgtatactttggagagcattcattattatcatgtgaagattgatctacttcattgtgtttaacagatgcacactgaatggatataccatggttatttcaatattctcttgctgttggtcattttgtttgtttcctgattttatctgttaaaacaacgctgcaatgaacaaaggaataactttctarccgtgttacttaaaaaatggaataaattttcttaaaaagttggggaaaattacttaatcttctacaagtgatcagagccagagaagttctagtgaggagggccagagaagaaattctagctcagcaattgcttcaagtaacatcattgttagcatcctctgagtcacatagaaatcattcccaaatgttcatctatgcctgatcttcaagggtgttatcatagctgtatctataagcttaaaaatcccacagctatttgtaacagtatatggaggtttcaaaagcttgtggggtgtgtgtgtgtgtgtgtgtgtgtgtgtgtgtgtgtgtgtgtgtgtgtggctgtctctttttctctttctg

SEQ ID NO: 744447 - DNA, 527 bp, Homo sapiens
ggccaggtacaagagagacgaagaatgtgcactagcttttaacgatgccctgagtcacacagtcacatccatatataatccactgatccagactagttacatgtttctaatataattgcaaagcaggctgggaaatgcagaggaacaaatggatattgccatgagatttgcctctaccaaaataaactatgcataaaacaaatatttggattcttaggtgttctctcttaagagtttttatatttgggggaaasacattaccaaaattttgatggcaaacctagtgtaatggacattattatttaatctgttcaacaatactgtcttccttcccttgcattttttggtaaaacaaagtaagaatattagtctaacaatcgtttttgtaagaaagcttcttgtgctgtctgcagccatagggattaagccactccagtatgaggaaaataaaaaacaaagttaaagaaatgtcaagagatggaaacactgccaacagcatctaaagctgtatttccagtcattcctgg

SEQ ID NO: 744448 - DNA, 527 bp, Homo sapiens
ggccaggtacaagagagacgaagaatgtgcactagcttttaacgatgccctgagtcacacagtcacatccatatataatccactgatccagactagttacatgtttctaatataattgcaaagcaggctgggaaatgcagaggaacaaatggatattgccatgagatttgcctctaccaaaataaactatgcataaaacaaatatttggattcttaggtgttctctcttaagagtttttatatttgggggaaacacattaccaaaattttgatggcaaacctagtgtaatggacattattatttaatctgytcaacaatactgtcttccttcccttgcattttttggtaaaacaaagtaagaatattagtctaacaatcgtttttgtaagaaagcttcttgtgctgtctgcagccatagggattaagccactccagtatgaggaaaataaaaaacaaagttaaagaaatgtcaagagatggaaacactgccaacagcatctaaagctgtatttccagtcattcctgg

SEQ ID NO: 744449 - DNA, 654 bp, Homo sapiens
catgatcatagtacactatagccttgaaatcctggcctcaaaggatcctgctgtctcagccaccaaagtagctagaactacaggctcaggccactttgcttcactttattttttaaattgacatgtaattagtatacatattcattgggtacacagtgatgtttccacacatataatgtgtactgattaggccatggtaattagcatattcataatctcagacatttatcatttctttgtgttgggaacattcaatattctccttctagctatttgaaactatataatacaatattgctaactataatcaccttccagtgctatagaagcctagaattaaccctgcctggggcccactcacagtcttccttctgttcacttgattggattctttgctccaaccccttttgtattttaatttgacatggatttcttttatttccaactcaaaatacccaattgccttatkaatttatttaacaaatatttattgagcactcacaatgaattagataatattctacttgctgaggatacagtagcacacaaaatagaatgactgttgctagggaatttacagtaaagcaagattttttaaaaatagtcacaaatccacagtttataccatatgaagtgatgccagcctattcctca

SEQ ID NO: 744450 - DNA, 600 bp, Homo sapiens
tgtctcagacaaaaattctctagctttagagtacagatgctgaccatcctataatttctgtactacttattaagctgtcaatttgattagtaatgagaatttccagctggacttaaataacaataccttttaattttatgaatatgaactagtatagcagctccacaatttcctcagatgccctcccttatccttgccaggtttctctcccatatcccttaggtaaacccttatccttttagtccaagatggctgccataactctaagtaccatgttgttattccaggtctcaaatggcttgcctctttcctttaagtagactttcccaaaagtcacacayagtatattaatttataactcataggccaaaattttgtcccatggatgggcattggttgcaatggataaggggatgtgtagacttttacatcgacaatatgcccagctaaagctacaagttattattaaggagaaaaagaagaatgaatagtagtagacagctagcacatgtgacagatatttgtatgaatctttacacttataaaaataatacattaattatcacatgtgaagaagaaaaagtacatattaccttcact

SEQ ID NO: 744451 - DNA, 600 bp, Homo sapiens
tgtctcagacaaaaattctctagctttagagtacagatgctgaccatcctataatttctgtactacttattaagctgtcaatttgattagtaatgagaatttccagctggacttaaataacaataccttttaattttatgaatatgaactagtatagcagctccacaatttcctcagatgccctcccttatccttgccaggtttctctcccatatcccttaggtaaacccttatccttttagtccaagatggctgccataactctaagtaccatgttgttattccaggtctcaaatggcttgcctctttcctttaagtagactttcccaaaagtcacacatagtatattaatttataactcataggccaaaattttgtcccatggatgggcattggttgcaatggataaggggatgtgtagacttttacatcgacaatatgcccagctaaarctacaagttattattaaggagaaaaagaagaatgaatagtagtagacagctagcacatgtgacagatatttgtatgaatctttacacttataaaaataatacattaattatcacatgtgaagaagaaaaagtacatattaccttcact

SEQ ID NO: 744452 - DNA, 411 bp, Homo sapiens
cattgtcttggggattaacatttggatcctcgttacttatgcaaatctctgcagccagcttgaatttctccttagaaaactggtttttctttcctatcacattttcaggctgcaaatgttctgaacttctattctctgcttcccttataagactgaatgccttcaacatcacccaagtcacctcttggatgctttgctgcttagaaatwtcttccaccaggtaccctaaatcatctttctcaagttcaaagttccacaaatctctagggcaggggtaaaatgccagcagtctgtttgctaaacataacaagaatcaccttttttccagttcccaacaagttcctcatttccatctgagaccacctcagcctgggctttgttgtccttatcactatcagggttttggtcaaa

SEQ ID NO: 744453 - DNA, 559 bp, Homo sapiens
tggagacctttttccccattgtcttggggattaacatttggatcctcgttacttatgcaaatctctgcagccagcttgaatttctccttagaaaactggtttttctttcctatcacattttcaggctgcaaatgttctgaacttctattctctgcttcccttataagactgaatgccttcaacatcacccaagtcacctcttggatgctttgctgcttagaaatttcttccaccaggtaccctaaatcatctttctcaagttcaaagttccacaaatctctagggcaggggtaaaatgccagcagtctgtttgctaaacataacaagaatcaccttttttccagttcccaacaagttcctcatttccatctgagaccacctcakcctgggctttgttgtccttatcactatcagggttttggtcaaagccatttaacaagtctctaggaagttccaaactttcccgcattttcctgttttcttttgagccctccaaattgttccaacctctgcctgttaaccagttccaaagtcgcttccacattttcgggtatctttt

SEQ ID NO: 744454 - DNA, 601 bp, Homo sapiens
cctaacttgaactgatgtgtatgtatagtccttgttaaaccacttagtgtgctatttatacattttgatgcagatctcaaccaatgtatttgattatggggctctgctctagataccactaccggtgttttacattcagggggcattaggattctaaatcctgaaatactcattttggaagaaggattaagaacccacagacctctcccagatctttgggggacatcttagttcactacattataatgctcttagaggcctggtcaatgtcattaccacccatgccccccagaatatattctctattctcatacaatttgatttccaaaagctgttaaatagtgccaacagtacatttgtattaaaagtaacataattcatatagtgactccagatcttgataaacatggtcaatttcttatttcctttctggcagtgayattccaattgatacagtatctgttctatcttggcaaatgcttccaccagagttgactgatgaaggaggcatgaactactccagatgcaccctgctcaagccaacacccacaaagggccaaatcagatacttccttctcctttttgttaaaacaaaggtgaa

SEQ ID NO: 744455 - DNA, 611 bp, Homo sapiens
ggagtgagccatgatcacaccactgcattccagcttggacagagcaagactctgtctcaaggtaaataaataaataaataaatacatacataaataaataaataaaatctctctaaacatcattgtgtgatcaatttacaatatattcctattgccatctttatctaytatgcctctaagtcctctgagagaacgcactcacttgcttggaactctgtgttattgtttgtacttcgaatcagctgaaatgccttttggaatcccactgcgtgctgggtaggactgtctgaagacttcacgctgctaacaaaggtggacattttcctttttgtctcactggtggctggagacaagaaggtcttatagcactggtctagtgagcaagtccggacggtatctgccacagttaacacagaaatctgcaggaaagaaaaaaaaaaaaaaccaccaaacttgttatcctaccgtctaaagatttatttatttatgtaacagaagaggccaaggagtaagaaggcctacagaacagattctgagagtttcaaaataaatccctggagccatccatctatcaaatttgaaaaggatccataaggattggtaaagtgggg

SEQ ID NO: 744456 - DNA, 609 bp, Homo sapiens
aacctcggctcttgtcgcctgcacacccacaggcccaacaccacatggaacctgccaagacttggggcttgcatcctctgaagccatggcccaagctgtgccttggccccttttagccatggctggagctggagtggctgggacacagagcaccacatcctgaggcagcacagactagtgggtccctgagcctggccraagaaaccatttattcctctgaggcctctgggcctgtgatgggaggggctgctctgaaggtctgtgacatgccctggagacattttcctcattgtcttggctgttaacattcggctccttgttacttaggcaaatttctgcagctggcttgaatttctccccaggaaatgggtttttcttttctaccacatggtcatgctgcacattttccaaaatttatgctctgcttcccttttaaatataaattccagttttagataatctctttgttcatgcatatatgcatacagttttagaaacagcaaggtcaactcttgaatgcattgttgcttagaaatttcttccttgccagataccctaaatcatctctctcaagttgaaagtttcacagattgccagggcagaagcaaa

SEQ ID NO: 744457 - DNA, 609 bp, Homo sapiens
aacctcggctcttgtcgcctgcacacccacaggcccaacaccacatggaacctgccaagacttggggcttgcatcctctgaagccatggcccaagctgtgccttggccccttttagccatggctggagctggagtggctgggacacagagcaccacatcctgaggcagcacagactagtgggtccctgagcctggccaaagaaaccatttattcctctgaggcctctgggcctgtgatgggaggggctgctctgaaggtctgtgacatgccctggagacattttcctcattgtcttggctgttaacattyggctccttgttacttaggcaaatttctgcagctggcttgaatttctccccaggaaatgggtttttcttttctaccacatggtcatgctgcacattttccaaaatttatgctctgcttcccttttaaatataaattccagttttagataatctctttgttcatgcatatatgcatacagttttagaaacagcaaggtcaactcttgaatgcattgttgcttagaaatttcttccttgccagataccctaaatcatctctctcaagttgaaagtttcacagattgccagggcagaagcaaa

SEQ ID NO: 744458 - DNA, 643 bp, Homo sapiens
cttcctcccttacccgttcagcctctcctcttaggccccagagggatcctgttaaacccacatctaccctcgtccctgccttggcgagcagccccgtggctgcctttcatttgggatggaagcccaggtccccacagtagactgagtggtctgactcccgacattcccacgcctctccttccgcctctgtcctgctggctcactccgccacactggccctcccccgccccccagctcccctcaggtgtggagtgcatggcccatggcctttgctcttgcttcccctgcggggaatgctcttcccccaaatgcccacggggctcactccctcacttctttgacctctgcacaaatgtcctcgtgtgagtgcaggctccctgctatttgaaatggcagcctcaccctctgtgccatccytacacccacctcatccctctccctgtcccatccttactcacccccattcctacccacccccatccctacgcccgtctctttatgattctctgtagctctcaccacttcctaacactctgtgcattttctttctttattcgcttactatttaatccccctcaagctctgcatgggtgctgaggctctacgctccagccatcagaatggctggtctttccccaggagc

SEQ ID NO: 744459 - DNA, 676 bp, Homo sapiens
aatctgtcctgtttaaccagcttcccaggtgaatctgaaaatcaggtgaggttgggaatggcggtgctaataatgaactgggaggcacctgggcaaaacatcaaacaaaatcagctcaggaaagagattaaggctggctcatgacagtgcgtgcatgtgatgcgtgtgtgcacacagacgtctcatctgccagactgtgagcatctaggggctgggccaggctgagtttcacttctgccagcctcactaagtmcaggatcatcccaacagccatttatcccggacttgagagtttgccagagagtctcttattccctattgctgctgctcctcaccaggccctggcagatgaagaccttggccctcaacttacaaataaggaaaatgaggctcagaggagaatgacctggccaaggttactccatagcaagtggcagagcccagatgtggacccaggacagagccaacatgcctttatccacttgctaaagagaaagggagtttgagaaatcaaggcaaaggctggcaggggtgacctagggctcctggagctgggcagctgagtgaggcctgcatgtttgagactggggggagaagccttggagaccaaccccgattcctgggggtaggggggtgcagagggaaaaagaagcctggccttgtctctgcagcaggc

SEQ ID NO: 744460 - DNA, 629 bp, Homo sapiens
atgactgctagagctccagccatcacatccatgttccaaacaacaggatagaggacagaagaagggacctcctttcttcctttaaacacatttcctacatttttcaccaacacttccactttatcttattggccaaaacatagtcaggtagctttacccatctacaaggaaggctggagaatgtagtctgttagctgatggcaatctgctcagccgaaaatcggggtccttatggtcaagaaagaaggggagctgaatatgaggaggtaactagttgtttccatcagagactaacgggaaaaacaaacctggcrgggagtgaagacagagggctcacacagaaggggaatgaatcaggcatggagaagatgggtctctcaccatccgtggggtcatagtgtgcatatgcctcaaatttttatcataaccaaaaataaaaacaaaaaattggcaatatttaaccctatctaagaataaatacacacatgacttatattgtaccacctgtgtagctaactcaagtcccatattattttttgctgttatgattcagacacttttgtgtgtgtgtgtgtgtgtgtgtgtgtgtgtgagacagagtctcgctctgtcactcaggctggagtgca

SEQ ID NO: 744461 - DNA, 664 bp, Homo sapiens
tgtttagatttctatatcttggtaacatgaatacacacttaatgaaagatttcagtaatttttgatttgggaattaatcatagtgggaaaaactgtttaggaaaacatgtcagtggaaattaactcgccacagtatgtagtgttagggaatagcttctgttcggcatttgatttgagtgctgtattctgacatttttcaggaacaaatacatgtgattcatcttctataaatatttgcagtttcttcaagttgaaatgagaaaagctcgtaaattgagcaccaggtctaataaatcattcacttacccaagaacagaaagacaggaaaagctagcatgttaatctaatgaaaaaatcgaatgttaaaaaaccaagaaagtagaagatatttgacattaactttmtaatcattgataataatctaataatcataacattattcttaaaacctgaaagaatggattcctgctcccaatgtgtttttaatatcaacttaaactaaaataatttttttacctatttttggaagcttggaaattgagatgtagttgtctaatgttaacctaattaagagagcttggtgtgatttctcatatacagcatctaaatatttaagttttaatgtcttctaaaatattattacattcttcatactatagttttt

SEQ ID NO: 744462 - DNA, 472 bp, Homo sapiens
aatgttgtattgatgcaaacaaattcatacctactaatgattataggatgtgatgcgatgttatgtagacctaaggtttacttttgctgcaacatagttagaagattaaacccctgcataagtgactgaatgactgaaragaacagaacactttgaactatgactctttgaatttttagaaaatgagaaaatactacttcatatatcaatttaatttgggggaaaatatggcaagacaataagaaaatgaaatgtcaagcttgattaagcttattttaactggctagtgaactcaatttcaaatatgtaagacatattttgattcaatatttcggttttattctaaatctttaactaacataattgcttctatgtgtattctattagatgactgtaccattttctaatgtgaacatatttcacccaaattttcatagtaaaaaataagttcataggttttccttcaaaatgt

SEQ ID NO: 744463 - DNA, 472 bp, Homo sapiens
aatgttgtattgatgcaaacaaattcatacctactaatgattataggatgtgatgcgatgttatgtagacctaaggtttacttttgctgcaacatagttagaagattaaacccctgcataagtgactgaatgactgaagagaacagaacactttgaactatgactctttgaatttttagaaaatgaraaaatactacttcatatatcaatttaatttgggggaaaatatggcaagacaataagaaaatgaaatgtcaagcttgattaagcttattttaactggctagtgaactcaatttcaaatatgtaagacatattttgattcaatatttcggttttattctaaatctttaactaacataattgcttctatgtgtattctattagatgactgtaccattttctaatgtgaacatatttcacccaaattttcatagtaaaaaataagttcataggttttccttcaaaatgt

SEQ ID NO: 744464 - DNA, 480 bp, Homo sapiens
gcacactgtgttctgaggcttgctcctaacctgcgtctcctggaacagcaaaacgggcagctctggctccatctgtccatccctcacagatgagtctgtctaccctgttgcaacacgctgtggtccttatacagagatgatattaccgatcttccattggtagcaaaagcataccagggttttgtctttttttttccagaagtgacactaagtggagcatgtcttctttctccctgctcycctttgggaggggagatagactagggagagagcacaaatcgtgacaatgaaaatgaagcttggatgaaagtcaaggactgcacacaatatgtgcccagtaaatattagctcaatgaacgaagaaatctctaccatcaacttaatgtgtgaggtcaacctctctgggctgtttttttaggtgaactaggggatcggggtggccacagggcatctgtaaactccctgtgaatcttatggaag

SEQ ID NO: 744465 - DNA, 489 bp, Homo sapiens
tatactcacgttagcagatcttaactatgtggaaccaaatgtactaaaataactttctatattaaaaatgatgtatttacacagttaagatgccatcatgtatgcaaatgtgttacttcaaaaattgttaatgtcratgctccttacacccatattttttgaattaataattggaaattctacatgccaaaaatatgaaatggtgaaattaaattaatccagactgatgacataagctctctttggaaaaccacattccacatgtggacgctagataatcctccattatttgagggctccagaattactggataatttctcagaactgaagtatttcacaagcccacaatgaaaatgcttttattgagttatttttaagcatagagttacacaaaaacctttaaagatctgaccgctatattttcgtaacttataagacagatacacaaacaccaacatacatatatgatacaaaccaatagcaaattg

SEQ ID NO: 744466 - DNA, 556 bp, Homo sapiens
aaagtgaactgtattacttcacattcccaacagcaatatacaaaagttgagatttctccatattttcagcaacacttgatattgtcagcatttttagtataagccattataataggtgactaacggtatctcattgtggttttaatttgcatttccttgatgactaaagatgttgaacatctctttgtgtgcctatttgtcatttgtatgtctttatgaagtgtctatttaaatctttacctcatttctcaaaattgagttgtcatattgagttataagagttatttatatacagacagtccccaacttatgatggttcaacttgtgatttttcaactttacaatggtgtgaaagtgatacacattcaatagaaactatacttcgggyacccatacaaccattctgtttctcaattttactacagtattcaataaattacatgagatattcaccactttactataaaataggctttgtgtcagatgactctgcacaactgtaggctaatgtaagtgttctgagtacattgaaagtaggctaggctaagctttgaag

SEQ ID NO: 744467 - DNA, 518 bp, Homo sapiens
cagaatgaccccatgggcatcatcgaaaatgtaaccctactaagagagccccagcacggtgcttctttagtgacggcagaggaaccaaagccatccccatggagacgcctgctcttctgtgctagaggtcagcaaacgtcttctgaaagggccagagagtcaatatcataggctttgcaggccatgctgtctctgttgctgctactcaactctgcaccatggtgtgagaccttccctggatgatatgtcaaccaatgggcgtggatgcattccaacagaattttatttctggacattgaaacgtggattttgtataatttttgcatggcataaaagattatgcttcttttaatccattttaaatgtagaaaacrtgcttagctcagaggtcttacagaatcagggaacctgatcttctaggacagtatctattcaccctacaaagcctatgttgggagtacatccctctagctgtttggatgaaaccaaactctcacaggtaatttaagacacaagta

SEQ ID NO: 744468 - DNA, 614 bp, Homo sapiens
tgtctgggtggctgctatggattaagaatccaaggtcacgatttaacccactagaaatgaacttgacgattaccttgtcccttaaagggtgatttgttctcccgtggggacctggtcccacagccaacaatacactgccggtgtattgcactctgctggagttccacaggctggttcataaattgaatttcattttcagaatcaggaggaaatgaagaaataattttatataccgtacatttattgaaattatatcaaaataagcaatgaaggaaaatttctgttggtaatataatttcaaggatcayttcatgagtttgcagctagaacagcatctgaaaatatctgggtttgataagcacagggagaaactgcccgtgttctatttaaacgtggagggagaagggagcgccctttgcagagtccccactcagctctcctcccatctcgcttcttgcatccttgtccctctgtagtactcgctgttgacattttgcaattgtgcatatcccaatttagataccatttctttgtcttgatagagggcctgaaattatagttacaggacacagcactcaaccccggccattttggttcccacattggtgtaactt

SEQ ID NO: 744469 - DNA, 641 bp, Homo sapiens
aagatgtctccagatatttttgtcacatgtgcctgggggacaaaaccaccccgtcaataaacactgctttaaagatagaaacaataggccactttgccaaaacaaactgcaagaaacactttggtgtgtatgtgcacatatgtgctgtagcttaagaaaaactcaaaagttgttcattaaatctcaatgtaataattttttatctgaaacatttggaagaaaaaaatggttacaaattctcatatgaagaactaaaagtctctcattctcaaaagtcatcttcctttattggggattttatattgaacacagatcctaggttggctgacagatcccttattcaactttatatttcaggtttaaaagctctgaatttatattcttaaattttcattctgtttcatatttatgagaktgaacactatcaatttttttcttttaaataatcatttcttggcatttttctgctcagacttcagcctgacatggtgagtagtttctcttatcatttggaaggagtctgggactgtgggacctgccagacaaagctggctctgccccccaccttgccacagctgtccggagtctctctgcttagctctccagctcttacaaggtccaggtgcctctagtaatacttt

SEQ ID NO: 744470 - DNA, 655 bp, Homo sapiens
tacttgcccgatggacccagggatccagtcagaagagctcccaggagcatcagtgcctctggtcttgcacggagcatgccaaccctgcagcctgcggggtgagggtgggggtggtaggtggtatgcgaaagccactgttagggcgtcctctatgcctcccctcttgttcctacagctagtactggaggaggagcaccagctgtttccacttctggaaggtagctgttagaagcatcaccgaggaccttcatccaaacgccactctttccaggacaattggcagctctggaggcattgacactgttccccatccgccaccccatcagagagttaacccccgaccataggaacccactgggcaggagtcttctggggcatgtcagtccagggcaggactggtcaagcctcccagggtgtgcccaatgtctccaatgtttcacctccacccgcccccratccgtcaggctccgcttctcctccaggaggcagggaagggaaaaaggttactgacctgggagtgagggactgcagcacccttccacaatgaatccccccttccccaataaactccccttctgcaatgaacgcctgtgcatgatgggcgagggctagggtcagatcccaaactctggtctaacctgtggtttagggtggt

SEQ ID NO: 744471 - DNA, 671 bp, Homo sapiens
tgtgaagttgagtctggaggaagcaaagtgcctccctttctgcgtggccccccatggccccagccgtggagctctagggtgccgaagtgccgctttccccctgacccaacccagatgcattcttcccccaccgcagcctggccccagtggtggttttcagccaggatggggcttgtccggtggaggccaggtgccagtcacaggagcagtctgacagatctgagtttttctagggcccactgggagccttgagaggagtcacaggccagagaccttgtgatgggtttaagtcaacacctgaacctgctctagaagtaagcaggttacatgtgcagagtacacctttcagcaagtggttcctgaatgggcccatctttctsgggccctttccaagtcaagacaccaaacgaaagtttcatggaaggcagaagagcatagtggtgaagcccactggtctctgccaattacaactgtgtgaccttgggcaagtcacttaaattttgtaacctcaatatcctcgcctgtaaaatagaaatagtgatggtacctccctcacagaattactgatgagatccaatgagaaaagcatatcaagtctccagcatgaggtctggcacatagtaaatgctcagtaaatggtaccaagctatgccatagtcatggcctagtgg

SEQ ID NO: 744472 - DNA, 659 bp, Homo sapiens
aactgttcctgggaacagatccgagcaaccctgtcacggagtaggaaggtgggacagagtggaggtgggcacaatgaagacagtgtaatcaggatgccaccacagggccaacatagcttcacacacgggcctggatctgggccagagtggaacacagcccaccagagaggatcgcagcccaccagagaggaacacagccctgcagagaggaaagcagcccaccaaggaggaacgcagcccaccagagaggaacacagcccagcggagaggaacacagcccaccacattggactgcagcccaccagagaagagcacagcccaccctcagtccctgtgggacctgtccttgctttctctgacttgccataggagcagcccatcaggctctaagaaggccccaggctcccgtgagaattcgaattctgcaggaggacatcgaggcagcaggcagtgaagcggtgasgggtgtgggctgagtgccgagtggacgcactcccaccagcaaggcccaagcagcggtggagacacacagtgtgactggctgggctctttagtgttcagaaaccaaaatgccagtgttagatttaatagtaaaaataaaaaaaacaaacaacttttaaagtaagatcaggttcaattctaactttaatttatttcta

SEQ ID NO: 744473 - DNA, 659 bp, Homo sapiens
aactgttcctgggaacagatccgagcaaccctgtcacggagtaggaaggtgggacagagtggaggtgggcacaatgaagacagtgtaatcaggatgccaccacagggccaacatagcttcacacacgggcctggatctgggccagagtggaacacagcccaccagagaggatcgcagcccaccagagaggaacacagccctgcagagaggaaagcagcccaccaaggaggaacgcagcccaccagagaggaacacagcccagcggagaggaacacagcccaccacattggactgcagcccaccagagaagagcacagcccaccctcagtccctgtgggacctgtccttgctttctctgacttgccataggagcagcccatcaggctctaagaaggccccaggctcccgtgagaattcgaattctgcaggaggacatcgaggcagcaggcagtgaagcggtgackggtgtgggctgagtgccgagtggacgcactcccaccagcaaggcccaagcagcggtggagacacacagtgtgactggctgggctctttagtgttcagaaaccaaaatgccagtgttagatttaatagtaaaaataaaaaaaacaaacaacttttaaagtaagatcaggttcaattctaactttaatttatttcta

SEQ ID NO: 744474 - DNA, 605 bp, Homo sapiens
accttcagctcagttggaaactgaacttcgggggttagaagggaagagagtcggtgccccattggtttgttaccttcccaacatgcgacaagtcagtttccacgtagatgaaagaggaggtggtctgatttacaaagacagatgagcccccagcttcctgtttggccaccgaygggctcactgtcacctcaccgagggtgcctctgtcctgtcccagcaccgttaaggtgcaatgggtccttggtctaggagtgaagacgatgggatgaagatggggggatggagttaaataaaagggcctgactctcacttcgctttcttcatccttcctgctccttaagatagttggatgtttttcccacttggtaaagttattcctacaattggcctacaggaaaaggaagacaggcaaaacaaacaaagcgtaaaaagactcccctggcctggcagcaatgataacccacaccattgacaccagtatgttcccttattattttacaacaaaagggattgccttttgatataaccaaatatggcattttagaatctttttgacagggttcagtttatcttgttgagcttaatttttttttatgtattctaga

SEQ ID NO: 744475 - DNA, 621 bp, Homo sapiens
gccctccctgctctcccaatagagctccttcctctctgttaagcttggctcctggtctcccctccactggcctcttaaccaaacacaacactcagcagtagctcagccctgccctgagcctggctggaaatgtgaggggagaagaagccagtgcattcggggccctatagagacatcaaggctgacaaccagaaattcctgttgaggtgggcacagaaatttacacttacggtcaaggataggtcagtccagggtacccttactgagacgagtcctgttgaaagaatcagatgttgaaggaaatasagaatgtagaaagataaaataacttctagacaatagtttcacacaaaatcagtgtatctttgtactgacttttcaaattattttcccacccaggacagcacagaagaaagagcacgcatttttgaggcagacagacctgatttaaaatctagatttggccaccaacttgctgtgtagcctttagacaagtttcttaaacctccacacatctgcttcccctggctcagtgaaatgagagtatcagtggtatttgcttcatgcctgttttgagatccgcaaggtctcatccctgagaagcaagcaccaagagtgttc

SEQ ID NO: 744476 - DNA, 609 bp, Homo sapiens
gaaagaactccggagctcaaagaaaaggctttcatattaacaaaatttgacaaagacaaagaaaatagaattttaaaaaatgaacaaagcctccatgaagtttgggattatgttaaatgaccaaacctaggaataattggtcttcctgaggaagaagagaaatctaaaaggttgaaaaacttatttaggaaataattgaggaaaacttccatggccatgctagagatctggacatctaaatacaagaagctcaaagaayacccaggaaattcattgcaaaaatatcatcacctaggcacatagtcatcaggtcctctaaagttaagatgaaggaatgaatcttaagagctgtgaggcaaaagtgttaccaggggttccttgctcccagagctcccaagatggcggcgggccacttccaagatggtggcaagcctcgtgttctctgacctggggttgttggcctcacagtttccaaggaatggaatcttgggccatgcagtgagtgttatagctctattagaagccatgggtcatggaagagaaccgtggaacccagtgactagtgttcagcttgattaggacaaacccaggcacttagccatgcaggaa

SEQ ID NO: 744477 - DNA, 619 bp, Homo sapiens
atctcaataggcaaaggaaaagctttcaataaaatccaacctcccagccaggcgcggtggctcatgcctgaaatcccagcactctgggaggccgaggcaggcagatcacgaggtcaggagttcaagaccagcctggccaacatggtgaaaccctgtctctactgaaaatacaaaaattagccaggcgcggtggcgtgtgcctgtagtcccagctactcgggaggctgargcaaaagaatcacttgaactcggtaggtggagattgcagtgagctaagatcacaccactgaactccaggctaggcaacagagcgagaatcccttaaaaaaaaaaaatccaatatccctttgtgataaaaatcctcaagaaactaggcaccaaaagaacacatctcaaaataataaaagccctctatggcaaattcatggccaacgtcatactgaatgggcaaaaattggaagcatttttccttaagaactagaaaaagacaaggatgcccattcttaccactcctattcaaatattactagaagtcctggccggagcaatcaggcaagagaaagaaataaaaggcacccaaataagaaaagaagaaatcaaactatctctcttcatgaac

SEQ ID NO: 744478 - DNA, 619 bp, Homo sapiens
atctcaataggcaaaggaaaagctttcaataaaatccaacctcccagccaggcgcggtggctcatgcctgaaatcccagcactctgggaggccgaggcaggcagatcacgaggtcaggagttcaagaccagcctggccaacatggtgaaaccctgtctctactgaaaatacaaaaattagccaggcgcggtggcgtgtgcctgtagtcccagctactcgggaggctgaagcaaaagaatcacttgaactcggtaggtggagattgcagtgagctaagatcacaccactgaactccaggytaggcaacagagcgagaatcccttaaaaaaaaaaaatccaatatccctttgtgataaaaatcctcaagaaactaggcaccaaaagaacacatctcaaaataataaaagccctctatggcaaattcatggccaacgtcatactgaatgggcaaaaattggaagcatttttccttaagaactagaaaaagacaaggatgcccattcttaccactcctattcaaatattactagaagtcctggccggagcaatcaggcaagagaaagaaataaaaggcacccaaataagaaaagaagaaatcaaactatctctcttcatgaac

SEQ ID NO: 744479 - DNA, 588 bp, Homo sapiens
tggcaggagcaggagagaggaagagagcgaagtgccacgcttttaaaccatcaaatctcatgagaactcattatcatgagaacagtctgggggaaatccaactccatgatataatcacctcccaccaggtccctcctccaacacatggggattacattttgggatgagatttaggtggggacacagagcaaaaccacatcgacaactaatgatcatagctaaaacaatttgagcaagaaaataagtaatgatagtattgggttataaccctaagaataaaataaatatccttgaattcatgcttgtataaataaatgaataaatgtagaggcaatgaggaaaatagaaaggtatcgttagaacacaayggtagcagttactaccagcatgaaccattggtagatgataaaactggtggatgtaaatttaaggaaagaagatatttgtgtagtttcaaatcatctactctaagtatttattaattgcaaaaggaaaaataatactttacaatggagaaactctgtcaggagaaaagttaatattaccagtaataagacgtttgacttcacaatacactgagaaaggcat

SEQ ID NO: 744480 - DNA, 588 bp, Homo sapiens
tggcaggagcaggagagaggaagagagcgaagtgccacgcttttaaaccatcaaatctcatgagaactcattatcatgagaacagtctgggggaaatccaactccatgatataatcacctcccaccaggtccctcctccaacacatggggattacattttgggatgagatttaggtggggacacagagcaaaaccacatcgacaactaatgatcatagctaaaacaatttgagcaagaaaataagtaatgatagtattgggttataaccctaagaataaaataaatatccttgaattcatgcttgtataaataaatgaataaatgtagaggcaatgaggaaaatagaaaggtatcgttagaacacaacggtagcagttactaccagcrtgaaccattggtagatgataaaactggtggatgtaaatttaaggaaagaagatatttgtgtagtttcaaatcatctactctaagtatttattaattgcaaaaggaaaaataatactttacaatggagaaactctgtcaggagaaaagttaatattaccagtaataagacgtttgacttcacaatacactgagaaaggcat

SEQ ID NO: 744481 - DNA, 512 bp, Homo sapiens
aaaaagataatacaccacaaccaacttggatttatactggggatgcaaggattattcaacatatacaaattagtaaacaagatatatcacatcaacaaaataatatgatcatctcaaaagatgcagaaaaagcatttgataaaattcaacatcacttaaaaatgatatacattctcaacaaactaggaacagaaggaatatgcctcaaaataataaaggccatatgtgacaaaatcctactaaatggggaaaaactgaaagtatttcctctaagaactggaacaagttaaagatgcccactttcaccactgctatttgacatagtcctggaagtcctagtaagagcaatcagtcaagagaaagaaacaaaagccatccaaagtgaaaaataggaagtcatattgttcctctttcctaatgayataatcagatatctagataaaactaaaaactccaccaaaagccttgtagatttaatcaataaattcagtaaagttgcataatataaaacc

SEQ ID NO: 744482 - DNA, 646 bp, Homo sapiens
cttggatttatactggggatgcaaggattattcaacatatacaaattagtaaacaagatatatcacatcaacaaaataatatgatcatctcaaaagatgcagaaaaagcatttgataaaattcaacatcacttaaaaatgatatacattctcaacaaactaggaacagaaggaatatgcctcaaaataataaaggccatatgtgacaaaatcctactaaatggggaaaaactgaaagtatttcctctaagaactggaacaagttaaagatgcccactttcaccactgctatttgacatagtcctggaagtcctagtaagagcaatcagtcaagagaaagaaacaaaagccatccaaagtgaaaaataggaagtcatattgttcctctttcctaatgacataatcagatatctagataaaactaaaaactccaccaaaagccttgtagatttaatyaataaattcagtaaagttgcataatataaaaccaacataaaaagtcaatacactacacactaataatgagctagatgataaagaaatcaggaaagtaaccccatttataacagctcccaaaaataaaatacttaggaataaatttaaggaggtgaaaaatatcttcaaggaaaactgcaaaacactaatga

SEQ ID NO: 744483 - DNA, 613 bp, Homo sapiens
tcccaccgaaatagaaactaccatcagagaatacaataaacacctctatgcagataaactagaaaatctagaagagatggataaattcctggacacatacaccatcccaagactaaaccaggaagaagtcaaatcactgaatagatcaataacaagttcagaaattgaggcagtaattaatagcccaccaaccaaaaaaagcccaggatcaggcggattcacmgccaaattctgccagaggcacaaagaggagctagtaccattccttctgaaactattccaaacaatagaaaaaaagggactcctccctaactcattttatgaggccagcaccattctgataccaaaacctcacagagacacaaagagaaaagaaaatttcaggccaatacccctgatgaacatcgtgtgaaaatgttcaaatattggcaaaacgaatccagcagcacatcgaaaagcttatccaccacaatcaagttggtttcatctctaggttgcaaggctggttcaacatatgcaaatcaataaatgtaatccatcacataaacagtaccaatgacaaaaaccacatgagtatctcaatagatgcagaaaaggccttcgatagaattta

SEQ ID NO: 744484 - DNA, 613 bp, Homo sapiens
tcccaccgaaatagaaactaccatcagagaatacaataaacacctctatgcagataaactagaaaatctagaagagatggataaattcctggacacatacaccatcccaagactaaaccaggaagaagtcaaatcactgaatagatcaataacaagttcagaaattgaggcagtaattaatagcccaccaaccaaaaaaagcccaggatcaggcggattcacagccaaattctgccagaggcacaaagaggagctagtaccattccttctgaaactattccaaacaatagaaaaaaagggactcctccctaactcattttatgaggccagcaycattctgataccaaaacctcacagagacacaaagagaaaagaaaatttcaggccaatacccctgatgaacatcgtgtgaaaatgttcaaatattggcaaaacgaatccagcagcacatcgaaaagcttatccaccacaatcaagttggtttcatctctaggttgcaaggctggttcaacatatgcaaatcaataaatgtaatccatcacataaacagtaccaatgacaaaaaccacatgagtatctcaatagatgcagaaaaggccttcgatagaattta

SEQ ID NO: 744485 - DNA, 613 bp, Homo sapiens
tcccaccgaaatagaaactaccatcagagaatacaataaacacctctatgcagataaactagaaaatctagaagagatggataaattcctggacacatacaccatcccaagactaaaccaggaagaagtcaaatcactgaatagatcaataacaagttcagaaattgaggcagtaattaatagcccaccaaccaaaaaaagcccaggatcaggcggattcacagccaaattctgccagaggcacaaagaggagctagtaccattccttctgaaactattccaaacaatagaaaaaaagggactcctccctaactcattttatgaggccagcaccattctgataccaaaacctcacagagacacaaagagaaaagaaaatttcaggccaatacccctgatgaacatcgtgtgaaaatgttcaaatattggcaaaacraatccagcagcacatcgaaaagcttatccaccacaatcaagttggtttcatctctaggttgcaaggctggttcaacatatgcaaatcaataaatgtaatccatcacataaacagtaccaatgacaaaaaccacatgagtatctcaatagatgcagaaaaggccttcgatagaattta

SEQ ID NO: 744486 - DNA, 579 bp, Homo sapiens
aacatgtaaaagttatttctccacacatgaattctggacctcaaagcggtgtgttaaagtttaatgtcttgaaaattattgttggttcttttcctctccccctctccactttccttattaacacttaagcatggggattaattcagtatgtttgaattttccaaggcagtggatttgttctaaggacagggtggtgtgtaagcacatttctcttctgtgattaagtggaaccagcactccttctgacgcccaagaacacaagctttccmcttctaagatggatcgataggaataatcttatgtattgagtgtcactcctggcacctcctcatttgtgcacagacaacaatctccctctgaatctcaaagtggataacgccatacattatttccagcaaatagagaaagcagaatcattttgagctcatctgggctgtgattaaacacaatgatacattcggaaggaacacaccagagactagatggcatctatcatcctaggcctattgagtacacctttaatactaaatgatgtactctctgaatcttactagaccattgacatattctttgtccttt

SEQ ID NO: 744487 - DNA, 634 bp, Homo sapiens
taattttaaaaactccccaaaagaaaaacctaggaacagatgcctttgtaactgaattctgccaagcttttaaagaattaacactaattcttctcaaactgttccaaaaaattgaaggaaaagtaattcttccaaatgcattctatgaggccagcattattctgatacaaaagccagacaaggacacaagaaaaaacaaaaacaatgaaaaaaaactacgggtcaatatttytaataaaaaagatgcaaaaatgttcaacaaaatactagcatactgaatccaacagtacatccaaaagattagtcactgtgattaagtaaaatttaatcccaggaatgacgttattcacagaaacaaaagatagttaaaatgtgcatgaaaccacagcagacttcaaataatcaaagcaattctgagcaaagagaacaaagctgaaggcgtcacattatctggcttcaaaatatattacaaagctgtagtaaaaaaaaaaaaaacagtaccatattggcatgaaaacagaatagagaacccagaagtaaatccacatatttactgccaactgattttcactaaatgtgccaagatcacacatttgggaaagaacagtccttccaataaatgttaatggaaaaa

SEQ ID NO: 744488 - DNA, 634 bp, Homo sapiens
taattttaaaaactccccaaaagaaaaacctaggaacagatgcctttgtaactgaattctgccaagcttttaaagaattaacactaattcttctcaaactgttccaaaaaattgaaggaaaagtaattcttccaaatgcattctatgaggccagcattattctgatacaaaagccagacaaggacacaagaaaaaacaaaaacaatgaaaaaaaactacgggtcaatatttctaataaaaaagatgcaaaaatgttcaacaaaatactagcatactgaatccaacagtacatccaaaagattagtcactgtgattaagtaaaatttaatcccaggaatgacgttattcacagaaacaaaagatagttaaaatgtgcatgaaaccacagcagacttcaaataatcaaagcaattytgagcaaagagaacaaagctgaaggcgtcacattatctggcttcaaaatatattacaaagctgtagtaaaaaaaaaaaaaacagtaccatattggcatgaaaacagaatagagaacccagaagtaaatccacatatttactgccaactgattttcactaaatgtgccaagatcacacatttgggaaagaacagtccttccaataaatgttaatggaaaaa

SEQ ID NO: 744489 - DNA, 645 bp, Homo sapiens
ctataaagtacacagtgcttctaagttgagagaatgtgtctcaaatatcatgtcataatttcacttaaaagaagactcgaggaattcacttaaaatgtaaattagtatgacttttttcataggcaatttggaaataactatcaaaattgcacatacttttgactcaataattaaacttttggcatttaatcggacatgtacaggatatatgcacaaggatagtgttgacaacagttttgaaattacttggacctcaataaccatattttcttttcatttatcttttaacaaatacttattaagcattattaaccatttaatatgttcggtatttttctaggtgaaagaaatccaagagtgaacaagaccaagtcttgctcttatggaacttctattctagggaatggggaagttggttattatataaaaaaaatataaatacaaagaagcaaacaagaragaaaattataccacagtgttatatgctaagcaaaataaattctacacagagacttaaaataaatagaagtaacagagaataactgggtggctacttgtgattgtgtggtccaccaagtcctcattcaggaggccgggttttatctgagatctgaatgaaaaagagatgtaactagtcagagtttg

SEQ ID NO: 744490 - DNA, 588 bp, Homo sapiens
ttgtcttttcattcttttaacaatgtctttcaaaaggtaaaacttcttaactttttgtcttttttttttccccttgagacagagtctcactatgtcacccaggctggagagcagtggtgcaatcttggcccactgcaaccgctgcctcccaggttcaaatgattctcctgcctcagcctcccaagtagctggaactacaggtgtgtgccmccacacctggctaatttttgtatttttagtagagatggacttttgccatgttggccaggctggtctggaactcctgacctcaggtgatccacctgcctcagcctcccaaagtgctgggatcacaggcatgagccaccgtgcctggcctaaaggttcttaattttggtgaagcctaattatcatctttttaaaaatgtattatgcttctgattttgtgtctaggaaatttcttaaaagattttcttctatgttttctcataggaactttatagatttacagtttacatttggcgttaatttttatacagggtgcaaaataaggatcaaggttaattttctgcatttgtgttcccaactatcccagtaccatttgttgaa

SEQ ID NO: 744491 - DNA, 588 bp, Homo sapiens
ttgtcttttcattcttttaacaatgtctttcaaaaggtaaaacttcttaactttttgtcttttttttttccccttgagacagagtctcactatgtcacccaggctggagagcagtggtgcaatcttggcccactgcaaccgctgcctcccaggttcaaatgattctcctgcctcagcctcccaagtagctggaactacaggtgtgtgcccccacacctggctaatttttgtatttttagtagagatggacttttgccatgttggccaggctggtctkgaactcctgacctcaggtgatccacctgcctcagcctcccaaagtgctgggatcacaggcatgagccaccgtgcctggcctaaaggttcttaattttggtgaagcctaattatcatctttttaaaaatgtattatgcttctgattttgtgtctaggaaatttcttaaaagattttcttctatgttttctcataggaactttatagatttacagtttacatttggcgttaatttttatacagggtgcaaaataaggatcaaggttaattttctgcatttgtgttcccaactatcccagtaccatttgttgaa

SEQ ID NO: 744492 - DNA, 636 bp, Homo sapiens
aaattaatgctcttttagcaattgccatctgcagatgactaagtgttaaccagctcagtggagagtcagggtgacagccttttataccctcttggtacccaggtttttctccagcatccaggaagaatcatgtcatggatttgaagggtgcagagattttattgagtgatggaggtggctctcagtgggatggggagctggaaaggggatggagtggraatagaatcttctgctggagtttggctgtccccagctgaactcctctcccaccgtccccagccgaacccctctcgacgttcagatgcttcttctcttctttccttttctgctgtactgctctgctcttctgccagtggagtttggggttttgatgggtataaaatgggggggtgtggtgggccagggtggttttagacaaagcaacatttcagtgagaaaacaggagtaacttgttctcatttagggctgttgttttcaggcttgaaggtggggcctttgcccaggaactgccctcttctacccagtattttcctgcctcctgtccgtatcagaagtatttttaaagcatctattaatgccaatactgttctagatatttggtaaacactagtgaataaaatcaactatatatgtacc

SEQ ID NO: 744493 - DNA, 578 bp, Homo sapiens
ctcataatgaaatgtgacctccagtgttttgaggttggcctggtgggaggtattggatgatgagggtggatccattatgaatggcttagtgctattcccttggtgatgagtgaattcatcagttaattcacaagagatctggttgtttaagagtctaggacatcccccttytttctctctttctcctgtttttaccatgtaatgtgtttactcctccttccccgtgctccataattggaagcttcctgaggccttcaccagaaggagatgcagcactattcttggtgtacagcccacagcactatgagccaattaagcctcctttctttataaattactccaccttaggtatttctttatagtaatgcaaaaatagactaatagacatcttacctactcatgccactgtttcagaagccacccccgttccacttaaatatcatacatgatggaaaacaaaacaatacacaaggtagaaaacatcctagatagcagctcctgagggaaggtacacttctacaaaataaaaatcaatgagtttatattttggtagcctgtgatgttatacagaatagaca

SEQ ID NO: 744494 - DNA, 634 bp, Homo sapiens
cttgacttcacagagggaccctgtcatcggtaattgggtctgatggatgcatgagcccttcactttctcaagaatgtattcttacctttctcacatgttttccaccctctagcctctcttgaatgtcttaaagagtcttacctactaagtgcttacttactaacttacttacttagagagtcttacctactactgcttacctactaagtgcaagaaatgaaacaagtcygatatgcatctgcttatgataagagttaattttagattaattcttcaggatcctgtatctccttaacaccctgagtttttggcccttccaccccattctggcgtcttttaactgctctccctccctgcaggttctactccattcctgcacattctccacactttcactagaatcctgtttactagatccaatttttctatatctctatgttttgagtttttcattgtgtatgctttacacaaagttaaacaactaattaaaattaaatgaaacaaattgaattatgtcatttttctgcttgtgttttctaggtctccatcatgtaatgatcatgaattatatatatgtaaatgtatgtatggtgtgtgtatctcctcatcttgtgccaatttacgtcttataccc

SEQ ID NO: 744495 - DNA, 609 bp, Homo sapiens
tctattctcttccactgacatgttatgaagaattttgttccaccttttgtcttcctaaactgtttcttttgattaacagttctaggtttacaggccaggcacggtggctcatgcctgtaattccagcacttcgggaggccraggcgggtggatcacatgaggtcaggagttcgagacgagcctggtcaacatggcaaaactgcatctctactaaaaatacaaaaattagccaggcatggtggcacacgcctataatcccagctactcaggaggctgaggcaggagaattgcttgaacctgggaggcagagttgcagtgaaccgacatcataccactgcattccaacctgggcgacagagcaagactctgactcaattaaaaaaaaaaaagttctatgtttacagacagacactgaggatattttctactatcttctgacctctactgccgctgtggcaaagtttgctctgtttgattatttgcaggaatgtttttttactctagttgcttttaagatcttctctttggtaatcttcactgtacttcctgaatctgaatggtgatgttttttgttaattcttaaaattctactgtcatctctctgaatgc

SEQ ID NO: 744496 - DNA, 631 bp, Homo sapiens
ctataacccccggaaatagactccagggaagcttcgcgggcactctgaggtttgactccaggctgcgggacccgcacacctctctttccaacccttccctctttcatggggatgggaggagcgcccggaaagctccgcccccgtcgcacggtccaaraggcaggcgggtgcagggagaggtggcacgaggccgagagacgggagagcccgcccaggtgactggagctggaggcggagacacagtccgggaaggggcccgccgtatagtacggaagatggagccccgcaagcccgtacggaacagagactaggaggattggaaggaaaaagaaaacaagggaaatgaaatgcgcccctcctccaggtaggggcggacacaccccgcccccccactccgggcggaagagttactctcgggaagcttctcgtggggagtggaggaagaacgtggaggccccgcccccaggacaagaatcaggaggaggaaaagtcctgtcaggccccgggcccagcctcccggcagaccggcccgccccctcctcgccggcggcccaagcaggtgccgcccctcccccaagcccggcgcccactctgccgcccggccagccgcgcgacctgcttcctcgcgccc

SEQ ID NO: 744497 - DNA, 625 bp, Homo sapiens
acatttcatgctgatctacccttgttctcttgtggtctctgttccaatcaatgcaacattaggagaggatgaactatgaagaggtaccttctgtagctttagcatactgcctgttcttccacacggcaaacaaaatcataattgatatcacattacagtagtacaaattaagcttagtccsttgaatatttgcataggggtcgttatcttcaatatcttgtaatcacctctcccagaaaataacaacaaaaggcttgtctgcctttatatgaatagaaatacaggtgattaataagtttaaagaagtacagcagtagaatattactacaggaaattaataacatgtaaagtggagataaaacaactttcttatacagagttacataaggaaaatactgatatattgttgcgtatagtttttgtttcctattaaaataccattaaataagattacaaaaataaatttttcatcatactaatggcaccattaaacaattaaataaatacacattcattgcagaaactttagaaaatactagttgagcatccccagtccaaagatctgaaatctgaaatgctctaaaatccaaaactttttgagtgctgacatgctcattgaagcctt

SEQ ID NO: 744498 - DNA, 612 bp, Homo sapiens
atgcttagaaggaatgctaaatagtgctttgttaggttttatacatgagattcagggaagacttttctaagtaagtgatagttaagctgaggtctgtagtaaatgtagtaaacagtaaaggggagatcagttaaggcagatggartaacttgagtgaagggccatggcattttaaagaaactgcatgaaggccagtattggctgaagtcaagagtagcagagaggggactgattttagaagaggaacagcagacacctgctgtgtactgtgcttgcgttttggaatacaaagacaaacgaaacagtgtcctgttttagtatttacagtgtagtggagggagacagaaaaagaggtaggcagaatgcagtgttacaggcaccctaccagacatctttagagagtgctgtagggagattaaagatagtggtaagtttgatgaaactttgaggaaacggtttctaaataatctccagagttaacttttgtgggtttttgtttgtttttttttagtttctatttgtgatgaaaacacacaagagacatgtaaagtgtttggacgttttccgataacaggtgcttggtggagagtgaaggtacaagtaaagcctgtg

SEQ ID NO: 744499 - DNA, 612 bp, Homo sapiens
atgcttagaaggaatgctaaatagtgctttgttaggttttatacatgagattcagggaagacttttctaagtaagtgatagttaagctgaggtctgtagtaaatgtagtaaacagtaaaggggagatcagttaaggcagatggaataacttgagtgaagggccatggcattttaaagaaactgcatgaaggccagtattggctgaagtcaagagtagcagagaggggactgattttagaagaggaacagcagacacctgctgtgtactgtgcttgcgttttggaatacaaagacaaacgaaacagtgtcctgttttagtatttacagtgtagtggagggagacagaaaaagaggtaggcagaatgcagtgttacaggcaccctaccagacatctttagagagtgctgtagggagattaaagatagtggtaagtttgatraaactttgaggaaacggtttctaaataatctccagagttaacttttgtgggtttttgtttgtttttttttagtttctatttgtgatgaaaacacacaagagacatgtaaagtgtttggacgttttccgataacaggtgcttggtggagagtgaaggtacaagtaaagcctgtg

SEQ ID NO: 744500 - DNA, 612 bp, Homo sapiens
atgcttagaaggaatgctaaatagtgctttgttaggttttatacatgagattcagggaagacttttctaagtaagtgatagttaagctgaggtctgtagtaaatgtagtaaacagtaaaggggagatcagttaaggcagatggaataacttgagtgaagggccatggcattttaaagaaactgcatgaaggccagtattggctgaagtcaagagtagcagagaggggactgattttagaagaggaacagcagacacctgctgtgtactgtgcttgcgttttggaatacaaagacaaacgaaacagtgtcctgttttagtatttacagtgtagtggagggagacagaaaaagaggtaggcagaatgcagtgttacaggcaccctaccagacatctttagagagtgctgtagggagattaaagatagtggtaagtttgatgaaactttgaggaaacggtttctraataatctccagagttaacttttgtgggtttttgtttgtttttttttagtttctatttgtgatgaaaacacacaagagacatgtaaagtgtttggacgttttccgataacaggtgcttggtggagagtgaaggtacaagtaaagcctgtg

SEQ ID NO: 744501 - DNA, 572 bp, Homo sapiens
tgtcattggtctgtgtgtctgtttttatgctagttccatgctgttttggttatcaaaactttgtagtgcatttttaagtctggtagtctgatgccaccagcttttgttctttttttttttttttcccccaaaattgatttggctctttggggtttttaaaaaaaaatttaraattttttttctgtttctgtgaagaatgtcattggtaatttgataagaattgcatttaatctgtagatcactttaggtagtatagatgtcttaacaatatcaatttttctaatccatgaacatggagtatctttccatttacttgtgtcctgtttaatttcttcatcactgttacatagtttttcttgtagagggctttcacctccttgactaaacatattaagagaattttttttataacttataaatggtattgctttcttgatttttttcagatagtttgctattgatatatagaaatgctttactgaattcacttaatatttgtaagagttttttggtggagcctttaggattttctatagcttcaagattatgccattcgcaagcaggaacaattg

SEQ ID NO: 744502 - DNA, 562 bp, Homo sapiens
acatctcagttggtttctcctgaatgcctctctgttgattttcaaacaaaaccagcaatcattactgtgtttcaaagcccctgcatgatcaaactctaccttgatctctaaggtaactctctcagtagagwaccatagaggtgaaatgcccatctcattgcgtcatttcagaggataactaatattgacgtgacttatcactagtgagtaaactttcatcacttggttaatatggttccacactgctaatttccttttgcattatctcttctttggagtgagtcactatgtgcaatccacactcaagggaagcgaaatcaagctcaacctcctggaggggagaatattatttgtaattcttctgtgagaaatatttgttccttctcactaatttttatttaataatttattgatatcagtatgggctcatagatatttattttgttctttgggtaaaaccaggtctttctaaaaacttttgttgcacaaattctatctgttttgctgagtggaagctctttgaaactgttttttcccattttgtttgggctatatgtctttt

SEQ ID NO: 744503 - DNA, 425 bp, Homo sapiens
ctagggtggggggagtctgtgaaggatgaaggggaagcagccaggcaaggctggcatctgtcagaggagagagacggggtactgggtggaagagctcaggtggcagcaccacctaagaaagtcttagcggggcatgggcgcacccccgagccaaggtccagcagtagaggatacctgtgcttggcagaagtgacctggtcccagtgcccagctgtgctcattcagtgccggggacagcccaggggatgcatggtcttggcaagacggctgcagtgrgagccatctgtcacctgggtccccatggcagatgccctccatggccacacagaacccctcctgcatgtgtgtgaggacaccactcccagtgcttgagagcctctttcagaagggaaacacagaagagacagtataatgggacaaccact

SEQ ID NO: 744504 - DNA, 553 bp, Homo sapiens
atggaacctggggctatgagaattgtaaaaattgacctgggatagttgtgttggggttatcaaacagaatgctggtattgggaggatcctgggacacatggaggtgttagatcaattggggactgtggacttcttgtttccaggtgaaccttttgaggtgggtgtgaggggttggtaaaacttgaacttgaccttccagtgagtccaaatggctttgacaaacatgtggtgggcaaggcctaagaacagagagtgaaataactagggagccccaawgaagtaggagagttagatgtgctcatgtctcggaaagtaagacgtcgaggagcctctaagcaggtggtccatggtctcatgtggccagagactcagagcaggggatggcatcttgaaggagcagagaaaagctgaatgggtcacagagacactggcagacaatgaggatgtgcaaagttgccaatacatggtgatatggtttggctctgtgtccccaaccaaatctcatcttgtagctcccataattcccacatgttgggggagggacctggtgaga

SEQ ID NO: 744505 - DNA, 615 bp, Homo sapiens
gagtaatagactgatttcatcttgttagtctgggtcaatcaccccagccaacactgtaactcctttgttagtctgttgacttaaaagtaagaggaccccaaagtgtccaggttgcaatcttaacttccattttaatgggattgttgtgtctcctggtggtagcattcctccctctggaactaagacctctaggccagcagaacacaatgtcacgggaacaggaagcaaaaattttgctactggatcactaggggtgatggtgagtggtgctacttccacctcttgattcctggacccataaatcctggttataggagaaacagtactatatattggttgctgattcagagcatacacgaccttctggagaactctgctccagccctgcatmgtattgtcacctagttggcattgtaactgtgacttcaaaaggccattccaccattctataaatccagctactttaggataatggggacatggtaaaaccagtgaatttcataagcataagcccactgctgcacttctttagccataaagtgagtgccttggtcaaaggcaatgctgtatggaacaccatgatggtggataaagcatttcatgagtccatagatg

SEQ ID NO: 744506 - DNA, 624 bp, Homo sapiens
cctatcccagtctgtcttaaatcctggtgttcacttcccttccttagtaataaatgtccttcttgtcatttatttttccagaatagggcaatgttgtctttattaaaaacctgctcaggcaaatatcctttctcctccatgattttcttaatggtgtctgaaaactctgctgcctcttagtcagaagaagctgctgcttcttttgtcttaacatttttaaagctgcctttttctaaaattatcaaaccatccttcactggcattcaattctccaactttagatccttcacctttcttttgctttaagttgccatacaatgacttcatttttcatatcatatcagggtctccaggtatgcctttctttmctgcacccacataatagctgcattttgaatatgagataaaaaggtattttgcaaaaagtgcaaggtttttatgcctatggcacagtgcagcaaattttcttttctttttttttacaatggcccttaagctggactcatttatcttgaaatggtgggcaaacgcagtcacagacctcaatctacagtatgtatcaagcaattcaactgtttattgtaatgtcatggctttgcttcttgagagcacttccagcattac

SEQ ID NO: 744507 - DNA, 623 bp, Homo sapiens
gcaattcaactgtttattgtaatgtcatggctttgcttcttgagagcacttccagcattactactggcactttctgtgggtcccatggtgctgatcaaagtttacagtattgcactaaacatgatgaaaaacacatgagaatgactagaaggtactttttactacaatacacagtttactggagacacgaactgcccaagcaaagacgattagtgacaaacattatttttaagtggattctctcaacacttgagctcaccaaaatagcaatagtcggtaggtaattttttttttttttttacactgggtctcactcccgttgaccaggctggagtggastggagtgatcacagttctctgcagcattaacttcctaggctcaggtgattttcccacttcagcctctcgaatagctaggactgcatgcgtaccatcatgtccagctaattttttgtatttttagtagacacaggatttcaccgtgttgcctaagctggtctcaaactcctgtgctccagcgatccacctgcctcagcctcctaaagtgccgggattacaggtgtaagttattgtgactggccccaaatttttatttatttatttagtataaacttggggataca

SEQ ID NO: 744508 - DNA, 623 bp, Homo sapiens
gcaattcaactgtttattgtaatgtcatggctttgcttcttgagagcacttccagcattactactggcactttctgtgggtcccatggtgctgatcaaagtttacagtattgcactaaacatgatgaaaaacacatgagaatgactagaaggtactttttactacaatacacagtttactggagacacgaactgcccaagcaaagacgattagtgacaaacattatttttaagtggattctctcaacacttgagctcaccaaaatagcaatagtcggtaggtaattttttttttttttttacactgggtctcactcccgttgaccaggctggagtggagtggagtgatcacagttctctgcagcattaacttcctaggctcaggtgattttcccacttcagcctctcgaatagctaggactgcatgcgtaccatcatgtccagctaattttttgtatttttagtagacacaggatttcaycgtgttgcctaagctggtctcaaactcctgtgctccagcgatccacctgcctcagcctcctaaagtgccgggattacaggtgtaagttattgtgactggccccaaatttttatttatttatttagtataaacttggggataca

SEQ ID NO: 744509 - DNA, 625 bp, Homo sapiens
tttaaaagagagatgcctcaaaagggaagatttgcaggaaaactctacaatgatttttagaccttcattttgtgtacacatcattttgtgtgcacatattctcatttatattttatacagaaaaaaaaaccctgaggatcagagagattaggtaatctacccaargacatatagatgtagaatagtaatcactgggtgtaaacataggttaaataccaacagaccatgatgtgatcactgtttggggaggatcactcgatgatgattatgacaatgacaataagaacaaacacttgggcagtactgactatggactccatgctttctaagcatatacagttgtcactaactcatctcatccgcacagaaaccctcgaagtgtaaactattattatccccactttaccgataagaaaactaaggcacagaaaagtaacttgctcaaagacatacagtaactgtacatagttaagccaagattaaaactgaggcaggctagcttgaaagtctgtgctttagctctctactctcttgacttgaaaatggcaaagtgtgtctttattcagcaagccacttggcaagtcttgatcttgaagacaacagaagatgtgtggattgaattgaa

SEQ ID NO: 744510 - DNA, 395 bp, Homo sapiens
ttctgtttatgtgatgaattacatttattgatttattgatttgtggatgttgaaccaaccatgcatccatcccagggataaagcctacttgatcgtggtggataagcttttggatgtgctactggattcattttggaagtattttgctcaagatttttgcatcaatgtttatcaagaatatttgcctgaagtttttttgytgttgtttttgtatctctgccaggttttggtatcaagataattctggcctcatagaatgagttgggtaggagtcatccctccctatttttttttttcaaaagttttagtaggaatagtaccagctctttgttgtacatctggtagaatttgactgtgaatctgtcttttcctgagctgtcttttgtttgtaggct

SEQ ID NO: 744511 - DNA, 590 bp, Homo sapiens
tactatgataataatctttttctattgtaattgtaagctcaaaagttacaccggggtttgtgactgagttactgtgttataactagtggggttgggacaattaggataacacagtttttgaaagtggcccgaacatatagtttgttaaaaaccagggatacgcttatgggtttttaagaatcaagaatgctgttatagtagctagatttgggattcatctattcattcattcatccttttattcttttttttttttttttgagacagagtttcactcttgttgcccagactggagtgcaatggcactatctcagctcaccgcaacctctgcctcccaggttcaagcaattcttgcgcctcagcctcccgagtagctgggattaaaaccatgtaccgccacacccrgctaattttgtatttttagtggagatggggtttctccatgttagtcaggctggtctcgaactcccgacctcaggtgatccacccgcctcggcctcccaaagtgctgggattacaggcatgagccattgctcatgttaagatgttaaagccatcctttaacatctgcatatgggtccagcactgct

SEQ ID NO: 744512 - DNA, 521 bp, Homo sapiens
tacatccagacaacggagtattattcactgctaaaaagaaatgagctatcaagtgatgaaaatacataaaggaaacttaagtgcatgttactaaatgaaagaagcaaatttgaaaaggctatatagtatattatttaaactatatgtctttctagaaaaggcagggtcctatggagacagtaaaaaaagatcagtggttgccagaggttggggactgcagggtgaagaggtgagctgcrgaggatttttagggcagtgaaactattttgtatgatattataataataggtacatgtcattacatttatccaaacctttatataaccccaagaagtaaccctaatgcaaagtctgggctttgggtggaaatgctgtgtcaatgtaagttcattagttgtagcaaatgtacccctctggtggggaatatcaatggggaggggggggcggtgctgtgtatgtggagggtaggtaggcgatacttaagaagtccctgtaccttcctctcaattttgctgtcacac

SEQ ID NO: 744513 - DNA, 537 bp, Homo sapiens
ttgctgtcacaccaaaactactctaaacagtaaaatttattttcttaaaaagagtagaagacaaggccaaatgtaagctcttgtttaggaaactcaggtagtccagttcaaatggatgtgtacacaaggctggagtgctgagggttgtggcatgagatgcaagtagggccagccagaaacaaataaggtgactaagagtgggattccatccttttcrcttttgtatgtataagtttttgtttcttaaaaaagcagccaccctctgtaggatgcatgggttttgacagctggaaggccattggtttatagtggcttataatacagtggaatttgcaatgtggaattttagaggcacagggaaaacttgggctggttttgttcagcaggaatagactgaagtagactgaggttccctgggacctcagaacgatgctaggataagaaaacaagagccggaagttgagcaccatgatgagggaagggcatggaagaaaaggcatggaaggaaggccatcctgggagatgcctatatatcta

SEQ ID NO: 744514 - DNA, 644 bp, Homo sapiens
cagggttttaaacccaaaccaaccaaacaaaaacacagcttgttttcaatccttaaatttgcagaatatatatacaaattttgctcaataaattactgttaagtgtcacaggaatccatttccataatagctaggaggactacgaagatcccaggctctcctctctctgggaaattgctcccaggtgcaagctctggttctttcttgagcttgagagaaatgttcaatccttgatagtttcaaccaggaaagagttagttttaagcagagaataatgaacaatgaaatggtaggaaatgatttgtgtaggcacactactgagaggtagagatgcaaagaaaattcagaagttcacaatttttcttgtatgtgagtaccagtttccagcctatgaaattctgctcctctttcaaaaccctaattcaaatgctaccttatacattaagtctttcttgattcagattctatttggaawtaagcttactcttccccaatttcccttcccatttaacttgtattgtggttatttacatggttctattaggtcctacgtgactgtgagtgactagcttttatttgcccttcattttatccatacatcctacttgatactgtatgcaccattgcataccctttctttcatt

SEQ ID NO: 744515 - DNA, 442 bp, Homo sapiens
tgtcataaatacaccctggctggagctgcaaactctatcaataacaacaaaaagccatgacatgagcctttcctgtatttgcaacactctttggattgccatggcaacaatagttttaattatggagaggcaaaatgataacttttatatcagatgtggctcacttttccctgtggacaaaactctgatttgagagaggctttgcatgtggattttccttctaggctggattttattatctgctctaacagacagctcttttgcttatggaatgaaccagaagaagccaaagcccyggctgaaggggctgctggacactggcccttgtggaggcgaattggaccctttggtctcggaggcagcctgatgtgcttgtcacatgtgcatttaagaaccaagtgagccattgctctcgagggctgcttttggcctcccctttcaa

SEQ ID NO: 744516 - DNA, 524 bp, Homo sapiens
gtgtattatataattactaggctaaacatatacattatatatttcactatatcttatttttagcctgtttccagacatggtgcaacttctacataaggttttggtttaaaactacctgtggagagttggatagtgactacatctttttaacaatgcaagtgttaataaacttaatgtcactcacaccaaaaataatatgtttatactaagagttctttaactaatgaattgatgttttcttctggagaagaggaaacataataggtggcatttattagaaagtatcttcatattgacaacattggtagaaagcaaaaattcagctgtcatttaacaaatattttcaccattcatttcttttgaagaaataattcaaaaggagtgattttaaagaaaatattyatttggatgatgccaatggtttggctatctacattttaaattgtgtatatatttctatttgaagtctcagtaaaaatatttagctcattatagacataataaatgttctgtaaaactggtaa

SEQ ID NO: 744517 - DNA, 602 bp, Homo sapiens
tgtatttagtaggaattatctaaattttttatctaatattaatagtttaccttaagtaatgtcgcattattcacaatttctattagtatttagtaatctctttctcttctttccttcctcccttcctctccctctttctctccctctccccctgcctctttctctctctctctttttctcctcctctttcctccccccgttgaatgagaggctgaaaaacctttgttttcccttgttttcctcagagctctgtctcctcaggcttcatttggtaaaagcgagtttagatgagataattttagttctttgtgtgaagctatttttaaatgtaatttttgctaataatgcaattagttgtggtttttgcataatttgcaataaggtgatgaagtttaagaagcttcattttattttaattaacagttgatcrgtgctaataaccaagcctctgctaacaacaccagctttaactcttaaaaaatatgcaccagacacgtaactccacctactccttcccctcccccctttgaaatatttaataagaatgccatgtataaaattaccctgtgggagagaacaggagctgcattcccatatagatc

SEQ ID NO: 744518 - DNA, 583 bp, Homo sapiens
ttaaagatcacctatcaaatctgggttattcttccaacagctgtgatatggtttggctctgtgttcccacccaaatcttatcttgaattataatccccctaatcctccacatgtcaagggagggacctggtgggaggtgattggatcatgtgggcagtttctgccatgctgttctgatggtgagtgaattctcacaagatctgatggttttataagcatttgacaatacctccttcacacactcccactctcttctgccatcttgtgaagaaggtgcctgcttctccttccacmaggattttaagtctcctgaggcctccccagccatgtggaattgtgagtcaattaaacctcctttgtttataaattacccagtctcaggtaatatctttatagcagtgtgaaaacggactaatacaagctgtatgtagtcactccttaattccttcattcatgtattaaatcaaatctagtagttaacggttcaaaagaaaggtcacaagtagtcacaggccagccctgtgatgtcaagtgcttctaaatgctgtttaattttgcaaataaacattctttgagggtatct

SEQ ID NO: 744519 - DNA, 606 bp, Homo sapiens
aatggcctgtgccccacacatccccaagcacagtcccctataggtccccacaatgatgcacatgagccccctacagatagcacacacatctcaacagtaggtgcagatcttagcagccaatccaactctgctagattgggataatgtgtgcaatctgaacacatcaggtcactgcactagggaaaataaataggaggccctcattccaggcctggctttgtgggattgaaaaaaggcacacaatcctaagacttctcctgtaagaaggaacaagagcagtagagtatgggyatccattgataaggtctcgagacctccagaatctagagagtctcactaacgaagctctcaccagtgacaagctcactggtgaaggtctttctctcttgaagccagtcagtaaaggctggaagaggtgactacttattcaaatgcaaagaaacaatgcaatgcttctaggaaaacaaagaatcaaaaaaacacaataccaccaaaagaacaaaataaagctccagagactgatcttaaaaaaaatggatacctatgaattgcccaacaaagaattcaaagtaattatctttaataaaactcagtgagccacaagag

SEQ ID NO: 744520 - DNA, 606 bp, Homo sapiens
aatggcctgtgccccacacatccccaagcacagtcccctataggtccccacaatgatgcacatgagccccctacagatagcacacacatctcaacagtaggtgcagatcttagcagccaatccaactctgctagattgggataatgtgtgcaatctgaacacatcaggtcactgcactagggaaaataaataggaggccctcattccaggcctggctttgtgggattgaaaaaaggcacacaatcctaagacttctcctgtaagaaggaacaagagcagtagagtatgggtrtccattgataaggtctcgagacctccagaatctagagagtctcactaacgaagctctcaccagtgacaagctcactggtgaaggtctttctctcttgaagccagtcagtaaaggctggaagaggtgactacttattcaaatgcaaagaaacaatgcaatgcttctaggaaaacaaagaatcaaaaaaacacaataccaccaaaagaacaaaataaagctccagagactgatcttaaaaaaaatggatacctatgaattgcccaacaaagaattcaaagtaattatctttaataaaactcagtgagccacaagag

SEQ ID NO: 744521 - DNA, 567 bp, Homo sapiens
tggggagaatggaggcagctacctccagtttctattggcaacattctgagtcccacatcatggcatcagcaaaatgcagcatctatggtatctgtgccatttgtgcctgtggtgtcttcatggcaccagctctgtggtctgcccatctcttcctcctagacattttatgagctagccaatatcctcttaacaaaatccaattctgcttaaattgaaaagggtttgtatctattatgagtcacttagtgttctaatggtttacttaattttacacatacctttttctatgtcacagcactttacaaatattaatcatttcattcagctcagatgccaagtctctggagtagaaaatattatccccattttatacaaacggaaaccaaggtccagagaggatacttastttgccttagataactcagttggtaagtgcagaactggtattcaaatccaggctgtccatgctcttaaccattcttttcccctgatccccagagagatctttccccattatcttctcttgcaaatcccctctccccaccacttctctctgccttcatgctt

SEQ ID NO: 744522 - DNA, 612 bp, Homo sapiens
ataagaaatgtaatgaaagtccactgtattagtctgttctcacgctgctaataaagacatacccgagactgggtaattcataaaggaaagaagtttaatagactcacagttccacatggctggggaggcctcacaatcatggcagaaggcaagggaggrgcagaggcgtgtcttacatggcagcaggcaagagagcctgtgcaggggaactgacctttataaaaccatcagaccttgtgagacttattcactatcatgagaccaacacaggtaaaacccattcccatgattcaattacctcctaccaggtccctcccatgacatgtggggtttatgggagctacaatccaagatgagatttgggtggagacacagccaaaccatatcatccatcgagtagaagaaaaatgctacctaatggaaatatgaaaatacacaaagaaatgaatagcactggaaaagataactaactacatatgtaaatacgtaagatttgtttcttatcatttaaatctttaaaaagataatcatactggtttgctagggctgccaacaaaataccacagtctgggtggcttaaacaacagcaatttattttctcacaattctaga

SEQ ID NO: 744523 - DNA, 612 bp, Homo sapiens
ataagaaatgtaatgaaagtccactgtattagtctgttctcacgctgctaataaagacatacccgagactgggtaattcataaaggaaagaagtttaatagactcacagttccacatggctggggaggcctcacaatcatggcagaaggcaagggaggggcagaggcgtgtcttacatggcagcaggcaagagagcctgtgcaggggaactgacctttataaaaccatcagaccttgtgagacttattcactatcatgagaccaacacaggtaaaacccattcccatgattcaattacctcctaccaggtccctcccatgacatgtggggtttatgggagctacaatccaagatgagatttgggtggagacacagccaaaccatatcatccatcragtagaagaaaaatgctacctaatggaaatatgaaaatacacaaagaaatgaatagcactggaaaagataactaactacatatgtaaatacgtaagatttgtttcttatcatttaaatctttaaaaagataatcatactggtttgctagggctgccaacaaaataccacagtctgggtggcttaaacaacagcaatttattttctcacaattctaga

SEQ ID NO: 744524 - DNA, 612 bp, Homo sapiens
ataagaaatgtaatgaaagtccactgtattagtctgttctcacgctgctaataaagacatacccgagactgggtaattcataaaggaaagaagtttaatagactcacagttccacatggctggggaggcctcacaatcatggcagaaggcaagggaggggcagaggcgtgtcttacatggcagcaggcaagagagcctgtgcaggggaactgacctttataaaaccatcagaccttgtgagacttattcactatcatgagaccaacacaggtaaaacccattcccatgattcaattacctcctaccaggtccctcccatgacatgtggggtttatgggagctacaatccaagatgagatttgggtggagacacagccaaaccatatcatccatcgagtagaagaaaaatgctacctaatggaaatatgaaaatacacaaagaaatgaayagcactggaaaagataactaactacatatgtaaatacgtaagatttgtttcttatcatttaaatctttaaaaagataatcatactggtttgctagggctgccaacaaaataccacagtctgggtggcttaaacaacagcaatttattttctcacaattctaga

SEQ ID NO: 744525 - DNA, 632 bp, Homo sapiens
agaaaataaacaattagccaggtgtggtggtacatgcctgtagtcccagctacttgggaggatgaggtgggtggattgcttgagcccaggagattgaggccatagtgagccatgattatgccactgcactccagcctgggaaagtgagcaagaccctgtctcaaaaagaaaaagaaacacaacagaaaatagtgttagcgaggatgtggagaaacttgtgtactsttggtgggagtgtaaaatggggcagccactatggaagacagtatgacagttttaataaaaactgaaaatagaattactatattatccagcaattccacttctaggtatatacccaaaagaagtgaaggaaagcacttgaacagatatttgtatacctatgttcttagcagcatcattcacaatggccaaaagatggaagcaacccaagtgtccatcgacagatgaatggataaacaaaatatagtacatacattcaatgtaatttattcagtctttaaaaagaaaaaaatttggacacatgctagaacatgaatgaacattgaggtcattatcctgagtgaaataagctattcacaaaaagacacatgctgtatgattccacttgtatgagttatttaaagtagtca

SEQ ID NO: 744526 - DNA, 569 bp, Homo sapiens
tgcatttccaactgaggtacctggttcatctcactgggactggctggacagtggatgcagcctacagagggcgagctgaagcagggcagggtgtcacctcacccgggaagcgctaggggtcaggagatttccctttcctagccaagggaatacatgacagactctacctggaaaaacgggacactctagcccagatactgcacttttycaatggtcttagcaaatggcagaccaggagattctatcctatgcctggctcggcaggtcccacgcccacggagccttgcttactgccagcgcagcagtctgagatagacctgcgaagcagcagcctggcagggggaggggcgtccgccactgctgaggcttgagtaggtaaacaaagtggctgggggaagctcgaactgggcagagcccactgcagctctgcaaggcttgctgcctctaacactccacctctggggtcagggcatagctgaacaaaaggcagcagaaacttctgcagacttaaacttcccagtctgatagctctgaagagagcagtggttctcccaacacgacgtttgagc

SEQ ID NO: 744527 - DNA, 568 bp, Homo sapiens
tgatacccaggcaaacagggtgtggagtggacctccagtaaactccaacagacctgcagctgaggggcctgtctattagaaggaaaactaacaaacagaaaggaatagcatcaacatcaacaaaaaggacatccacaccaaaaccccatccgtaagtcaccaacatcaaacaccaaaggtagataaaaccacaaagatggggagaaaccagagcagaaaggctgaaaattmaaaaaatcagaacacctcttctccaccaaaggaacacaactcctcaccagcaagagaacaaaactggatggagaatgagtttgacaggttgacagaattaggcttcagaaggtcggtaataacaaacttctccaagctaaaggagcatgttctcacttgttgcaaggaagccaaaaaccttgaaaaaaggttagacaaatggttaactagaataaccagtgtagagaagaacttaaatgacatcatggagctgaaaatcacagtacgagaacttcataaagcatacacaagctttaatagctgatttgatcaagtggaagaaaggatataagtgaat

SEQ ID NO: 744528 - DNA, 524 bp, Homo sapiens; identical to SEQ ID NO: 743667

SEQ ID NO: 744529 - DNA, 504 bp, Homo sapiens
gaaacggggtttcaccatgttagccaggatggtctcgatctcctgacctcatgatccgcccgccttggactcccaaagtgctgggattacaggcgtgagccaccacgcctggcctttttttgtttgtttgtttgtttgttttgttttgttttgttttttagtagagaaaatgtctctctatgttgctcaggctggtcttgatctcctggagtcaagcaatcctcccacctcagcctcccaaagtattgggattacagacatgagccactgttccctgccccatttttaatgtrtctgtttggccagagggtgggatggaagaagctgggaatagaaccctggtccacattttatattgaagctgtggacagaggaagatgaggcagtgaagaaaactgaggctgggccagagtaataagagaactgggagtcattctctccagaaacagcctaaagaaggaaggcagatgaaagtacaggctgacacagaagtgtgggtaggga

SEQ ID NO: 744530 - DNA, 542 bp, Homo sapiens
tcaccgcagtcacgttgacacctaaaattaaccatctcagaaagccaaaaggtggctggggacgcgggggcagcatcagccggctccccgccccctgaccaggagaaggtgcgcaccgtaagcactccaccctcccattcggcctctggccccaggtgcagccactgtggactcaccctgcctggtgcggaacactccctccctgtgatgtgcagtccgcagatggaagcctggagggcccacacgcttccgaagcagggtggccctaggctggcttgtcagmggaagctgtctagcggggatatggcggtggcagaagtgagggggctgaggggcggggcggactttagcaggaggatagaggggaatgtccttgtttcataaagctgaagtgtgcccaagcaatgtcccggtatctctgtgaaaggttggctgcctggtgtgactgagagaccggagatttggccctggaaggtcaagtgtggtggtctttttcttttttccactttttaacctttttctactgtggggagatcgcccaa

SEQ ID NO: 744531 - DNA, 549 bp, Homo sapiens
ggtcttccatggtgtgctggagggcctttctgggtttgagaacagcacagcctcttgtcccctagacctgtcttcttgatggggaaagttctgagactggacaaggtgagcagagaggacggcctggtggagtgtgaggaggggagagcattcaccacagcccctgggccagcctcacccacccttcctagaggacagcacaatgaggggrcagaggccagcagctggccatggcaggctgagtccaaggctgattgattctgggtgcctcgtcttctctgataagtggtagcttgggaccagaattaaatttatttgaaacacgtaaaggaaaatgatgctttcccactgcaatctggacaggcagattcacacctgatacctatacctgcttctctatgaaggcagcagcaagtattgccaaacagaggtaaggagcatgatacatgctctccctccctttccacagaccccggtgaggaaagctggtcacgtctactgtcaggcaaatagcccagaagcttttgagtgagctgagggctgacactc

SEQ ID NO: 744532 - DNA, 549 bp, Homo sapiens
ggtcttccatggtgtgctggagggcctttctgggtttgagaacagcacagcctcttgtcccctagacctgtcttcttgatggggaaagttctgagactggacaaggtgagcagagaggacggcctggtggagtgtgaggaggggagagcattcaccacagcccctgggccagcctcacccacccttcctagaggacagcacaatgaggggacagaggccagcagctggccatggcaggctgagtccaaggctgattgattctgggtgcctcgtcttctctgataagtggtagcttgggaccagaattaaatttatttgaaacacgtaaaggaaaatgatgctttcccactgcaatctggacaggcagattcacacctgatacctatacctgcttctctatgaaggcarcagcaagtattgccaaacagaggtaaggagcatgatacatgctctccctccctttccacagaccccggtgaggaaagctggtcacgtctactgtcaggcaaatagcccagaagcttttgagtgagctgagggctgacactc

SEQ ID NO: 744533 - DNA, 691 bp, Homo sapiens
tgtaagtggattgtacctttacagacataaatacatattcagtcataatatctatctatctatctatctatctatctatctacctctatattgtatgtactgctctacaatttgctatctagaatgatacactttttaaaatttttttctgggggtggctggcaagatgactgaataggaacaactccagtctgcagctcccagtgagatcaatgcagaaggcaggtgatttctgcatttccaattgaggtacccagctcatctcrctgggactggttagacaatgggtgcagcccatggagggcaagccgaagcagggtggggcgtcgcctcacgcaggaagcacaagggggtcagggaactccctcccctagccaagggaagccctgagggacttccgtgccaagaggaaaggtgccttctggcccagaaactatgcttttcccactgtctttgaaacctgcagcccaggagattcctacaccaccagggccctaggttttaagcacaaaactgggcagccgtttgggcagacaataagctagctgtaggagtttttttccataccccagtggcacctggatcgcaatcgagacagaacaattcacttccctggaaagggggctgaagccacggagccaagtggtctagagcatcccaccaccactgggcccagcaagctaagatccac

SEQ ID NO: 744534 - DNA, 631 bp, Homo sapiens
aaccactgtgacatgtgtatacctatgtaacagacctgcacgttctacacatgtatcccagaacttaaactataataaattttttaaaatttttattggcacatagtaggtgtttatatttatagggtacatgagatattttgttacaggcatgccatatgtaataatcacaggaatgatacacttttaaataaaacataggtatacaattcataagaaaattgaggattacatagacttataaaatagccatgaaccccaaatttagaagcctataaacaaacaaaatcccccacagactaagtaccattgaaacaataatgtgtcagtgggcccagcctgccagtcccaggaagccctggtctggttattcttcaattagcaacaagactatgagctattgaaggccttgtgaacaacttgtgtttttccacaatggaacctgyactttaatagtctaagaattcctgtaatgtagctgatgcaatgcaaacaaaagaaagaaaagctcaaactaaatctggtcagctgagaatagcaatgatgcaatgactgcatagcttttagttctcaatgatgtcattgcaagtgtgaatttgatgctgtgataacacttatcaaggaatgagta

SEQ ID NO: 744535 - DNA, 511 bp, Homo sapiens
tttagtttcgcaaggtgaagagagttttgaagactgcacaacaatgtgaatgtacttaatgctaccgaactgtacccttaaaagtaacatggcaaattttatcgtatatatgttttgccacagttaaaagtttaaaaaaaattaaacatttaagaaatgagtggagaaaaagtaaacattcttcccatgttatamttccctgtctttccagtttcctaccttcccatagttaggatgaccgtacaatctgtttgcttacgacagttctggttactcctgttgtccttgtgcatttttccatgggtcgccttcactcttaaaactgttgtgggtgataatctttatgctcaccttgtccaatacacctttggcaggcgaggacagccagagaacttaggcacggtgtgcatactgctagcatcattagtcattcattaactgttcattaactcattcacaaagagcctctgtgcacctcctgcctgtgatcatactgtgccctacatgggtg

SEQ ID NO: 744536 - DNA, 619 bp, Homo sapiens
ccttccccaacagtggtgttctgtgtagatacaggcctctagagcaagcacagatgggggtggagctgtggggtcacaccatcctgagtggcgcagttccagccctgtaactcctggatgtgtgacttgggagaagttatcaaccctctctaggagtgaggttctcatctgaaaaatggggaactactagtgcctaaattaaaggactgttttcatgattgaataagataattcatgcaaaattgttggcatgcagtgggcactcagtagatatcagttctcttctcttccttcttttctctgccaccttcttcttctcttcctcctctttctccctgctttcccctccccatgcctccttctccttcttcatctccttcctgttttccatctccttctytcttcatccttcttccttttcttcccaattcctcctctgtcttcttaatgatagctttaataatagacccacatcttctgataatcaagattactttctatcagccatagaaaagcaacagtgcatgaaccaagaagtagtgggctaggagatgtgttgctttcaaggtaaactcatccatttcattccatctgagccaccttatggttcaagatgttc

SEQ ID NO: 744537 - DNA, 619 bp, Homo sapiens
ccttccccaacagtggtgttctgtgtagatacaggcctctagagcaagcacagatgggggtggagctgtggggtcacaccatcctgagtggcgcagttccagccctgtaactcctggatgtgtgacttgggagaagttatcaaccctctctaggagtgaggttctcatctgaaaaatggggaactactagtgcctaaattaaaggactgttttcatgattgaataagataattcatgcaaaattgttggcatgcagtgggcactcagtagatatcagttctcttctcttccttcttttctctgccaccttcttcttctcttcctcctctttctccctgctttcccctccccatgcctccttctccttcttcatctccttcctgttttccatctccttctttcttcatccttcttccttttcttcccaattcctcctctgtcttcttaatgatagcyttaataatagacccacatcttctgataatcaagattactttctatcagccatagaaaagcaacagtgcatgaaccaagaagtagtgggctaggagatgtgttgctttcaaggtaaactcatccatttcattccatctgagccaccttatggttcaagatgttc

SEQ ID NO: 744538 - DNA, 598 bp, Homo sapiens
atagctttaataatagacccacatcttctgataatcaagattactttctatcagccatagaaaagcaacagtgcatgaaccaagaagtagtgggctaggagatgtgttgctttcaaggtaaactcatccatttcattccatctgagccaccttatggttcaagatgttcttaattacttcttcagttttttacactcttcctaagacatgagtaccataactaaagtatctaggtgtgttccatccagaaaagaaaagattacccacctgccctggagccatgttgggcttcctgtagaggagccccaaatagaatgctctggggtcatgagatcacttattgactcaagcagagcctgtggaaaacctacacactaaaatgaattatctcaaaacaacaagtwgagggcaaggttgccgaggtcaggttgtgctagcaaacctggacctacaccacgggggagagttcaaacgcagttcctatggcaaatatttgcctgatgtttgctgttacctcagctcttgctttgtttatctgaaggtcacgtcacctttcaagttcccatctgactggcagctggaggccctggcgaccaca

SEQ ID NO: 744539 - DNA, 552 bp, Homo sapiens
ctatttgaaaacacattcttctttcttttctattttgttttttaaaattgctgcttctactagtttatgttaatttcacagcctgactttgtccagcatttcccatacatggattctcacttaaaccccagaaatatccctgtgccatccaaggcaaaccatggacctgagcctggcagcccctgtgctggcacatctggaagtccccagatgtggctgcatctggggccttccagactgaccaaggccggasaacaaggccggagactgcaaaccacaagagaaggttatttagtgcattggccccaaacagcccaaggaggggctcctgcctgccatatctcagctctgagacgtggggctcacggctactctgaagctccttgtctgtgtccatcacatggagagggctggtagctcatgggattatcaggacaactggaagagatggtacctgaaagtcctgtgtgggcctggcaggcacaggctgccctggaaggcacatgacctaggtgttggtctgtccccagcaggagctctgtcctgaacaaa

SEQ ID NO: 744540 - DNA, 426 bp, Homo sapiens
ttgtcttgaaacttacatgaatttatatgcactcgagagcacagaggtgagctcacgtgactttctcttccctgggttgccatcctctgcgtattttcttttttttttttttgagacagagtctcagtctgtcgcccatgctgcagtgcagtggcacaatctcagctcactgcaacctccgcctcccaggttcaagtgattctcctgccttcgcctcctgagtagctgggattmcaggcgtgcaccaccacacccggctaatttttcttttttttttttttttttgtatttttagtagagacagcgtttcaccatgttggtcacgctgatctcgaactcctgaccttgtgatccgcctgccttagcctcccaaagtgctgggattacaggcgtgagccactgcacccagcctctctgcatattttc

SEQ ID NO: 744541 - DNA, 551 bp, Homo sapiens
tggctaagactgtgcctagcagggtgattgtggatgggtcatttcacccctcaaatgtaaaatgaggtttctaatagtacttcatcatagagttattaggagggttaaatgagttagtatttgtaaagcattaaaacagtggctgctgggtttattaaataagtgctcttccacacttctttccctagccaacttcagctccccctgtagacctcggtgtgcgtgtttcttctagatatctgcagcacctcctccatggttacgctgagaggactgtggtcaatgcattattacctctgtgactgctgactttctctctccactgtgcatacattcctggagagcaaggacgaggtctcccgtcattcctgctctgtcccctgcacccagggtgatgyggtcagggtagcacctccatgaatagtcactggacgaatgaacgaccaaatacctgaatggatgggctttgcagcgactgctgcatgctggggacttaacgaagggcatgggcctctcccaaggaagaagctgcagaagggtcttgggaagga

SEQ ID NO: 744542 - DNA, 664 bp, Homo sapiens
ctctgacctaccttcccctcaaggtggccacaggaccctcattgcaaaaggatcctaccccatatttggggcgaggacatgcctcacagagaggccagaaagaatctgaacaaacaggctttggcaagatccctccagttcattaccactgggtcatacccccrggtctttgtgtcttcatcatgtaaaacttaccctgaatacccttgctatgcctctctctggttaatctgtcttttgcaataagggtatggggtagaccttgcaacaccttttcctcattcggaaggcttgctacaggtgccaggtgccagtatgctacaaaaatgctttgccttttttcccccctcattcaaccctccaaagaggcttaaaacagaggtcatttttaactctatgaggaaatcaaggtttagagaattaaagctgcttaaggacacaaagttggcaagggacagagctaggatttgagcacaagcaatcggaccctgcggcctgaaacttcaagcctacaatttcctttatatcctactacttcagttttcagcactcctccacaccatcacacagtcttatctgcacctgcctggtaatacctgggggccatgggggcgtcttagcaccaacttgacatccgtatgtgtcgcacgtaagtgtgtctcaa

SEQ ID NO: 744543 - DNA, 598 bp, Homo sapiens
tttatatgttatttgcttttctcttgctgcttttaggatcctttatttatcttagacttttgagagaaaattattttatgccttggggtgctcttatttcggtagaatctgtttgatgttctctgaccttcctgtactggatattcatatatttctcaagttttggaaagttttctggtattatttytttgaatagagtttctgccccttgctgttgtacatatccctcttgaataccaataattcttagatttggtgtttagaggtaattttctatatcttgtagataattttcattccttttcattcttcttttttctcctatggccatattttttattagcctgtcttcaagctcactaattatttcctccacttaacccattctgctgttaagagcctctagtgcatttttctgtttggcaaatgtatttctcagttccaagatttctgtttgtttgattttttaattattatttcaatctctttgttaaatttttcttggccgggcacagtggctcatgcctgtaatcccagcactttgggaggctgaggtgggtggatcgcctgaggtcaggaattcaagaccagcctgacc

SEQ ID NO: 744544 - DNA, 533 bp, Homo sapiens
cctatggaaacagccctcaaccacacttgccagagaagcaggtggccaccatcagcacagagcctagaaaagataaggcagtccagtgggtgtctacctggagctcttgagccccctcaccccaggatgccgctcagctccgggtgtgcccaggcagagcactgatccaccggcccctcagccgcacccactgaggactgacgccccaggatgggaagcatgcctggaccggtggggacagccagatggactccagtcgatttgccttggacagctggggagcagggcccaggatgctcccaccccaccccaccactccagacagggaggggtgtggttgyaatttctaggatttctctgccactatgcccatcaagaagtgccacctgcctcatcagtaccagggctgaccctcagagcctcccacaggtggggtttgcccagcggccaagagtctttaatacaccccacaattaccagcctcttctagcattccccctgcaccctcaaaatgaccactggccaagggctgt

SEQ ID NO: 744545 - DNA, 582 bp, Homo sapiens
aaaaatgcagacacttcacttggcatctccagtgccttcagctttctgggcctgctctgtttggcatctccattttctgcaggcttattcccctccttgccagcatcagcttttccttttttccctttgggtatcttttctcccttttttgcaggggcctttttaggcttgggctctggctttggaggagcaggtttagcagagacaaccttgcagatcttctctgtggtttgtccttcaccttggctttgtctcctttagcacccccttcagccttcctcttgggcatggtggtggtgggacataggcggtatgccrgctttggtcagtctggggattgttgccccctcttcttcttcctttttttttttaatttttatttttgttggcacatagtaggtgtacatatttatggggtacatcagatattttgctacaggcatataatgcataataatcacatcatggaaaacggggtatccatttcctcaaggatttatcctttgtgttaaagacaatccaattatactcttttcgttatttttaaatgtgcaattgaattatttcgacgatagtcatctt

SEQ ID NO: 744546 - DNA, 582 bp, Homo sapiens
aaaaatgcagacacttcacttggcatctccagtgccttcagctttctgggcctgctctgtttggcatctccattttctgcaggcttattcccctccttgccagcatcagcttttccttttttccctttgggtatcttttctcccttttttgcaggggcctttttaggcttgggctctggctttggaggagcaggtttagcagagacaaccttgcagatcttctctgtggtttgtccttcaccttggctttgtctcctttagcacccccttcagccttcctcttgggcatggtggtggtgggacataggcggtatgccggctttggtcagtctggggattgttgccscctcttcttcttcctttttttttttaatttttatttttgttggcacatagtaggtgtacatatttatggggtacatcagatattttgctacaggcatataatgcataataatcacatcatggaaaacggggtatccatttcctcaaggatttatcctttgtgttaaagacaatccaattatactcttttcgttatttttaaatgtgcaattgaattatttcgacgatagtcatctt

SEQ ID NO: 744547 - DNA, 595 bp, Homo sapiens
acaattaaaaacaacaaggaaatatttagaatttgttcacaattttacttatgatactttgtgtaaaaaggaaaaatgaaatttcatagcttatttcagtttaattttaaagtgtttaatcatgtttgttatatgtggagcttttgaaaataagttaatctttttttttttttttttaatggcagggtattgctctgttgcccaggctagagtgcagtggcatgatcataggttattgcatcaacctcttgagctcaagcgatcctccctgccttagcctcttgagttgctgggactataggcatgtaccaccatgcccagctaatttataattactattattgttttgtagggacagagttttgctatgttgcccagattggtctcaaactcctggcctctcactcctgccgtcatggcctccaaagtttamtttttttaaaagtaactgttagatggaggaatatggtgacccactattgttgagaaatttgttttccacttgtcacgtcacataagatgattgctaaaatattgtactggtgttcggtggtgagtcatatttttgaaagttaataattataaataggtaatt

SEQ ID NO: 744548 - DNA, 669 bp, Homo sapiens
taaaataactgctaacatacatctgttacacagatttcatcacttaacaacaaagtagaaagtaggattgatctaggatacagatataattcctacaactgcatgtcttaattataataaaaagatgatgtgtaataggttatttttcctacagattagaaagagaagcttattaaaatgtttaatcaaatggaaaaatattatgtaagatctatattataaagtttagactggatattaataattgagacctttaataatttggtaaattatattaatggcatctagtccttcagataattcctaaggttttcatcccttctttgcttaggaaattgggtaaccatagtcacaagcaggtagaagcagctcagaggcagaggttagcaagggcagcacaaattcccatgtgcaaagaacagctcctgatcctaaagaactccactgtccaagaaaataataataaatttggaaaactgtcttttaaattatacagtaagatatgttcgggctgggtgcggtggctcacasctgtaattccagcactttgggaggctgaggcaggtggatcacctgaggtcaggagttcaagaccagcctgaccaacatggagaagcccgtctctactaaaaatacaaaaaaattagctgagcctggtggcgcatgcct

SEQ ID NO: 744549 - DNA, 581 bp, Homo sapiens
ttatcacattatctatattatctattcattcatccattcctctatctacctatcaatccatcttacttcttggtgcatttcaaggtaaattgtgacacctgtacacttccccctaaatatttcagcactcatatcattaactagagttcaatatttcttaatagttttctcttttaatgtaaaatacaatratgtttacaaatctgggtgtacattcactcagtttgacaaatgcatacacctgtgtaacccaagcctctatcacaataattattcagcattgccattaccccactaacttacctcatgtcccttcccagtccttttctgctcctacccaccccccttcttccaggaaacaattcttctatcttttccccctatattagttatgcctgtcctagaactgaatataaatggaatcaaataatatgtgctttcttgagtaaagcttctttcattcagtataatttttaaatattttctgaaaagttgagtgaacagtttcttaggaaaaatgtataatcaaaaattttaaaaattttcaaatatttaccttaaaaaggcatggagtctagaag

SEQ ID NO: 744550 - DNA, 614 bp, Homo sapiens
ggcagtaagaagctaataatgtgaagccatctgcactggaaaagccttgatctaactttattaattaatacaaagcaactcagtggcctggctatatagccaacagaaggattggaaggcataccttaccttaacacctatgcccttaactaatgaaaggctattattctatyataaggtgttccattctaattactggaaaattttcttcctaactctattccctgaagctttccttttccccaaatcaatcagtactagcacaaaatgaggtgatgacccagcaataaaaatttagaaaatttattttctcaaagagcctttgagtaatatcaacactaactgattctgttttgagaatacacttgggatgttgtgttttctgaaaatgaagaactatttttttaagggccctgtctcttctaccaagaaactttctggaaataatagattttaataatttgaaaaaccagaagccaaaacaaaaacagtcagatactgacgtgaagtgacattataattctggaaacctggatatctttactttccttaaagtgaccactaaatcagtgggtttcttcgggtatgacaacttaatcttgggcaaagctcca

SEQ ID NO: 744551 - DNA, 614 bp, Homo sapiens
ggcagtaagaagctaataatgtgaagccatctgcactggaaaagccttgatctaactttattaattaatacaaagcaactcagtggcctggctatatagccaacagaaggattggaaggcataccttaccttaacacctatgcccttaactaatgaaaggctattattctatcataaggtgttccattctaattactggaaaattttcttcctaacyctattccctgaagctttccttttccccaaatcaatcagtactagcacaaaatgaggtgatgacccagcaataaaaatttagaaaatttattttctcaaagagcctttgagtaatatcaacactaactgattctgttttgagaatacacttgggatgttgtgttttctgaaaatgaagaactatttttttaagggccctgtctcttctaccaagaaactttctggaaataatagattttaataatttgaaaaaccagaagccaaaacaaaaacagtcagatactgacgtgaagtgacattataattctggaaacctggatatctttactttccttaaagtgaccactaaatcagtgggtttcttcgggtatgacaacttaatcttgggcaaagctcca

SEQ ID NO: 744552 - DNA, 500 bp, Homo sapiens
ttcatatgaataaaaaaagttttcaatgtgtctttttgcttgaaatccaaaaagcaaaacatgtgaaattaatttcatatctcttgaagtattgccttctaagataggtctcagagaagagatgggtgaataattgggtatacacttctttggactaaaatatacctccaaagtatcaaaccacttytcagaatcaattgtatgtggtcacataacatggtcaaagttatcccatgcagttctgttactacttccccatgttccacagctacctgagagcagagatgtaagttcatatatatataatatatatatatatattttttttgctgtccagaaggaaacaataaaccttctcaaagaaggcttaaaatatctttttaatgaatttggtttttcctttggaaataacaaagagttttaaactcatcagagctggctggagtcaggatactccacctcacagcttgaagtgataaaatgcctggctctgtgtcatg

SEQ ID NO: 744553 - DNA, 615 bp, Homo sapiens
tggatccagctgaaacttgttgataagaactccttacagaagaacccgtcagatgttttccaaactagcaagagcatgaaataaatatctcaattcctttaaactgctcagttctaaaatggtttgttacatagctaaagttaactgatttaagaagcttcaaaacacacaaatttgaaggtaataatgactgtcaaaacttgttttgtctcttacgagttcactccaaaaattcctattatttacttaataactccaagtggataccccactggtaacttacatcttctcaatactgaaatcattgtttcttctataactgtttgtttttcttatatttattttatttgatcatattactgcaaaattatataaattttttaaattatggtaattgtgacactttcaccttaatacatgaattccataattaagcatcccaaatgtctcataaatgtattcttttttaaaaataaattwcatcatgtatgtctgaggtttacaatatgatgttatgggacacatatacgtagtaaaatggttactacagtgaagtagattaacatatctatcatatcatataattcatttcttgtgacaacagtagctaaaata

SEQ ID NO: 744554 - DNA, 557 bp, Homo sapiens
attttacaacaaaattcagaaatatgggggcggtaatcagatgaggctaaaaataccaagtagaaattcatgaataaattacataaaataacaaaaatccagcccacttccctcctacccccacccctatttttcttgtacaacctacctgaattgaaacgaaagttgtttaagtaacttcaaraattacaagagggttcacttagttattaaatctgacattgaaattggaaaaatgatttgttcagtaactgtgtaagacgtcgttttggagacatgcatgtgagatgtgtagttctaataaaacctctgcatcacaaactcaaaaagctgcagcctggtttatgcccaacagctttatccatagtctaagtactttaaaaaagaaagaagataatacctgcaacattgatacctagtcagagaaatcacacaaatcagttttgaaccgttaccagagatgacagaagaacatgcactgcgaagtgatgagaaattctaaattgtttacttactaaggaaactgacttacttgacctaatgtctggcagtttcta

SEQ ID NO: 744555 - DNA, 557 bp, Homo sapiens
attttacaacaaaattcagaaatatgggggcggtaatcagatgaggctaaaaataccaagtagaaattcatgaataaattacataaaataacaaaaatccagcccacttccctcctacccccacccctatttttcttgtacaacctacctgaattgaaacgaaagttgtttaagtaacttcaagaattacaagagggttcacttagttattaaatctgacattgaaattggaaaaatgatttgttcagtaactgtgtaagacgtcgttttggagacatgcatgtgaratgtgtagttctaataaaacctctgcatcacaaactcaaaaagctgcagcctggtttatgcccaacagctttatccatagtctaagtactttaaaaaagaaagaagataatacctgcaacattgatacctagtcagagaaatcacacaaatcagttttgaaccgttaccagagatgacagaagaacatgcactgcgaagtgatgagaaattctaaattgtttacttactaaggaaactgacttacttgacctaatgtctggcagtttcta

SEQ ID NO: 744556 - DNA, 562 bp, Homo sapiens
gtctggtgtccaggaggtaagctgcccctctcagcctgggaagtcaataagtcctgcaggggaaggcctgagatgcctttgtccactccctgcctgcggtcacttcagagggggctgggagtgaccttggtcaggagcagtggtgtatgcrgccagctcgtcctggctcaggacagccaatcactacaatttctagaatttttaagccagttgacatcacattggtagcttgatataggctgtggtgggagtatttacaccatggaaattggcaaattagttccccagcctgcctgaagagccaactgttaaccattcgacaggacaccacactgttgtgggaggaggcagaatgctgaccactctcaaggcgtcctggcatttgggtggtggacttcaggaattcacaccaaagacgggcctccagtggagccaggggtctgaaaggaaagaggtcttgagaccaagtgggtctcaaaaatggacctctggttgtgtgatcctaaaggaactggagaaggaaggtccctagaaaagtgccagggcaactacaagatatcca

SEQ ID NO: 744557 - DNA, 610 bp, Homo sapiens
taatgaagtcaaatgtaaccatcagcatcaacttttacaaatattctatggttcttcttgtatccattccctctcccctagacacagtttttatttttaacaaatgtagtttattctctttgaccaacactttcatrcttaggaatttaccttagagagatatatgcatatgagaaaaattactttgtctaaggttatttattgcagtactgtttgaagcaacaagaggttggaaacaatatgaatgtccattaacaggagactagttagatacaccatgaaacatccatgcaatagataactatccaggtgtggaaatgactgaggaattaggttatgcaccaatatggaatattttccaaaatatattgtggaggaaaaacaaagcaagagccaaaggatgcatctaacccactgtcatttgtgaaacaaaaagaggagaagtaatgcaaacatattttttcatgggcacataaaatatttctggaaggataaacaagacacagataatactagctacctttgtacaagggagctagctagtgctgtggggcagtggcttgagtaagatttttgccatagggcttttctaccttttgattttttaatc

SEQ ID NO: 744558 - DNA, 610 bp, Homo sapiens
cgcaccacagcatctgtcccctcacctgggctgtttccacattttgatgactttcttttctttttttctttctttctttcttttttttttttttgagacagagtttcactcttaccgcccaggctggagtgcaatgacgcgatctcggctcactgcaaccactgcctcctgggttcaagtgattctcctgcctcagcctcctgagtagctgggattacaggcacccatcaccacacctggctaatttttgtatttttagtagagacagggtttgccatgttggccaggcttgtctcaaactcctgaccccaggtgatccacccacctcggcctcccaaagtgttgggattacaggtgtgagccacagtgcctagccctttttgtaaaaaaaaaataaaaattatttttccataagtgattgrggaacaggtggtattcggttacgtaagttctttagaggtgatctgtgagattttggtgcacccatcacccgagcagtatacactataccctatttgtagtcttttatccctcaccccttcccactcttccacacaagtccccaaagtccattgtatcattcttttgcctttgcgtcctcatagcttag

SEQ ID NO: 744559 - DNA, 587 bp, Homo sapiens
cattgagtagtaccttagctatcctttggttattaattttgaggtatatgagaatttcaactcttgagcttgtatttttctattttttaatagataagccaaaagaagccaaaaaggatacatttgtggaaaaattggcaactcaagtaataaaaaatgtacaagtaaaaatcacagatattcacttaaatatgaagatgatgtaagtaatttttatttactcagttaataattaaatatgtattttataatattcttgacttttctatatgtggattatctgtgcccatttttaaatccgagattaatttttttcttatgagtacactaccatatcctcttgtgttagcctcgttttattgggcatttatgtacataaatatactataaaattmccatgtgttcctttctgaaagctgatataagaggtttttggattgtcttctgttattttttttgaattttattttacgtgttaagacataatattataactttaaggaactaatttttgctttatgctgacaaaagagttaattctaaaaggtgatgaataactaatgataatgttaattggccaaaaagtg

SEQ ID NO: 744560 - DNA, 613 bp, Homo sapiens
tccagatggatgatctggtccagtcaaccctattttagtggaaacatcatcacacagggtttgttaatccatttatttttataaagagaacttcctatgcgatctaaaattcatcagaaagccaagactaacagctctgaccaaatccaaattctatctgtccatcctataatggttttcactcggcagggcgcggtggctcacacctgtaatcccagtactttgggaggccgaggcgagcagatcacgaagtcaggagatcgagaccatcctggctaacacaatgaaaccccgtctctactaaaaatacaaaaaattagctaggcatggtggcacgcacctgtagtcccagctactcgggaggctgaggcaggagaatcgcttgaacctgggaggcagaggttgcagtgagctgagattgtgacactgcattccagcctgggtgacagagygagactccatctcaaaaaaaaatcagttttcacgcagccatgagaggatttaagaggaacgatctgatgaaaagtctctctacttaagaatttgacctttccagagactaggcatgacaccaagagcagacactgaatgtaaaaaatatgcctttacagtt

SEQ ID NO: 744561 - DNA, 603 bp, Homo sapiens
caccttgaggagtgtgggggcagtaaagggatcaggaccctggagagaaggctagtccctttcctggcttgaactggccctagcattactcatctcctggtagataaccaggcctctgaaggcttgcctggtgctcactcagcccgtgaagagggcctgctggtcctctggagcccacagccctttgtccagaggcgactcctaaccyttagcaggctctgccctaacttacagtcccaccattgtctgccccacatcctgtctgcctgtctgtgctccattctggcccatcctaggtgtctctggctgcaaagcctttcctgggctcagccttctgccttgaacgggccctgaccatgagtccccatgtgcccagcccataccttttccctgtccagccaggagccaacacaggcctggagcattgcctgtggtatggcctgctcgctgctgttcccggcctgggtggtcacggacatgcagaggtggcactcagagtctcgcggcagccattctcctgtcggcgaccctggagatgtgagcattagggggaaagcaggcaaggccaccctacagaggtgtttggtttctgtcctccttggt

SEQ ID NO: 744562 - DNA, 478 bp, Homo sapiens
atacagttgctatggaaagcaatatggaggttattcagaaaattaaaaatacaaataccaaatgatccaacaattcaataaagaagtgtatgtaataaacacacttctgtttacttatcaaaaaaatgaaattaggatctcccaagagatattagcatttctatgttcactgcagcacttattcacaagagacaaaatgtggaaacaacctaaatattcatcaacgaggaataatagataaagaaaatgtggtgtacatatatttgtctacatatatacaatggaayactattcagtcttacaaaggaagaaaattctccaatatgcaacaacataggtgaatgttgaaggcattgtgctagtcacagaaagataaatagtatataattccacttatatgaagtatctaaaatagtgaaattcatagaatcaaaaagtgaaagggtggttttttaggggcttgaggaagggtgaaatg

SEQ ID NO: 744563 - DNA, 634 bp, Homo sapiens
ataaaaatttatttattcatcatgtttctaaaagtagtgtgtgtcatggtattaatttactcttaatgcatcaaagactgcattctgattatcttagcttgtaacaaaaattaactttgaaaaccatcaagtaatcatgatagtattccttaatatgcaaatgtatacaaattctgtgtcattcacatgatgttagattcacctaaaggcaagatctctttatcatgatttctcaattatttaggggataaagaggtaacattttgcatgactttcacaaaccacagaaatttgaaaatatgaaaattatagaataattcacagcagtttttaaaatgtattcacaacactaaattgattacattagaaaatagataatttaactcctacataaattattcaactgagtatgaaatcacaatatttctgaagtaaagacatagcaggcataatgctgatcatgttyattgttctttacaaaacatggaattttcttatgctaagatagttttaaaatatttcagtttatctgtgtattttcagaataaattctttacatgaaagagatgtagaaaaacaggaaatagataaaactaatgaaacattcaaaaaagagggggttaaaaaccctcaa

SEQ ID NO: 744564 - DNA, 552 bp, Homo sapiens
cattaactcgtcatttagcattaagtatatctcctaatgctatccctccccttccccccaccccacaacagtccccggtgtgtgatgttccccttcctgtgtccatgtgttctcattgttcaattcccacctatgagtgagaacatgcggtgtttggttttctgtccttgcgatagtttgctgagaatgatggtttccagcttcatccatgtccctataaatgacatgaactcaccattttttatggctgcatattattccatggtgtatatgtgccacatttggtatgaagaaattctcgagactgggtaatttataaagraaagaggtttaattgactcatagttctctagggctaggtggcctcagaaaatacaattatagcagaagctggagcaaacagtccttcttcgtatggtggcagaaaggagaagtactgagcaaacagtaaaagctcctttcaaaaccatcagatctcatgagaactcactatcacaagaacagcatgagagtaactacccccatgattcaattacttcccatgaggtccct

SEQ ID NO: 744565 - DNA, 601 bp, Homo sapiens
agccaccttgcccatcactacctcaacggtaagtgagaaaagatggtaaggtgttttcagtctagaaatctttgttgggtcaaaagtttaaaaccttttcccaagaagcttgctggaaacctaaaaatgctattttgaagtatttatgaaatgctagtttgtcaaaaaagtaatcataaatactgctttagaaaaagtatagaataaaaacctgtttttcatctggttttaatgttacaagcttccatcaaacattgatgtttactttccaagaaaggtatttaacaacacacatgggttcaaggtgtacagamcataatttaatcttttgaaacattattgcatatgaactcaaaaatacccttttggtacaatagctatcaatttttgaataaatcattttgtaaaaatattttagagcaaaaaaatgattttagattatgggctagctagactatcaaggactcttttagcacatattctctctaacagtccaaaatgcacaatgtgtaaattccagtcatctaacttctggctttgcagaacacagaatactactgttaaaattccaagaactggtattcaaacattacatcaacaa

SEQ ID NO: 744566 - DNA, 629 bp, Homo sapiens
aataattggtgtatattatattcttattataatgatttctcaaagacaaaggccaaatgaatacaaatacataaaagacaataaattattgaatataagcaactatatttttcataaaacatatgttgttaatggaagagaagaaaaaaagaaatatttaaccaagttcttgaagacttgttcacaaggaagaaattggagaaagtgaaaataatatgtgacaaatgggctgaaagatgaaatgtctacaatgtctatgtttatacctttcaatttaaaaattaaaaagtgacaatatttctgagaaaatattgccttctttttaagcaaaaacaacatcrccacaacaaaatcctaaaagtgaagtaacagttagctactagtataaaatgcatacatgcaggtatgtttaaaggggagacttccagatacagttttgtgctgtggtagaatacctgctttttcctgcttttttctggtgctgattagagaggatcttaagacacagtctccagtgaaagaataaaattgtgctttgcaatatccataaatacagggcaagagactcaaatgtatgctctacacattttccctttatccccactaattcaagtggaggctctgcctat

SEQ ID NO: 744567 - DNA, 611 bp, Homo sapiens
aaaaaaataagagttgggtaagagctatccagtggggagtaatctgaagagttagttaggcatggctgaccacctcaaagggaagaaaggagaaaagagggctatgacccacttaaccacacgatttaccagaaccatcaaaacgtgtrgcccatgttttgatagaaatctagatttttgaatgtgcttcctttgccagaaaacttcagcaaaatacattgaatttgaatgactttaggttgggtatacatttccagtttgctacaggcactacaactctattcccagctttccgatgcttgtgtgagattatatatttactttgtcacccataagcactgacttttttacattgagatattaggcaaataactactatttaaataaggcttgactttttcatatgaaatgaaatattacaagtatacgaagaaaaaagctattaatgaaattctgatttaaaaagaaagagttttgaaggttttatgtcctgtctgcattattaaattatcaatttcacatgcccttatattgtcagctcaatgttctttctgtcattcatttctttatatttatttttattggcccctaataatagaaagtcatttcta

SEQ ID NO: 744568 - DNA, 670 bp, Homo sapiens
tttttagtttctccacaaataacttcataatttttactttaaaacaccaagtcatacattttaaacagaaaaagcagcagcagtactatactaagtaatttaaatatgtctcagtatagaagtgtaactaattaatttgctgacactaacttttaaaaaacttataaatattcaaaacagaaggaaagagtttcagacagccaagattataaaagcaattgctttaaacatggagcttccatgataaaaagggagaggtacttatctattcattatattttatttagtagtcacattaaaaaygcacacattcacacttttcccaaatatttttctaattttaatggagatccatccacttgaaaacaaatcctaatttaatttatttttttttgttttttattatttctttttaagttttttaaaaaacttttagggatggcagtacatgtgcaggtttcttatacaggtaaacttgtgttatggggtttgttgtacagattatttcatcatccaggtactacacctaatagtgaagagttattttttctgctgctctccctcctttcacccttcaccctcaaataagctccagtgtctgatgtttccttctttgtattcatgagttctcatcatttagctcccactaacaagtgagaacatgtggtat

SEQ ID NO: 744569 - DNA, 670 bp, Homo sapiens
tttttagtttctccacaaataacttcataatttttactttaaaacaccaagtcatacattttaaacagaaaaagcagcagcagtactatactaagtaatttaaatatgtctcagtatagaagtgtaactaattaatttgctgacactaacttttaaaaaacttataaatattcaaaacagaaggaaagagtttcagacagccaagattataaaagcaattgctttaaacatggagcttccatgataaaaagggagaggtacttatctattcattatattttatttagtagtcacattaaaaacgcacacattcacacttttcccaaatatttttctaattttaatggagatccatccacttgaaaacaaatcctaatttaatttatttttttttgttttttattatttctttttaarttttttaaaaaacttttagggatggcagtacatgtgcaggtttcttatacaggtaaacttgtgttatggggtttgttgtacagattatttcatcatccaggtactacacctaatagtgaagagttattttttctgctgctctccctcctttcacccttcaccctcaaataagctccagtgtctgatgtttccttctttgtattcatgagttctcatcatttagctcccactaacaagtgagaacatgtggtat

SEQ ID NO: 744570 - DNA, 628 bp, Homo sapiens
cagaacacaacatagggaaacctcacccttgtgaagcttatttttgatgcagcaaagcctgcagcttgccttggtgaagaggccagtgggcatcatacacagaagcaactgctagaatcagtaatgtgtcataagtgtgacttgtcaaaaccttccctgaagaagcaaaacttaaagatctaacagatcctcaagtgtctagaaaggtgacttttagtttcaatttcaaaataattcctcaacttctttggaaaatatgtatgtgttccccttgaaggtctattctgcagaacagcccaaagtttaagacatatatattagctagatagggttcctctataccttttgttgacatttaagttcttcattgacttcatagttatgttgagtcatgtataattaagctaatattgatatattgatgaacaaaggctgttactgatgaaacattgtgaaaagcataaaactgatgtatcatcyaatatataatccaatagagtttttggaaaacaaacgtttctgggtcatcctgcaataaacacataatatattgtctgcatcttttcatttgcaagactttggtttagaattgcatttataaagtttaggaagtgatgtctaaaacttt

SEQ ID NO: 744571 - DNA, 610 bp, Homo sapiens
ccccctaacgagatagaagaggctgctctcctacataactgttacttatgcttcatcatttctgttttttctttttatatttgttcagttttattcatataatatcaagaaacacactatcagtccaaaaagactaggctatgaagagataattagcaacctaaattttaggggctaatgcaagcaagtaagcaaacaaacaaacaaaaatatctatttatctcatattttgtgtattcaatacaagtcagttgtgagcactggtctatttcttctgatttcakaatccaagctgcctgagaaggtaccatcttaaaagtcgacaatcagagtgtcaaaaggaaaaatattaccaccaattaaatgctccagcaccgcataaaatagattccttcaacttccaaattattggcaagatacacatgctactatgtgcttgatgggtgaaattagaaattcttggtgagtgagtagactgattctcacagttcattcttttggcccctaaatatttgacttactccctcattcccaagcaaaatactctcataccttgcctaaagcagaatatctgaaattctaatcattaggttttgggttgttaagaggt

SEQ ID NO: 744572 - DNA, 627 bp, Homo sapiens
tatttttgccgtgttagagacagaatactggattgactaatggtcttatgtttgcaaactctcattgaataaaatattttgagactggccaatgaaaggatgaaacatggaataaatgtgtaatatcctatatatttactttgtatatatatatatatatacaaaaacacayatatgtatacatagcaatgacatttgactgtatccagttaatctatttctctgtaacatgatgacactttacatttataaagcactcttatttttttcaaattcatcataaaaaaaatttatttcctttcctttgctacaaacattaacaaaacaggcattctacctattttgtgactgggcccatattgttataaaattataactacatatgggtccatataggtgatcacacgggttagtccatgttttatgctttgtaaggtcatgctgcagttgctatcactaactgtctttgtttagccttatcaatgtcattttttatttactccaaaaacattgtcttcattctaattcaagaagaactgataccattgctgcaagtggggccagaagaagaagtctctaggaaaatggattgtggaagggtggatttccctcatgatattctctggt

SEQ ID NO: 744573 - DNA, 681 bp, Homo sapiens
cacaagataatattgactaaaggcaatagtgagtacgaagtacaattagcaaagattaatatcatctcctcagtgccaaaagtaagccagatggaatatgccaccgacattaaaatctgtgcgatagaattatttcttataaatttatctatttaaaagaagactatttaacacgtctttgaaaggctacataggcagttaaacagaaatgtatggtggttttgtgccttgattatttcactgacatgcctgtcattaacttattctgatcagtgaagttacccatgtttataactcagaaatcaatattttcctttgagaaaatacaaaatcaatgtagacaaataacacacatatgtaaacatttgattctatttatttctttggcaaaagaagaaaaaaaatcccacaagcaactaagtgaaggttttcagctcacaagttggcatgcattttattatggcagattgctgcaactgatcaaggccatagatggagccagcctcatgcggccaattcctacagacaatcatgacaaaattcayagagtgaccttgataggtctctttggatgtgctgcttggatgaaggcttttcccactgctgagtggagtaactcacagcacaagcagcacaaaggtgttgcatcaacagtttcattcactgtgtaccctcaacttt

SEQ ID NO: 744574 - DNA, 635 bp, Homo sapiens
tcagctccccctcagaggcagtaaatggggagctcccctgcctgggtgacagccctgagcctagctgtggcccagccagcagggcacaggcaggtctcccaccttctgaagaccaggtgcctccattagttcagggtttctcctgacctgactaacaatgtaagggcgaggcctagagagggcagggyggttggtccaggagcagcagagctgggggaggggtcctctgtcccagctcacttcttgaccaacatgcaggtggaacttgtcattttcctctctgaattagaaagctaactctccccctctccttcccagggaagaagtccagacccaaagaagaagaaatctcccaatcctgaaagagagggacaaatgaaatttatggtcaggaaaggatggagttggccagtgccttggaaccatgggaggttctgcccacgcggcctccagaggatttttaaagctctgagcagaggcagctgcactctagcacgctcctttccatcttttctggagcagcagctccctctcgggggcagcacccttcctgcttgaaaaatgcctttctctcccctgacctctctccctcccccaggtcccccactgtactttcctcctctttctttttcttc

SEQ ID NO: 744575 - DNA, 592 bp, Homo sapiens
aaaaactcaaattataaaaacagatgcaaaaaaagacagtatctatctttttgtgactggcttatttcacttagcataatgtcattgaggttcatccatgtcagagcatgtgatagaatttccaccctttttaaggctgaaaaatatttcattgtatgtgtataccacatttttttattattcatctgttatggacgtttgtattgcttccatcttttagttattgggaataatactactgtgaacatgaatgtgcaattatctctttgagatcctgctttcaattctttcagatttcacccagaagatgaattactggatcatatgggaattatatttttaattttttgaagaatctccatcctgytttccatggcagctgtaccattttacctcaccaacattgcacaaggattccaattttttccatatccttgccaacagttattttgtttttttgatagctgccaccttattgaatgtaaggtggtatttcattgtggttttaatttatatttctctgatgattaatgaagttaaatatattttcatatacttattggacatttatatgtcaactttagagaaatgt

SEQ ID NO: 744576 - DNA, 595 bp, Homo sapiens
attaggtgtcaattcatgtcttcagtccattttgttacttttaatatatgctaaaagataaaggtccagcttcattcttttgcatgtggatattaaatttttgcaccactatttcttgaagtgattttccttcccatattgaatgatcttagcacttttgttgaagatcttttgaccatatacactacggtttatttctggactcagtattctagtctgtttgtctgtctgtctatatgtctgtgccactctgtttgattactgtggctttatatgctttgcaatcaaaaggtatgagtcctctagctttgttctttttcaaaaatatttttgytatttaggattccttgagattccatataaaattcaagatgaacttttttctatttcagcaaaaaaaagtcattgggatttttataaggattgtactgaatctgtagattgctttaggtagtgtcaacatactaacaatattaagtcttccagcttatgaccataggatatatttccatttatttgtgtctttaacttctttcagccatgttttgaggtttttattgtataagtctttcactttctacgtaatgtttattct

SEQ ID NO: 744577 - DNA, 525 bp, Homo sapiens
gggcatctcatggaagggcattcctccctgctgggtgttcctgccctgaagggaacactgttgaaggtgctgctccctctgcttctgctgtggatgcctggcctgagagaagtcagcccaaatgttgatccctgggtgctgacacggctgtggcctctgagggttcagattgcaggctttcagcacaggcctggaaaagcaaacaaacacaggaggtgtgtgtgcgttagttgaggggagtgggaaggcccagrgagcgcgccaccttcttatcaggcctctggagctgttttggacatccagccttcatgagagagcaaagccgggctcgcgtggctcccctttccctctctcctgctctcctgctctctggctctctccctgccctccttctgctagaatctagaagtgctgtgcccaaaatcaagtggcgttttagaggccgaggaacggtggcaaaggtcttattttcggtctaggatgtcggaagtgctggctttccacggaaagcttctcagtggagtg

SEQ ID NO: 744578 - DNA, 611 bp, Homo sapiens
tcaacaggagacccagaggcagcaggtgtgtgttcaaatggaaggtcagggataaagacccacgtgcacacacgtgtgcacacacactctagtataaaacgaaacaacatcactcacattcttcaatgcctgctaaggagctccgcttatttttgacmgaagaaattattactggtggtaaatccgtatgggtctgcagcaatctcaattcttgtctcctcagaagaaagaatttgactaagcggcataaggcagaagaagagaccaagacaaattttacagaaggagtgaaagtttataaaaagctttagtctggacatggtggctcacgcttgtaatcccagcactttgggaggccaaggtaggtgggcgaattacttgaggtcaggagtcccagaccaacctggccaacatggtgaaactccgcctctactaaaaatacaacaattaagctgagcatggtggcgtgtgcctataattccagctactcaggaggctgaggtgggagaatcgcttgaacttgggaagcagaggttgcagtgagctgagatcatgccacttcactccagcctgggcgataaagggagactcaaaaaaaaaaaaaaaaaagg

SEQ ID NO: 744579 - DNA, 555 bp, Homo sapiens
cgaactatttaatatttttcagattcaattttaccatccctgaaatctgggcatcttaatctgggtactgaggatattgtgaggattaaataaggtggttatgagagtagacactgaataaggggtagactagaggaaatcacaktaaggacatgggtgaaggttgtggccacgtaagtggacgttagcacgcatggctgatccaggcacgcaggaagatgctgtgggccagattcaagagaagcctgcagaaaactgctttgatatgggttggagaagctgggctggagggggtggtggcacatgttagaggtaaggaatagagggaattacaataggaggtgtttctcggggttttcacttcagtctggctggaatgcggtagacatgacacttgaaacattatttatttagaacattttgaaaggatttaagttgctggctgacaaatttagacttcatcctgtgtaaagcaatcgacgtggaacttttctaagctggagagtgacccatcaaaacagcttcaagtggatgagactttcagaagcagtgtca

SEQ ID NO: 744580 - DNA, 562 bp, Homo sapiens
tattgttagtatgtatgtgaaacttcatgcaaattttaaccgtacattaattaatttctcaatttggtgcaatcactacttctaaaatagcctctcattatttggagaatggatactttctgtgatctagctaagttgtccaaaagggagtgacagtctctttatatgagccttgtcatcaccaccctcacttttctggtcaaagtgagattgattcattgatgaaacacaccttatcctaatcagaccagtggaataatttcccagagtttctcaaaatagaaccagaagagtcttccacacaatatacatttacacaactctgtaaaaatatcacatacagacttccagggattstattttgttgctgagagaatttgctgatagaattaagccaacacacctgaaggtttctgaagtccttgcactaatgacagttgatttttcatgcccctctgagattcgtgcgctaccccaatattttctaatacaatttattttagttttattcagttttgcaataagataattttattaatgaagtcctaatactatcttttca

SEQ ID NO: 744581 - DNA, 582 bp, Homo sapiens
aaaatatatatatatatttcctaggtgatttcatttagtctcctgatgttatatatcaactgtatagcttatataggaggtaaacttccaaatttgttttcctaggtcagacttcatccatgaacttcagccttgtacatctatttctgtatgatatataactaattatctaattggtatctttaacataacatgtacaaaataaattttctcattttactcrtcaaacttgctccttacacagttgtccaaatctcagttaatgatgactccatcctttcccttgcaccttcacaaggtgaaggaccttggggaaaatacttggctttcacactccatgtataatctgtcagcaaatcttcttggctccatacagggccaggtctggtagctcatccctgtattcccacactttgggaagccgaggcatgtggatcacttgaggtcaggagttcgagacgagctttgccaacatggtgaaaccctgtttctaaaaaaaaaaaaaaatagaataaaataaaatataaacagaattgaagtattattattccattgtccaaaactctccaatggcctccattt

SEQ ID NO: 744582 - DNA, 582 bp, Homo sapiens
aaaatatatatatatatttcctaggtgatttcatttagtctcctgatgttatatatcaactgtatagcttatataggaggtaaacttccaaatttgttttcctaggtcagacttcatccatgaacttcagccttgtacatctatttctgtatgatatataactaattatctaattggtatctttaacataacatgtacaaaataaattttctcattttactcgtcaaacttgctccttacacagttgtccmaatctcagttaatgatgactccatcctttcccttgcaccttcacaaggtgaaggaccttggggaaaatacttggctttcacactccatgtataatctgtcagcaaatcttcttggctccatacagggccaggtctggtagctcatccctgtattcccacactttgggaagccgaggcatgtggatcacttgaggtcaggagttcgagacgagctttgccaacatggtgaaaccctgtttctaaaaaaaaaaaaaaatagaataaaataaaatataaacagaattgaagtattattattccattgtccaaaactctccaatggcctccattt

SEQ ID NO: 744583 - DNA, 582 bp, Homo sapiens
aaaatatatatatatatttcctaggtgatttcatttagtctcctgatgttatatatcaactgtatagcttatataggaggtaaacttccaaatttgttttcctaggtcagacttcatccatgaacttcagccttgtacatctatttctgtatgatatataactaattatctaattggtatctttaacataacatgtacaaaataaattttctcattttactcgtcaaacttgctccttacacagttgtccaaatctcagttaatgatgactccatcctttcccttgcaccttcacaaggtgaaggaccttggggaaaatacttggctttcacactccatgtataatctgtcagcaaatcttcttggctccatacagggccaggtstggtagctcatccctgtattcccacactttgggaagccgaggcatgtggatcacttgaggtcaggagttcgagacgagctttgccaacatggtgaaaccctgtttctaaaaaaaaaaaaaaatagaataaaataaaatataaacagaattgaagtattattattccattgtccaaaactctccaatggcctccattt

SEQ ID NO: 744584 - DNA, 534 bp, Homo sapiens
atgcatagttaagttgctatttgtagtttttctacttttttggtgtagtttgttacagctataaacttccctcttagtactgctttagctgtatcccataggttttggtatgttgtgtctccaatatcatctatatcaataaagttttcaattttcttcttcatttcttcatttacatactagtcacataagaatatatcccttttgttgttaatttctagtttcatttcgttgtggtcagagaagatacttgatatgatttcaactttattttgaatgttttaagacttgttttgtgatctaacatatgatctattcttgagaagcatatatgtgttgagcagaagaatgtgctccagtgttgacttcatatatatttacaatttcatatcttctcgacccctttatcaytatttaatgacctactttgtctcttgtaacagttttttgtcttgaaatctattttgtatcatgtaagtatagctcctgcttgcatttagtttccagtttcatggaatatctttttccatcctg

SEQ ID NO: 744585 - DNA, 521 bp, Homo sapiens
gtgcactattctagagtaaaagttttttcctttagcactttaaatatgtcatgccactctctcctggcctgtatggtttccactgaaaagtctgctgtcaaatgtattggagctccacagtatgttatttgtttcttttctcttgctgcttttagaatccttcctttatccttgacctttgagagtttgattattcaatgccttggtgtagtctactttgggttacttctgcttggttttctataaccttcttgtacttggatattgatatcttcctgtaggtatggaacttctaggtttagaagttctctgttattatcttyttgaataaactttctacccatatctctttctatacctcctctttaaggccagtaactcttaaaggctattttctgtatcccgttggcgtgcttaattgttttttattcatttttctttcctttcctctgactgtgtgctttcaaatagcctttcttcaaactcactaattcattcttctgcttgatcaattcttcttt

SEQ ID NO: 744586 - DNA, 589 bp, Homo sapiens
gtgtctgtttccactcttggagttccataagaaaaacagaagtttctccccaaaaacgagtctggtgccttcttttctacacaggggtctgtatatgtgtatgtggcatacggacttaattaagctactatgttggaatatatccgatattagcttttagttaagtttacttttgaccattaagcccttttaaaaatcctcttggctgggcgtagtggctcacgcctgtaatcccagcagtttgggaggccaaggagggtggatcacaagatcaggagttcatgaccagcctggtcaaggtggtgaaaccccgtctctactaaaaatgcaaaaattagccaggtgcggtggcaagtgcctgtaatcccagctacttgggaggctgaggcaggagaatggctgaacctgggcggcagaggttgcagtgagctgggatcgygccactgcactccagcctgggcgacagagcgagactccgtctcaaaaaaaaagaaaatccttttaaatctttaaatctcactaccttatttcagccgggacaaactgctgatatttcaaaagtaacacaaatttcaaaccagaaaggatg

SEQ ID NO: 744587 - DNA, 516 bp, Homo sapiens
caaagcaggaaggactgagtgggaaccacaagccagttgaaagaaaatacatgacgtacttgagtgctcaggaccacgagctgattcaagttgtacagaatggacacttacagatgtgtggaaaatctgagacaggaaatgaagcctcaccagtaagctgaacaggggagatttaatgcaaacatttgtccctggctgggcactgtggctcatgcctgtaatcccagcactttgggggctgaggcagragggttgcttgaggccaggagtttgagaccagcctgggcaatacagcaagaccccatctcttaaaagaaaagaataaagagtattagccaggcatggtggtggagcacacctctggtctcagctactcaggaggctgcagcaggaggattgcttgaacctgggaggttgaagcaacagtgagccgtgatcgcaccactgccctccagcctgggcaacagagtgagaccctgtcactgacagaaaaaaagccttgtccctgaggcaaaa

SEQ ID NO: 744588 - DNA, 583 bp, Homo sapiens
aggcctgtgcgccagcagctcggccagtatgcagcccacagccctgcagagaacagtggacctcactgcggccagacgtctgctgaccccgccagcgcgaggaacagaggacctgactgcagccagacctttgctgaccctgccagtgtgaggcacgctgggtcagggacactgtgaaggacaggcagggaccactggctcccctcctgggccccgcaggcctcccggggtgacaagtgcaggggcaggcgtgcctcctccagacctctgtgctcccagcctgagaacagcaagctaagttctcacacctcctcctgggtttccaggctcaggcccacctccctgggagtgggaggctggcaaagaccccactgcactcctgcccctcccctgaggctgagctyaggaaccaggtgacccggctcctgtcccagcccttcctgaggccccaggagcggtaaccgtatctcctcaccacatgtcgatgctggtggtctgcgtggtggttcccaacagcagttcaggggctcggtacctacacacagaagcacccacctcaatacggccggctcctctcccccag

SEQ ID NO: 744589 - DNA, 542 bp, Homo sapiens
tatatatatatatatatatatatatatatatacagtgtaataatagaaataatgtgcacaataaatataatgcatttgaatcatcccgaaaacatccccaaccaccagccttttttgcatgaaactggtccctcgtgcaaaaaaggttgggaaatgatgctctaaaacttgacccacccagcggcacttcaagttttagtgaaaatgtgtgaataaagatacggcaatgaaacattatttgtattcaaccagcaagcttgtattgaaccttagaatatgccaagcgtatgttctttattttattttcctcttgctgatgagctcacaatctcaccaagcaccataacactatggaataagtgctgagacccggggcaggtaaagagcaatgasaacacaggaagtgatcgattctgatgaggtggtattgttaggtttcccagagaggaaacatttgggctaggccttaaaaaataaataggaattaattaggaggatactggggatgttataatgtaggaatttatagaagtcaaagtttt

SEQ ID NO: 744590 - DNA, 623 bp, Homo sapiens
agagctatctttaataaacagcacagtcccagaattgacagtctagcttttacaagaagaaagcttttgaacattttctagaacaacaaccaaactataagaaaataatacaatcatgcacttcctgtgtgcatcactgcagttttaaaagggctttcctcttctctgaaggcttgtgagtagagagtaatcagttaaatagygctgtttgagcttacaaatgttcaatgagcaaattctcttccaaaaatagattacaaaaccactaaaaaacaaaatgattatggcccattagaaaaaataaatctttttacagaatatggtacatatagctaaaataacccaacaaaggggcacaggaaacaaaaataatattcaatgaaggcagaaaaaaatcaatatttttatatcgtgcttaattgacaccttttttattaagaaaaacaggaaattaaataatacaggatcagtggaaatcagcaagaatacgattcattaagccttctcttcttcttggccactgaattacttctggtttataacaggcttttaaaagtataaatgtgattttagttaattaaatacaaatactaataaatctcttttaaactacttcataaagg

SEQ ID NO: 744591 - DNA, 623 bp, Homo sapiens
agagctatctttaataaacagcacagtcccagaattgacagtctagcttttacaagaagaaagcttttgaacattttctagaacaacaaccaaactataagaaaataatacaatcatgcacttcctgtgtgcatcactgcagttttaaaagggctttcctcttctctgaaggcttgtgagtagagagtaatcagttaaatagtgctgtttgagcttacaaatgttcaatgagcaaattctcttccaaaaatagattacaaaaccactaaaaaacaaaatgattatggcccattagaaaaaataaatctttttacagaatatggtacatatagctaaaataacccaacaaaggggcacaggaaacaaaaataatattcaatgaaggcagaaaaaaatcaatatttttatatcgtgcttaattgacaccttttttattaagaaaaacaggaaattaaataatayaggatcagtggaaatcagcaagaatacgattcattaagccttctcttcttcttggccactgaattacttctggtttataacaggcttttaaaagtataaatgtgattttagttaattaaatacaaatactaataaatctcttttaaactacttcataaagg

SEQ ID NO: 744592 - DNA, 540 bp, Homo sapiens
accaacagacagaccctgaactaaatttgctaataggcttttttatatccatgtccataagtgagactggtctatamttttcttttcatattctatacttagtatcaacataatacgagcctcagaaatgagttaagtaacgttcactctcagtccctgaggtcccccttccatcattccttgaaaacagttgaaggattcttgaagtttcatgaaagttctcctctaaaactattaagtctgcatttcgagacactccctgtgtggagtcagagggtaggatatggtggcaaaagtagcaggatgaaggaaggaatatttattataaatagctccttatttagtttgactttcttcttcttgagtcatttctggcagattataattttaaaagaattatctatttcatctacattttcaaatttattggtatggaattatttacagtattctctatatgattaaaaaaactcaagtatatcagcagatatggatcccttaaacactgtgtatttataccttctctaatattatttttca

SEQ ID NO: 744593 - DNA, 579 bp, Homo sapiens
tttgttttttttttttaaatttcaataggttttggaggagcaagtgttgtttggttacatgaataagtcctttagtcgtgatttctgagattttggttcacccatcaccctaccagtgcacactgtacccagtgtgcaatcttttatccctcacccctctcccaccctttcccctgaatcctgaatgtccattgtatcattcttatgcttttgagacatcatagcttagttcccacgtatgagtgagaacatacgatgtttggttttctattcctgagttacttcacttagaataatggtctccagttccatccagatttctgtaaatgccaatatttcattcctttttatggctgagtagtactccatggtrtgtatatataccacaatttctttatccagtcattgattgatgggcatttcggctgattccatatttttgcaattgctaattgtgctgctataaatatgggtgtgcaagtatcttattcatataatgacttgttttcctctgggtagataccctatattgggattgctggattaagtggtagttctactcttagttttttaaggaat

SEQ ID NO: 744594 - DNA, 506 bp, Homo sapiens
atattgtaaatgttcatgaaaaaaaaagaggcagaaaaagaattataaaattgagctaaatcagattttaaaacaacttaatttaacattccttagattaactgcatcattaattgtgtgaagaaaaagaacaccaaatacatcattttaataaagacatttttttaactaagattaaggcttaagaaaatagcataatcaaattaaaaggattattatattcctaaactgcatgatacttattttcaagaaagactgtggttggtcacaatcctaatgagttttttcctgaaattatttttttcaattgcatgwgatctggtttattattatagggttactcatgagtgctggatgtgtatattgatttttttattagaagagggcactgaagcattaggtcagttgcggggagggaatgctcagatttgtaaacagatgtaaacatagatcaaatttaaggatggtaaaactgaaccattttgctttagctgggatgagctatg

SEQ ID NO: 744595 - DNA, 689 bp, Homo sapiens
atatagacctagcattgtagatcagtgaaataaaagattgcatttttaaataaatggtatatatactattagctaaccacaagaaaaaataatgaaattggatcacctaatgcctgtcattaccaaaaatcaattccatgtggatttacagacaaaacctttcaaaaattttgaaagatgatataggaaaatatgaccttggaatggggaaagatttcataaataggtgacagaatgccaaaccaagccactaagaagactgacaaattcaagtacattaaacttacaaacttttcttcatcaaaaatacttgaaagaaagtgaaaaataaaggtacaaagagaaacaaaaagtgattgtaacataggtcactgacaagagatggttaaatatctttatatttaaaaaataagaaaaagagaaatccgtagcagaaaatggataarggttgaaaaagtatttctcagaaaggaaacaaggatggccagtacacttatgaaaagatgctaagccctattgtcaaggaaatgcaaattaaaagcacaatgtactataatattttaccttccagactgaaaacctaaagtccaacattatcaagttttgtggaggacttggaacaaccagaactcttttatacttattataagaatgtaaattggtttagtctctttggaaaacaattgagt

SEQ ID NO: 744596 - DNA, 565 bp, Homo sapiens
attggtctatgcagcgattcaacttattcctggtttagccttgggagggtgtatgtgttgaggaatttatccatttcttctagattttctagtttacttgcttagaggtgtttacagcattctctgatggtagtttttatttctgtgggatcggtggtgacatctcctttatcattttttattatgtctatttgattcttctctcttttcttctttattagtcttgctagcagtctatcaattttgttgatcttttcaaaaaaccagctcctggattgattgatttttttcaagsgtttttttatgtctctatttccttcagttctgctctgatcttagttacttcttgccttctgctagcttttgaatgtgtttgctcttgcttctctagttcttttaattgtaatgttagggtgtctattttaaatccttcctgctttctcttgtgggcatttagtgctataaatttccctctacacactgctttgaatgtgtcccagaaattctggtatgttgtgtctttgttcttgttggtttcaaagaacatctttatttctgccttcat

SEQ ID NO: 744597 - DNA, 615 bp, Homo sapiens
ccatatgtagaaagctgaaactggatcccttccttataccttatacaaaaattaattcaagatggattgaagacttaaatgttagacctaaaaccataaaaaccctagaagaaaacctaggcaataccattcaggacataggcatgggcaaggacttcatgtctaaaacaccaaaagcaatggcaacaaaagccaaaattgacaaatgggatctaattaaactaaagagcttctgcacagcaaaagaaactaccatcagagtgaacaggcaacmtacagaatgggacaacatttttgcaatctactcatctgacaaagggctaatatccagaatctacaatgaactcaaacaaatttacaagaaaaaaacaatcccatcaaaaagtgggtgaaggatatgaacagatacttttcaaaagaagacatttatgcagccaaaaaacacatgaaaaaatgctcatcatcactggccatcagagaaatgcaaatcaaaaccacaatgagataccatctcacaccagttagaatggtgatcattcaaaagtcaggaaacaacaggtgctggagaggatgtggagaaataggaacacttttacactgttggtgggactgtaa

SEQ ID NO: 744598 - DNA, 622 bp, Homo sapiens
aactttttttagaactgtattaaaagacaaataaataattgtataataataaacagatcaatacaggaagaggctataacaattttaaatatatatttactcaacactgaaatacccagatgtataaagcaaatattattagatataaagtgagaggtagacttcagtacagtaataagtggagatttcaacacctcgctctcagcattggacagattatctagacagagatcaacaaagaaactttcaatttgtactgcagattagaycaaataaacctaacaggaatttacaaacataatatgtgatagccgtagaatacatgttcatctcatcagcacataaaacattctccaggatacccatatgttagagaacaaaataaatttctactagttttttttttctttttaatgaattcgtagcaaatgacaatggaataaaactagagattggtaacaagagaaactctggaaatgtacaagtacatgaaaataaaaaaatgctactgaattatcattgagttaataaactaagaatgaaatttaagaaaattttaagacaaatggaaatgaaaacacatctaaccaaaacccatgcaatatagcaaaagcagtgctaa

SEQ ID NO: 744599 - DNA, 528 bp, Homo sapiens
gtttcatatggggatttcccctcttctgcttattcttctccttcctgcaaccatgtgaagaaggatgtgtttgttgccccttccgccataagtgtaagtttcctgaggcctccccagccatcctatgagtcaaataaacttctttcctttataaattacccagtcacggtatgtctttattagcagcatgagaacagactaatacrctccaaaatcagcactcttgaaaaggattcatgctggtaaagcttttgagatgtcatatgtaagatagtagttgtattctacttgaatggaaatgataatgcagctggaaatagaattctaggttagaaataacattctaatgtttaagtctttgttccattatctccttgctttcagtattatctctgaaaaattcagtgacttgttgattattgattatttcacatggtcttcttcaatttaatattttagcattttttattccccaaattctgaaaattgttgctaatataagttggtattagcctacttttaatcact

SEQ ID NO: 744600 - DNA, 614 bp, Homo sapiens
cccaagtctcataaaggtcagataaaagctaatttaagtatactatacacttttataagttgttgctaaggttaactcaagttaatatttgttagtcctacagtagtaatacaaagaaaggccagatatgtccaggaaatataaagaaaataaatatttttatcataaaccaggaaactatttatttttattctcagaaaaaatcaccattgagagtttaagctcataatagccgaaattttaaggtattaaaattatatcaaaaaagcagaaatratgcgtaatagagttgcaaactgacttctctaaaactgtgaatgatttgtaacccaaaaccagcacacatgaggaagggctgtcaaagtcactaaagattaaactgaggtatgtgaagatgctgaaaaaaggcccatgcaatcgcagttttcagaaataattctgtcagaatagttgtctaaagtaacgatacttcatgaggggcaaaaccaaaaatcagcagtgtgttgtttctaacagtgggaatggcatctgagggctggttgcagaagatactctgaactccatagaagaaaacaagagctgaaatttaacaagaaagcatgcagaaatatctt

SEQ ID NO: 744601 - DNA, 466 bp, Homo sapiens
accgtcacccacgtttccctcgcacgtcccaggtcctctcgagcagcacaggacggtgtggagcaaacccactcacccttgcccatcccttcccacaaacttgccagcgatgcctagaacagcacaggtgtcctttctcagattgtgcccccactccccttccccattcctgacagaagaaaatgcaaaagatcttctgaatatttgcccatttyggaaagccacaccatcaccacataaacttcaaaaaataaattaaataaaaacatgttcactgggttgacacccaatccacttcatgagttctctaagcatgttgttgaaaaccagtgtcacatccttaggatccttcttccaactggccactctccctgtgaatcattttagcagtgcctttgtaacaatattttcaaagcatcttccaagtcccctagttctatgaactttgccaccaaatgagtgaaga

SEQ ID NO: 744602 - DNA, 600 bp, Homo sapiens
aagaggcccacaaaagcccatagaagctaaacctctcagtgtttctgatttcaatagggatgagaagagaactaacatctcctgatcacctacaatgttgactggccacaggctagaaattttccatacattaccttagcacagcctcaaacaactctaaggtattatcattcacatcttacagacagggaacaggctcagagaggcagaataactggctcaggtcacacagctagtacatgttgagctgggattccaactccaagtccatctgcattctactacactaggcagcctcctcctagaagtattccccacaaatgagaggcatttccttttaactttttgtaaaagcattttcttactctcctgtatctcctgccgyctgactacatgtgcagtcagaaagcagcacctcaactgactctggacttccagagagccttgtctcctaatctcagtctccccctcagcctcccaaccacgtgggtctggcaaagccatccacagcctgcagggcagacctgccctgctccaactgtgcccccagctcagctatggagacacacaggatgctgggagagtctctgcctttgctgc

SEQ ID NO: 744603 - DNA, 499 bp, Homo sapiens
acagtgactatagttaataatatactgtacatttcaaagataactagaagatttgaaatgttcccaacacaaatgtttgagacgatgaatatcctaaatatcctgattcaatcatcacatattacatacatgtatcataacactacgtgtaccycataaatatgcaattattatgtatcaataaaaaaataaagaaacataaaaaaacaggttggctctggtggctcatgcctataatcccagcactttgggaggccgaggtgggcggatcacctgaggtcaggagttcgagactagcctggtcaacacggtgaaaccccgtctttactaaaaatacaaaattagctgggcatagtggcgcgtgcctgtaatcccagctactcaggaggctgaggcaggaaaaaagcttgaacccgggaggcagagattcaagcgattcgcaccattgcactccagcctgggcaacaagagtgaaactccgtctaaaaaaaaaaaacca

SEQ ID NO: 744604 - DNA, 419 bp, Homo sapiens
actccacctcagaaaaaaaaaaagaaaaaaaaaaaaaaagactaaagcttcaggctatagtaacagtagacttgtcttaactatgcataataatggtgtatcaacaaaatatgaacattgccagcaaaggtggaccattttgcttaaaaatgtgttgttgtttcttcccaattggattcctatacyagttcagcattaattgttactgctgtttaaattagaaaccaaggtctttaacagaatcatctaggcagatatatactgttttaggcactgtactacattaggtttttgtcagagttgctactcttcctaagatttctttcctctcgcttttccgaccataagtagtttaaaataccacaagttttctgtaacattaattcctgaatgaactattaggctatgaaaccaacttc

SEQ ID NO: 744605 - DNA, 516 bp, Homo sapiens
  misc_feature 499, 500, 501, 502, 503, 504, 505, 506, 507, 508, 509, 510,511, 512, 513, 514, 515, 516: n = A,T,C or G
attaaaaatcggtttatataaatgatatgtgcttagtatggaatattttatcttctcttcttttaatttggtaccttcctctattccgaattctgaggacacatggatcactttttcttgggtgagagtgtgtgccrtgtggctgccttttgccctcatgcagtagtcttttttttgagtcagagtctcactctgtcgcccatgctggagtgcaatggtgtgatctcggctcagtgcaacttccacctcccaggttgaagcaattctcctgcctcagcctcccgagtagctgggattacaggtgcgcaccaccacgcctggctaatttttgtatttttagtagagatggtgtttcaccatgttggccaagctggtctctggcaaggctggtcttgtactcctgacctcgtgatctgcctgcctcggcctcccagagtgctgggattacaggcgtgagccaccacgcctggcctgcggtagtctttccattacctcccannnnnnnnnnnnnnnnnn

SEQ ID NO: 744606 - DNA, 529 bp, Homo sapiens
aaaataaaaaataaacggttaccaatctgaaaccctgaaaatatgatgagtagtagaaagcacagctgtcaaaaaagcaggaagagattataaaattttttctaatatttccccccaaaatgcagaaaacatactggcaacattatttgaccagargaagcagtacaataggataaccatcaaatatctgattattaattcaatattccctcttaattaacatgggttaaggaataaatccctaatatatacattatttaaatgtacatgaaaatgaaaacaattgaaaaacctgtgagtggcagtaaaagttgtattggaagttttataacctaatatttgtgcatatattgtaatactaggaagaaaaaatatagaacccaaggaactaaaacaagctgaaatgaattgtgggaggaaggaggtagtattattttaaaaggcagaaataattgaaagaaaaaaactggatctgaatccaaaattgatatttgatggaagagaaaaaaaatgagacaaagtttagtga

SEQ ID NO: 744607 - DNA, 512 bp, Homo sapiens
gttggatgtggtatcgtcaccttattttagaaaagttggcctctccagagacaaggctatttttattcctcctggtgccaagcaggcccccacctcgcccaggccttaacaaaacacaagctggaaccacacagaaaacagattacacacagcccaagcagaaacacaaggagaggtaaaccaaaaggaagccwgacgaaagaaaccccctccagtgcacaaggcacatttgtcccactagataccacaaagagaagacacacacacaaacacatcccacacaaatacacacacagatatacaacacttacaaagtgctgaccagctacagccagtttggaccaataagtatcggtttatgccagttctaatttttcatcgctggttctgactggtttagaatggcttcaactggccagaacctatttagtgagactatagtgaatttgaccagcttggacctgttttgactggccaaaatcagtttatgccagttctggtctttgttggtt

SEQ ID NO: 744608 - DNA, 512 bp, Homo sapiens
gttggatgtggtatcgtcaccttattttagaaaagttggcctctccagagacaaggctatttttattcctcctggtgccaagcaggcccccacctcgcccaggccttaacaaaacacaagctggaaccacacagaaaacagattacacacagcccaagcagaaacacaaggagaggtaaaccaaaaggaagcctgacgaaagaaaccccctccagtgcacaaggcacatttgtcccacyagataccacaaagagaagacacacacacaaacacatcccacacaaatacacacacagatatacaacacttacaaagtgctgaccagctacagccagtttggaccaataagtatcggtttatgccagttctaatttttcatcgctggttctgactggtttagaatggcttcaactggccagaacctatttagtgagactatagtgaatttgaccagcttggacctgttttgactggccaaaatcagtttatgccagttctggtctttgttggtt

SEQ ID NO: 744609 - DNA, 527 bp, Homo sapiens
ggagcatccatatgtggctcttaagaagagcttagggccacatgtggtggcttatacctataatcccatcactttgggaggctgaggcaggaggattgcttgaggccaggagttcaagaccagcctgggcaatgtagcaaaacctcatcccaacaaaaaaagtaaaaattaggtgagtatgatggcacatgcctgcagtcctagctacttcgaaggctgaggagggaggattacttgagcctaggagttcaaggttacagtaagctatgatcataccactgcactccagcttggttgagagtgagaccctgtctcaaaaaaaaaaaawaaataaataaataaataaataaataaataaataaataaataaaaattaagagcttggcacttttttggagtttaggtcttttaaatttgtgccctcagctctctgatgaatttaaaagaaattatgacttttcatcttatctgaattatttttaggttgttaggatgggcccaagtatctcttgcagaaatctatatgt

SEQ ID NO: 744610 - DNA, 528 bp, Homo sapiens
gaatcagggggacagtcattcccagcttgttagagctgaagttcagatgggtcagcttgctgttaccctgaagggcaataatgaggtcctgcagaacccactcaggagttaccgatttgcacctgaggaagggaagggacatgaaagctggattgggggagaagactggtttccaggatcccgtctgcctcctcaccctgccttctactacactcactgccaaggttatacacggtacacaaggaattaaaaacaagggctgagccatggtactggaccttgaaaataaaaactaaaatatactccccccaaaaaaatcagtaaactcagttgcaggtaygaagtcagggatccctccttccctctccacctctcctagagacctgccatgaagaggtcctggggccacctattcttctaggaaatgacccccccatatacacatacaatccaacctagaaaagcccagcaataactctcttgcattttctgaacttctttctccttatcttgagaactaagtacgac

SEQ ID NO: 744611 - DNA, 579 bp, Homo sapiens
aagactctgtctcaaaaacaaacaaaacaaatagataatcacaattcaaacagagtatcaggagagaatattcgagcccaacagagaactcataggaagaagctggggcacagaaaaaggaagagaagccaactcagccagcagagatcagctaggataggcttgccttgtccagccccacccaacttcactcccacccctccatggctgatcatggagcccaagctcctatgcatttcacagaccagcccattgcctgatgcacaagaaagtttctcctggtaaacaacaatcaagcataaaagctactgcaactgctgcagctggctctaacctgcacgtgtcatctactggactagatgtcaaactacacaacccaatacaaaagctgctracacaagtaaacagtgcttgggaaccagataagctttaagacctcactaacctggccccacaggagaccaagagcctactcacacacctagtaaaccactactaaaaccacatttagaaagccactgcactaatactgtctataaccaaggaatttatagagtctttgtcaatgaaagcactcag

SEQ ID NO: 744612 - DNA, 631 bp, Homo sapiens
acataattaaagaaaaaattagtaaaatggaagataggttacaattacctagaaagcagcatgaaaacagaaaaataggtaaatcatagaagagggtataagacttagatgattaagatgttctaacacacttactgggaatcgcggaaagagaaaatattttaagaagactgaaatttttctgtaaccaatgaaagattccaattcagattcaagcatccaaataagcgcttaacaggataaatagtggagaaactgcagaacaccagatataaagatgttggtctgtaaagatttaacaaggggctgggagcttggggcgggggraagtgatatctacaagaaaggagacagacttgggtgaagagtaatagtggaaaccagagggcagtacagtgagatattcagtatggcggggagacgggagggtggattgtcaacctagaattctatagccaccaaaaactatcaagaatgaggataaaaacacattttcaaataaataccaagtttcttaccaccagatccttcctaaaagtaattctaaagactgttccttagacagaagtaaatcattccagatggaagagagatagagcaaagagaggggtagatctctggataaatctaa

SEQ ID NO: 744613 - DNA, 631 bp, Homo sapiens
acataattaaagaaaaaattagtaaaatggaagataggttacaattacctagaaagcagcatgaaaacagaaaaataggtaaatcatagaagagggtataagacttagatgattaagatgttctaacacacttactgggaatcgcggaaagagaaaatattttaagaagactgaaatttttctgtaaccaatgaaagattccaattcagattcaagcatccaaataagcgcttaacaggataaatagtggagaaactgcagaacaccagatataaagatgttggtctgtaaagatttaacaaggggctgggagcttggggcgggggaaagtgatatctacaagaaaggagacagacttgggtgaagagtaatagtggaaaccagagggcwgtacagtgagatattcagtatggcggggagacgggagggtggattgtcaacctagaattctatagccaccaaaaactatcaagaatgaggataaaaacacattttcaaataaataccaagtttcttaccaccagatccttcctaaaagtaattctaaagactgttccttagacagaagtaaatcattccagatggaagagagatagagcaaagagaggggtagatctctggataaatctaa

SEQ ID NO: 744614 - DNA, 631 bp, Homo sapiens
acataattaaagaaaaaattagtaaaatggaagataggttacaattacctagaaagcagcatgaaaacagaaaaataggtaaatcatagaagagggtataagacttagatgattaagatgttctaacacacttactgggaatcgcggaaagagaaaatattttaagaagactgaaatttttctgtaaccaatgaaagattccaattcagattcaagcatccaaataagcgcttaacaggataaatagtggagaaactgcagaacaccagatataaagatgttggtctgtaaagatttaacaaggggctgggagcttggggcgggggaaagtgatatctacaagaaaggagacagacttgggtgaagagtaatagtggaaaccagagggcagtacagtgagatattcagtatggcggggaracgggagggtggattgtcaacctagaattctatagccaccaaaaactatcaagaatgaggataaaaacacattttcaaataaataccaagtttcttaccaccagatccttcctaaaagtaattctaaagactgttccttagacagaagtaaatcattccagatggaagagagatagagcaaagagaggggtagatctctggataaatctaa

SEQ ID NO: 744615 - DNA, 566 bp, Homo sapiens
ctctcctcctcctagtagtcccgtgtcttgtcaacaaatatatgtgtatatatgtatatacacacacatacacacacacatattcatatacatacacacatacacatatacgtattgtttgagacgcagtgtcactttgtcacccaggctggagtgcagtggcgtgatctcggctcactgcaccctccacctcctgggccccagcgattctcctgccttaggctcctgaatagctgggattayaggcgcacaccaccacgccggctaatttttgtatttttagtagagatggggtttcaccatgttggccaggctggtctcgaactcctgacctcaggtgatctgcccacctcggcctcccaaagtgctggaattagaggcatgagccaccatgcctggcctactgtcaccatctttaaatccacatgtactgattgtttagctccaacttgtgagaacatgtggtatgtggttttctgttcctgcattagttcacttaggctaatagccctcagctgcgtccatgttgccacaaaggacatggtttcattcctttttagagcagt

SEQ ID NO: 744616 - DNA, 528 bp, Homo sapiens
gaatcagggggacagtcattcccagcttgttagagctgaagttcagatgggtcagcttgctgttaccctgaagggcaataatgaggtcctgcagaacccactcaggagttaccgatttgcacctgaggaagggaagggacatgaaagctggattgggggagaagactggtttccaggatcccgtctgcctcctcaccctgccttctactacactcactgccaaggttatacacggtacacaaggaattaaaaacaagggctgagccatggtactggaccttgaaaataaraactaaaatatactccccccaaaaaaatcagtaaactcagttgcaggtacgaagtcagggatccctccttccctctccacctctcctagagacctgccatgaagaggtcctggggccacctattcttctaggaaatgacccccccatatacacatacaatccaacctagaaaagcccagcaataactctcttgcattttctgaacttctttctccttatcttgagaactaagtacgac

SEQ ID NO: 744617 - DNA, 648 bp, Homo sapiens
aatcacactagcttaaataaaatgcaatgtccaaacgcattgcctagcattttcccacatcaaacagaggcccaggtgaatcaccagcatcactagagtattgttatttgaagctggaaaggggatcctcaattttggyggatgggaaggttggtggggagcaaatataagaattgcttaggggtctaagttctaggaaaactaacacacttgtgagaaggggctataatgccacagaaagtgtgtggcatttggatttggaaggcctgcctttgaatcccagactgctatacattagctgtgtgaccttggctggtcacttagcctctctgattcttttcctcatctagaaaagggagctgatcacagttgcttcagaggctactgtggaaataaaaggaaataatgatagagaaagtgctttgtcagctgcaaagaaatatcaaatattggagattattaagaaagtatattttaagcaaaaaagtgtaattgggtgatattattgaattgatgttattttgcattgttaggataatgtctttatccttaggagaagcacactgaaatatttaggagggaaatgtcaaaatgtttaaaacattcacatggttcggaataaaacaaaattgtacagctcaatgtacg

SEQ ID NO: 744618 - DNA, 557 bp, Homo sapiens
aatgtgagcaacagaaagtccaggggctagaacttggcaggagaaggaggagtggtatgaaatgggaggcaggagctggatagcgtaggggtctgcatgccatggtaaggactatgtatggggacagtaaaaatggcaaatgatgccatcagtttccactttaacagaattgctatcacccaagaggtctgtaatgggaaaaccggctgagtgagttctctagccttggcraagccattccattattgggtcaagcctcacaaaatcacttgagtaaaaaaataattgcaagaattttcttttcttcttgagtgttggaatgggagtgggggatattgagtctattcttcccccagatatccatgtagccttttaattttatttttcttttattagacagggtttcgctctatcacctaggctggagtgcagtggcgtgatctggactcactgcagcctcgacttcctggactcaagcgatcctcccacctcagtctcctgagtagctgggactacaggtgtgcactgccacgcctggctaatttttgtatttttgt

SEQ ID NO: 744619 - DNA, 555 bp, Homo sapiens
acattgcatagacttcaagctagcatgagaccctagaggctgtgtggtgtcactcctcggggaacagacttgtttctgctctcagcctggatcccaacttttcatgacagagacagggacatatttaggcaatcaaggraaacagctgcaaacttcacagcctcaaagagcaccactgtcactcactttgatgcaggaggttattgaggcctacatgctggtgaacctgccaagtaagtccccacttgggaggcatcgagagcccagagcaggaggaagaaaatgcaccagacacccagatgccatgtgaggatgagctgtgagttcgcacccacagctcaattagtattgctaacatgccctctccctcagcaccttcagaataagtaaataatccatctacctgaaatgaactccaaaaagagagaaaaagagagagcatttggaacatttgctgagacctaaattgaccaactttgatcaagatgagttagtaaaatagcaggctcctcatcagctgcattttaatgccatatttggagccactcagtcatt

SEQ ID NO: 744620 - DNA, 634 bp, Homo sapiens
tccgatatatggtggggagaagagggaggcgttggtgagcaagcacccgtgggcagaccctgcccctccgacctctcccagggcccggggaagctctctccttggttgcctttgcctgccttttggcaaacccttgaaattgctgtttgcttgggatggagcggggagggcgagccaggtcctgtaactggggtgtgacttctcacctgctccctccaaggccttaggaaagagattcaggaaggacgccgcctcctaccgaagcctctatggagtggagcaaaaggggaaacacctcagcatggtccctggcagctacatcaaggatggccccaagaaatctggtaagggaaaaaccttggccccggccrccagaatcctgctccataatctcctcctctagaagaaaccgaaagctcacgccattcttagagcagtagcgtccacatcaatccaaccattgtgcacacaggagtcagaagcccacatggaggctcagtagggaccactcctggggtcgctcttggcaagcagggtgtgacatgaacaggaggcaagtgtctgtcaaggccctgccccatctcgagtgttcccttctcaggaaaccagcctcatgtgtccaggttcctgaagc

SEQ ID NO: 744621 - DNA, 634 bp, Homo sapiens
tccgatatatggtggggagaagagggaggcgttggtgagcaagcacccgtgggcagaccctgcccctccgacctctcccagggcccggggaagctctctccttggttgcctttgcctgccttttggcaaacccttgaaattgctgtttgcttgggatggagcggggagggcgagccaggtcctgtaactggggtgtgacttctcacctgctccctccaaggccttaggaaagagattcaggaaggacgccgcctcctaccgaagcctctatggagtggagcaaaaggggaaacacctcagcatggtccctggcagctacatcaaggatggccccaagaaatctggtaagggaaaaaccttggccccggccgccagaatcctgctccataatctcctcctctagaagaaaccgaaagctcacgccattcttagagcagtagcgtccacrtcaatccaaccattgtgcacacaggagtcagaagcccacatggaggctcagtagggaccactcctggggtcgctcttggcaagcagggtgtgacatgaacaggaggcaagtgtctgtcaaggccctgccccatctcgagtgttcccttctcaggaaaccagcctcatgtgtccaggttcctgaagc

SEQ ID NO: 744622 - DNA, 651 bp, Homo sapiens
ttctaccaagatttctaatttataagagtagtaagatgcattgggaatatcttatttgtttctatttttgcctctaaaaatctaatacacactaagaaaatttctcctcaaagataaaaaaatctaattatgaatctaaatattaaccagattttagagtaaaaaatctagaaaagaaatgtttttttcacagggaaataaaattaaaggacagtttatttttttctaacaaatgcatataatgtgatttttttcagccttctacataaatcatagaaatctttaaagactttttcatcakatggaataacaattagacaacaagcttttattaaaagtgatattttaaaattagtcgtaatgtgtacagagctttaaacataacacatactattacaaactcaaaaccttcacaaattgatttgaaattgtgaagcctgatattcaaatctaagagtcaagtcagctagtattcctgattacaaaagcatgctttcataggaactcaatttcctttatcaatacaattttggccacttaagagattaaaaaataaataaatacacaaacaaatcatgtatataaactttcctggtcagattgcaatcactgttcatcaaaacaatggctcttggatgcttccatcctaac

SEQ ID NO: 744623 - DNA, 589 bp, Homo sapiens
gacatcgctccttagaattttctattgcattccttacatggtaatttctatgattgaattagtaataatatacttataatatctcatttttctatttcccacagaatatatgatagtatatccaatttcaaaataatctaaaaatattttagtgttagtttactaaatatatatatatatatatatatagagagagagagagagagagagagasagagagagagagagagagaaagagagacagggtccagggtctcactctgtcacccaggctggagtgcagtgacatgatcaaggtttgcactacaccttaaactactgggtttaagggatcctccaggctcaacctccctagagctgggaccacaggtgcatgccaccatgtctggctttaaaatttttttttttttttgtagagacagggtctccctaggttgcttgggctggtcttgaacctcctgagttcaagcgatcctctcacctcagcgccccaaagtgctgggattataggcatgagccactaataatatttgaaaccatattagagcttctttaaaggcctaacccatctcatgagatcatataatgt

SEQ ID NO: 744624 - DNA, 616 bp, Homo sapiens
caaatgaacatggtatacgtttaggaaatctatgaaaaccacactggctgaagcggaaaatttgatttagggattaatgagagataaaactattcaatagcgcatatgaactcagttaacagagagtcttgaacgccagactgatgaaatttgatgttataataataacataaaaaggaggaatgtaggtggtgagttgaaatctacaatttaaactacaaataccttcttttaagcatggatgacaaaaaagtaaaacaatggacacatgaycttagaaaataatcatcttttaaagctgatagatggcttttcttctctcataaggttatagccttaagtacaaatacattgtcatgatatgcaaaacttcaagtatgaatacactttatatttaatataaaggtaaatcacctaagaacacattcgataagtattcaacaaaataatatgaatattaagtataaaatatttgacattttctttactcaaaaagagagcacttgctaataaactttatagaagatgattaaatcacacatcaatgtccttttacatccaatttaatatgagttctgatgtaaataaaatatccaaggcattttaagtactatac

SEQ ID NO: 744625 - DNA, 685 bp, Homo sapiens
tcacagagactagatgctaagcaaatgctcgtggaattgattatctaacatttttactttttatgcctttctgtgttccttcttacattccagatgttctgcagagttttcatgacctctgttgaatatcaactctgggaaagtcaatatttacggagttttaaaagggagtacaaatcaaaagtaaaagacagcttcagttggcacaagaaaaaatacttcatgggtaaaagagtacaaaagaggaccattaaggatggagtaatgtaggcttcaccttgaggcttcctcaagatagtcaccagcaccactggcatgacctgaacacacaatgtaatgtatgtacatagaaaataatatcttcacttcatcacttttttagggggcagtgtgggcagtgtactacttttaataagtaaaatgcatgatttgatgaaaacttgataagtgaatcctctaaataaattatcatttggagagctttttaatgttcagtgtggttttacacaaagagtttgtgcgmttattctgtttgccttggactttcacatgtaattacatctcatcatcaaagtgtatgaaaattagaaagctgaaataaacttattttttctctgtgaccatcatataaatggatcctcttgccacagtcactccatgcattacgaataggttctatggaagc

SEQ ID NO: 744626 - DNA, 663 bp, Homo sapiens
tgggatgttgctgtgttgcccaggctggtctctaacttctggcctcaagcaatcctcccacctcagcttcccaaagtgcttggattacaggtgtgagccatcgtgcctttcttctgagagtattttctagaggaattgtaatagcgggacaatctggaagaaaagacaaagaaggtcccttttgtctttaacttagaccctacattagttgctattgtgatataacagattaccacaaatgtagtggcttaaacaacattcatttattgtctcacagtttctgtaggtcaggcttggcttaaatgctcagtctcacagkaagagacaaaataagaaatgtatatttggtctttgctcctagttcctggcacagagcttttaaaatccttgtaatttcttgagcgatagaagcatcttttgttacaatatttagttttagtccccagtctgacacaaaagcttctaagacctttggaatctctggagtggtaagtgtctctttttgtgtgtgaatgagatgactggtggctggggtctctagatggcttcaggatgaggctggttgctagaggaaccaaacaggtgattagagggttagaactttcaaccccatcccttgacctctggggaagggtgaggggatccagattgagatcaatcacc

SEQ ID NO: 744627 - DNA, 599 bp, Homo sapiens
caggtcagattattcttcatgctcacataaggctaaagtattaatttatatatttaactacacttgccaggagtcagaaaagcagacattctgaggaactgctcttggacagaacttgtggcaatgatatttagacattacttcacataccactatttgatttaaagcagtgatctgttgactgggtcattggtaatgcacatcccttccattttttggaaatacacctgtttcttggatttgatttggctcttaattcaaacagaactccaagtgctctgaaactaaatcaacctaaaattatacatttatctagagttacatttaggccatatggtttaagttgtccaaatgtcacagaagcaacagcaacagccatcatcrtactttacacttacccagcatctttcctgccagaatatgatgtaagttataaaagtttcattaaggcagaggtgttaaccctaattccaaaaggacagtcatttagctgctgtttcagtttagctctgcttcatagtgaattgatacataagagttacttgaagtcaatttaaattttcataataatattcttgtaactgaaaatgtctcaactg

SEQ ID NO: 744628 - DNA, 599 bp, Homo sapiens
caggtcagattattcttcatgctcacataaggctaaagtattaatttatatatttaactacacttgccaggagtcagaaaagcagacattctgaggaactgctcttggacagaacttgtggcaatgatatttagacattacttcacataccactatttgatttaaagcagtgatctgttgactgggtcattggtaatgcacatcccttccattttttggaaatacacctgtttcttggatttgatttggctcttaattcaaacagaactccaagtgctctgaaactaaatcaacctaaaattatacatttatctagagttacatttaggccatatggtttaagttgtccaaatgtcacagaagcaacagcaacagccatcatcatactttacacttacccagcatctttcctgccagaatatkatgtaagttataaaagtttcattaaggcagaggtgttaaccctaattccaaaaggacagtcatttagctgctgtttcagtttagctctgcttcatagtgaattgatacataagagttacttgaagtcaatttaaattttcataataatattcttgtaactgaaaatgtctcaactg

SEQ ID NO: 744629 - DNA, 631 bp, Homo sapiens
tatagaactcccagtgcaggtctaataaatgacatttgattttgttattagttgttttaatcacattcaacagaatgtgattcagagcttcttttttccagcgaaacacaggtaatattatgggttcttctccaaagtactcttactccgttttcacattgtagtttgtgttctyttttttcaccatccgtgtcagcaggccccttcccacctttactatgcctgattccctcttttttttttttttgcaagcctcttgcattcagcttgtgtttcacaggactgaatccatcagacactgactaccagctaagagaactattattacatttcttctccagtgaaatttgacccccttacagtcttacagtcaaatcactcaagtaatatcatgtaaatgtacctaagttgttcagaattccagtgcctgagttttttttttttagaatcaaaaggaaattgcaaaaaaaaggctgccatcttgaatttcattttacgcgagtgacctccagaagtcagaagtttatgaagacttacacaatacactgtaaatgctaaagtgttcaaaatgaatgttgctgaacaaataatacaattatatgcatttctggtcttttcaaattttacaaat

SEQ ID NO: 744630 - DNA, 573 bp, Homo sapiens
taataaatgacatttgattttgttattagttgttttaatcacattcaacagaatgtgattcagagcttcttttttccagcgaaacacaggtaatattatgggttcttctccaaagtactcttactccgttttcacattgtagtttgtgttctcttttttcaccatccgtgtcagcaggccccttcccacctttactatgcctgattccctcttttttttttttttgcaagcctcttgcattcagcttgtgtttcacaggactgaatccatcagacactgactaccagctaagagaactattattacatttcttctccagtgaaatttgacccccttacagtsttacagtcaaatcactcaagtaatatcatgtaaatgtacctaagttgttcagaattccagtgcctgagttttttttttttagaatcaaaaggaaattgcaaaaaaaaggctgccatcttgaatttcattttacgcgagtgacctccagaagtcagaagtttatgaagacttacacaatacactgtaaatgctaaagtgttcaaaatgaatgttgctgaacaaataatacaa

SEQ ID NO: 744631 - DNA, 523 bp, Homo sapiens
cgggtggagagggctgagcactgggactgagggagggccgggtggaaggggctgtgcgctgggactgagggagggccgggtggagagggctgagcactgggactgagggagggccgggtggagggcmtcctccccctgaagggagggaacagcaggatggaaggcacacgagcacagacctgactgcaagtattttcttttttttttgctgtgtgactctaagcaagcagtgtcccttctctgagctgtttcctatcaactaagggcagcaccaatatcatgaggctgcggcagggttgtcggagcttgcaggtggtgagctgagctcagagcttcccactgtgtgtctccacagaacctgcccaggtggctgctgcccctgccactcgcagtgtccctgtaccagcaaaactggagcaagttttgtaggaatggctccacgttgctgagtcaaccacagttctcatctcagtccttggctcaggctcggcacagtggcccagggctatgtgctcttccctgg

SEQ ID NO: 744632 - DNA, 468 bp, Homo sapiens
tgaaacaaattttaagaaacatacttggatgggcgaggtggctcatgcctataatcccaggactttaggaggctgagacgggtggatcacctgaggtcaggagttcgagaccagcctgaccaatatgatgaaaccccgtctctactgaaaatacaaaaacagccaggtgtagtggcatgcgcctgtaatcccagctactaaggaggctgagacaggagaatcgcttgaacccgggaggcggaggttgcagtgagccgagatcaggccattgcactctagcctggacaaaagcgaaactccgtctcaaaaaaacaaaaacaaacaaamaaaaaaaaccatagtacatccaaaacatcacttcgccatgtaatcaacaaaagattattggtagtttacacactctgttatactaagtttttgaaatccagtgtcttataccacctcaattcataccagcaccacttcaaa

SEQ ID NO: 744633 - DNA, 529 bp, Homo sapiens
ttgactgcccagcatagtgtctggccaacaggggaccccataagtttgttgaaacaagaaaagttacatacttttttgtgtgcctctgactcaggaagtggaaaattcctagagcatggagtaccttctccccagaatacactcaaaaaggtttttcagagcaggacagtcatgctgcacacagctgatgactgggatggaggcattagccctggaratcacacttcctactcagaggggctgggcagaggtggctaggagaggtcatccctcagacaagtcaggagacaaatgaaactggcagctcacagagaagggcgtgtgtgtgtgtgtgtgtgtgtgtgtgtgtgtgtgtgtaagctgtaggtaggagaagaaagattgggggtgggggaaaacgacggcgagcagagatgccgaaagctgtgaagagctgaacccgctcatgcagacagggctgaatgccaagtagaagggactcaaaccaccaagacatttattccagagcaggatccttaaaccaaaagga

SEQ ID NO: 744634 - DNA, 683 bp, Homo sapiens
gaaaggggaggggcatggatgctgggcactcagtcagtgctagatgaataatcctaaaacagcagccaaggagacaagataaaatgtcagcctttgccaaatcatatattagcatttttaaacaaagacacctctttattttgattttgcatatggggaactaaaacaaaatgtttttgatgagggtttaggaagtcatcaatagggttaggaatcaaattacagcctaattctacgcgtatctgttgacataagcagaacgtcagtaaagtgcctcccaatatctctaaatagcctcttggcatctgaaacgtagggaaaaatattggttrctttttaaccaaaaggcactaaaacttccaaaggtatatgaaatcagtaaattataaaacatgtcccctccccccccttctgtaagaaagaaatagaaaacaaaaagagagatgaatatggggaaaataaacaatgaaataatattatgaattcattgtaagacttgctaactggctgtgtaactttgggtgatttgcttaactattctgtgctttgttttcctcactgtaaagtggacaaactagtagtacttttgtggaagattaaatgaggaaaggcaagtcaagtattgagcacagtgcctggcatttactacttacgaaggttatgttctttattactccatctac

SEQ ID NO: 744635 - DNA, 645 bp, Homo sapiens
tggggaccttgtgagccaggttaaggactttgggttcatcctcaaaccatgaagcattccaagcaattatgtgacaagatcagattctaggggctgaatggagaataaatatgtaagtggcaagattgaaggctgggaatgtaaaaggtggctcctgctgtggcttgggcaaaacatcacataggcttgagctagctttgtgattctacgggattgagaggagaatgctaatttcataaatgtttagtggatatgattggcatgtgawctgaatgcaactggagaaggggaccagtcatttactgagtagatattggtaattgataaataagaccaaagaaggtgaggtttggggataggcagtgtaaattttggaagtaataaggggattgaggttctgtccatggcattggtggggaaatctagcatgtaaatacatgtaaatagataagtaaatatgcctatacatttatataagatatctatacacttattctccttctttgttcatttattaggtgtgaaatctacgtgatttttttctcccatattatttttggtattcaataaatgtgaatcatgaagagatagctgttttatttaatctctgcaaagtcacattcttacccattttgattgtaataa

SEQ ID NO: 744636 - DNA, 612 bp, Homo sapiens
ccatgccttatttatttctgtatccttagtgcttatcaaaaatacatagtaggtgtttgatcatagcaacaataaagagctatcattttttgagcatctgctgtgtgcccagtttgcatatgttctttaatcatgtgtgtatatgtccatgtgtctctttgtatatgcatgtatatgtatatgtatatgtgtatatgtacgtgcatggtaggttttattacgtacgcccttgaagayacagaagctactgtagcttgattgttgctcagagaggttatataagttgtctaaagacatgaagcaagaaaatgacaaagccagaatttgaactcaagtttgactgacttcaacaagaaaggaaggaaagaaggtagaaggaagaggtgtataatctcaaatgaatgatatgaattgatagaaatactgtatatcaaatggactccttaaattgcccaatcaaaacatgaacagcatattttgcagatgtagatagcaggaatggaggatctgtcttggaggcttaactggtagtaccctttttgtgggaaaattcaaaacaaacatgcctgttgccccaaaaccatttgcataatcacactgccaagaagaaag

SEQ ID NO: 744637 - DNA, 599 bp, Homo sapiens
agaagaggcagaacaaattgcctttgcaacattttcagtttaaagctatattttcatgtgtgacctagggtctctcaattgactaagaactcctgtctataatctttttgctcttccactcggttcagatcaaaggaatctttagttgacacctaagaaaaatagttacatgccgtaaataaataattggtctgtcaatctttatgaaatactcctctaccaagttcatctcttgatagctyatgggataagtggggtttctcacaatatgacatgatacctacttcatcagagtattgaaaatgttcagtagaaagagacagaggaacccactgttctttgatttgtattaaccacataagtacctggagaaaattatagccaaagcagtgggactgatatcctactggccttttgcttggaataagagagaaagatgactgtgggaattagtcaaggtacaaatcacatcacatcatcttcttgtgcaaacagattgcctggggagtggtttccaagatttttcagtttacagaaaatatagaaaaatgacaaaactgaatatataacacagaggcagagagatgaggttgctcatg

SEQ ID NO: 744638 - DNA, 629 bp, Homo sapiens
gtgcacatattgtcttgataaacatcttaacagaaaacagggttcgagagcagagaagcggtctgaccccaaaatcaccaggatggggtttttccccaccctaataagcctgagggtactgcaggagaccagggcgtatttcagtccttctctcaaccacgtaagacagacactcccagagaggtcctttatagacctccccccaggaatgyattccttccccagggtattaattattaatattccttactgggaaaagaatttagcgatatcttccctacttgcacatccatttatagcctctctgcaagaagaaaaatatggctgtattctgcccaaccccacaagcagtcagaccctatggttgtcttctcttgttccctgaaaatcaactgttattctgttctttttcaaggtgcactgatttcatattgttcaaacacacatgttttacaatacatttgtacagttaacacaatagtggtcctgaggtgacgtacatcctcagcttacgaagataacaggattaagagattgaagtaagagaggcataagaaattataaaagtattaattttgggaactgataaatgtccatattaaaatgaaatcttcacaatttatgttaag

SEQ ID NO: 744639 - DNA, 629 bp, Homo sapiens
gtgcacatattgtcttgataaacatcttaacagaaaacagggttcgagagcagagaagcggtctgaccccaaaatcaccaggatggggtttttccccaccctaataagcctgagggtactgcaggagaccagggcgtatttcagtccttctctcaaccacgtaagacagacactcccagagaggtcctttatagacctccccccaggaatgtattccttccccagggtattaattattaatattccttactgggaaaagaatttagygatatcttccctacttgcacatccatttatagcctctctgcaagaagaaaaatatggctgtattctgcccaaccccacaagcagtcagaccctatggttgtcttctcttgttccctgaaaatcaactgttattctgttctttttcaaggtgcactgatttcatattgttcaaacacacatgttttacaatacatttgtacagttaacacaatagtggtcctgaggtgacgtacatcctcagcttacgaagataacaggattaagagattgaagtaagagaggcataagaaattataaaagtattaattttgggaactgataaatgtccatattaaaatgaaatcttcacaatttatgttaag

SEQ ID NO: 744640 - DNA, 629 bp, Homo sapiens
gtgcacatattgtcttgataaacatcttaacagaaaacagggttcgagagcagagaagcggtctgaccccaaaatcaccaggatggggtttttccccaccctaataagcctgagggtactgcaggagaccagggcgtatttcagtccttctctcaaccacgtaagacagacactcccagagaggtcctttatagacctccccccaggaatgtattccttccccagggtattaattattaatattccttactgggaaaagaatttagcgatatcttccctacttgcacatccatttatagcctctctgcaagaagaaaaatatggctgtattctgcccaaccccacaagcagtcagaccctatggttgtcttctcttgttccctgaaaatcaactgttattctgttctttttcaaggtgcactgatttcatattgttcaaacacacatgttttacaatamatttgtacagttaacacaatagtggtcctgaggtgacgtacatcctcagcttacgaagataacaggattaagagattgaagtaagagaggcataagaaattataaaagtattaattttgggaactgataaatgtccatattaaaatgaaatcttcacaatttatgttaag

SEQ ID NO: 744641 - DNA, 626 bp, Homo sapiens
gagggaaatttatagcactaaatgcccacaagaaaaagcaggaaagatctgaaattgtcaccctaacgtcaaaattaaaagaagtagacaagcaagagcaaacaatttcaaaagctagtagaggacaagaaataactaagatcagagcagaactgaaggagatagatacacgaaaaacccttcaaaaaatcaacgaatccaggagctggttttttgaaaagatcaacaaaatacagagactgctaagcagactaataaagaagaaaagagagaagaatcaaatagatgcaataaaaaatgataaatgagatatcaccaccaatytgacaaaaatacaaactaccatcagagaatactataaacacctctatgcgaaaaactagaaaatctagaagaaatggataaattcctggacacatacaccctcccaagactaaaccaggaagaagtagaatccctgaatagatcaataacaagttctgaaattgaggcagtaattaacagcctaccaaccaaaaaaaagcccaggaccagatggattcacagccgaattctaccaagggtacaaagaggagctagtaccattgcttctgaaactattccacacaatagaaaaagaaggaatc

SEQ ID NO: 744642 - DNA, 630 bp, Homo sapiens
tgtatgtatatatagtaaatataccatctatagtaataaggtttcacaaagaagagaaaatggaaatgtagagatataaaggaaatcatctttgtattactagtctttttattgccaaaaaaattttatttgcaaaacaaatataggctcatggtaaaaattttagcaactgagatargcaaaactaagaaagatgtaaatcccactagccagataccactactcctaagacccaggtcagacagcgaggcatcactgttaagagcatgggcgctatggttggacaactctatcacttactagctgtgtgtcctggacccagctacttagtccctcaccacctctgtttcttcatctatataatgggtcagtaatcccacccacatgaagttattgttagacttaaataagctgacccatgtaaagtgcttggaaattccctggcacaaagcaagtgctcaataaatattatctgtgactctattattatcatcatcatgatcataattattaccgcaactgccactagcattcccttccaaggtattttctcagccagcagcagcaaatctgtttgggattgtatgtcaagccctgtgaaaaagaagggtttggcacacagggcttcat

SEQ ID NO: 744643 - DNA, 630 bp, Homo sapiens
tgtatgtatatatagtaaatataccatctatagtaataaggtttcacaaagaagagaaaatggaaatgtagagatataaaggaaatcatctttgtattactagtctttttattgccaaaaaaattttatttgcaaaacaaatataggctcatggtaaaaattttagcaactgagataggcaaaactaagaaagatgtaaatcccactagccagataccactactcctaagacccaggtcagacagcgaggcatcactgttaagagcatgggcgctatggttggacaactctatcacttactagctgtgtgtcctggasccagctacttagtccctcaccacctctgtttcttcatctatataatgggtcagtaatcccacccacatgaagttattgttagacttaaataagctgacccatgtaaagtgcttggaaattccctggcacaaagcaagtgctcaataaatattatctgtgactctattattatcatcatcatgatcataattattaccgcaactgccactagcattcccttccaaggtattttctcagccagcagcagcaaatctgtttgggattgtatgtcaagccctgtgaaaaagaagggtttggcacacagggcttcat

SEQ ID NO: 744644 - DNA, 576 bp, Homo sapiens
tcaacaggaaacttgctacctgatgagttgccttttttcttttttctttttttttttttttttttctttgctttttccatccccatgattgttccaacagaaggagaaaagatgtaataaacctttaccgggcaccgtctgcgtccaggcactctactcggccctgggggtgcagagcacaccaccccagccttaggcatgaaaaacactgtgtaccgagaagcccagcccctggaatccagcatgctggtgctacattccagctctgtctcttattaactgggccgcttttgayaagttgctaagcctctctgattcttggttacctcaaccttaaaacaaggatgatacccacttcatcaggttgtcatgagtcacaaaaataaatgtagtgatgctcttaaagggtttagcaccaagctgggcccaaggaagcattctgtgtgtctattgaccaacttttacctatcctgacaccaaggagcttagagtttagtggagatggcagagccgtcagggcccgtgttaggctcccaaaggcatttttaccagtgcatgtgcctcgcacagacctag

SEQ ID NO: 744645 - DNA, 610 bp, Homo sapiens
atcgttaggaataataatctcgaacaagacccaaaggacttacagcaaaaagaacataaattaaaaagcccttataaatcagagcaacttttatttaaaagctcctttttgcctcaccaaaaacttacctctagtattatgtttaacccrgaaaagccaacactatctattagatcaaagttagtaggccaagcaaggtggcttacacctgtaatcctagcactttgggaggctgaggttggcagattgcctgaacctaggagttcaaaaccatcctgggcaacatggcaaaactccatcccgaaaaagaatacaaaaattagtcatgcacagtggcacatgacttgtagtcccagctactcaggaggctgaggaaggaggatcacctgaacccaggtaggtcaaggctgcagtgagccaagatcacaccgctgcactctagcctgggcagcagaatgagaccccgtctcaaaaaaaaagtaaatagtgctaactgatctctcaactttatccaaagtgagcatttgtttttattagttttatagaaatttaatttatttgatggaaggagagaataaggatttttggcatataacactaggaaagctga

SEQ ID NO: 744646 - DNA, 661 bp, Homo sapiens
agtttgaacctggcagcccaaaccatctctacggggcccgtattaagtctttatatgattatcaaacgcgtcatattccccatctatttccatttaaaagaacgggggagtgatggcttttaaaacaagccaaattaccactaaattcagcagcatgttttcatgacttagcaacttatataaagtatgtttgagcctgccagtgaaaaatgtgatgtgggttgccaagaagacacacagatatagaaccaggcataacagctgtaaaattaaaatggaatagactaagataatgatttttcataggctaagatatatcatgtcccagcctgtcttctccttcagtcctctgtaagatagatgttccaataatgccagctgattcaaaattgaaatattgttcaaaatatgyttagattgattttttttaaaaattgttattcagccccagagtgaaatgactactgaactactgaatttatagcccccaaactgagggtgggaggggctctgaactgaacttcagaaagatacctcagcctgtggtctttctcttttcatagctcaaccaagctctagactgcaggggggatatagtaagattatttagattgattctacttaaaagatgctagtttggataaaatgaagccattagtta

SEQ ID NO: 744647 - DNA, 661 bp, Homo sapiens
agtttgaacctggcagcccaaaccatctctacggggcccgtattaagtctttatatgattatcaaacgcgtcatattccccatctatttccatttaaaagaacgggggagtgatggcttttaaaacaagccaaattaccactaaattcagcagcatgttttcatgacttagcaacttatataaagtatgtttgagcctgccagtgaaaaatgtgatgtgggttgccaagaagacacacagatatagaaccaggcataacagctgtaaaattaaaatggaatagactaagataatgatttttcataggctaagatatatcatgtcccagcctgtcttctccttcagtcctctgtaagatagatgttccaataatgccagctgattcaaaattgaaatattgttcaaaatatgcttagattgatttttttwaaaaattgttattcagccccagagtgaaatgactactgaactactgaatttatagcccccaaactgagggtgggaggggctctgaactgaacttcagaaagatacctcagcctgtggtctttctcttttcatagctcaaccaagctctagactgcaggggggatatagtaagattatttagattgattctacttaaaagatgctagtttggataaaatgaagccattagtta

SEQ ID NO: 744648 - DNA, 521 bp, Homo sapiens
gttcattgctagcctgcaaactaggtggtaagcaaaacttcctacagctgccactcaacttgagctaatgaaaatgcgcccagattagttaactagtctatcagaggcctgtttctctctacattatgcagaataatcttttgcaaggttaaaacagatattatgagactttctgagaatagtcgtgagaatttatggatggagggtgggcygcagggaaaatgataaatgcataatttacactgttttttcactggctagtaataatgactataatatcatgaaacattgtttttaacaaatgaattattatgccaagtagtatagatgtgaggataaaattaataaatacatgtctcagatattccttatttatgaaatactagtccaatgttaactttagccgttattcatatataactgttaccatccaaaagccttttgggccttgcaatttaccttttgagaacgtatcggtgtaattgtgaattaggaagttgggaaattgacagaaaaagaaa

SEQ ID NO: 744649 - DNA, 575 bp, Homo sapiens
ttttccattattagtgaaatcttgttattttcacaagttaaattctatttaaatacatttatgtgttacagaattgtcaagtggcagcttaacctgctgagggaatagaaaaaaagtgtgcctagattaaaagaatgcacttacacgaaaataaagataaatgaactaataaattactagtttttaataaataatctccatactgaataacttatccttctggtaaaatatttactatgctctttaaaagctttttaatcaaccgaaacactcaggaagctttaaatgattggatatccttttgtggcttaagagttgaaatgattttttactgaagtacattttaataagaagcaaattgctttaaagtgattcaagtcttcatggcgtsagggctcttcacgctcagttcctcgggcttaggggtggactcctcggttcagaaggcagaagaggtcacactaggtcctagagcgtggacgttctgggtaattaagaatcaattccttttcaattattttaggactagcccaggcctgagactcccagcatgggagcatcgcccacactcccat

SEQ ID NO: 744650 - DNA, 575 bp, Homo sapiens
ttttccattattagtgaaatcttgttattttcacaagttaaattctatttaaatacatttatgtgttacagaattgtcaagtggcagcttaacctgctgagggaatagaaaaaaagtgtgcctagattaaaagaatgcacttacacgaaaataaagataaatgaactaataaattactagtttttaataaataatctccatactgaataacttatccttctggtaaaatatttactatgctctttaaaagctttttaatcaaccgaaacactcaggaagctttaaatgattggatatccttttgtggcttaagagttgaaatgattttttactgaagtacattttaataagaagcaaattgctttaaagtgattcaagtcttcatggcgtcagggctcttcacgctcagttcctygggcttaggggtggactcctcggttcagaaggcagaagaggtcacactaggtcctagagcgtggacgttctgggtaattaagaatcaattccttttcaattattttaggactagcccaggcctgagactcccagcatgggagcatcgcccacactcccat

SEQ ID NO: 744651 - DNA, 640 bp, Homo sapiens
ctgttaaaagaaacagccatattatttacatttccagaaatggctcttctgatgattatccatagcccatcaaaattaactgcatattctgcataaaagacctttaagatatttaatatgtaaagtttctttctgtaaacacttactgggttttgacagcaacttgtaaagaccaaggtaagaggtaataaaactacagcaatggtttacaaatggaggttttgaaggctgattagagggagatgaattccagctggaaaactttttgataatgtcaacagctttcgagagcctctgagmagtgaatgagatgatacaggtgaaagcagctagcgccatacctggcccaggacaggcaggaaaaatgtcaggcagatctgaagctgaatccggttactgagtcatcacccatcagggaatcagaaatcctttgattcaaacagttgggacacaaattgttggggcatgcgtgacacatggattgaattgaatgccaggtaacgggggtcaaagccctgattgtccaagttggacgtgtcagctgggttgacacgggcgtggcggaatcccatggaacttggtgaattacatcatcggacggttcgcagtagacaggccttcttgaatgcagttctcgacc

SEQ ID NO: 744652 - DNA, 640 bp, Homo sapiens
ctgttaaaagaaacagccatattatttacatttccagaaatggctcttctgatgattatccatagcccatcaaaattaactgcatattctgcataaaagacctttaagatatttaatatgtaaagtttctttctgtaaacacttactgggttttgacagcaacttgtaaagaccaaggtaagaggtaataaaactacagcaatggtttacaaatggaggttttgaaggctgattagagggagatgaattccagctggaaaactttttgataatgtcaacagctttcgagagcctctgagcagtgaatgagatgatacrggtgaaagcagctagcgccatacctggcccaggacaggcaggaaaaatgtcaggcagatctgaagctgaatccggttactgagtcatcacccatcagggaatcagaaatcctttgattcaaacagttgggacacaaattgttggggcatgcgtgacacatggattgaattgaatgccaggtaacgggggtcaaagccctgattgtccaagttggacgtgtcagctgggttgacacgggcgtggcggaatcccatggaacttggtgaattacatcatcggacggttcgcagtagacaggccttcttgaatgcagttctcgacc

SEQ ID NO: 744653 - DNA, 628 bp, Homo sapiens
attttttcttgccatgaatgtgacgtgattatcttctcctacatcacactgaagttttatgaatgatgctttgaagtgggaagggccagagagttaatattttcggcttcttgggccagctggtctcggtggcagctactgagctctgccactgcagcagagaacgggcacaggcgatatggaaatgataggcgcggctgtgttccaataaaactttatttacaaaaatgggcagtagrccagatttggtctgtgtcttagagtttgctgaccctgctttaaagaaacatcaaagagattctaccagctgatttccttgctcccaaaattcttgtaaggactatggctgagttaggaagttatgtactttaatagctaatttcaggcctggcgtggtggctcacgcctgtaatcccagcacttcgggaggctgaggtgggtggatcacttgaggtcaggagtttcagaccagcctggccaacatggcgaaaccctgtctctactaaaaatacaaaaaaattagctgggcgtggtggcaggtgcctgtaatcccagctacttcagaggctgaggcaggagaatcacttgaacctgggaggcagaagttgcagtgagccaaaatcgcgcc

SEQ ID NO: 744654 - DNA, 380 bp, Homo sapiens
ccattcattaccattccccaacgccctattcctcaagctcaagtcgtaatctagagcacaaatgaaagtttctagggcactgagctcaggaattcgtagtttgaaaatgtttcctaagtggttctgacgtgcagcagcatttaggaactaccactgcaattaacacgttgctcttatcrcacagtggcaattgtgtacggcaagccaatgagaagctcaggccaaatttagtgtcagttaactccatccccaactcttcctagttggtttctcttccttgtcaagtttaacttcctgtctggttcacattttaattctgtaagcttctgaaacactttctggaaagttggtgctatagaaattctcatactggatgtgtt

SEQ ID NO: 744655 - DNA, 524 bp, Homo sapiens
gtaccttatgtaaggtactattctttacaagtgagacagagtgaagaacaaaacagcctagatcctcatggagcttacattcttatgtttggagaaagaccaaaaaacaagcaaatagggtaatttgcaggggtgaggataagtgctgttatggaaataaacaagattatgttataaggttggggaagggttttgctttaaataggatgatcagggaaggcttctttgaggtgacatttgtatctgacctgataatgggttaggaactcmccatttgaggaggtgaaggaataatattgcaattgaagagaataacaagtatagagaatctgaggtaaaactgagtttagtatgttaaaagaagggaccgaggtcagtgtggctacagtgtagtgagctagaagagcaggaatgagatgaagttgacagggcagggatcttgaccttgtaagccattataaaacacttggattttaccttaaaagcagtgttaagattaatatcctgatgcctgtgaacctgag

SEQ ID NO: 744656 - DNA, 647 bp, Homo sapiens
tctgtcatatattttaaagcagtgaaaggtatttctttcttttgaggacttcagcaaatatttctaatttcaaagctttctattaaaagtttttagttccatataaagtatatcttttttatgatattttaagcactaatatattatggtagttaaaataatttctagttgacaaatctagagctgatagttcttaagtttaaaatacagtttaagcaaggagtatataaaatctacatgggtttctataaatggtatcgtttaaaatcttatttcagtctgggcatggtgcctcatgcctgtaatcctagcactttgggaggctgaggtgggagaatcccttgagcctaggagttcaaaaccagcctgggcaacatggtgaaaccctatctctacaaaaaaatacaaaaattagccaggtatggtggtgcatacctgtagtcctagctattcaggaggctgaggtgggatgatcrcttgagcccaggaggtcgaggctgcagtgggttgtgatcgtgcccctacactccagcctgggcaacagagcaagactgtctcaacaaagaaaacaaaaaagaaagtaaagaaagtaaataaaatcctgtttcatcttttattaaattgcagattctgggatattcatattc

SEQ ID NO: 744657 - DNA, 649 bp, Homo sapiens
gtgctcattaatcaacctctctttatcccataccccaacccttcctaacttctggtaaccaacaatctgctctctgtcttcaacagatgctgaaaaagcatttaataaaattaatcatccattcatgataaaaaataattcctccacaaactgggatagaaggaacatacttcaaaaaaaagaggccatatatgacaaccccacaactaacaccatgctgaacaagaaaataaaatgaaagcctttcctctaagatctggaacaagacaaggatgcctagttttacttttgtttgacataatactggaagtcttagtcagagcaattaggcaagagaataaaaaataaggagcatccaaaytgaaaagaaagaagttacattatccctgttttcagatgatatgatcttatatttagaaaaacttaaagactttaccaaaaactattagaactgattaaaaaaatcagtaaagttgcaggatacaagatcaatacacaaaaaacagttgcatttggacatgccaacagtgaacaatctgaagaagaaatcaaaaaagcaaccccatttataatagagtcaaaaagatgaaatatctaggaattagtttaaccagaaaggtgaaagatctgtacaacgaaaagctataaa

SEQ ID NO: 744658 - DNA, 576 bp, Homo sapiens
cagcatgggggttattttcagtttttctcattttaaaaatccctttccagctagaaatccagccttgaaagggccctactaatgatctgagtcagatgactcagcagagagcaaatattattctattccccagcactctgttacctttcactccctcacttttcttgctgcagtgaaaaatgattcatataaagcaaaccaaaatagtaaaaacagaaagaaactaygagaaagactgcttaacaatttccaatcgcggctggggcttggagaaattgaaaagaggcccgggatgcttacttttcagccatgcctagaatatgttttagtttcagtatcaagagaatcatttccatgaaggagagctaaaggagactgcaaaatcatatgtcttttccttgatcaggagcaggagcattgtgaagggatcaggcagtccctgaagaagcacctgaaagaaactgattagaagaaacatgaaatacatgggcttcctcctaacccacctccttgctgcctccaccctcagctccagggtcaacccaaaaaggcgtctgagttttatgagagatgtat

SEQ ID NO: 744659 - DNA, 562 bp, Homo sapiens
agcacttaaaagtgcgttgctaaagaaccctggagtaaaatgttaatgtgtgcaaaggaacagagtgaattaggaacatttaccaaaattacttactgtaacctgtacgttccaaatttttgccaagatcctataaccatgttgttcttactactggggaagttgtatccttcaacttggttccaagttgaagaatgctggagggccaagttagatgtcgaaatattcctctctggcacatcaataagggacatgatttatagagaatttaacgagaaacattcacaagaaagatcttgggaaaagaatttttaaactattacctatgagaagtgtaagcatgagatggtaatgatgaaaaaaattgaaaattatmttaaatatctgaggagtctggctaaacacactgtggtacaatcacataatagaatgctacccagtgctaaaaagaaagaaactgcaggtaatgggacaacttggatggatttcaaggacatcacactaagtgaaaaatgtcaatctttgaaagttaagtgctagatgattccatttatacattttc

SEQ ID NO: 744660 - DNA, 578 bp, Homo sapiens
caacaaagctatatatatatttttctaaactgacagtaaatatgctcatttatttgatttataaattgacactggatactgttatttagtttagaatatattattattaggctattgcaggacaggtccatatttagaaacatagaatagtctgttttttgttgcataaatgttcaattatttagactggttacatttgactgaaatgtgtgagggatgtcaaataaatacataaataattttataataaatgtttttctttaattttgaaagaatttcctttactccttgtgctcccctrttataaatggatattcttccttgtattaatggtacttggccttaacatattagctcctcttttaatactgttagattctaaatatatagactttatctcaggtagcctgtgactctcaagggccagaataaaacatagtaggtgctaagtacttgcttaaaaaaaaagaaaatgagagatcatgtcggatatatcatgctgctcctgagcactttgcacagcactttttacctggtaaattagaggaaatgttgggaaattaatgaataccagtatg

SEQ ID NO: 744661 - DNA, 600 bp, Homo sapiens
tatttatcatttttatgcttgttgtactttcttatgtcccatgcctccctctgggttaacatttctttctttctctccttctcattcccttcccttctccttccctcccttcttccttcctgtttcttttgagacagggtcttgctctgtcacccaggcaggagtgcagtggaataatcataactcactgcatccccaacttctgaggctcaagcaatcctactatctcagcctcctgagtagctaggaccataggcatgtaccaccacaccctgttaatttaattttttatagggatggggtatcactatgttgcctaggctggccttgaatgtctgatctcaagtgattctcccagcttggcttcccaaagtgctaggatcacaggtgtaagccactgtgcctggcygactttgtttcttatatgcttgaatcctttctggttgcacagtaaggatctgtacttttgccttccttcttgaatgttagtatagttgagtataaaattttgaattgacaattttttctcccaaacaccattatatgatggtatttatgggtattccttataatgtgatgtgatgtgattttatatttatt

SEQ ID NO: 744662 - DNA, 552 bp, Homo sapiens
taatactgaaataccccctgccactgacctttggcccccagatgcctcccactgccactgctctccccactgggaacccctgaagttcccacaggctcataactaaagggctaatgtctcgcacagcagcgagcacccaggaccgagcagccacatggccgggtctgctggtgaaagcatccattctgactgatcaggacctgaggggcctcatggttacatattttgataatatccctaattataaataaggctcagttatatagtttgaaaacartgcttctcctcattgcaaaatctcttagaagactccgtagatccaggaacggaaatggaaaatgacagcgtgtcaatctctgaaggttttgggcatttccattagcactccatcttcatgtaaaccagaagatatgcagtttcctgcctagagagaagagaagacacatcagcacagcggcatgaaaccttcatcagaaaacaatgcttcattaatccgtgacaggacaagcgtcagcaaacttccaggcggctggattaggccttcatctatcc

SEQ ID NO: 744663 - DNA, 562 bp, Homo sapiens
ggtccctataagaccctgtcatatcccttcccgctgaggatcctcacatccctccttacctacttgggtccttggcattcctgggcggatctgcagacccccccacactgaccagtgacctcccaggaggggcgtcagctgcccgggtggtgtcttctctttccctgtgagcattctgcacctctgactcccgctgcagccagtgacctggtgtcttgtctctctaaggggacagagccactgcagcgtgtccctctgccctcctttttggctaaggccagstccttcatctactcgctggctcggggtgctgttcctacaatgctcctgtctgcctctgatgatttatttctttatcacggattattcccaaaaaaaaggcagctgttattgctctagagacttctatctgctgcctccttctgtcctttgctcctcttagagcaaacatggctgggctatgtcctctctcccttcagggtatcccctcccctgctctatccccatgccaccagatcgccatgtccagcctcagtttccccatcaggccccactcagcagc

SEQ ID NO: 744664 - DNA, 562 bp, Homo sapiens
ggtccctataagaccctgtcatatcccttcccgctgaggatcctcacatccctccttacctacttgggtccttggcattcctgggcggatctgcagacccccccacactgaccagtgacctcccaggaggggcgtcagctgcccgggtggtgtcttctctttccctgtgagcattctgcacctctgactcccgctgcagccagtgacctggtgtcttgtctctctaaggggacagagccactgcagcgtgtccctctgccctcctttttggctaaggccaggtccttcatctactcgctggctcggggtgctgttcctacaatgctcctgtctgcctctgatgatttatttctttatcacggattattcccaaaaaaaaggcagctgttrttgctctagagacttctatctgctgcctccttctgtcctttgctcctcttagagcaaacatggctgggctatgtcctctctcccttcagggtatcccctcccctgctctatccccatgccaccagatcgccatgtccagcctcagtttccccatcaggccccactcagcagc

SEQ ID NO: 744665 - DNA, 585 bp, Homo sapiens
agctggggagcagggctccactctgggaggggggcagccttgccggatccagggcagagttaagcggccccagctctgctttcccagagctgctgagaacctggggaatggtgtggaggttccagggagccctgcccctacctggcaaccgcagtgcagcacgcaccaagttctcctgcacattgcgacagtgtgaccatgggctctggtgggcggtaggtsgggcctttggacctaccagcagtgagggagttaacacagcagctgacttctctaggcaaagaaaactcccctcagacgctttgctgcctggcctcctgccaggaacaagcaggagctgaaaactagaagttgaggcatgagtttggccactccgtagtgtgcacttggtgagggcagcagctcgccacagctgccagccatctgtccattcacccatctgtccatctggcagcccgctgttcagacctgtctgtctgtccgcccatctgtaagcccatctctgtcccattgtctatctgaccatctttctcttactgtcctctttgtctagctatctggcctgtctgtcgatccatcttcgtg

SEQ ID NO: 744666 - DNA, 770 bp, Homo sapiens
gacagaggagggaagggccagagggtgagtaaagttcccaaggtcgcctggggaggaagaggggagagcaagaccagggaggtcctgggcagaaataatgatcatttctaagtgtgcaggagcaagcaggctggatgggagtgtcgggaacaatcctgcaccacaattgtgggggctcagaaggatatagctcttccctttcagttctgccagctgcctgttgggggagctgctgcacccagacatgagtgagccaggcacctggtgggtagcttccagctccctgcacccttcggtgctcataaaaactccgagggttggctgggcgcggtggctcaagcctgtaatcccagcactttgggaggccgaggcgggcggatcacgaggtcaggagatcgagaccatcctggctaacacggtgaaaccccgtctctactaaaaatacaaaaaattagccgggcgcggtggcgggcgcctgtartcccagctactcaggaggctgaggcaggagaatggcgtgaacccgggaggcagagcttgcagtgagccgagatcgcgccactgcactccagcctgggcgacagagcgagactctgtaacaacaacaacaacaataacaacaacaacaacaacaacaacacaaaaaaaaaaaaactccgagggtaaaatacgccaggcaagagagaaccagagctgccttttcatgtcttgttactctggaagagcccttgaaatattgtctggatcctttgcattgactgctcatggtc

SEQ ID NO: 744667 - DNA, 770 bp, Homo sapiens
gacagaggagggaagggccagagggtgagtaaagttcccaaggtcgcctggggaggaagaggggagagcaagaccagggaggtcctgggcagaaataatgatcatttctaagtgtgcaggagcaagcaggctggatgggagtgtcgggaacaatcctgcaccacaattgtgggggctcagaaggatatagctcttccctttcagttctgccagctgcctgttgggggagctgctgcacccagacatgagtgagccaggcacctggtgggtagcttccagctccctgcacccttcggtgctcataaaaactccgagggttggctgggcgcggtggctcaagcctgtaatcccagcactttgggaggccgaggcgggcggatcacgaggtcaggagatcgagaccatcctggctaacacggtgaaaccccgtctctactaaaaatacaaaaaattagccgggcgcggtggcgggcgcctgtaatcccagctactcaggaggctgaggcaggagaatggcgtgaacccgggaggcagagcttgcagtgagccgagatcgcgccactgcactccarcctgggcgacagagcgagactctgtaacaacaacaacaacaataacaacaacaacaacaacaacaacacaaaaaaaaaaaaactccgagggtaaaatacgccaggcaagagagaaccagagctgccttttcatgtcttgttactctggaagagcccttgaaatattgtctggatcctttgcattgactgctcatggtc

SEQ ID NO: 744668 - DNA, 612 bp, Homo sapiens
gtagagcactgggctgggctctgtcaccacacatgtggaaatccaggcaccagaaccacttgacagatatctccctctgactgtattttcattcaagtcatttttctccaagtcacactccagccaagacaacatcaagacaaccttgttctctcctcctccaaatcttctcctgacccaaattgtcaaawccatgacttaaagagtgacatcaccactgaccttacaaaaggtacaatggttatagggaataatgcgaacaataaatgccaaaattatggatgacttaaatgaagtggataagtatctggaaatacataaattatcaaaatcgattcataaaggagaaaatctgaatagatctatgacacataaatatattgaattagcaatttaaaatcttcctgctaagaaaagcccacctagtacaaatgactttactggtaaattctatcaagtttttatggaagaaatgacaccaatcatacacaatctccttcagaatatagaggagaagcaaacatttccctactacctatttgaggcctgaattactctgataccagagcccgacaaaggaatgacaaaaatatcctatagacctgtgtcctg

SEQ ID NO: 744669 - DNA, 612 bp, Homo sapiens
gtagagcactgggctgggctctgtcaccacacatgtggaaatccaggcaccagaaccacttgacagatatctccctctgactgtattttcattcaagtcatttttctccaagtcacactccagccaagacaacatcaagacaaccttgttctctcctcctccaaatcttctcctgacccaaattgtcaaaaccatgacttaaagagtgacatcaccactgaccttacaaaaggtacaatggttatagggaataatgcgaacaataaatgccaaaattatggatgacttaaatgaagtggataagtatctggaaatacataaattatcaaaatcgattcataaaggagaaaatctgaatagatctatgacacataaatatattsaattagcaatttaaaatcttcctgctaagaaaagcccacctagtacaaatgactttactggtaaattctatcaagtttttatggaagaaatgacaccaatcatacacaatctccttcagaatatagaggagaagcaaacatttccctactacctatttgaggcctgaattactctgataccagagcccgacaaaggaatgacaaaaatatcctatagacctgtgtcctg

SEQ ID NO: 744670 - DNA, 542 bp, Homo sapiens
ggtggcaggcaatcccagctactccagaggctgaggcaggagaatcacttgaacctggaaggtggaggttgcagtgagccaagatggtgccactgtactctagcctgggtgacacagtaagacttcaaaaaaaaaaatttactgtgaatccttctttgtactgctttgtgaaacagacttgggagtggggggaattgtccttaatttgtacttggatttttgtggttttataatttgaagtggttttttttmtaggcagcatgtatagttgagtcttgttcatttcaacatgacaatctctgccttttaattgtgatatttagactatttacaattaatgtgattagtaacataatttggttgaaatatgccaacttgcccttcattttccatttgtgccatatgttcattgcttctccttccctttttctgtttcctttttttgactgatttttaaaaattatttctttttatctccttgctggtttaagtgatgtttaattttaagtgttagattgactaggtatagtgcctagttgatt

SEQ ID NO: 744671 - DNA, 542 bp, Homo sapiens
ggtggcaggcaatcccagctactccagaggctgaggcaggagaatcacttgaacctggaaggtggaggttgcagtgagccaagatggtgccactgtactctagcctgggtgacacagtaagacttcaaaaaaaaaaatttactgtgaatccttctttgtactgctttgtgaaacagacttgggagtggggggaattgtccttaatttgtacttggatttttgtggttttataatttgaagtggttttttttataggcagcatgtatagttgagtcttgttcatttcaacatgacaatctctgccttttaattgtgatatttagactatttacaattaatgtgattagtaacataatttggttgaaatatgccaacttgcccttcattttcyatttgtgccatatgttcattgcttctccttccctttttctgtttcctttttttgactgatttttaaaaattatttctttttatctccttgctggtttaagtgatgtttaattttaagtgttagattgactaggtatagtgcctagttgatt

SEQ ID NO: 744672 - DNA, 574 bp, Homo sapiens
acaaagttcttgcttctcctttgccttctaccatgattgtaagtttcctgaggcctccccagccatgtggaactgtgagccagttaaacctctttcttttataaataaggtatttctttatagcagtgcgaaaacagattaatgcatatgtgttctcattaagaatatgttaattttaggagtaatttttatgcaacaatagacaactaaggcactttatgtttaatagaatctatttaattcaggttcatgaactctaaactacaataataactatgtttaaagattggctcacaaaattccagagaatttaagtactggactctggatatgtctgaatatttttaaaatttttaattctcacagyctgtcgattaatcacgattccagctagaaattgatgatttccccagaaaaattagatatatttgatgcccatgagaaagagtgggtgtgttcagctcaactcttccctgtggagccattttggaaacttccatactatggggagattgtccacctgtagggtgtttccaggacagggactcagtgatgtgagaggaggaggatcctg

SEQ ID NO: 744673 - DNA, 574 bp, Homo sapiens
acaaagttcttgcttctcctttgccttctaccatgattgtaagtttcctgaggcctccccagccatgtggaactgtgagccagttaaacctctttcttttataaataaggtatttctttatagcagtgcgaaaacagattaatgcatatgtgttctcattaagaatatgttaattttaggagtaatttttatgcaacaatagacaactaaggcactttatgtttaatagaatctatttaattcaggttcatgaactctaaactacaataataactatgtttaaagattggctcacaaaattccagagaatttaagtactggactctggatatgtctgaatatttttaaaatttttaattctcacagcctgtcgattaatcasgattccagctagaaattgatgatttccccagaaaaattagatatatttgatgcccatgagaaagagtgggtgtgttcagctcaactcttccctgtggagccattttggaaacttccatactatggggagattgtccacctgtagggtgtttccaggacagggactcagtgatgtgagaggaggaggatcctg

SEQ ID NO: 744674 - DNA, 596 bp, Homo sapiens
cccagggacccatgatcttcctccccctggtccctcagactcagtcccctcttgttcatttcatctaaatgctgtgctgtgtcattgggacacttgctgattattcagtgggaatagttgggtcatttaagcaaccacacacccctgtggastcaacagggcctctggtctcatttcagccatggtgctgctcctgctacatcacccctcattgccacaagagattagcaattggcaccctcagctcgtctgttatttatgtatgtttttctcatcaatgtttaatgtaaacttgcaaaaagcaggagaaaaccacactggactgaaaatctaacttcaggccccatggtctctgaaggggtcccagggtcatggtctctgcacagcatgtgagctccagagggtgggtggtccctggttgccccagccaggttcctggtcactccagtcagatccctggtcagtgtcctgtcactgagtgtggacagccccatggtcagagctgaggcaggtgagaagccctgtccctctgaagagtgtctccttaaggaggctggggatgccccatgaagggatcaggatcccaaatgcttcac

SEQ ID NO: 744675 - DNA, 612 bp, Homo sapiens
aggggtgggcaccactaagataattgatcaagaagtgcctctcctcctcctggagctcttggctcatgcctttatcatggtgcctgttgcctgctttgcactttatctgtttcatgatcagatccccaagtacacaacaaagtcttctaggacacacacaatcacaaatcaatgttttcatacccagcagagctagcactcaatttaaatgtttgttgaatgaatgaaggaatgcacagtcacagaacatgttaaatmaacatgatgtttgcaaggctggctgattggaaggatatgatcaccaaaggccctgcctacacttggcctgatcacccagggcccaaccattcttattaagaatcacgaagttctggctcttacatagcctttgtttctcatttgtatgctgtgttagtccattctcatgctgctaataaagacatacatacccgagacagggtaattcataaagaaaagaggtttagttgactcacagttccacatggctggagaggcctcaccatcatggcagaaggcaaaggaggggcaaagtcacatcttacatggtagcaggcaagagagtgtgtgcagggagagtgtgcgcacaaaact

SEQ ID NO: 744676 - DNA, 612 bp, Homo sapiens
aggggtgggcaccactaagataattgatcaagaagtgcctctcctcctcctggagctcttggctcatgcctttatcatggtgcctgttgcctgctttgcactttatctgtttcatgatcagatccccaagtacacaacaaagtcttctaggacacacacaatcacaaatcaatgttttcatacccagcagagctagcactcaatttaaatgtttgttgaatgaatgaaggaatgcacagtcacagaacatgttaaatcaacatgatgtttgcaaggctggctgattggaaggayatgatcaccaaaggccctgcctacacttggcctgatcacccagggcccaaccattcttattaagaatcacgaagttctggctcttacatagcctttgtttctcatttgtatgctgtgttagtccattctcatgctgctaataaagacatacatacccgagacagggtaattcataaagaaaagaggtttagttgactcacagttccacatggctggagaggcctcaccatcatggcagaaggcaaaggaggggcaaagtcacatcttacatggtagcaggcaagagagtgtgtgcagggagagtgtgcgcacaaaact

SEQ ID NO: 744677 - DNA, 617 bp, Homo sapiens
tgccactttacaaaagattcatcccagtgtttcttaaagaaccatacaactgtgatgtattttaaatgtctttcaattaaaagaattgactcatgctcaattttgcttcaacattatttcaactttatttcaccttaaatatcatacaataaaaacttattgtactgatttttatcccrggggaatgtgtcttcccctaggtttgatggaggagtctggctctgaaggttgcacagcagaaaaccagctctcattctattctgccattaactggtagcagtgagcacggtcccttgggcctcagtttccccatctgtaaaacagggacaagctacttgcccactaagcctatgtttcaaaatgatcatgggtttaaaaacacagaaaacaaaggcgcccagtgcttaccaacatgaggtgttaatattctgtcccctggccacatcttaaacagcccaccaacccaggatggctgctggaccagtcccgggcagcgttattaagcgactccagctaccttcaggctgtttccctccttgtccatttccgacttcaaggccttcatgccgggtcccgtttcatcctccctctgaaacgaggttaacaggaaaggatcc

SEQ ID NO: 744678 - DNA, 600 bp, Homo sapiens
gggccctgccatacagcactgacagaatcctcggtttaaaaattcgtcacgtgcctgcagtgacattccttctggctgatgacgtgccaggagatgttaatgaattaaagccacacttgcctgaagaagctggcgaagttaccgactggttcaaaaataattatgtgcactgtaggataagaagacacctacacaggccgggtgccgtggctcacgcctgtaatcccagcactttgggaggccgaggcaggcggatcatgaggtcaggagatccagaccaccctggctaacacartgaaaccccgtctctactaaaaatacaaaaaaattagccgggtgtggtagcgggcgcctgtagtcccagctactcgggagactgaggcaggagaatggcatgaacccgggaggcggagcttgcagtgagccgagattgtgccactgcactccagcctgggcgacagagcaagactccgtctcaaaagaaaaaaaaaaaagaaaacaaaaaaaagaagacacctacacaacggttttgccgttctgtcgccagcgcggttcccaccaatccacggtctgcgtatgaaagcatccagatggatttcc

SEQ ID NO: 744679 - DNA, 612 bp, Homo sapiens
ccttctgatgttcagatgtgttcggagtttcttccttctggtgggttcatggtctcactggctcaggagtgaagctgcagaccttcgcggtgagtgttacagctcttaaggcagcgtgtctggagttgttcgttgctcccggtgggctcttggtctcgctgggctcaggagtgaagctgcagatcttcscggtgagtcttacagctcataaaagcagcgtggacccaaagagtgagcagtagcaagatttattgcaaagagcgaaagaacaacgcttccacaaagtggaagaggacccgagcgggttgccaatgctggctcgggcagcctgctttttattctcttatctggccccacccacatcctactgattcgtagagcccagtggcctgttttgtcagggtgctgattggtgcgtttacaatccctgagctagacacaaaggttctccacgtccccatcagattagttagatacagagtttggacacacaggttctccaaggccccaccagagcagctagatacagagtgtcgattggtgcactcacaaaccttgagctaaacacagggtgctgattggtgtatttacaatccctgagctagatataaa

SEQ ID NO: 744680 - DNA, 617 bp, Homo sapiens
gttttacagtccttgatttttaggggtgtccctttgtacagtgtctttgcctgacctaccaaattaggccaccccatgaggcagaggtcaaacgaaacgcaagaggggaaaaggagatctgaaagttttggcttaaaaaaagcactatggtcaaatgaccgacttgccctggtctgcccaggaccgtccaggttttaacactggacaccccatgaccctggaaatccttcagtcctgggcagaccaggatggtcaccctacactatgtaaggccagcagttttagttctgggatatgcagagatggaaagatttgtggttaaacgaggcttggggtggaaatggggagcgactgtaaacgggcacaaggtttctttttggwgaaatgaaaatgttccaaaattagatggtggtgatgacggacaactctgtaatgatactaaaatttgtctacttgtattcttaaaacaggttaattttgtagtatgtaagttatattcaatgaaacttttaaaaatagattattaaatggcatcttcataataaagcatttgactttttggacagaaaaataataatactctgtccataaaataaatatatgcattaagaatttga

SEQ ID NO: 744681 - DNA, 617 bp, Homo sapiens
gttttacagtccttgatttttaggggtgtccctttgtacagtgtctttgcctgacctaccaaattaggccaccccatgaggcagaggtcaaacgaaacgcaagaggggaaaaggagatctgaaagttttggcttaaaaaaagcactatggtcaaatgaccgacttgccctggtctgcccaggaccgtccaggttttaacactggacaccccatgaccctggaaatccttcagtcctgggcagaccaggatggtcaccctacactatgtaaggccagcagttttagttctgggatatgcagagatggaaagatttgtggttaaacgaggcttggggtggaaatggggagcgactgtaaacgggcacaaggtttctttttggagaaatgaaaatgttccaaaattagatggtggtgatgackgacaactctgtaatgatactaaaatttgtctacttgtattcttaaaacaggttaattttgtagtatgtaagttatattcaatgaaacttttaaaaatagattattaaatggcatcttcataataaagcatttgactttttggacagaaaaataataatactctgtccataaaataaatatatgcattaagaatttga

SEQ ID NO: 744682 - DNA, 613 bp, Homo sapiens
tccatcagccatcacaccctattattacctctcctcagcttctagtgaccaataatttactttctgtctttctgagttgttcgttctgttgcccactaattttagcaacaattgacaatttttacttgcaacaattattgctgtggcatttgccaaatggtgatatttctaagccatacacttttgaagactaaaagttatggtgacccatccaaagygattaaattacatacgctattattccatgacttgtatgcccaggatagtcctgttgtccattgacatttgtcatttgtctcagacaaaagcatcctgtttggatgataaattatatggtcattccacttactatcactcaggttgtttatgatagtgtttaaccaggtaaatccacttccgtagccctatgtgggtcttgcacacggaaagatttgtaggggacttatccctttccttccccctcggatataaaagaaatcattgttgtcctgaacacattctcttacacaatcaggaagcaaaatattctttgcatttccatgtattttttttgttctgatttgtgcatgacgttatggtggtatttctcagcaaactacacctgagtctacac

SEQ ID NO: 744683 - DNA, 613 bp, Homo sapiens
tccatcagccatcacaccctattattacctctcctcagcttctagtgaccaataatttactttctgtctttctgagttgttcgttctgttgcccactaattttagcaacaattgacaatttttacttgcaacaattattgctgtggcatttgccaaatggtgatatttctaagccatacacttttgaagactaaaagttatggtgacccatccaaagtgattaaattacatacgctattattccatgacttgtatgcccaggatagtcctgttgtccattgacatttgtcatttgtctcagacaaaagcatcctgtttggatgataaattatatggtcattccacttactatcactcaggttgtttatgatagtgtttaaccaggtaaatccacttccgtagccctatgtgggtcttgcacayggaaagatttgtaggggacttatccctttccttccccctcggatataaaagaaatcattgttgtcctgaacacattctcttacacaatcaggaagcaaaatattctttgcatttccatgtattttttttgttctgatttgtgcatgacgttatggtggtatttctcagcaaactacacctgagtctacac

SEQ ID NO: 744684 - DNA, 516 bp, Homo sapiens
acataaaattaaccactttacagtgtgcaattcaatagtgattaatatattcacaatgctgtgaaaccatcatgtttatctactttcaaaacgtttgcatcaccccaaaaggaaacctcatactcatgaagtagtctcttctcctcttcttcccccagcccccgacaaccactaacctgctctctgtgtgaatttacctcttctagatatttcatgtgaatggaatcatacactgcgtggctctttgtgtctgtcttctttcacttagcataatgttttcaaagttccatgttgtagcacatcgtatggwtgtaccgtattctgtttatccattcatcagttggagttgggttgtttccaccttttggctactgtgaataatgctgctatgtacattcacatataccttttgtatgaatacttgttttcaattatttcaggtgtatacatagaggtggaattgctgggtcatgtgggagttctgcacttacctttttgaaaaaccaccaaactgtt

SEQ ID NO: 744685 - DNA, 621 bp, Homo sapiens
gaaatcatattcactcaaatgtgtgtgtgagtgtgtgtgtgtgtgtgtgtgtaaacttcctctggaaggatacgtgagaaagtgtctctaagaagagggactggtgtcgagggacaaagagagacttgcttttcagtacatgaaatttttgaattgtacaccaggagacatctaaaataaaatataagaaaggaaagggaaacatcgagtaataattatttaatctttgacccagagacaattttcttctagaccttacatgtccctttagaaaaagcaagacactgggtaaaccagctgaacccccatctggttcagctctatccaaggtcattgtcaccactgccttccctggagtctatgacccctctccttctgacayggcccttggaggaagagatttcagtgctgagaaagagaaaagaaccagacaaggaggtttggagtcttgctatgttgagcttctctcagggaacccctgcctgtccagcccactgttcctcttatggggtgaaggggattgagcaggatgcttgtattgcaagggacaaaaaatttctaagttgacctagcctaaaccactgacctagttcatcagcacatatagcccaatttattgcc

SEQ ID NO: 744686 - DNA, 572 bp, Homo sapiens
tgttttgcataactcaaggagaatgaaaattgagaattgaccactggttttagcattggtccctgggggactgggtaaaaattatctgagtggattcaagagaaaatggaagaaaaaaattggaggcagcaaatatagacaaccgtttacagcttacttttttttaatacctgaaaggactgttatatttgagtctttgaagataggyaaaggactgagaatagagtatttgcaatcacacactttagagtaaaattctaataagtaactcccaattcctcctccccagcaactagtgaatctcttagctaaggaaattatttctatgtgttgagcccattcaggacctgctgaaacttgactcaagctattctgatcccatactagtctgagatgagaagattcacttccacatgtcaatatgtttaatattaattacaaagaactatcagactctcagtgtgcaattgttcagttttaattttaagcagagtcttactccctgtgtttctcaagagggttgctctctccaggatgcctgcaaaacaccagcctctggttgctgttatcta

SEQ ID NO: 744687 - DNA, 575 bp, Homo sapiens
gggtattggtccaatgggcaatgagatgtgggtgagattggggccagttcctgggcagcccctctgaggcccccacacctccatgcctccatggcctccatgggcacggatggcaggcccagcacataggcctctctgccatcatcccaccccaacccccacttggagaatagaggtcaggtctgctgtatcaactgtcctatcttgaatgctggtagttgtaatagagtgaacgagagctgtatagggtcttataccagcaatagatgcttggcccagaaataacacatcacttccactcatatttcactgttcagctccatccatggggtcctgtccaaccacggggagccgggaattgtagtcccaccaagggcccagaaaaaaagagagacagaagtaattaatgaatagcaataatractgcacaacctccaagacaacttcccatcttaaaaccctcctgcttttctctcaccaccaagagtcccagatcagagcccctgaggtcatgagaatgcagcctttgccaccctgccagcctcatttctaggcctccatctccagtaacccag

SEQ ID NO: 744688 - DNA, 617 bp, Homo sapiens
atcccgcaagagacctgcattccaatcccagcttcttcctcctagtttttctgtttgcaccccctttcatgcctcttactaggttggtattctccaaacagtcttggagggcagacatcatcaactccatttcactgatagagaaagtagagtttgagagctaaagtgacttgcccaagagtgaccaattgttagagcccggtcttgccttctgactctacttggtgtctgtcacactgtagaagctacacccaggctgtcccctggaccttkggcctcccagctttacccgagtaacctcacaggttcccttccttgggtcttgtactgaagctgtcagttcagttctctgtgtttgccccaactcatggttctcctactagccctcaccccagcctgtccaagttcaccattcctcctctttaggtaggaagaggggagatagagttggtgagttcaaggagaagcctgctccaaccccagagtggctgaccacgtttctgccctccccagagagaagcaaaatgatgcctgccacactcactgctcttgctgtccacatcttccggccacatcccagctagcagcaagcacaccagggctgtggtgatgatctg

SEQ ID NO: 744689 - DNA, 589 bp, Homo sapiens
cccccaaagcattattggtctcataaaacattatatctctccaaccatgaaaggcttctgactccgatttctcccctgaatctattcctggtcttctgagaatggcagtgagggagggctgctttcatttggattgctttgcttgcttcctggttatgtgctaggcaatgctatcggcagcttaggtcatctcagcagagagagggatttgttttcaaagtcatgagttcatgctratgtgctggtaatcacaccattccactaagcctcttcctttgtcattcttacctgagaacctcttgattcatgtcctcgttccctttccgaagcttccagttttcctctcttgcatacactacgttctaaatgctaagctacacatcgtcaaatcaaactatatgttaagctataatagcacccacagctttcaaaacatcaacattcaaatggcaacttgtggctacctgctgccatgatttcttactcacgacactccgcacaccacctattggttaatatgaacttgagctgggggcttgcattcctgcatttactttccccactttactcaatttattaacaacagttt

SEQ ID NO: 744690 - DNA, 631 bp, Homo sapiens
caaggtgcccaattaaggctaatggaactgaaatttcaggtgccatccaccaaaggggtgacagttttgcagtgagaatttagtcaaactaactgcttaattaaacaagcaaacaacaaacaatactttttatagcaatatacagaatctaaacactttatactatttactttatccagtatgtaattcaaaattactagccataggaagaaataggaaaactttacccatagaaaacatttgagactggccctaaaatgacccagattttggaattagcagacaaatattttaaagctgctcttataactatgctcaaggatataaagaaaagtatgtctacaatgaatgtaaagactgaactaccaatgttwgccaaaaaaaaaaaaaaaaaaaaaaaaaaaaaaaaaagaagaagaagaagaagaaatgaaaagaaaccacagaagagaaccaaatgcaaattttagacttggaaatataacatctgaaataaagaaatattataagcatgatttacaaataaaataaattcaggttcataaagattgagtaattttcctaaagtcgagctgacaagcaatacagcaggaatttgaatttcaagtctatctagctttaaaacctatac

SEQ ID NO: 744691 - DNA, 648 bp, Homo sapiens
ctaattctttactttggcaactaagtggacagtgaacactaagactgcaaagtagttttgtttttataaaatatatttaataagatttaattaatttttttgagctgggtgcagtgacacgggcttgtaattccagctactcagatggctgaggcaggatgatcccttgagcccaggagtttgaggccagcctgggcagcatagtgagaccccatatcaaaaaacaaaacaaaaacagattttattacattttcaaaaaatgaatttagacatttcattttgatttaaagaattttgagattaaatattaaagctctttaattatttgtatctcgctttttattattaataattttgaatattttcaaagaaaactaactttgaaaatgcatatgaaaaatttaatttttcaatttttaacacagagttttgatgaagatatttacttcttgtacactgaagtataattcaatgtactttttaatcttttatatcatcaataaamcacacattatatgaaaagctcaggagagcataattaatgattctaatgaaattaaagaaagaaaaataattgtaaaaattaaagtctgattttaaaaatgtataaagtataaaattcatgaatttatgtctttaatgctcatc

SEQ ID NO: 744692 - DNA, 604 bp, Homo sapiens
gccctgttgtgctcaggcaagttgatccttctctgagcccattttcctgtctgtaaaatggggcttacaatcatggccttgtgacatcagagaactactacgaggatcaaacaaatgaatgaaaccgatcacatgttgaggaatatacagcactgggcacatttgaggattctcattcatcagaaaatgtaagtatggagcatgctagagtctaagacttgcccatagtacaataatacacagcttataaatgaaagactccagaaggagcatagggattaagggaatctaattccaacccctgctgtccaaggaagtttaagggacttgcccttcgatcccacagcaagtcctaagccaagctgagcaggagaccagaagctgagaccactgcttccagaggttgcaacatcataactgcttttcctccccagtttactttaagaagaacttggcagctcctgagrcaaatatgctgctggaaatgaaaagaaagactttgaacttatgcagacatttggcccagttcataccaatttggcatcaacgcattctccttgtccctgaacatgattccgacgttggtagcatgctgccgagagga

SEQ ID NO: 744693 - DNA, 561 bp, Homo sapiens
cacacgctgaagtgctttgaagtgaagtgtactaatgtttgcgtcttactttgaaatgcattccaaaaataaaaaggatggataggtgggtaactatgaaatttttaaaatgcagcaaaacgttaacaactatagaatctaggtggtgagtatatatttgtttactgtataattctttcaactyctctgtgtgtttgaaaatgtttgctataagatgttgtaacatcttctttcaaattttctttcaaattggcaaaaataaaggataacttgattttcaagattgtgtgactgaaacaccaggggtttggtctgggtcctgttgctcactgtacagaaagccagtaactgaaacaatgagtatttccagggaaaaaggctttttattctcatgatgtcaactgggagaatgagagagaagtctcaaatccatcgcctcaactgactaaaattgggggtttatagactagggaaagaatgtggaaaagttggactaggaaggtaaggaacagtaagaaagatgaacgaggggtctggtgtctcgttgtctggatgccggga

SEQ ID NO: 744694 - DNA, 611 bp, Homo sapiens; identical to SEQ ID NO: 739771

SEQ ID NO: 744695 - DNA, 616 bp, Homo sapiens
tggttgatggaaacatcattatgcattaccatgactgcaaatctaggtagtgtctgtcccaactactcaattctgcctgtcatagtgcaaaggcagccatagacagtgtgtaaatgaacaggcactgctgtgttcccatagaactgtacattcgctgaaatcccaatgtcacatgattttcatgtgtcatgattttaatcgttttgtttcctaccattaaaaaaagtagaaaccattcttatttatgtctgtacagaaacgagcagcgggccaaccttgaaaggaagtaaaaggaagatgttcctttttcaaatgcagtgagaatatcccagagaggaccatgacataggatgtttcgcaaaaggctgagcatcactggggtgttccccaccctgttccatcaagcattattttgggaaatgtggtgctaagagtttgamcttgcaggatctagtatggttcccagcacaaggtaagtccagatggaaagctggttgagggatatttatgtagtgctgactaggaacccgacactcttctaagtgctttatgtatattaattcctctaagtcctcatcattatcccatgaggtagttatttagtatccccattttg

SEQ ID NO: 744696 - DNA, 564 bp, Homo sapiens
aagctgtatgtgcacagcaaagcaggttttttatttaggttgtacgtttctttggaatttcggaagtcagtggctgatagaggatagaaaggaataaaagcccttcccaaagctacgcattggcactgcccttaatactgtgagattttaacgcagcactcccgatgcattacagatacgaccactaaataagagactttaaggagttgaaataattattgaatcaacagatctctatgtctgtgtgtgcaagtagacaaatatacataccaaactttgtmctttgcaggataacatccgtattttcaagttacaatcagttgtaaaaattcatcttaaactttaagatccaaaaagtaggaatcacaggagccacacttaacactcttgatgcaatgaaactataaaatgtacaattaaaaattcaactggatattaagaaatactcttccaaaatctactgaaggaggagaaatgttactaggttaacataattgaatagcatcagtcattacaaattacattttcaaatgtttttgatatgggaaaatgttcataatacaa

SEQ ID NO: 744697 - DNA, 564 bp, Homo sapiens
aagctgtatgtgcacagcaaagcaggttttttatttaggttgtacgtttctttggaatttcggaagtcagtggctgatagaggatagaaaggaataaaagcccttcccaaagctacgcattggcactgcccttaatactgtgagattttaacgcagcactcccgatgcattacagatacgaccactaaataagagactttaaggagttgaaataattattgaatcaacagatctctatgtctgtgtgtgcaagtagacaaatatacataccaaactttgtcctttgcaggataacatccrtattttcaagttacaatcagttgtaaaaattcatcttaaactttaagatccaaaaagtaggaatcacaggagccacacttaacactcttgatgcaatgaaactataaaatgtacaattaaaaattcaactggatattaagaaatactcttccaaaatctactgaaggaggagaaatgttactaggttaacataattgaatagcatcagtcattacaaattacattttcaaatgtttttgatatgggaaaatgttcataatacaa

SEQ ID NO: 744698 - DNA, 539 bp, Homo sapiens
gattcgatcaagcagaagaaagggtatcagtaattgaagatcaaatgaatgaaatgaagtgagaagagaagtttagagaaaaaagtaaaatgaaacgatcaaagcctccaagaaatatgggactatgtgaaaagaccaaatctatgtttgattggtgtacctgaaagtgatggggagaatggaaccaagctggaaaacactcttcatgatatccaggagaatttccccagcctagcaaggcmggccagcattcaaattcaggaaatacagagaacaccacaaagatactcctcaagaagagcaactccaagatatataatggtcagatttaccaaagttgaaatgaaggaaaaaatgttaagggcagccagagagaaaggttgggttacccacaaagggaagcccatcagactgactgacagaagatctcttggcagaaactctacaagccagaagagagtggaggccaatattcaacattgttaaagaaaagaatcttcaacccagaatttaatatccagccaaactaagcttcataa

SEQ ID NO: 744699 - DNA, 516 bp, Homo sapiens
aagaagtaataactcacacgatcacaagctcccacaataggctcaggagcaaggaagccagtccaagtctcaaagctgaagaaactagagtccgccgatgtttgagagcaggaagcatccagcatgggagaaagatgtaggctgggaggttaagccagtctagccttttcacgttcttctgcctgcttttattctggccactctggcagctgattagatggtgcccaccgagattaagggtgggtytgcttttcccagtccattgactcaaatgttaacctcctttggcaacaccctcacagacttacccaggaacaatactttgcatccttgagccaatcaagttgacactcagtattaaccatcacagctattattgtcatattcaggaaaaattagtagctcagcatgacctgcatcggtgtgcctagtggtgagatttcaaaggtagattgtgtctaccagactgatttgagaatgtcttctgttgcataatttttagcgtggtcagagttg

SEQ ID NO: 744700 - DNA, 516 bp, Homo sapiens
aagaagtaataactcacacgatcacaagctcccacaataggctcaggagcaaggaagccagtccaagtctcaaagctgaagaaactagagtccgccgatgtttgagagcaggaagcatccagcatgggagaaagatgtaggctgggaggttaagccagtctagccttttcacgttcttctgcctgcttttattctggccactctggcagctgattagatggtgcccaccgagattaagggtgggtttgcttttcccagtccattgactcaaatgttaacctcctttggcaacaccctcacagacttacccaggaacaatactttgcmtccttgagccaatcaagttgacactcagtattaaccatcacagctattattgtcatattcaggaaaaattagtagctcagcatgacctgcatcggtgtgcctagtggtgagatttcaaaggtagattgtgtctaccagactgatttgagaatgtcttctgttgcataatttttagcgtggtcagagttg

SEQ ID NO: 744701 - DNA, 536 bp, Homo sapiens
ggatcccattgtcaccatactataaaacattgtagctgacaccacccattagagtgtagtgaccagtggtccaggagcacttcagcacccctggcacaatggattccaaaccttgaggagccagagaacaaagttgcggccgaagacaagtcccccagagttagagtacacagtccaggagttggaaactgagtgtcagtcccctaaaatagtccagaaatgaagccagttggccaaatgcaccttataccataatcgaacccccaaggttatcaagtaggataaaagaaaaaaatccaaaggtcagcaacttcaaaattgaaggaacataagcccgtaagaggrgaaacaatcagcagaattctgacaactcaaacatccagactgccttctttcctgcaaatggccacaccacctctccaggaagggttctgaaccaggctgagatggctgaaatgacagaaatagaattcagaatatggacaggaataaatatcattgagatgcagggtacattgaaacccatttcaaggaag

SEQ ID NO: 744702 - DNA, 608 bp, Homo sapiens
catgaatcggattagtgctcttaaaacagtccgaagagaccagcattcttacttttcatcatgtgaggacacagcgagaagacattgtctaggaacaaagaaataggccttcatgatacaccgaatctgccagcacctttattttggattttccagactccagaactgagagggacaattttttattctttataagtcacttagtctatggtattttgttatagcaacctcaatggactaagacaaatgagtacgaaaagtgttaagcacatgaatactcttaatccagcaattctaattctaggagattataaaagcagacaaaggtattgctatgggaatgttcattgtagcatcatgctagtaccaaacttggcccaacaataggaaattgaatcataaataycccacatttatttgttaaatactttgaaactattaaaaatatgtggtaaaatattatttaataccatggggaagtattcacaatacatgattgacttaaaaaattgtaagacacaatgtaccgtaatagttccttttgaaaagaatgtactatcttttcaatggccactgtctcttgaactgttggccttttcacacctgaa

SEQ ID NO: 744703 - DNA, 502 bp, Homo sapiens
taaacaacaccctgcctgtataatgattttattctgctggggagagtagaaaaaagcaatgaataatataaatgaatgaatcaaaaggaaatacaaaaaaaaaagaaaatagtaaaagggatgtggagggtgggtacaggtagcagtataaacatttgttgtcagagaaggccttatggaaaaggtgacatttacacaaagacttaaaggagataagcaagccaaggaatatstggagaagagttcctgagctacagaatacttgaacaaaggacctaaggcaggaatacgcctagagcatttcaggaaaggggaaaggccacagtgcttccagggcagtgagtgaaaagaaaggaggaagaagagcaagtcatataggtccagagtcagcagatcaggatgagcattttggtcattgaaagaactttgccttttatctgagtaaaacgatgttttgagtagaggagtggcattacccgacttacattttaaagggattgct

SEQ ID NO: 744704 - DNA, 596 bp, Homo sapiens
tgattacaagtgaaagaaaacttaaatctaagaaaaatgggatctattggctaacataacctgaaaattcagacacacagctggatcctgggcctccaaaaagtgtcataaggacacaatatcttgccagttctcagcttcactgtccttcgtgtggctttactctcccaggttcctgtgatggcaaatggcaagctgcaatcccaaacccattttcttccaggttcagggagagtagaggggtaaaaaagagcgcatgtctctctcttaatagtcctgtccaccttgggttgcacctcacctcrgtgctctgactgggtcacgtgccatgcctccttcagtcactgaggccaagtgtctctggcgctctgatcgggcctggctgagtcccgagtctagactggagtggaggtgctgggctccatctgagcacatgtacctggctggaggtgccaggccggggggaagttcacctgaagaaaactctgggggtctttccagatgatgagatgtcatttgatttggggcacagtattcctagtcaacgcttcattccttcaggtctgtactctatgattctgcattatatgtgtgat

SEQ ID NO: 744705 - DNA, 646 bp, Homo sapiens
cccttcttccatcttcagagccagcagaatagcatcttcaaacctctgacctctatatccaccctcacatatcattctttcattcttctaactccttctttcccttataaggatgcttgagattacattgggtccaaataatccacaatcatctccccatctcaagacatgattaatctaatgacatctgcaagatccttttgccatgtaaggttcatattaagatgtggaggtctttagggggctgttattctgcgaccacactgagtatccagattgaggagggaacagtgaagatcaggccagagcctaggcacctgcccccacagtagtagggtagtgtttagtcaggccttcacagcaccagcagagtggggcaggaagtctgtaggtgtgagttctaatcctagcaaaatgacttacacaatggccaaagctaccctgtgttttacctggttacaggcagatttgcattcagcattccctaaaaccwtaaagctgttactgacaatccatgataccaaattagcttgtaagtctgggtaggactgaggacagcaggaaggtgccaccaagaacctgaacaatgagttgcccctgttaattttaaattcttaaaatcaacacaaacattgattttataaag

SEQ ID NO: 744706 - DNA, 629 bp, Homo sapiens
agaatctttttcataaggaagcttaatattaatttttattttagagacattatagacaacaaatgaggaaaatataaaataatacttattgatcaatttgtatatatcaggagcttttattcttaacttcctcataaataataattgttgttgttgttattacaataattataattagaaatggggaaactgaagcccagaaatgttatgaaacaatatgtccaaagtctctttaatargagtcagggtcaggacaagtcccataatctttttttttttttttgagactgagtccctctctcacccaggctggagtgcaatggcatgatcttggctcactgcaacctccatctcctgggttcaagtgattctcctgcttcagcctcccaagtagctgggattaccaccatgctcggctaatttttgtatttttactagagacagggtttcaccatgttagccaggcttgtctcgaactcctgacctcaagtgatccgcccgcctcggcctcccaaagtgctgggattacaggcgtgagccactgggcccagccaagtcccataatcttaaggcaatgactccattctttcctccttacccaaaccctccctcccccacattcttacaga

SEQ ID NO: 744707 - DNA, 590 bp, Homo sapiens
taggattccagtactatgtcaaataatggtggtgaaagtggatatccttgttatgttccagatattagaggaaaggttttcagttttctccattcagttgatactagctatgggtctgtcatatgattttttatcatgttggggtatgctccttctatacccagtttttgagggtttttagcaygaagggatgttgaattttatcaaatgctttttctgcacaattgaaatgatcatttttttttgttcttcatttggttgatataatgtattacactgattggtttgcctatgttgaaccatccttgcatcccagggataaatcccgcttggccatgataatctctctttttttttttttgataatctttctaatgtgttgttgaattcaatttgctagtatttttttgaggatttttgcattaatattaatcatagatattgtcctgtagttttcttttttgatgtgtctttgtctggttttggtatcacggaaatattggccttgtagaattagtttggaagtattccctcctcctctatttcctggaataggtggggtagggttggtattagttctttaaatgttt

SEQ ID NO: 744708 - DNA, 507 bp, Homo sapiens
ggagtggacgtcccctccctgccgcatccccagcctctcggttctctccagaggtcagcgctggattgtttgtgtgtcctgctggagactcccgtacacacagcattgctatgacatcttttttgtggttcttttttgttttgttggttttttggttttggtttttttgagacagagtctcactttgatacccaggctggagtgcagtggtgccatcacagctcactgcagcctcaaactccagggctcaagggatcctcccgactcagcctcctaagttgctaggactacaagcatgagccaccatgcccagctaattaaatttttttttttttkgtatagacagggtcttcctatattacccatgctgatctcgaactcctgggctcaatcgatcctcctgccttggcctcctgtagtgctggtattacaggcatgagcctctgtgactgagcccttttttgtggttcttattttgaacagaaaaagtagcctgtgtggacactg

SEQ ID NO: 744709 - DNA, 507 bp, Homo sapiens
ggagtggacgtcccctccctgccgcatccccagcctctcggttctctccagaggtcagcgctggattgtttgtgtgtcctgctggagactcccgtacacacagcattgctatgacatcttttttgtggttcttttttgttttgttggttttttggttttggtttttttgagacagagtctcactttgatacccaggctggagtgcagtggtgccatcacagctcactgcagcctcaaactccagggctcaagggatcctcccgactcagcctcctaagttgctaggactacaagcatgagccaccatgcccagctaattaaatttttttttttttggtatagacagggtcttcctatattacccatgctgrtctcgaactcctgggctcaatcgatcctcctgccttggcctcctgtagtgctggtattacaggcatgagcctctgtgactgagcccttttttgtggttcttattttgaacagaaaaagtagcctgtgtggacactg

SEQ ID NO: 744710 - DNA, 623 bp, Homo sapiens
  misc_feature 1, 2: n = A,T,C or G
nngaggtcatagaatgtcaaattactttaaatggtgaaactggagaattttcatgttattttcaatgcacagcagtatctaaagacataggcgatgagactagatcacattaagtgcattttgatctctttgaggtcccctgtgtcgagatgtgttttctgaaggtcccctgcatggctccacagcgtgctgggcatccacccggcttcctcagcctcygccttgggtgggggtttcctggggcttcctcatgggtgagggtggggcatggtggcagttgttgggagacggaacagagctcaccctccttgcagctcccagtggtctccagcaagcacacagggcttgtcccatgatgtcacctctcccaggtggcagggccgagcctcctgccttcccttccttctgcaaggatgtgctgggtgcctgcagttgcagcagtgccctccccagctgggggaggctgacctgagacaggcaactcctttcccaggaggggaagccctgctccagcttgtagcaggcaggggccgaggaagagtttcagagcgtgccaatgtctccactgaggtgacgagacaagcctggagtggggtgagggaacacacacggcccagttttgg

SEQ ID NO: 744711 - DNA, 624 bp, Homo sapiens
gatatgtgcactttgtcaaaactcacaggacggtgcacagcaaaggatgagtataggtacattacaccttaaattttttttaaagtggggaaagaaaaagaagttgccacaaaaaccttgtatgttgagccatcagcctgtctggatttcagacacattggaggagaggtcgggtctgtagtttgagactggggagccaccagctgtggacrgagtcaagtgactgagagattaaagacaccagacacctagacactgaggatgtggcaaggtgaggttgggagagggcatggggtggaaggcattgggaatgacagaggcaaattggcaggaagattgacacacagataaaaagagatggttggatgagcagaaagacaggcagagagacagacgtggactaacagacaggcagaaagtggatacagagacaaatatccactaactgagcaacaggtagacagaaagatgctgtaaagatagaaaattgtgtaagtagatggatggagctaagggtagctctcaggtggacacagacagaaatgcagacagatgtcttggcttacgagtgcatgaacagcctgccctgattttctggggcattcttctagatcttggatctat

SEQ ID NO: 744712 - DNA, 596 bp, Homo sapiens
attccttaccattcttacttcttttgcaagcagaaaagactcagtattagcaaagacaattcagatagtttgttcttatgccagtagttgtaatttcctggaggtctatgtgacatcaattatgtacttcaatacctctcacaagcacttttcctgtttggccattttctgcagtatatccatgctcccattttctctattcttttatttctagcctagacttttctttcatcctataattctttatcctaaagatattaatttaaggataacatcacaaaatagtatatttcttcagatgatactccaaattgatacctaatatacagaaatgactatcatggacataacccacaacatgtgaaatatatggctcattctactgacattataaaggaaagttaatgacaactgaatttccagtcattgttcacccaaccagttgcttataaamtggcaaggaattgtaggtatgtacgcagtggctattttttggtggagtgttcagcacctctcctcttgagagccccccttttctttggggaccatttcaatgagcaccaactgggcctgacccaacctaccagccccagccc

SEQ ID NO: 744713 - DNA, 616 bp, Homo sapiens
acatcacaaaatagtatatttcttcagatgatactccaaattgatacctaatatacagaaatgactatcatggacataacccacaacatgtgaaatatatggctcattctactgacattataaaggaaagttaatgacaactgaatttccagtcattgttcacccaaccagttgcttataaactggcaaggaattgtaggtatgtacrcagtggctattttttggtggagtgttcagcacctctcctcttgagagccccccttttctttggggaccatttcaatgagcaccaactgggcctgacccaacctaccagccccagccctagaggtgatcatgatgcccagctctggcaaaagactctacccttggatcatagcaactgtttcagtacttttttttttggaatcatcaggaaggactcttgctttttctaccactgtggtctgtgaggaaaaagtaaagtgggttatttgtagcactatctcttgctacagagagagaagagagtcatcttcagaaggaaaaaatgaggctaaaacaaaaggaaaagtgtcaagagaaagaaggagaacatttcttgaagattttatataagcccccgggtccagctatg

SEQ ID NO: 744714 - DNA, 550 bp, Homo sapiens
caaattgatacctaatatacagaaatgactatcatggacataacccacaacatgtgaaatatatggctcattctactgacattataaaggaaagttaatgacaactgaatttccagtcattgttcacccaaccagttgcttataaactggcaaggaattgtaggtatgtacgcagtggctattttttggtggrgtgttcagcacctctcctcttgagagccccccttttctttggggaccatttcaatgagcaccaactgggcctgacccaacctaccagccccagccctagaggtgatcatgatgcccagctctggcaaaagactctacccttggatcatagcaactgtttcagtacttttttttttggaatcatcaggaaggactcttgctttttctaccactgtggtctgtgaggaaaaagtaaagtgggttatttgtagcactatctcttgctacagagagagaagagagtcatcttcagaaggaaaaaatgaggctaaaacaaaaggaaaagtgtcaagagaaagaaggagaacatttcttgaag

SEQ ID NO: 744715 - DNA, 626 bp, Homo sapiens
gcttcccctggactccgcctggggtttcctcatcctggtcggccctttgtgactcctggcatccggagacgttgccgtcgatcccatgaagaggtcaggccggagcctcagcgcccggacacccaagcactgcaaaggaggtctcctgctgtgccaagcctcagggactggtttctaagacaaccgtgggaagcactgtgacaggagaagccgctcgcgcctcgcgcatgcgcattggctgggcccacaggcgctgcactccaggtagccaggctgcgtctactttaaataacgccacctctgtgcggcggcaacgaggctcytgctgcagccgcggcgggggctgaatccggggtccagtttggggtggcgtggcagagggggccgcgagtgtcctgtcccagggccaaaccaccaggagtcctgtcctcaggacctccttgagccgacttctacccagggagggggagcttcaggaagcctgctgggttctcgggactcctcttcagatccgatataaacgcactctgagagagataggatgggctcaccacaactggtgaggcaggcagggcctcgctgcagcacagaatgatcccataggtctcaaggagaagtgtcaggtg

SEQ ID NO: 744716 - DNA, 593 bp, Homo sapiens
ttctcagggttctggaggctgggaaatcaagatccaggccggcatctgacaaggcctccctgctgtgtcctcccatggcagaaggaaggccgaaaggcaagagagtgctggagggagcagtggagggcaaaacacccttttattacaaccaaaccgctcagtaactaacccactgggagatggctggcagcattcatccattcaggagggcgggcccccaggacttaatcctgctgtgaggccccacctcccaacacagcagcttgggggacacattcaatccttctggcccctgtccattccctgggggaagagggacttgaccacagtttcggggctgctggggcctgagctgccaggtgggcagcacgggcctcctagggctctgccctcagaagcagagctcggccccgagggagggcatgggaacsggagcgcagccgggacgctaacccccggcacgggtgctgcctgctgtttgacttggagctcctggcttcccttctctgaggtgcagagtcctcagccagcacaacgcgcctatcggctcagtatcggctcgctcctggaaagccttcccagagcagaccccc

SEQ ID NO: 744717 - DNA, 635 bp, Homo sapiens
agaagatgaatgctatgtcactaaccttcaaagatgaccttccttttctttcaaattcttgaaatcttaagacttcattaattcatctctctttgcccttggatcaacattgtgctatacaaaatctcatgtaaaacaatgatctaatrtaataaaaatggcatttttctttcaagcagatgcaagctaactggcatttttacaattgacatatttcctttgtcaatttttcattctgtattggaagtaattgataggtattcctgaagggatgaaggtgtttctgtgttcattgtgatccaaactatttttagacctagtggcatttgtaaaacaatttgtgccagctgaccaaggaccactgtggcagaaagcagcaaacttgcgtaagatgtcactgcctcataagttggctttgaaaactaggggcttactctatagtcttatgtatcaaagacattgatagatgtagtataagattacaatcatattttccttttgacagtcacattataaagcatgatgtattgcaattaatctcaattagctgatcacaattaaaattaatagtttattattgctgataaacaatcatgactctcctgttctcaaatgtgcaagtaattcttgtaatt

SEQ ID NO: 744718 - DNA, 638 bp, Homo sapiens
atatgcagaagattgaaactggaccccttcctctcaccacatacaaaaattaactcaagattgattaaagcagaggtccccaacccctgggcaatggactggtaccattctgtggcttgttaggaaccaggccgcacagcaggagatgagtggctggtaagcaagcattaccacctgagctccacctcccgtcagatcagcagcagcattagattctcataagagtgcgaaccctatcrtgaaatgcacatgtgagggatctaggttgtacactccttttgagaatctaactaatacctgatgatctgaagtggaacagtttcatcccgaaatcatccccctgcctactgctctctgtgggaacattgtcttccacagagtcagtccctggtgccaaaaaggttgtggactgctggattaaagactaaaatgtaaaacccaaaactgtaaaaaccctggaagacaacctaggcaataccatcctggacatagaaatggacaaaaatttcatgatgaagacaccaaaagcaattgcaacaaaagcaaaatttgacagatagaatctaattaaacttaagagcctctgcagagcaaaagaagccatcaacaaagtaaacagaaaacctacagaataggag

SEQ ID NO: 744719 - DNA, 572 bp, Homo sapiens
tctacggaacttaaagaaatatacaagagaaaaacaaccccattaaaaactgggcaaaggacatgaagagacgcttttcaaaagaagacatacatatgaccaacaagcatatgaaaaaaaaagctcaatatcactgatcattagagaaacgcaaaacaaaaccacaatgcgatatcttctcacacaagtcagaatggttattattaaaaagtcacaaaataacagatgctggagaaaagggaaagcttgtatattgttggtgggagtgcaaattattagttcaaccattgtggaaagcagtgtggcaattcctcaaagagctaaaaacagarctaccatttgactcagcaatcccatttgggatttatatacccagaggaatataaatcattgtactttaaaaacacatgcacacaaatattcattgcagcactgttcacaatagcaaagacatggaatcaacttaaatgaccatcaataacagattagataaagaacatgtggcatatatacaccatggaacactatgcagccataaaaaatgagatcgtctttttcagcgacacatggat

SEQ ID NO: 744720 - DNA, 600 bp, Homo sapiens
atcgatttagcccatgatataaagttagacataagaactcaaaaagtatggcagcatggagccatttagcataggggcaaagagccaaccacacctgccgagtttctgagtgcatcctgtattacagcatactgtacacaccataataattaatggttataatgactttgaatcactaaggacgtattaacccatgaactctaagaagacagggacttacataatatattttgaaagctccccttccccctataaagtgatttagtttaggcacttatagaaatacgctgcagaaaattaattttttatgatgtacctcattttctgatamtgccttgaatgtgacatggtatacatacctaaaataataaccctaactatttaagaccttacactcaaggacttaggtgttcttgtttcagtaagctgtgttctgaagcatactggaaaaataaagcgtgttccataggaagctacctgcattatacacaggcattttatttaactctaatattagccaaatatcaataaagtaaaaactcttcaaacacaaccctttccccctatttaaagctagaatgtttttgtaaatatttactg

SEQ ID NO: 744721 - DNA, 649 bp, Homo sapiens
ctgtctctagccatgagttatactgctgttggctgccagtgcaatgttattgaatcaacaatacatactaaataagatgtctttaaacagaaacacacataaaacaaagttaggtattgatcagttgacaaaaaagttatgagcacagactcacagaaacttaaccctctatttcctctaggacgaataattttgtcttttaaaattcagtgttcctgggaactttatagaacttaactactttgaagaactaaaatcagcaatgaatggataaataytcaacaacaccatgtgctggagaggatatggagcaactggaactctcatacattgctgataggaatgcaaaatggcacagctactctggaaaccatcaagcatttcttataattaaatgtatatatccatcccatatgatctaacagtcccattcctaggtatttaccaatataaatgtaaatttaggttcacaccacagcctgtaccatgaatatttataccagctttatttttgattgccataaaatggaaacaacccaactgtccttcaattgaggaatgaataaacaaactgtggaatggaatattactcaacaataaaacagagcaaattattgtactcaacaacacgggatgaatctcaaatgct

SEQ ID NO: 744722 - DNA, 494 bp, Homo sapiens
cccgagtcaaatttccctttagaaattgaaagaatgtgtgtgggtttttcctgctttttttttttttttaaccaagctctagtgcaaccgctggttcatggactagaatattaagatccaattcaatggcagactgtctccagcaatgttgtatttttwtttttttttgccgtcatcccccccacccacttgtgagcaatggttgtacaaattagcctctgtgtactagtcaccgaagctggcttcccaattaaccccaggcttgagagaaaataagactaaagattcttcccctcctgaaagaactaagttatccatgcacaaaagcctacatgttggcacctggctatggagttgggcatttaattgcctttgtaatgactcagtccatctgcatggtattgggtccccagtttcaggtaatgggccagaggggtcttattagtctctggaatgaccaggccatgtgtattcatcacttcgaaaggcaagca

SEQ ID NO: 744723 - DNA, 460 bp, Homo sapiens
aatccaccaagaataaaccgtgcagatgttttttaaatgggccaaaatggacactttcaacatctcattccccagggtattttattgttgatttttatttagggaaaaagaagtatcatcacttttggcaatgaaaccaaggctattgcctgcctataaaagcaatgtcctggtaacacagacatgaacaccttgtgtgagtgaacgtggtaattaggaaagtttccytaagataaaatgccaacatattaacagcgtcacctctagcgtgagagaaatatgattaatttctatttttgttttttacacttttctgggctttggattatctatagtgattgtgcactagtttaaaaaataattttaattcaagaacaaatgcatgactacgcattcctagaaaaacattatagcatgaggttaaagtgtcctttgaccctgctcccttccacagtgggtc

SEQ ID NO: 744724 - DNA, 598 bp, Homo sapiens
aagcaatcctcctgcctcagcctccccagtagctgggactacaggcatgtaccaccatgcccagctaatatttgttttgtttttgtttggtagagatggggttttgctagttgcccagactggtcttgaactcttgggctgaagtgacctgcccacatcaccctcccaaagtgatgggattacaggtatgagcactgcactcagcctattttaatatgtaaatgtttaaattatttctcactcaagaaaatcaatgttctaagagacttgcatgcttcatttgtgaaaaagtaccttttgacatatcctgtgtttgggaagctcagctgaagatgttggtagggcaaaaagcaaggcaacaatataatcatatttgtttctttgatacttttggagggacagagagaacaggaaaatcctctagaccagactaaagctgatgagggccrcaccaaggcagtggcagtggtgatgaagaagagagaagtgattttagaaacatatgttaggataattagcatgggatagttagttatcaaatgaatgtgagggataatggaaaaaacaaaccaaggctatatgtcaattaaggatagtg

SEQ ID NO: 744725 - DNA, 600 bp, Homo sapiens
aagtcaatcaatagaatttacagtattaaactactaaaaaatgaaaagccataaaatcattcttaatacatgcagaaaaaatattttataatagccaacattcattcatgattaaaactctcagcaagctagaatagtaaagaaaatctatctctactaaaaatacaaaaaaaaaattagccgggygtggtggcaggcgcctgtagtcccagctactcaggaggctgaggcaggagaatgacgtgaacccaggaggcggagcttgcagtgagcggagatcatgccactgtactccagcctgggcgacaaagcaagactccatctcaaaaaaagaaaaaaaaagaaaagaaaaaaaggaaagtctaatgtataaaattctaagtactctatgaagaagaaagtctttggaactaataatgagtttagcaaggttgtaggatataaagtcattataaaaatttcagctgagtctatatataagcaataatgaatctgaaactgaattttttaaaaacatcatttataatagcatcaaaaatatactatttagacataaatttggtgaaagatgtgcaaaaactgtacactaaaaagcaaaaa

SEQ ID NO: 744726 - DNA, 600 bp, Homo sapiens
aagtcaatcaatagaatttacagtattaaactactaaaaaatgaaaagccataaaatcattcttaatacatgcagaaaaaatattttataatagccaacattcattcatgattaaaactctcagcaagctagaatagtaaagaaaatctatctctactaaaaatacaaaaaaaaaattagccgggtgtggtggcaggygcctgtagtcccagctactcaggaggctgaggcaggagaatgacgtgaacccaggaggcggagcttgcagtgagcggagatcatgccactgtactccagcctgggcgacaaagcaagactccatctcaaaaaaagaaaaaaaaagaaaagaaaaaaaggaaagtctaatgtataaaattctaagtactctatgaagaagaaagtctttggaactaataatgagtttagcaaggttgtaggatataaagtcattataaaaatttcagctgagtctatatataagcaataatgaatctgaaactgaattttttaaaaacatcatttataatagcatcaaaaatatactatttagacataaatttggtgaaagatgtgcaaaaactgtacactaaaaagcaaaaa

SEQ ID NO: 744727 - DNA, 654 bp, Homo sapiens
cagggccattgaagtgagggctccagagggaagagcagcttggtcaccttcgcctcctgatggaagtctcccttcaacactggggattttattaggggaagtgagaaatccctcatcactgcctgctgtgcggatgtcaaatcttagactcagttttgttctactaaccacaaacccccctgattttatcaccattcgagcatagtaattttttttttaatctgaagtaaaaatgcgctgttctaacaataggcaactaaaaacacaaaacaaaacaatcyttccacccccaatctagtagtctaaaaaaaatgacaggcaaatcggtccctttaatcgagtccaccttttaaaaattgaatcctaagtgtggacatctagcttactggtctgatgttttcctcatgaagatctgtgacatgtgttcaagtgtcctccgtcccctgggatgtcatcttctaggctggtcaccctcattccggctctaaggactctcccactgtccctgttcccatcatgcacctcctccttaacccttaggactgcggcttccaaactccagggcacctgagaactatctggacatgattccctggcccttcctcagcccttccgcagtccctctaaatcagaatctgagggtgggatcctggg

SEQ ID NO: 744728 - DNA, 594 bp, Homo sapiens
agggtttatgaatacaaaagaaaatcaaacacatttcagccttcctttggggacaaattctctttcactatttctggatgttacctcaaatgtgtggttcttcccagtaaaactttctaacccaaggtaagagctggaatcttgggcaatgcgccaagcctggtgacagactccaagagaagtgtgtacctggaacaaagacacctgtgggccctggctcctggccaacaggggacccgtgcacctgtggctcttcccacacatcttccacacaaactcctcccccgtgtacaagaggacactttagacaaaaagagaccattccattacatatgaaaacctagagaacataagcagaaataaaagtggtggcaatacacttcatactatcctatcccacttcttcccttaacaagagtgaatgacaaccacgwctccaagtccatctcttctttgcttgtgaaatgaagggtgtagaggtgtgtgtcaaagcaaatgaaatagtacttagtatgagccacttcacttcaattcccatctaatcctcataggaactctaaggaatctacaactatccctttttcacaaattaag

SEQ ID NO: 744729 - DNA, 691 bp, Homo sapiens
ccatgccagcccctcacattctttggtttgagcatttatgcttagactgtctccagggacaccaggatggagaagtggatgggcaggccagtgggggttctgctctcctggaagccccaggagaaactgagagcattaggggagccctgcagctggaggtctctgcagcctgtgactcctgggaataaaggacatggrggaaggctgttccagattgagagtgggtggctcagctgtcagggatacctgggatttttctcccccatgttaagcacttagcagcctcaaaatccatttctgtttagtttaggcctgttgctagggctctagtgctgtagcctgttgccttagtcagtggagtctcagactactttgccggaaagttcttcagcagtgactcagcaaaggacttacaatgtccagaaattgtcatttaaagcaattcccagagctctgggaaacagagcaaactgacgtaaacagaaaagcaacttttggatggctagagagaagcagctactgcttcactagatgcagggtccagagaaagccctggaaatgaccagcaaagggtgcaaacccgccttcacccccttcccaaacaaactctgtgagaacccagggcagccccgctggagggaggaatcagggtggttgtgaccgccaccaatcagccaatcagcaccaacgc

SEQ ID NO: 744730 - DNA, 508 bp, Homo sapiens
aaaaaaaagcaacttctgtgtcataaaagcaacgtgggttctacctggtcccttttgggctaagtaagttgtttgatcagcttctctcagtctctgtggatgtccttatatgagtctaattgaaggactcctgttctctttttatttttgctctatgaaaaatgtatcagagatgtcttataatgaactttgatatggtgaaatgataataatgtcctaattacatataaaaatgtaattacacttgcttctattatagaaaaactccctttataatgaagtgttatgttggaaaaagattttcattataggcggactcctttacttgttaatttgarctctgattcatcgctttaatattaaaaaagttctttgtaagttacttttgatgtgtctcatttatggttcatttcacttcctgggaaccacaaggagcccaaatccaaacttctttgaaagacacttaaaaatacatctttcaaaaggagttcttctttctatgcggtga

SEQ ID NO: 744731 - DNA, 488 bp, Homo sapiens
taataaacctgtatatgtactccctgaatctaaaataaaagttaaaattacaaaaaatattttaaaattttaaaaatgattttgaagataattggataaatgcttgtgctatatactgccatctattgacatgtatagatgggaaatacaaatcgaggaacaggctaagacaagggtgggtggagaagaaagaacaaatgaagtgcacatgtgttcaccctggagtcatatccaagtgctgaatatcagttgaataagcagttaatattatggttctggggctcragacattcaggtttagagaaactgattggcaagtcagtgaatcgttgggtgtagatgttttgtccatgagagatgatttaaggaatgtgccaaaaaatggtggtcagaacgaaggagaattggactggaataagatggtagatggacccatatggctcagcagatgtagggctataaatcagaatacctggtttcaattctca

SEQ ID NO: 744732 - DNA, 603 bp, Homo sapiens
aaccactgtgccctcaaaatcttggtattctgggcctgtgatgggagtggcagcctcaaatatctctgaaatgccttttgggtcattctcccactgtcttgatgaataatattgtagtttgccagccgccattagtattttcccccaaacaagccttttttttcttttttttactacatggctaggctgagatatttccaactctttaatatctgtgtattttaggattataaattccatatttaattcatcttctcttcttgcattttatcataagccatcaagagaagccatgcagcagcctgaacacttaacttggagatttcctctgccaaatatcacagttcattgcttgcaagttctgctttccccaaagcacagacacaattcagtcaagttacttgccrttttgtaaaaagaatgaccttttgtctaatttccaataacatattcctaattttcatctaagaccttatcagaatcgcctttcctgtctatatttctaccaacattctgatcacaatcacttagacaatctctaagaagacctcttcctcttcttctgagctctcaccaaaatcacccttaacactctgctcacag

SEQ ID NO: 744733 - DNA, 643 bp, Homo sapiens
catatgtgtgtacgtatgtgtatatgtgtgtgaaattgaaaggcctttctattaaaaagacctagtaataaaattcccctcattaatagactaaaaaataaaaacaatacaatcaaacttggaattcagaaaaggcctatgaatatgttaaactcctgtcatgactagaaaaataatattaacccatttatgctggaggttgcaattttttgaatttttgcacaagtgaaaaaatcagaccttggtgatraccttgagtagtaggatataaataactcccacatgcttagggttccaataatggaacactgggcataagtgggttaatgaggaaatggaagggaactcctttaacctgaaaaagagcaccaaaacttacagcaaacataataataagccatggagtgttaaaagtctcccttaaaagtcaagaataagacttatcgggctattatcactacttacatgcaccacttctatatattggatatagtgacattgtacaagacaagaaaataaagttataaggattagaaaagaaaaacaaattctcattgttctcatgtaatatatggaagttttaatagaatttatacatcaaatatgaccactaatagaagagtccaaaaagattgttctatac

SEQ ID NO: 744734 - DNA, 643 bp, Homo sapiens
catatgtgtgtacgtatgtgtatatgtgtgtgaaattgaaaggcctttctattaaaaagacctagtaataaaattcccctcattaatagactaaaaaataaaaacaatacaatcaaacttggaattcagaaaaggcctatgaatatgttaaactcctgtcatgactagaaaaataatattaacccatttatgctggaggttgcaattttttgaatttttgcacaagtgaaaaaatcagaccttggtgataaccttgagtagtaggatataaataactcccacatgcttagggttccaataatggaacactgggcataagtgggttaatgaggaaatggaagggaactcctttaacctgaaaaagagcaccaaaacttacagcaaacataataataagccatggagtgttaaaagtctcccttaaaagtcaagaataagacttatygggctattatcactacttacatgcaccacttctatatattggatatagtgacattgtacaagacaagaaaataaagttataaggattagaaaagaaaaacaaattctcattgttctcatgtaatatatggaagttttaatagaatttatacatcaaatatgaccactaatagaagagtccaaaaagattgttctatac

SEQ ID NO: 744735 - DNA, 629 bp, Homo sapiens
ttgtggtttgacagcaggcattgtatgattcatattcttgtaaatttgctgtggtgtgttttatggcccagaatgtggtctatcttggggaatgttttgtgttagcttgagaaggatggatattctgctgttgttggatgaaacagtctgtagatatctattatattcaattgcctgatggtgttgttgasttcagctttgtccttaccaattttgcgcctgctggatctgtccattgctgacagaggggtgttgaagcctccaaatataatagtgaattcatctatgtctccctgcagtcctacccgtttttgcctatgtattttgatgctctgttgttaggtgcacacacattaagaatttttatgtcttcttgaagaagtaatccctttatcattatgtaatggtcctcttcacccctgataactttttctggtctgaagtcttctctggttgcaattaatatagctacttttgctttctttttattagttttagcacagctctcaccagttgtttacttttaatctatatgtacctttatatttacatggactttttgtggacaacacatggttgaaacttgtttcttattccactctgacaatatcttttaattagtgtattta

SEQ ID NO: 744736 - DNA, 543 bp, Homo sapiens
catctcatatatatttctcttgtaatcttcacaaagggagacagagaagctgaggctctctcgggaagctgtgtaacttgctcagggtcgtaccagatagtgggtggcagaggagaagggcaggcccagatatggtaggtgccaatgtgcagaactgctgtgctgtgctgcctggtgttggccagaatgaccatgagaggccaaaatggtgccactgaggggaggagcggcacccagagcacagcagaccccccaccgctccagccagcccctcctcaagcccgtgctaccaggtaaygaaggggagcggggaaagcaaagacagccagggaccaggcagagggccagtgcctgtgcccccatgccatggcctgcacgtcctctctgcctctgtaagtttccacctgagcatctccaaaccctagaccagcatgatgcctggccagaagcctggctctccagggaaagcagagacagccatggaccaggcagagggccagtgcctgtgcccccatgttatggcctccacgtcctcctctctgc

SEQ ID NO: 744737 - DNA, 571 bp, Homo sapiens
agcccgtgctaccaggtaatgaaggggagcggggaaagcaaagacagccagggaccaggcagagggccagtgcctgtgcccccatgccatrgcctgcacgtcctctctgcctctgtaagtttccacctgagcatctccaaaccctagaccagcatgatgcctggccagaagcctggctctccagggaaagcagagacagccatggaccaggcagagggccagtgcctgtgcccccatgttatggcctccacgtcctcctctctgcctctgtaagtttccacctgagcatctccaaaccccagaccagcatgacgccccggccagaagcctggctctcctggtatttcttatctcttgcagaccagttcctatactctggagcaattgtccatgagcccagaaggcccaaatcacactggactgtagggattgggtgaggctccgggaagcttttgttattagagggactttctttttctggaacttcatgtttccagtggaaaaaacacaagctcaaaatctctgtgtcatcggagtagttaaatccccatcttgacctcagagacccaga

SEQ ID NO: 744738 - DNA, 562 bp, Homo sapiens
agcaaagacagccagggaccaggcagagggccagtgcctgtgcccccatgccatggcctgcacgtcctctctgcctctgtaagtttccacctgagcatctccaaaccctagaccagcatgatgcctggccagaagcctggctctccagggaaagcagagacagccatggaccaggcagagggccagtgcctgtgcccccatgttatggcctccacgtcctcctctctgcctctgtaagtttccacctgagcatctccaaaccccagaccagcatgacgccccggccagaagcctggctctcctggtatttcttatctcttgcagaccagttcctatactctggagcaattgtccatgagcccagaaggcccaaatcacactggactgtagggaktgggtgaggctccgggaagcttttgttattagagggactttctttttctggaacttcatgtttccagtggaaaaaacacaagctcaaaatctctgtgtcatcggagtagttaaatccccatcttgacctcagagacccagacaggtgacgagcagaactggcccccat

SEQ ID NO: 744739 - DNA, 603 bp, Homo sapiens
ttaaaaattaggcactttaattatataaaaaagcatatgaattgtaaacaaattttaaaatgaacttaaaaattagcatcagaaatcaattcctttaattcaccagccactaggttaatttcagcagaaaaatgctttagtatactccaaatatcatactaatttgagaaagtttccattatttctactgtgtgtttctttttatccttcttttattgtttatctcttcacaaaaatacagagtgccttctttctgtaygcctgttggtgagcattctagagaatgtgcattaagaagtgcaggaccgctgggcgcggtggctcacgcctgtaatcccagcactttcggaggccaagtcaggtggatcatctgaggtcaggagccggaggccaacctgaccaaaaccccatctctactaaaaacacaaaagtgagtctgacgtggtgggaggctgaggcaggagaatcacttgaacccgggaggcggaagttgcagtgagccaaaatcgtgccacaggactttagcatgggcaacaaaagtgaaactccatctcaaaaaaaaaaaaaaaaaaagtgcgggatcaactttacaattcagttttg

SEQ ID NO: 744740 - DNA, 620 bp, Homo sapiens
ggggcgaataaggctgcactcgtctcttctggccattgggcgtctgcagtgtgtagagtggcttgtgagttggaggtcgtagaacagggttatgctggtgcctcttccactttgccatcccatactcctcctgaagattcctgggtcccctgccctgtccctcaccgggccacagcccccatctccatcccacccccaaccctctcccccagcataaaacactgaaatgaaaggcagtgtgaaagtcagacggtcactgcagytgtgaagtggggacagtgggtggtggttgctcgttagcacccacagtggacgtgtcacagggttagtgtctgtagccattcgggagttcctcgcttttccacccttcctgctccaggtttattcctttagtcagcagaattgtcattttgtgggcttttttttttttttaactatcaggagagatggtcagggggctcatttattctgattagacttttcctgttgcatcattcctaattcatattttcttaatatttagacattatatattacagaatatgaagcttttcttacctttatatatcatctgtgtaatttacccttatgacctatttattccatacattgtctttctc

SEQ ID NO: 744741 - DNA, 506 bp, Homo sapiens
agttactgccttttatttcatattttatattaactttttggccccaaggaaacttagtgtgcctctttcagaatttaaaatagtactcggatttcataagatcccgaaggtagatgtccttcaatcaccaacgtttttctcattcacatcttcaatagtctttcctaagagaaaggccaacgccatgcttctgttggaaagttggccctgaatccaggcagactttggagtaaaatccagctacctagaaccatcaacgccctgcatggacccagagagtcttcccagccyggtgtcctctcctttcatatccccaggcagccgagggtctcctctctcccaaggtgggaagcaaatcctatatccatgaacaacatggactctctcagggtaggtggacgctgtgaatgcagcctacagctgcccccagtttttgagcagttacacagtgtggttcataacagccatacatgtaagtcagggtttaccaatgtccacactggtga

SEQ ID NO: 744742 - DNA, 570 bp, Homo sapiens
gtccctggaggcttaagctcagagctgggaatgtcattgctgtcaccttttattggccacagcaagtcataagacaggctcagattgaaggatggggaagtagacgccacctctagacaggagttggggcaaagtcacacagcaaagggcgtggtgattcagggaggagtggggcatcggggacacgtttgtaactgatctaccacagaggggagcccccctttgagaaagtgcttggtgggccttggtgcttacgcagccacggaccaacctgctagatggggccttcagtagggtggcgggacgtcagtttagcctcargattcgactccgagcctcttgcgagaccacgtcttgggcagcatcgtagacccggctgtgagcacagagtggctcttccagaaagtttgttgaatgactgactgacctaagtcagtccctgtgccaggcagcccagagggaccagcccagagcctccttctcggggtgcaagcctggcttgggattggggggtgtctgcactcgtggagccccccatgcctgccgggagcctgaagacgcagagacctc

SEQ ID NO: 744743 - DNA, 619 bp, Homo sapiens
agtaaataaatcctgttcttttggtattagttaagcttacgaataacccttaaaggtaaaataaataagaaagcacacacattcaaaactgtgtaaaatgataaaacaggcaacaacagtaaatagaaaagaaagataaggtatattacattactatgatatgctgtgaagtaatcgttactctctctggtggactaagcaatccagctactraatttattggtgagctacagatgatgggttactcaatggtatgactatctatcctcaactatggcctggcaattaaagtaattttgatttctgtagctggcccatcccctttcttccaaacattcgaagatatatatttctctttttaaaatatttttcaaagtaatcttgacaatctcaaaatgttgatcaatttttacttttggcagaaaagacgaaatatataataagaagactctatgcattagctaaagagtgggtctacattttatatctcttagagtgcagggttctctctcaactgttcttttgagggaaatatgttctcggcctccaaaacaggaaaaaaaaatggaaacaagttatggacttacaaactcagtgatgagattccaatcaggcacct

SEQ ID NO: 744744 - DNA, 619 bp, Homo sapiens
agtaaataaatcctgttcttttggtattagttaagcttacgaataacccttaaaggtaaaataaataagaaagcacacacattcaaaactgtgtaaaatgataaaacaggcaacaacagtaaatagaaaagaaagataaggtatattacattactatgatatgctgtgaagtaatcgttactctctctggtggactaagcaatccagctactgaatttattggtgagctacagatgatgggttactcaatggtatgactatctatcctcaactatggcctggcaattaaagtaattttgatttctgtagctggcccatcccctttcttccaaacattcgaagatatatatttctctttttaaawtatttttcaaagtaatcttgacaatctcaaaatgttgatcaatttttacttttggcagaaaagacgaaatatataataagaagactctatgcattagctaaagagtgggtctacattttatatctcttagagtgcagggttctctctcaactgttcttttgagggaaatatgttctcggcctccaaaacaggaaaaaaaaatggaaacaagttatggacttacaaactcagtgatgagattccaatcaggcacct

SEQ ID NO: 744745 - DNA, 613 bp, Homo sapiens
cgtctatcattggaagcatgggatccagtaataacagtatgagagtcagaaaatacatggttttgtgtaggatgtgatgccttggatttcaggtacatagacatggaggttttgctgactgtcagaaaaggtggccagaaagcacttggtacacatatttggaattgtaggcaggtgaggagggttggtccagcagcctagaggtgatgtaagcaacttcagaatgagttaggatcccagtgcttcccatgtgtccagaggaaaggaaaactggyctgagacagggagtgatggcatgataggttctgacaccatcacaagaaggggttttcaaaagaaggggacgctttacatcctctaaactgtgataccatctctgctcacaagagtgctgtccacctgatgagtattgaactagccagatcccatctgtctcacagtggaagccctgcagtttgaatttcccaaattcccaagaaactttctaacatttgtcagagaggaatggcccagctagtgttgatttggagatttcctttaatcaagcattttcatgtagagtagacacaacccagagattcttatccagtaaccctgaaggcaggtggtagtg

SEQ ID NO: 744746 - DNA, 523 bp, Homo sapiens
aaagattctaccagaaagtcttcatagtcccataggccacacagaatgtaacacttttactgcaagcaagaaagcaggatttcaagtctgggagggctatttttcataaagttaagggaagaaaagtaatacctatttatctacatatcatacatgtgtgtagttgtgtgtttctgccatgaaaacaaaaatatttgccagagggtgttcagaaaaaagcactgtgagaatatgtagctgttycctgctaaaggcagacttcccttgacagatttgagctagctaactaattttcccctgggtacaaagcggacttcatggatctcagaacatctaacattgaaatgcatgctcaggatttgccaatgccaagaccacaagactttcatatgaagatgagtctagtaattccaaaaggcaagaggcatagctggtgagtacctatgcattttcttttgaagggaaaggactgccacttaatgtttttaaatattaggatcaccatcccaggacacatatttaa

SEQ ID NO: 744747 - DNA, 750 bp, Homo sapiens
tcatctatgagcattgttctaatgcctgaaacgagcactacttcaagtacttctttgtcactaaaagctattcaattctactgaaggtcagttattcaagcttcatcttatgtactttttttttatcaaagttaattatgactgaaggtttgcctctatgatgtatgaatctggttttgtgctgtgttatcgtacagagaagataaaggcagrtcacttggattcaaattctagagtttccactcattatgtgtgatcctaaacaagttatttaaacttctctcaatttcttcatctgtaaagtggagataataatggtaccaaccttatagagttattatgaggttaaaattagttaatatttataaagtgcttagaagtacgtcacagagaagcccacataagcagtcattaattaaatagaccataatgatctaagacctcatcagcacaattgtacatgcttttatttggagagttttataagaactataattttcctactttactaatgggaaaactgaagcctggagaaatattagtgatttgtctaagttaacactgttaattaatcacagaactggacttctggactaatcacagaagtcctaaatcttctgatccttgacacagcttttactcctgtgcacctgtaccaacaaagttaaaatttttacaaccaaataggtctgtagtttcaaatgatagtaatacacatttcaggatccacaggttaaataaaaggagggg

SEQ ID NO: 744748 - DNA, 476 bp, Homo sapiens
tttcccagaaagggaaaacgataaagttaaatgattactggaaagatttagtattgataagacctgtaccagataagaaagaaaataaatagtctgtaccttgatgactcaatcagattttgcaaattgacttaaacttcaaattactccccagtagcatcattcatgagatttgtttatgaaattagtgtatattttcaaatgttttttcttagctcrtagatatatacaagcagaaaacaaactacatataaggattcatgtaagttggtgataaaattacctcatcttatttggaaacagaatctcttctaattaaattattttctgcaaggtttgatttggtgtaattcctaccaccatgtagctgctggtaaaagagggcaaacaaaaattcatgaattgaatttttaagtatgaaagggatgtggaacttagaacaccaaaaatcaaaataaatgaaagtcttcatttct

SEQ ID NO: 744749 - DNA, 629 bp, Homo sapiens
atactcccatatgctgtgacgaaaacaacatcattgattgactctatccgctctcacacgtgatgtttggcttaacaaatgtttttcttgcatctattcctttaagaaatcagttctcttcctgtctcccttctgtctgaatttgctaggtggagaggggggtgccaggagtgctgtgtctgccaacaggtggccagacactagatcagtctctctcaatcagcaagtccccatctgctagttggagtctccatgtgttcattccgcttattacagcagctgagcctcaaactgggttctttgtgggcttcaggcagatgcttaacaaggtgagccaaagggagcctggccattaggagctgtgttaagactgcctcagctggaacctgtttttaccatgtttttcaagtgcttayctacagcttcccctgacagctttaccacaggacttccttgggggcatcagccagacacagtgatacttgaaacttcaaacaaaaatgcttatgctatgctattctttttttttagtctttggacgttattttgaattcaaaaatgttttagtaattatcaacatcctggcttaggtattactggttttgaagaagggtcttagcaggcagact

SEQ ID NO: 744750 - DNA, 519 bp, Homo sapiens
ttaaattagtgttctggactgaatatgtcatccgaaaattcggatgttgaagccctaacctctaatatgacagtaattaaggacaggacctttaaagaggtaattaaggttaaatgaagtcataggaatggggctctgtctgacaagatggtgtcttttttttttgagacagagttttgctctcacgcccaggctggagtgcagtggggcgatctcggctcactgcaagctccgcctcccgggttcacgccattctcctgcctcagcctyccaagtagctgggactacaggcgcccgccaccacatccagctaatttttgtattttgtttagtagagacggtgtttcaccatgttagtcaggatggtcttgatctcctgacctcgtgatccacctgcctcggcctcccaaagtgctgggattacaggcgtgagccaccgcgccaggcacaagacagtgtctttttaagaagaggaagaaacaccaaagatctctcccatgtgctcacagagaaaaggtc

SEQ ID NO: 744751 - DNA, 519 bp, Homo sapiens
ttaaattagtgttctggactgaatatgtcatccgaaaattcggatgttgaagccctaacctctaatatgacagtaattaaggacaggacctttaaagaggtaattaaggttaaatgaagtcataggaatggggctctgtctgacaagatggtgtcttttttttttgagacagagttttgctctcacgcccaggctggagtgcagtggggcgatctcggctcactgcaagctccgcctcccgggttcacgccattctcctgcctcagccttccaagtagctgggactacaggcgcccgccaccacatccagctaatttttgtattttgtttagtagagacggkgtttcaccatgttagtcaggatggtcttgatctcctgacctcgtgatccacctgcctcggcctcccaaagtgctgggattacaggcgtgagccaccgcgccaggcacaagacagtgtctttttaagaagaggaagaaacaccaaagatctctcccatgtgctcacagagaaaaggtc

SEQ ID NO: 744752 - DNA, 569 bp, Homo sapiens
tgtattttgcttgaattgtgaatatatcctttcttcctaagaaaactagcacctctgttcacttaaaaatgtttacatctacaagcaaaatctgcataattccatgtgcttataaatatgtatgtggaagagatttttattaaataaaggctgaattaaaaataaactatggaacacaagtgatttgacaaatgaaatatgtctaaatgttttagttggcttttgcatatagccttgtagagtaacatttaggacataacttcaagacagaagcctttgaatatattttggcttaagccaactttccacgtggattttcatggaaagagctaaataagttagtgaagataaacaatataaacatatcacttgatgaatgaatrtgtataataacaaactcagaagtgaatgactgaacagaggaaaatgagtggtcgcatctcagggtatacaggtctctttcatcttctggttttataccttcaggattgataactgatctgagaagccaaagctgactttgtcactcctggccttgagccttgagactggagccagcaacacattcc

SEQ ID NO: 744753 - DNA, 648 bp, Homo sapiens
cacatgcctttcttagctccccaactcccaactttatccttgttccattatgttacctacttagctcttgtaagcactggaattagcaagccctgaaatgtgtaaatttcatttgtggtttgaaataaactaactcctgtggagatattaacattaacatattctctaatgttgaaatgctgtcagatacaattcctgtaccagtttattattgtctctatgtggtgtgtataggatatcagaacttctagctgaaagctacttgttgatctccttgaaagtttttttcttttaccttttcctctcatccccctcaataatttttttcctttaaatgatacctattacaatttcttccctatgaaatgagataatttgactatctgcttgagtctgatgtaaaaatagaatcacaccagmggaaataaattagcatttggcaaggatacattttcatttgtggtactgtatttaaggcagttgctaggtgggtttgtggatgatggaacattctagaacttcgtttaaacctttttcaattaatagaaaggatgggagcagaaggcaaaatgaatgtatgtttcagcgtatgtggaatgctgatttgaataaaggaggatgttttacttaacaaaagattatttcaga

SEQ ID NO: 744754 - DNA, 660 bp, Homo sapiens
agagattaggcaagtagctgatgaattccttagccatctcagcaaaactcaggaagaaagatgggattatttaggaaagctctttggaggggcctcttgactaatggagcaaatctttgtgatatacatgggagatccaagagattcttaagcatgttttatcaccaggaacactgccagcttgaattgaaagagacagagataggacagaatgaaagaaggctgccagactcccaaaattatacagggakggaaaagcctaacacaactgctcaggtacaagcatacctatctttcaagaaaaaggggagaatgactctcagggcagagctgcactcccaggtgaggtaggcgagagccacgcaggattattccaaggtcttgaggcttaatggagttttatttgtatttctacaaagtaatatagctaaatttgcttgggaccaataactcctttttctttttccttttgttttcttcctccttttcttctttttaaaataggaatatctctaacttacatatcattcctgtcacaccattcattgtattttgagtgcagacaaattgttttctagtttcatcagtctacagatggagcaaaattttgtcccaggatagatcatgcaagattctcaattatacttgaattatatgatt

SEQ ID NO: 744755 - DNA, 435 bp, Homo sapiens
cagaatatcttagcaaggccccttaacgactggaagcgctgctaattccctgcgtatgcgcctctccctctgcagcccgggacaggcgcagccgccttttgcctgcccctacctcgcccgggacacactggcgccgcctggccaggcccgactgggaggaaggacagaggaccgacggacacttgtacatgtgcgggcgcacggaacccaggccccggccaccgctgcctttcccctgtgtgtctgagctgaagcgsgtacgcttataccgggaggtgaaacggaagctcagagagggccataatttggccactgtcacacagccaacctccaccttcacccggctacaccaacacactcgatgaccttctctgtcttcctcgccgtgcgctcccgatagcgggggaaatacttttctgagacgcctctctgggc

SEQ ID NO: 744756 - DNA, 435 bp, Homo sapiens
cagaatatcttagcaaggccccttaacgactggaagcgctgctaattccctgcgtatgcgcctctccctctgcagcccgggacaggcgcagccgccttttgcctgcccctacctcgcccgggacacactggcgccgcctggccaggcccgactgggaggaaggacagaggaccgacggacacttgtacatgtgcgggcgcacggaacccaggccccggccaccgctgcctttcccctgtgtgtctgagctgaagcgcstacgcttataccgggaggtgaaacggaagctcagagagggccataatttggccactgtcacacagccaacctccaccttcacccggctacaccaacacactcgatgaccttctctgtcttcctcgccgtgcgctcccgatagcgggggaaatacttttctgagacgcctctctgggc

SEQ ID NO: 744757 - DNA, 492 bp, Homo sapiens
ctaggtccacacttgctggatccttatgctctggtcaccatgacttttccatctttacaacacagctcagggtcatcacacatgctgtggctgctgtctggagtgttcttgtctttcctgttcacatagctgacttcaactcagactgcagctctcaacacaaacatcacctgatcagatgcttttcctggcccattaatccaagttaggctattgtgctatagcactcwacagctttccttgatagctcttacccacatttgtaattcagtgcttatctatatattcatttagttgatatctgccttttctactaccatgaggtataaaaaagcatctgttcttttttccgactatacacccatggcatagaacagttcttggctacagaatgcatctaataatgatttgttttgaaaaatagaactttcagtctcttactgagtaatcaaatagctacctaaggctgaccatagtatagtttccaagggt

SEQ ID NO: 744758 - DNA, 629 bp, Homo sapiens
gattctgaatcatgtacaagccctagtgggttcagggctgagtttataacttctctgggaaaaaaaaacaccccttaattttttttttttaattagagtctgggttaagatctttaagcttccttttttcctctctatggtgaccctgcatttttcattttgtgcatcaaggaatctggctttctatcaggatctcacttctatcgtcacattccatatgagcccaacatttacctcctatcattttgatgtcatttaaattcacaactcttggttaataagataagtatatgtcgttagggcagccagagycttagcctacccactctagactcagttctccttcagggtctggtattttgaaatttccctagctttcctatttcctcagatctatatcttaaagtatgttagtagtatttcttcaaaacattacaattctctttagagaaaagttgttttattcttattaactatttggctatattgttgaaaacagatttgagaaatgtcttagaggtcatctagactaatgcagtatccagtgtttgaattctcctacttctagtaatatcactatttacgaaaaattgatgtgtgccagtttgctaactgctttcatgcattat

SEQ ID NO: 744759 - DNA, 581 bp, Homo sapiens
gacttcagattatgcacaaacacacactttagagtagagaccagataggtttgcaagtgaaatattctctggctttattcaaaaagtaattttcatgagatgctgtgcttacttatacaggaagcagaatctttttttgttcagcaaaatactttggtttgttggtttcagatgacccaacagaaacttgcttacaggaattaggggaaacaatcaggtgattattcggctcttatgtacattgaggtcaacaaagtgtggtytaatagcctaataacagtttgctcctgagcatgactatccaaggacaatgttagagaggcagtattgcattacaggtatagggtataggaaggaatagaaacaagagatcaagagttgaaaagattagaacacttggtgaatatcgtacaatgcagcatgatcctaaattatttgggacataattaaataacaaagttaaggtgccatacatttattcttattgtgtgctggtcaccctatatacagatagtctgatggatttaaaagcagagagacaggttagaaatagataggaaagaaagctgaaaaagaagttt

SEQ ID NO: 744760 - DNA, 615 bp, Homo sapiens
caaacatctttgagccattttgatgggtgtttagtagtatattatgcttttaattaatatattcctgattaattatattaagcgcattttcatatgtttattgtccattgggatattctcttttggccatttttggtcctttttcgtattgtaagtttaatayatattacatgtgcagttctttgtctattatgtattttccccagtctgatgcttacatttttactttcttaatggtatcttttgatgataaaatgtacaagttgggtaaattacaatttaccaggttattttttcttttcgtagctagggattttgttgctttgtataagaaatctttgtcaatctaattccatgaagatattcttttatgttttatgggaaaattatacttttaactactacagttaagtcaacttaatttccctgtgtaatgtaaaggagcatatagggtttatttatttatttataattttttatgaatatcccatggctccaataccatttattttgaagatatttattttccctttgaagtgcattggtgcttctggtgtaaatcaagaggttgtgtatgtgaggtccatttctgcactctcttctgttcctttcata

SEQ ID NO: 744761 - DNA, 646 bp, Homo sapiens
tcagatgtccatgctgagctcaatgggtcctttgcttggggttttagaaagatgaaatcaaggtgtcagccagataggcacttacaggtgtgctctggaagaaaatccacttccaaacttacttagctggctggttaaatcccatttcttgctgttgtaagactgaattctctcgttttcttgctggctgtgaaccagggatcattctcagttttaggggctattagcattctttggattgtggtccctttatcatcaaagccaacaaagatagactcttgcttatggaacaagggaaggaaaatgtaagctctctgaatcattttcatgctttgagtccttctgaattcttctgcttcatccacatggcagatttcttaggcttttaaaggctcatgtaattacattcrgcctgcgctggtaatccatggtagtcttcctatattgagagcacctgattactaacacctgcaattacacctgcaaagtcccttttgtatgcaaccttatataaccatgcacgtgtaacagaatgcaaaggtcatgagaaccaaaaatctgcctcccatatcttccattgctagaaaatatcgcaaaagaggattgagtcagcaaagatagtttttccttttctttttgtctctct

SEQ ID NO: 744762 - DNA, 573 bp, Homo sapiens
atggaggaatcttaaatgaatattactaagtgaaaaaagccaatctacaaaggtgcatgctgtgtgattccaactatatgacattctaaagaaaccaaaactatggaagtagtgaaaagatcaacaattgacaggggtttggtgggtgggagggatgaataggtgaaatgagaattttttaggacagttaaactattctgtatgatactataatggttaatacacagcattataagtttgccaaacctataacatgtgtaacaccaagagctaaccctaatgtaaactgtggacttgsggtgattgtttgtcaacgtaggttcatcagaacataccactctgatgcattatgttaatagtatgagaggctgtgcatgtgacagggcagggggtatatgggaactgtattttctgctcaattttgctgtgagtgtaaaattgctctaactgtaaagtctatttttagaaaagagggaagaagaaaggcagacagatacaagatattaaaaagatacaaggaagaaagtaagtaaagtaattggtagaacaagagataaagtgtacatatgaaaa

SEQ ID NO: 744763 - DNA, 539 bp, Homo sapiens
tttatttttatagatcatattctagggcataatatatattttcataaacttaaagggattaaaactatacaacatataatctgtcaccacagagaataacactgaaaaatcagcaacagaatgtcatctagaaatcctcaagtatttgaasactaaacacacttctcagatgtcagagtaacccatgggacagataaattatcacaagagaaagtagaaagatttttattaatgaatgaaaataaaaatgcaacataccaaaatttgtgtagaactaaagcaggacatgtatagaattaaacacctattagaaaagaaaaaagttctaatttaaattatctaagctccaatcctaggaaactagaaaaggaaaagcaaattaaagtccaagtaagcaaaagaaagagaataataaatattagagtagaaatcaatgaaacagaaaaataattgggaatatcaattaaccccaaaactgggtctttgggatgtcaaaatgaaggcacaaatatgtttaatgtaaaaggaagcaacaagat

SEQ ID NO: 744764 - DNA, 409 bp, Homo sapiens
ccctactgttttccacactggctgccccattttacattcccacccatagtgcagggggtccccctttccccacacccttgccagtacttacaatttgccattttaaaataatagccgtcctaattggacatagatttttatcacatagcactcttgcaattgtgtaaaaatgaaaatataagtgaaattaatcatttcaggcattgcttaaacttctttgcawccagtctgactttcctgaggcactgtgtgattcagagaaggtgacattttcctgcccaatgttatgctctgtgctgtaagaccatcaaactcactggtgatgcagcattttctgaagaaggccctaaaagcactggtgctgggctcttcagctaatgttctttctgtacagccagcccacttgtgg

SEQ ID NO: 744765 - DNA, 644 bp, Homo sapiens
tgagagttccattattgtccccattttaactgaagagtaaattgagactcagagagaaaagtaatttgctcatggtcacatagcttctagtgcctggcatgtatgaggcctgcaatgagtgatgattaatattattttatagtgggaggcacarttgggatttcagtccaggtctaacactcaatgaagcctttacacgtggcctctatgtagtcctgcctcatagaattcatattgtgcatgaaaaggaggcatgccatggccaagtgctgccagcgggaatccctgtcctaagggaggcatattgtgtatgtcacactttcagtagctccctgtcagttgacagcgtgtggcacgtaaagcagaatgattgagataggagtctccaaactcaggtaggatgcgtgaagtttccagaagttcatgaatacattcagtgttagtgcaaactatggctaggttcatagcttgcagatgtcatccttcctaaaactgatgtgcccgagaatgctctgcaggcaaggctccatgccagctccacgtttctgcaccccaggtttctgccagaccagatactcacctcatctgggcctgtcctctgcgcaaaagtaagagacacccgctctgaagagtgcaccccatgg

SEQ ID NO: 744766 - DNA, 546 bp, Homo sapiens
aataaactaccatagttaggaaagtatacctgttaattatgaattattgtattagagcaatatacattttaaagaccattgaaaacttcttcctttgattgatcatagaaaaacttttttgaaggaggaaggaggaggtacagattaatggcaaaagagaatcttaatccctaagaactttttctaattgatggacatcattttccaattgaacaaattggaatttattagtggtgactgtggctttgaatctgagctagtttattcttgcagtcacagagagtgtccttatagaaaatawaaagggaaaagctcagttctgttgaatataatcaatatacacaatcaattgataattcacaactacctcctttgccttcttgcacactcttcctgccactcagaaacatccatacttactcttcaggatgggttttttgagcctgaattatccagatggctgtttcaactttttcagccataccttaaagttgaaaaggatggccctaatttccacctctaattccacttccaatttctggtttg

SEQ ID NO: 744767 - DNA, 546 bp, Homo sapiens
aataaactaccatagttaggaaagtatacctgttaattatgaattattgtattagagcaatatacattttaaagaccattgaaaacttcttcctttgattgatcatagaaaaacttttttgaaggaggaaggaggaggtacagattaatggcaaaagagaatcttaatccctaagaactttttctaattgatggacatcattttccaattgaacaaattggaatttattagtggtgactgtggctttgaatctgagctagtttattcttgcagtcacagagagtgtccttatagaaaataaaaagggaaaagctcagttctgttgaatataatcaatatacacaatcaattgataattcacaactacctcctttgccttcttgcacrctcttcctgccactcagaaacatccatacttactcttcaggatgggttttttgagcctgaattatccagatggctgtttcaactttttcagccataccttaaagttgaaaaggatggccctaatttccacctctaattccacttccaatttctggtttg

SEQ ID NO: 744768 - DNA, 590 bp, Homo sapiens
ccctagctgtgtgactgtctaggatgaagtctgggctcaggttacagtgatgtggataaagtccgttctgcctgagcaccagtgatcatcacgtgcggcggcatattgtagagcccaggacagagtttgacttggagcctgctgagttttttgcagaagcatgtctacgtgcaggagaggacagctcagcgggtaacaccaggactctcttatttgtgttcctttcattgaaggtagttccttccccagaacatggcatagctgcttttgagaaccaatccttgtaagtgacttcctttaatttttttcaataagtagagtttaatctttgaatatgaatggaacacctgagaaaattctttggagtctgaraggaagtagggtatgttggtttctaatagttaggtaaataattagttacataaattgatttcttttccttacttttattcctcagcaggacaaaagtaatattttagacaaggcatggtggtacaggctgatcacacctgtaatcccagcattttgggaggccgaggaaggaggatgacttgagcctaggagtttgagaccagcctgggcaacatagg

SEQ ID NO: 744769 - DNA, 642 bp, Homo sapiens
gttcagaatcatagtatgagattttattgatgctcagaaagaaaattcttcctcatttgtgaggctagataactttttcagggcatttcacctagtccataatggttcaaaataaagtaatgatttaacctgtttgactttaggttttgtggttcaagaattaagttagttgaaagacataakaaagcctttctgttttccagaatgaggattatcgaaagtaattcctcgaagattcaatctcaaatagatcacatcaagcagtgtagggcagagtatgacacaaaagaagtaaaatattgtactttctccaaagatccttcaaaacctattccaggtattgtattttgtttaaaatatttgagagaaatcctgattatttccaatttttacctaaggcatgcattaatataaatgtgctgatgtatgtgcatcttgcacatgtgtgtgtgttgtacacataattttagtcaggactgtaggtagattcaagggaatggaaaaacgaactctaaaagattgagtttcagtcagctgggttatataaagtgtaatgcagtggctcctgaagtatggtttcctgtatcaacatcagcatcacctaaagacctcttagaaatgcaaattcctgattcccatcag

SEQ ID NO: 744770 - DNA, 634 bp, Homo sapiens
cactgacatgagatagtgatacctctgttttgtgatagatcaatatgtacacaaattttgtttcatgcacaaaattattagaaatattatataaaattgccttcaggctatgtgtatatggtatatatgaaatataaattttgtgtttagacttggatcccatccccaagatatctcattatgtacatgcatatattccaaaatatgaaaaaatctgaaatccaaaacacttctggtcccacgcatttaggataagggaaacccagcctgtatttttcttacatttcctagctatcaacctgatgttacaaaatgtttttgagaatgtcttcctgattcagattattctagccaattcagtcctttctttctcattacttctatcccctgacttrttaaggaggcatatttctccctaatacttaagttattatacatagtatataagattaaagagatttaagactatattcttttttactttgtttactttttatcaaacattactttcatcaaatatttcaagtatacataaaaatacagacaataacattaacaaaatgttattctgtgtaccaacttagcaagaaattaacattttgccgtatttacttcagctctttttgtagaagtt

SEQ ID NO: 744771 - DNA, 631 bp, Homo sapiens
ataactaataataaatttggcaagtacaaagagctgctgattgcaatatctgtcaaagggagaaactgaatatataagatataactcttcattatatgatttgagtttattttcctggaatatatccaatcacaaaagaatattgtttttctcagaaaaactgagccaagtagattcttctttataccatactggtaaaggagaaaaagcaatgctactaagttccaataagaaatttcccccatctctatgttagtctayctttataaccattcaggtggaaaaggctgataaggcaatgttgggcaattctttctaattacttcctttgaaatgtctactactaacaggactgatcaatattctcattatgcaaatgtttcttatctattgttcaactttcatatgaccactggatatcagagatgtatgagaaggtagtatataacagacactgggaagagttagtaaatttagaagacacggacccttgcctcaaagattttacaatgtatgattcattccagctaacaaatatacaaggaaaattgaacaggaaaaaaaacatgttttatggtatcctgaaaacaagatgggaaaatcacattactggtcccatagataaaattta

SEQ ID NO: 744772 - DNA, 631 bp, Homo sapiens
ataactaataataaatttggcaagtacaaagagctgctgattgcaatatctgtcaaagggagaaactgaatatataagatataactcttcattatatgatttgagtttattttcctggaatatatccaatcacaaaagaatattgtttttctcagaaaaactgagccaagtagattcttctttataccatactggtaaaggagaaaaagcaatgctactaagttccaataagaaatttcccccatctctatgttagtctacctttataaccattcaggtggaaaaggctgataaggcaatgttgggcaattctttctaattacttcctttgaaatgtctactactaacaggactgatcaatattctcattatgcaaatgtttcttatctattgttcaactttcatatgaccactggatatcagagatgtatgagaaggtagtakataacagacactgggaagagttagtaaatttagaagacacggacccttgcctcaaagattttacaatgtatgattcattccagctaacaaatatacaaggaaaattgaacaggaaaaaaaacatgttttatggtatcctgaaaacaagatgggaaaatcacattactggtcccatagataaaattta

SEQ ID NO: 744773 - DNA, 515 bp, Homo sapiens
ttaagattccattggacataataataaagatattcaggcctggcactgtggctcatgcctgtaatcccagcactttgggaggccgaggtggtcagatcgcttgagcacaggagttcaagaccagcctgagcaacaaggcaaaaccctgtctccacctaaaatataaaaattagccaggtgtggtggcacatgcctataattccagctactcggaaggctgaagcacgaaaatcacttgaacctsggagaaggaggctgcagtgagccaagactgtgccactgccctccaacgtgggtgacagagtgagactgtctcaaataaaaaagatattcaacattccagcaattcgtttccccaaataagtactccatatataatgtataatgccaatctaatggcataatagaaggtaagtcaaacttcaggatggctactgagtgatcatatggacaagaccagctgagtctagctacagaaaagttctgttatagctcatgtgcattcactcaacaaa

SEQ ID NO: 744774 - DNA, 652 bp, Homo sapiens
ggagattgctggttggttcacaggaacaagtagggttaatctaaaatgtaggtgaaaacttaaaaacaactaatgagtttagaatttaataacaaatgtatgataaattttgaaacctaatttttctgtcaccagtcrtcatttttgtttaaaaaacacaaaccatcataggactaagtggtttccaaaatggactttagtcttatacttggcctgattatttgcataaggtgcagcaagaatagttatttgtacatagtccttttggattggctttgatggaacactggtccacaaggaatctcaggtgagactttttaagctgagcccagccatgggtttgtatcctcaaatacctgtaagttgggtgattctctccttttaaggtcccaagataaacttggagctcctaggcctgttacaaagtgacattctttactgaccacaggccaggaaccctgtacagggactgtgtaggcaagggtatgaggccagttcttcctacagggcttttagcagctctgcaagtcaagattgacttcttaaagggaagcatacccttccagtcaaagccttggtaaaataaccagtttctccaattgcatactgttgaaaaaaaaatggatccttattgcactgatgcaaataactg

SEQ ID NO: 744775 - DNA, 652 bp, Homo sapiens
ggagattgctggttggttcacaggaacaagtagggttaatctaaaatgtaggtgaaaacttaaaaacaactaatgagtttagaatttaataacaaatgtatgataaattttgaaacctaatttttctgtcaccagtcatcatttttgtttaaaaaacacaaaccatcataggactaagtggtttccaaaatggactttagtcttatacttggcctgattatttgcrtaaggtgcagcaagaatagttatttgtacatagtccttttggattggctttgatggaacactggtccacaaggaatctcaggtgagactttttaagctgagcccagccatgggtttgtatcctcaaatacctgtaagttgggtgattctctccttttaaggtcccaagataaacttggagctcctaggcctgttacaaagtgacattctttactgaccacaggccaggaaccctgtacagggactgtgtaggcaagggtatgaggccagttcttcctacagggcttttagcagctctgcaagtcaagattgacttcttaaagggaagcatacccttccagtcaaagccttggtaaaataaccagtttctccaattgcatactgttgaaaaaaaaatggatccttattgcactgatgcaaataactg

SEQ ID NO: 744776 - DNA, 615 bp, Homo sapiens
gttaatctaaaatgtaggtgaaaacttaaaaacaactaatgagtttagaatttaataacaaatgtatgataaattttgaaacctaatttttctgtcaccagtcatcatttttgtttaaaaaacacaaaccatcataggactaagtggtttccaaaatggactttagtcttatacttggcctgattatttgcataaggtgcagcaagaatagttatttgtacatagtccttttggattggctttgatggaacactgrtccacaaggaatctcaggtgagactttttaagctgagcccagccatgggtttgtatcctcaaatacctgtaagttgggtgattctctccttttaaggtcccaagataaacttggagctcctaggcctgttacaaagtgacattctttactgaccacaggccaggaaccctgtacagggactgtgtaggcaagggtatgaggccagttcttcctacagggcttttagcagctctgcaagtcaagattgacttcttaaagggaagcatacccttccagtcaaagccttggtaaaataaccagtttctccaattgcatactgttgaaaaaaaaatggatccttattgcactgatgcaaataa

SEQ ID NO: 744777 - DNA, 649 bp, Homo sapiens
gtgataattctcagcacattcctaattactggaggacagacatttcatgaccaactttctagccagctaaaatacaacccctagctttgtccttgggaccataagattttggggctgagagctatggactagtctatagactcctataagccacctgtgttactgcagctgcttccacctggtctggagcggggcagtcccyctgtcggcttgattccccatcattccctgacccccagttgaagtcacatgtatgtgaccctcatgccacagtccccagggattggcaacatttttccttcaaaaatcagataaatatttggggctttgtggaccatacagtctctgtcacaactactcaactattacaactacacaacaactgcacaactgcacacagctgcacactactcggccgtctagcttaaaagcggatgtaaacaatggaagtaaattaatgggcgtggctgtgttccaataaaacttcatttgaaaagcaggcagcagtctggatttggtcttacacagtggccaggcccctcagctagtccgggcacttacaacactttcctctttctttgtccctgatacttatttccccagattgttctttacctttgctttatatgaagggtacttgtttatacgc

SEQ ID NO: 744778 - DNA, 563 bp, Homo sapiens
gagacttttcattttgttctgtactaagaaaaattcttctgccttgggatcctgttgatctgtgaccttatccccaaccctgtgctctctgaaacatgtgctgtgtccactcagggttaaatggattaagggtggtgcaagatgtgctttgttaaacagatgcttgaaggcagcatgctccttaagagtcatcaccactccctaatcttaagtacccagggacacaaacactgcggaaggccgcagggtcctctgcctaggaaaaccagagacctttgttcacytgtttatctgctgaccttccctccactattgtcctatgaccctgccaaatccccctctgcgagaaacacccaagaatgatcaataaaaaaaaaaaaaaaaaaaaagagtcatcaccaatccctaatctcaagtaatcagggacacaaacactgcggaaggccgcagggtcctctgcctaggaaaaccagagacctttgttcacttgtttatctgctgaccttccctccactattgtcccatgaccctgccaaatccccctctgtgagaaacacccaaga

SEQ ID NO: 744779 - DNA, 646 bp, Homo sapiens
aggtcttccccaatatttcaatggcgtgattgtttttttccctctcttccaatgataagcatcttgaagaacaatgcaaatatcctgttcctcattaaaatttctctctgagtttgctatccattgatgattctttaccatgatggttataaaataataatttcttatccaggactgcactgacatttaccagtagctccctggtattctactgtaagcaaaagacctccctttctcttgcctatttgtttatatattattgtaataaatgcatgaaatcctattttttaatggtttagaattactgcagcyaattatttggaagatcaatttgtcccacatttggctagtgggatgcccctttaagctggctcttgtgttgttggcacatattcccataagacttttcagcttctgactttctggtttaacaagttgtttcaggcttatcttgtacctgtcttagaatcaatcatttctccaaagagccctggttcctttcagtgggaaatggtatcagaaaccaaggaatgggtggaaaggtatgctcatccctactggtcctttcagtggacagagctaggaaatatatgggtgtatgtacacacacatacacatacatacaaatgtaaacatgcatatacaa

SEQ ID NO: 744780 - DNA, 651 bp, Homo sapiens
aaaaagcttctttaaagtaaagaacatggtttataaaaggggttcccaacccctgtctgtggcctgtcaggaacccggccacacagatgaaggtgtgcgacgggcgagtgagcattaccgcctgagctctgcctcctgtcagatcagcggcagcawtggattctcataggagtaccctactgtgaactgtgcatgccagatctaggttgcacacctgttaatctgaggtggaacagtttcatcccgaaaccatccacccctccccagtctgtggaaaaattgtcttccacaaaactggttcccagaggccaaaatggttggggactgctttttccccaccattcctcctagaacaaccctggaaaaataatacatgatcaaaaaacacacagttgattactaattggtaaataaagaaggcaagtcatagattgttttatctacccatattcttacagaaaattacatgaagagttaaaatgtctctaaaaatcctaagtttaccaaaatatggcaccatgggcctaatgccacaagcagaggtttccactggtgtaactcttaaccttagcaagcttgctagaaacatgaccctgcactcactctaaaggaaagtagatattaacaaggacataccctctgatgttgtaa

SEQ ID NO: 744781 - DNA, 644 bp, Homo sapiens
tgaagggaactttttgatgtgtttactgaccacacttactgctcactttttaaataacttgttcgtgtcctttactcaaaaggccattttttaaatcatcatagcacactataattaaatttaaaaacacagtttcttggaacagatcatttccctgtatattttaaagaaaggtactacaaaaaggtattaacactatcaggtagtaaatgtaacttggagaataagaagtacaaagaaaattcttccatccattttcttaaagtacagggcttttatttctgttctaagaagggagtggtagaaaaaaggagtgtttttcaaatgtttgtgctatttttgcttaggcttttttattctaattctaagcattgaaacagaatcagtttgttgtgtatgacttaagagattgtctggtaatatgtggttgaaaattagaraatggaccgctgcaaaaagatgagagcccagaatagaactgcagcacttccgtgactttacattgctctgacacctctgaaccaggtcaggcattccctagatgaccacagatgtttatgcagcaaagtctggaagtggaaatgcttgctcaaaacataagaacattttaatttctccttttgaagttatcacccgaatgtgta

SEQ ID NO: 744782 - DNA, 644 bp, Homo sapiens
tcaaaactaggagtaaaagtatagagcaagctttagtaaattcttggctgtttgatggccttttttattttttgaaagatgctaaaaaggaaatcttatattttcctgtgttaaactgtaggaacacaaatgacacaaagatgttacctttaactgaattcttgtagcttgtgaaattgttttgtgttcatttagttaactatattgcaatactgtaagaactcagccctaatataatcttgttgcttaagctgtgactgcctttgaaagatatttttgaaaggctttctagataattcccyatatttttatattaatctagctgagtgttaaccttctatctttttttatgtttttattaataggggtttttgttaaaaagggtgcttgattacgcaaaaacaacatgtgaaacaataagtaacaacatgaaggacaatgtgcaaacaaaagtatttgcattactcagattgattagcttcatatagtggttacaactaacaaagaaatgagctgaaaatttttatttttcatctgtagtgacctgtacttaaaattaatatgttacttcttatttttagccaaaaaggcttctggaatgttgtccttcttcagagggacagcagggaaaagccccgatctct

SEQ ID NO: 744783 - DNA, 644 bp, Homo sapiens
tcaaaactaggagtaaaagtatagagcaagctttagtaaattcttggctgtttgatggccttttttattttttgaaagatgctaaaaaggaaatcttatattttcctgtgttaaactgtaggaacacaaatgacacaaagatgttacctttaactgaattcttgtagcttgtgaaattgttttgtgttcatttagttaactatattgcaatactgtaagaactcagccctaatataatcttgttgcttaagctgtgactgcctttgaaagatatttttgaaaggctttctagataattccctatatttttatattaatctagctgagtgttaaccttctatctttttttatgtttttattaatargggtttttgttaaaaagggtgcttgattacgcaaaaacaacatgtgaaacaataagtaacaacatgaaggacaatgtgcaaacaaaagtatttgcattactcagattgattagcttcatatagtggttacaactaacaaagaaatgagctgaaaatttttatttttcatctgtagtgacctgtacttaaaattaatatgttacttcttatttttagccaaaaaggcttctggaatgttgtccttcttcagagggacagcagggaaaagccccgatctct

SEQ ID NO: 744784 - DNA, 612 bp, Homo sapiens
gatatttttacttttaatttgctaagtttttttgttacatcaaggaaaaaggaaaggacaaaatgaactgataattactcaaaaccttggctttactaatgatattaaaccttttagatgaagtagatggaggagatacrcaaaagaagcaactcataaatcctcatgtggaacttcgtaagtatgagatattatatcattggtttggggagagggactacagttgagccatctctattatttgagaattctagcttcatactaaataaatgtcccagttcttgaaatgaatattaagtctttatgctgacatgaggtatatttaatcaacagtttataaaatataaatttaatttataaagaaatttaatcaaaagtataatttatttgtaaattatgctcttatttctaatagttaaacatttacttattatgtaatctagagccacagaattttgacagttgcatttagaattgtgtatatgtgtgccagaaacgtattatccagaataatatgtacagtacattttaagatatttattaagaattactataaaagtacaatgatgttaatatggtaggtaacaagtgtaaaattagaactgagtcttt

SEQ ID NO: 744785 - DNA, 579 bp, Homo sapiens
aagatctaatatccacaatatataagaaacgtaattcaacaagtaaaaaacaaatgaccccattaaaaattgggcaaaagacatgaacagacacttctcaaaaaaagacctacaagtggccaacaaacatgaaaaaatgttccacatcaatgatcattagtgaaatgcaaatcaaaaccacaataagataccatctcacaccaatcagaatggctgttattaaaaagccaaaaaacgaatgctggtaaagctgcagagaaaagagaatgcttatacactgctgatgggaatgtaaattagttcagccactgtggaagacggtttgaagatttctcaaagagcttaaaacagaactgctaccatttgaytcaggaatcccactactgggtatatatccaaaggaaaataaatcattctatcaaaaggcacatgtactcgtatgttcattgtaacactttttataatagcaaatacagaatcaacctgggtgccaccaatggtgaaatggataaagaaaatgtggtacatatacaccatggaatactatgcagccataaaaaaagaacaaaattatgtcct

SEQ ID NO: 744786 - DNA, 497 bp, Homo sapiens
ttctgaaattgtgagaagtttccaaattttataagaatatcagcttaacaaaaattcttaaattatttctgtcacttttcctaatagtcaacataaaaaggcatatttctttccacatggattagtcgctctccataatttccaacagaattcttaagcctaggtcagggctgaggaaacaattgggaggccaaatctgcttcaccaccatttttttatagatcaagttttattgaagcacagccagttattcacttacatattaactatagctgctttcacaatacaagggcagagttgactagctgcaarggcacagatcatatggcccacaaagcctaaaatattcactatctgatcctttacagagataagaggtgtcatggcaataaacaaaagtgggttcatatctcaaatctcatatcacaatacattccaaatggataaaagactgaaatgtcaaaagtgaattaatgggcggggcacagtggttcaca

SEQ ID NO: 744787 - DNA, 593 bp, Homo sapiens
taaagtgactgcaaaatagcagataataagatatatatgatttataaaagaaaaaactcagaattatggtgaagggttacaaaaactgaagtgtaatagtgtaaataaaaaagatttacatttaataaaatacaaagtttcagttatatttaaattttaaaaaatcatataatcttattctttaaaaggtaaaatttttatgtatgactattggtgttttaacagctatgacggtgtttttgcscagcagcaattctcaatccaaatttagagctcagatatttgatttctgttagtgctatttgctaaaaggaagctgagatatttgggggttgtggattctgcatcccggtgaaaaataatagaggctaaaaataggcttagaacatctttatcccacaataaagcaaaacatagtttcaaggatgtaatgaattgctctaaaacaagcaaagaaacggtcttttcctcattagatttaattataatatgtgtttgaaaggttataaatattagatgatacattggttagtcctgctacataccaaacatttctgaagtctcgatgacttataataacattcaatcctcat

SEQ ID NO: 744788 - DNA, 611 bp, Homo sapiens
ttgtcttactgtcttacttcagaaagccaatcttcaagctctgagattcttttcttcacttggtctattctgctattaatacttgtgattgtattatgagattcttgtagagtgttttttagctctaacgggttggttaaactcttttctataatgactactttgtctgtcagctcctgaattgttttatcatgattttagctgccttgattgggttccaatgtactcttgtagctaagtgattttttgtctatccatattctgaattatattgctgtcatttcagccatctcagccaggttcagtactcttgctggagaggtgatgcagtcattcagaagaaagaagtaactctgcctttttgggttttcagagttcttgctcagattcttttgcayctttgtaggctgatctaccttcaatctttgagattgctaacctttgaattgggtttttttttttcttttatcctatttgatggccttgagggtttgattatagcataaggtggattcagctgactggtttcatttctggaagattttagggggccaacgctcagttttcatctcctgtactgtgtgctctaactctgcgagacttgtattggg

SEQ ID NO: 744789 - DNA, 592 bp, Homo sapiens
tcaagacccatcagtgtgctgtgttctggggacccatctcacatgcagagacacacacaggctcaaaataaagggatggaggaaaatctaccaagcaaatggaaaacaaaaaaaagcaggagttgcaatcctactctctgataaaacagactttaaaccaacaaagatcaaaagagacaaaaaggccattacataatggtaaagggatcaattcaacaagaagagctaactatcctaaatatatatacacccaatacaggagcacccagcttccaaagcaagtccttagagacctacaaagagacttagactcccacacaataataatgggagacattaacacaccactgtcaacattacacagatcaacgagacagaaagttaacaaggatatccaggacttgaactcagctctgcaccaagtggacctaatagacttctacagarctctccaccccaaatcaacagaatacacattcttctcagcaccacatcacacttgttccaaaattgaccacatagttggaaataaagcactcctcagcaaatgtaaaagaacagaaatcttaacaaactgtctctcagaccatag

SEQ ID NO: 744790 - DNA, 641 bp, Homo sapiens
cgtgggagcagggggtgggtggccaaggagaggagagcagagcaggtatccagtggcctctggagagtgggcgagggagctgacctggctatgggggcaggggtggggtggttgtctgcagtggttgggggtccagccaaagtcaaggacagggaattttgagggtctccattacatggtcaggttcaagtaggagtggggtgcatggtggggttctccgaagcagggcttctgccagcagygtgggagggacccttgggctagggagtagctgaagggatggcccctggaatcgggactgcaggggaagatgtaaagactgagtggtcggagtgtggagtgtgggcgcttaggtctaggggactggaaacagagaagcaggagtgagtggggtgctggaaggacaggcgactgaggagcccaggagggtggggtttggatggaaggagttgaggtggagcagccctgggtggtcatcaggtccagggaatgcgcctgggcagggctgtggtaggtctgcagtgcagtggacatggttcttgggggtgagggagatgcagaactcagaggccagtgtgtaggatgtccacccacgtggacacaccatcagaagaaagagatctggtctgggctggaaggga

SEQ ID NO: 744791 - DNA, 606 bp, Homo sapiens
gggacacagacagggctgcaagcttgacttaagcactgaccttaaatctgtggtgtgcgtctggcccacagtcttagacttctctaaaagccctggtgcctgcccaaccctagtaaactctctgagcagcacagcagggaccagcgagtctcctctgaaaggcaggcaggggacaagggcgwttgtgctagaggagcatggtgatgcacacctggtggatttggcagtacactggaccacacgaatgcagagatcctggttgtccatctctcgaacggctttctaagtgattctaggtaaattacagtctgcctgtgagtttattattatttgacttttaaataagggagtactagaacctatctctacgcttccgtctgaaagagcgctgtaaagcaatctcccgtcagttctgtgggagacctgggcagactggaatggcagagggtgtgcaattgccgggcggggcggtaggtgggtgtcttttgcatagatactcccagcgccgctgggggcccactaccttctgctccagacgggtactggcactgcactacaggctcgctcctccgcgggcacggcgcacagttcagcggtagtccctgc

SEQ ID NO: 744792 - DNA, 605 bp, Homo sapiens
gcgcactcattaaccatggtgtgggatccaatgactgctctaatttcctactttaaatgtttttctttccccccacttttcaaaaatgtctttttatgttgtacatttacatacgcatattcagccacttaacgctgataggctggtcgctgtcagacacaataaaaagagacagaaaccactgcgaattacagtagcattagtgttgaaaatggaaatttaatttccagaaatgaacctcagcaataaaagctccctttgttgctgctcagatcagaaatgaatcgggtctgaaaggaagctaacgtgcaattaaaaacatctcaaagaggtatttgttatgtgtgagaacagatgccttgtaatggtgtttgaaacacaggggccctcartaaatgtttctgatgagtatgaagataatagtaatgccttacatgtgtatagtcctttttggtttacaaagcacttttcgtttcaggtcttatttggattttcacagggagcctgggagaacctcaatgcaggtgtggaaactgaggctggaagagaggaagtcacacagtctccccaaggtgacctggaaaaactagaactagaatgaggcc

SEQ ID NO: 744793 - DNA, 600 bp, Homo sapiens
cctagtaaagacaccattttgcaaagcattttggaactctttatcttagagttgccttcagaaccaaggttagggtctgcagaccactcgggactaaatacttagtgttttacttcaatttttagccacgacacagaaggttgattagttatttttctcccttctagatttaactccaaataacttggggtatttaaaaaaattaaatctattcatttactccttcatccatagattcattttttcaataagtactcattgaatgcccctgcatgtcaggctctgtgttagaagttgaggattctgtgatgcataagacagatacagttcctgctctcttggagctgatataataagaaagacagaccaaaaccacccccgccacaacatctamcaaacaaattaataaaacacttcagagttgggataagaggtatgaaggcaacagataagggactgagctagagaaataacaagaagagaaatgtaggctgggttggaatgggaatggtgacatttaagcacaaattcaaccttaaaggaggtatctttgccaccactgggagtgtttacaggaataaactttaattttgaaggaca

SEQ ID NO: 744794 - DNA, 537 bp, Homo sapiens
aggaaccaatccaggaccaaacattgcatttcgttgtcatgttggtttagtctactttaacatgaaatagttcctcaatctgtctttgcctttcatgttgttggtatttttgaaaactgaagtccagttactttgcagaacatcccttatttgggtttgtctgacagttcctcaggattcaggttaggtatttttggctagaataccacagaagtgatgctgcaaccttctcgatgcatcatggcagaagctaccctattttgacttgttctgttactaatgatattagctttgataacttggttaaggtggtaaggtagtatcygtcagatttctctactataaagtccctattttaccctttgaaattaataagaatctgtgaggagaggctttgagatgatataaatatcatgtttctcatcaaaacttcacccactagttttagcatccattgataatccttgcctgaaacaataagatggtaattttctaattctgtctttccatgtatgagtttgccttgcaccatatgga

SEQ ID NO: 744795 - DNA, 580 bp, Homo sapiens
atataatttatctttctgacaatgctctctagcccccagtacaagcctttcttgacctttcattttctcagaacagtgaaattctaattttagctgtctgcttatatttaagagtggggtattaaaaagccaaattagcagctctgatcttgtgagtggagcctgttgactgctatcttccccattgggttatctggctatgctaccctccaatgtcaggatgtttgatcatttcttcttgggccagtaagtcttccagtcttctgcccaaggagatagaccgggctgccagggtccygggacccaggtggggccaaagagcagtgagtctcagcattccttctgtggactttcctttttttgttgtaattccttgccatcagtggtgcccgctgtccttcagtcagtccttagaagctccattaacttcctccagagaataaaccttaagtctagtggcaggattgtgggaggtcagttgcccagttgcacagaattggggaaggaagctaaggatcaaattgttattttttttaaaaaaacagctttattgagatataattgacataaaataaatatc

SEQ ID NO: 744796 - DNA, 570 bp, Homo sapiens
tgtatttctgagagataaggactttaaaacaagaaccgcaataccatgatcacacctaagaaaattaacagtagttctttaatctcatctaataccaaatccatgttctattttctccaatttgtctgaaaaatacctttatacatttggtttattccaattaaagcccaaacaagtgttactcacttttagtagtttgactttaaccccagggtaattaaactgtcattgtgtacacaggtaacgatgcatatgcacttctgaaaagaggtgtcaatggaatktggctcagctgatgtttactggatgggctctctcctccttccttccttagcccttctggtgggatcttgacatgttacagaggaaatgctaattgaagccccagccacaaccacttctgtgctctgcttctgcctgaaggcatgttccctttggtaaacttagaatagaaccttcaggatgcatgtggaaagagagtatgagtcagctccgtggacagcttagaatttcctgcccctttgctggaggctgtgtctgagaagtgctgggactgcccccgggctcctc

SEQ ID NO: 744797 - DNA, 640 bp, Homo sapiens
attttgatgccagtgcttgcttaatcttaccagaagaggggatcaaacggaggcatgagtcacatcatccttttgctgctttgaatgtcctctattttaagggattttgcagctcttccttcccttagttcactgtctgggctgtgagaggcactccttttgtgtatatccggtgataaaatgtaacactgatccatctccttgtgaattccttccttccttagcttagcgcttagcttagcacttcttgctttacargaaacattgcagtgagtattggctttattggtgctccccctgctggctgtttctatgtctttgtgcaaacagggtaacagcttcagcttcaagtcatagtgaatctctgatgagcacagaggcttagcctggcggaggccgagggcaagcctacatcattggggtgttaaagccgagctttcaattctggcccagcatgcagaacctatcttcactttcctcatctgctaaactgcccactttgtaggttcattgtagcgattagaaattatatagctcatctgacactcataggaaatgttctgaaatggtgagtaaacctgaccggagccctccagaaagtttgcagatactattatgtattattttttcttgagaaaat

SEQ ID NO: 744798 - DNA, 640 bp, Homo sapiens
attttgatgccagtgcttgcttaatcttaccagaagaggggatcaaacggaggcatgagtcacatcatccttttgctgctttgaatgtcctctattttaagggattttgcagctcttccttcccttagttcactgtctgggctgtgagaggcactccttttgtgtatatccggtgataaaatgtaacactgatccatctccttgtgaattccttccttccttagcttagcgcttagcttagcacttcttgctttacaggaaacattgcagtgagtattggctttattggtgctccccctgctggctgtttctatgtctttgtgcaaacagggtaacagcttcagcttcaagtcatagtgaatctctgatgagcacagaggcttagcctggcggaggccgagggcaagcctacatcattggggtgttaaagccgagctttcaattctggcccagcatgcagaacctatcttcactttcctcatctgctaaactgyccactttgtaggttcattgtagcgattagaaattatatagctcatctgacactcataggaaatgttctgaaatggtgagtaaacctgaccggagccctccagaaagtttgcagatactattatgtattattttttcttgagaaaat

SEQ ID NO: 744799 - DNA, 525 bp, Homo sapiens
gttcgttatgatggaagaaccttgctgcttcaacggagagagccatggggatttaaaatacacagagaaaggcctatctatcagtacattataatatcatttccttcaaagtattcaaaatttccttagtctgtctctagttctccaaagggtgtatgtaatattataatatgtataacmgagatgaaaattgttggccagtggagcagcaagcatatttcttggataatgtagtgctttatttgggaggacttgatatcctttggggaggctcattgattttatgagatcattagtttacttattattcaataaatttaactcctcgacactcaaacctgtagtaaaatatgttttgtgactgtgatgttctcttttcagaagtgaggctgggctggcaatagctggctggaacatggtctggggaggaaatgggtgaggtcaaaagtggtgagacaagttgctgaagaacaggaatctgctatgcgaaagaatcagagtgctcccttagggaccttaatttag

SEQ ID NO: 744800 - DNA, 560 bp, Homo sapiens
ggaagaaccttgctgcttcaacggagagagccatggggatttaaaatacacagagaaaggcctatctatcagtacattataatatcatttccttcaaagtattcaaaatttccttagtctgtctctagttctccaaagggtgtatgtaatattataatatgtataacagagatgaaaattgttggccagtggagcagcaagcatatttcttggataatgtagtgctttatttgggaggacttgatatcctttggggaggctcattgattttatgagatcattagtttacttattattcaataaatttaactcctckacactcaaacctgtagtaaaatatgttttgtgactgtgatgttctcttttcagaagtgaggctgggctggcaatagctggctggaacatggtctggggaggaaatgggtgaggtcaaaagtggtgagacaagttgctgaagaacaggaatctgctatgcgaaagaatcagagtgctcccttagggaccttaatttaggggtcttgaaatatatcacactctcccaaaactaattcatgcttcaa

SEQ ID NO: 744801 - DNA, 560 bp, Homo sapiens
ggaagaaccttgctgcttcaacggagagagccatggggatttaaaatacacagagaaaggcctatctatcagtacattataatatcatttccttcaaagtattcaaaatttccttagtctgtctctagttctccaaagggtgtatgtaatattataatatgtataacagagatgaaaattgttggccagtggagcagcaagcatatttcttggataatgtagtgctttatttgggaggacttgatatcctttggggaggctcattgattttatgagatcattagtttacttattattcaataaatttaactcctcgacactcaaacctgtagtaaaatatgttttgtgactgtgatgttctcttttcagaagtgaggctgggctggcaatagctggctggaacatggtctgggraggaaatgggtgaggtcaaaagtggtgagacaagttgctgaagaacaggaatctgctatgcgaaagaatcagagtgctcccttagggaccttaatttaggggtcttgaaatatatcacactctcccaaaactaattcatgcttcaa

SEQ ID NO: 744802 - DNA, 604 bp, Homo sapiens
gtaaggtgtgacatttgctgctttgataaaatctccagatgatggtacttacacaggtgcaataaagtccaagttgttaaccttatctcacttgcaaatctgcaatttcctttttcctcaccttctttttgagatgtgactaaagaagtgatggcaaggatgtgaaggattaggcaagagacatcctgggttgggagactgcattctatagtaaaaatcctttgtcctttatttcccaggttgaccatcagggtaatactactagctcattgctcagcttttcactttgctttgattggaagtcatcagtgacttagaaaaaaaagctttaaaaatgcaaaattattacttttcatcttagtaatagaagcagtagctttcttaatggtaatccactttttttccccctttggttttctttttagcaaagattggtcactgttgacttatctstcatttacttataataggtatcatgtatccccttgactcaccccaatttaagacactctctgataaaacttgtagtgctttgcaccttcaagttaattacccaagtatccctttctaccagatctcctaccctaagctcatcctatacagt

SEQ ID NO: 744803 - DNA, 557 bp, Homo sapiens
tatcttggagtctgtgatgtagcctagaaaacataccccggggtgaaggctgatggagcacagccatatgtgcaacaaggaaattctcacactgctgtattcacagataacatttggtggtcaacgctatgcttcctcatactkatttggtggtgaaagaaatactcaaaaaattatagccatagatgtaagtctttgggatttattttctgggtttcaaggataaatttctgcttttccaaactgaagttcatcagggagtagagaaaaaatgaattactctatttttttttgaaaaaggcatgtttttcatacgacaccaataatacaaataaaggccacttttatttgtatcagttattcaagtgacaccctcagcaatgtatttgatgtctgaataatctgaacccttcttttctgggcagaaacattttattccaaagacatctaaatatttgaaagaaataccaaacatttgccactgttcttaatgacaattaattttaaatagggcttctctagtacagtacaaataaagactaagaaaagaaacaagt

SEQ ID NO: 744804 - DNA, 557 bp, Homo sapiens
tatcttggagtctgtgatgtagcctagaaaacataccccggggtgaaggctgatggagcacagccatatgtgcaacaaggaaattctcacactgctgtattcacagataacatttggtggtcaacgctatgcttcctcatacttatttggtggtgaaagaaatactcaaaaaattatagccatagatgtaagtctttgggatttattttctgggtttcaaggataaatttctgcttttccaaaytgaagttcatcagggagtagagaaaaaatgaattactctatttttttttgaaaaaggcatgtttttcatacgacaccaataatacaaataaaggccacttttatttgtatcagttattcaagtgacaccctcagcaatgtatttgatgtctgaataatctgaacccttcttttctgggcagaaacattttattccaaagacatctaaatatttgaaagaaataccaaacatttgccactgttcttaatgacaattaattttaaatagggcttctctagtacagtacaaataaagactaagaaaagaaacaagt

SEQ ID NO: 744805 - DNA, 494 bp, Homo sapiens
ttctgcctaatgttcattaagtgggttttaagtagtgaaaaattgaagaaacaccaccattgatatgaaagtggtgactagttttgaaaaatttcaaaaaaattgtttataataaatgctttcaggcataaacatattaatagtataaatatgtacaaatatgtactcactagcaacaatgtaattaagtacagataatataatttatgatttaaaacatttaaaatttatttgttacattyattcccaatctttgagctttcaatctcatacagctttgatacattctgcaacttgcaaaaataattttcggttgtttcataaattgataatgtcttctatataagtattttctgctctttgtttaatctttctcttgaggcatctatttttatttgtcctattttctcatgaagaatgaaatgctttagtgatacggaatataggatttctagaaatcttggtaattactgaaatctttgcatcatatggag

SEQ ID NO: 744806 - DNA, 574 bp, Homo sapiens
ctaaaacaaagcagatttattctaaaatgagcaatatgcagatgagggaaatgacaggtttagagaatgcacttatttaatcatctcctgaaaaaaaaaaaaaaaaaggcaaagggatcactgcacattttttttttttttctgtttgagtctttggatagaatctcatagcttttgttaaagagtgtgatagtgttagaatcttatttttaaatcttccatagtgcagtcattaggagatttttgatgaggttttgatgagtctttctatgaagaaacagcttttcagctctrtaaaatgtatgctgaatgagctgaaccagtataactagatgccattgcttgcccagtctagattatcccttctacctcattgttttctctaatctggtacatcattcctgattagattgattatatcgggccaacttttatttaatcacccacagattcactaattatccattaagcaactgttcccatagaattcttggctttgtgggaaacacagacatagatttgtcatattccctgcagtggaagcatcgagtcactgcaggaaaacagaaatcac

SEQ ID NO: 744807 - DNA, 594 bp, Homo sapiens
attttttaaactgtaccatattcttatttttgtatactcttattcttctgtcattcttgttggaattgagtggtaacgattagtcaacacaaataatttcgttataatactccaattacattagactgaatttgtctttgtgatgaaagttgattagttgttatgatttacaccaatgaaagggactaataattcagttcacygataagactgggaagcaagacttacaaggcattttcaagtaaatttgattaaaacgtggggtttttcttctgctctttcttaaaatgaggacagtcccctttcactacattcctaaaattaaaagtttacgtgtgtgtagagattaaaagaatagcacaatggcttgttgtgtataaaaaatatcaaattttgtgtttttcaacataaataggagttgaacagtatagattgcattaaaatgtttgaatgttttaataatacaataaaatagataattagctattaacctattaaaataggtatgaactattagcataccttatgtaggtgaggattggtaggctatacttcaaaattggcaggaatgttttgcaattattcttctcaagg

SEQ ID NO: 744808 - DNA, 594 bp, Homo sapiens
attttttaaactgtaccatattcttatttttgtatactcttattcttctgtcattcttgttggaattgagtggtaacgattagtcaacacaaataatttcgttataatactccaattacattagactgaatttgtctttgtgatgaaagttgattagttgttatgatttacaccaatgaaagggactaataattcagttcactgataagactgggaagcaagacttacaaggcattttcaagtaaatttgattaaaacgtggggtttttcttctgctctttcttaaaatgaggacagtcccctttcactacattcctaaaattaaaagtttacgtgtgtgtagagattaaaagaatagcacaatggcttgttgtgtataaaaaatatcaarttttgtgtttttcaacataaataggagttgaacagtatagattgcattaaaatgtttgaatgttttaataatacaataaaatagataattagctattaacctattaaaataggtatgaactattagcataccttatgtaggtgaggattggtaggctatacttcaaaattggcaggaatgttttgcaattattcttctcaagg

SEQ ID NO: 744809 - DNA, 594 bp, Homo sapiens
attttttaaactgtaccatattcttatttttgtatactcttattcttctgtcattcttgttggaattgagtggtaacgattagtcaacacaaataatttcgttataatactccaattacattagactgaatttgtctttgtgatgaaagttgattagttgttatgatttacaccaatgaaagggactaataattcagttcactgataagactgggaagcaagacttacaaggcattttcaagtaaatttgattaaaacgtggggtttttcttctgctctttcttaaaatgaggacagtcccctttcactacattcctaaaattaaaagtttacgtgtgtgtagagattaaaagaatagcacaatggcttgttgtgtataaaaaatatcaaattttgtrtttttcaacataaataggagttgaacagtatagattgcattaaaatgtttgaatgttttaataatacaataaaatagataattagctattaacctattaaaataggtatgaactattagcataccttatgtaggtgaggattggtaggctatacttcaaaattggcaggaatgttttgcaattattcttctcaagg

SEQ ID NO: 744810 - DNA, 497 bp, Homo sapiens
cctccagccttgctgctgccttgcagtttgatctcagactgctgtgctagcaatcagcaagactccgtgggcgtaggaccctccgagccatgtgtgggatataatctcctggtgtgccgttttttaagcccgttgcaaaagtgcagtattaggatgggaagtgactggattttccaggtgccatctgtcacccctttctttgactaggaaagggaactccctgaccccttgcgctgccggagtgaggcaatgccttgccctgcttcagctcgtgcacggtgcgctgtacccagtgtcctacacccactgcctggcactccstagtgagatgaacctggtacctcagatggaaattcagaaatcacctgtcttctgcgtcgctcatgctgggagctgtagactggagctgttcctattcggccatcttggctccaccctgtggataagctttttgatgtgctgctggatgcggtttgccagtattttatggagggttt

SEQ ID NO: 744811 - DNA, 605 bp, Homo sapiens
gatgagaaggtttgctgggcaggcatatagaaggacgccatggcatgtgcagaagcacagaggcgtaggagaccgtggtgttcgggaaaataagtactgtaatttaatgatactgagcggaaaagcctggttgattgtagcctctggtcttcaagcgccttgaatgccaagcaaatgactttataactagataaaagagagccactggagaaatttgagctgaggcaagaatctgcctctcccttaactacctcagtggcttgtkttctacatttgattcagaacaccactcctgaagttgtctttgggcattgctttgataacgtgtctaccagttagaccctaaatactcagacaactggtttcatatgcatgatatgcatttaggtaaaataattccgactctattgacagaaacgcatgtgtgtatatcagggtttcacaaactttttctttaaagggccagatagtaaataatttaggctttgtaggtgatatcatctctcacatttattcagctgtgctttgtagccatggacatataacaaacccgtttatgttacaataaaactttttatggccactgaaatttcaatttcatatag

SEQ ID NO: 744812 - DNA, 469 bp, Homo sapiens
atgatatcacaaatgtgcaaagacattagagcattcccttcccggaaacatccaagggtttagcatcctcttattaaataagacatatgacaacaataagcatttcttctgcaatcgcactcccaaagaatgatcatacacatatcagtcatgctaacagcagcggagatcaatgaccagtgtattttcatggtctcctaaaggggaaaaaaataatctgtgctcccatcttcygaagttgttgttggacattaaatggcggctccacagtgccacggaactgtacatcttaggaaaccagaattcgaaattactggcatgcaccttggagagggggcactggataaactctcctgtgagaacttgtggggttttttttggtttgtttttttgagacaggttctcactctgttgcccaggctggagtgcagtagtgcaatcttaactcactgcagcctcaacctccagg

SEQ ID NO: 744813 - DNA, 639 bp, Homo sapiens
atatttttaccaaccaggcctgaagcagtgaactcaaaaatctcaattttttaattaaatggcctccccaacaccctcaacctcccaccccactcctttttagtgggaggggctgtcttttagtgaaggattcttgcttttcttttccatatttcatgagtctacagaactcacagactggatgccttttattttaaaaactttactgaatccatcagctttcagaagagacaatttctttccaaaccattctgaagatataaaattayaccttaatgaaaatgactgtgacctcacaaggaggttgtcaagtcacccacgtttccttacaactccaagaaggattaacagaaataaacccaaatgctttgaatgcttacaactttactggtgaattaattatatgtcattcagggacattcaaagcaacataaactatgtaaaccactttcctaaccggtcaaaacacacattttaaatacatgctggtcgcgggagatgaaaactgagaaagtttcatgactgtgacctcaactaacatctgtaaactacatctttttcctccctagagaatgaaagctgatctatttactcctggcagagaagaaaggaggaaggacgtccaggtgctaccagaaa

SEQ ID NO: 744814 - DNA, 566 bp, Homo sapiens
tcctagccagggcaatcaggtaagagaaagaaataaaaggcatccaggccaggcacagtggctcacacttgtaatcccagcattttgggaagccagggcaggcaaatcacttggggcccaggagtttagacaagcctggctgtactggtcaaactccatctytaataaaaatacaaaaagttagctggatgtggtggcatgtgcctgtagtcccagctacttgggaggttgagacaggcgaatcgcttgaagctggaggctgaggttgcggtgagccaagatcacaccactgcactccagtttgggcaacagagcgagactctgtctcaaaaaatcaataaataccacccaaattggaaaaaggggaagtcaaattgtttctctttgtagacaacatgatcttatatattaaaaaatctaaagattccatcagaaaactattggaactgttcaacaaaccaacacacaaaagtcagtagcatttctacacatcagtgatgaaccagctgagaaagaaatcaagaagacaatcccatttacgatagctccaaaaaattaaaaaaata

SEQ ID NO: 744815 - DNA, 566 bp, Homo sapiens
tcctagccagggcaatcaggtaagagaaagaaataaaaggcatccaggccaggcacagtggctcacacttgtaatcccagcattttgggaagccagggcaggcaaatcacttggggcccaggagtttagacaagcctggctgtactggtcaaactccatctctaataaaaatacaaaaagttagctggatgtggtggcatgtgcctgtagtcccagctacttgggaggttgagacaggcgaatcgcttgaagctggaggctgaggttgcggtgagccaagaycacaccactgcactccagtttgggcaacagagcgagactctgtctcaaaaaatcaataaataccacccaaattggaaaaaggggaagtcaaattgtttctctttgtagacaacatgatcttatatattaaaaaatctaaagattccatcagaaaactattggaactgttcaacaaaccaacacacaaaagtcagtagcatttctacacatcagtgatgaaccagctgagaaagaaatcaagaagacaatcccatttacgatagctccaaaaaattaaaaaaata

SEQ ID NO: 744816 - DNA, 624 bp, Homo sapiens
acatgttgggtaagagtggacacagagagaccagttacatgactgtcctgccctggtgtccaagtgcaaggcatgaggccttgggtggaggaagacagagaagcctacagtgggcattgggcaatgaattaggcactactgatgatggcaagagatgctacttgatagcttaatgctaatccttcttaatgaagcctgaattccrtagcacaaggagttaaatctgctcttctgtgctgccagcaatgctctaataacaccttcttggaacattattctatgagtctgctagagctgccataacaatcagtggactgcagcctgggtggcataaacaatagcaactcatttctcaaagttctggaggccaaaagtccaaggtcaaggtgtcagcagggtttttgggttgggttgggtttttctccagagccttctctcttgggtttgcagatgactgctttctccctgtgtcctcatatggttttttctcggcatatgtatgtatgtgtgtccatcccttatctccttttcttctaaggatacccatcatattggattagggcccaccctaatgacctcattttaacttacttctttaaggaccttatttgcaaatactatcac

SEQ ID NO: 744817 - DNA, 624 bp, Homo sapiens
acatgttgggtaagagtggacacagagagaccagttacatgactgtcctgccctggtgtccaagtgcaaggcatgaggccttgggtggaggaagacagagaagcctacagtgggcattgggcaatgaattaggcactactgatgatggcaagagatgctacttgatagcttaatgctaatccttcttaatgaagcctgaattccatagcacaaggagttaaatctgctcttctgtgctgccagmaatgctctaataacaccttcttggaacattattctatgagtctgctagagctgccataacaatcagtggactgcagcctgggtggcataaacaatagcaactcatttctcaaagttctggaggccaaaagtccaaggtcaaggtgtcagcagggtttttgggttgggttgggtttttctccagagccttctctcttgggtttgcagatgactgctttctccctgtgtcctcatatggttttttctcggcatatgtatgtatgtgtgtccatcccttatctccttttcttctaaggatacccatcatattggattagggcccaccctaatgacctcattttaacttacttctttaaggaccttatttgcaaatactatcac

SEQ ID NO: 744818 - DNA, 640 bp, Homo sapiens
ccaagtgctgcaaagaaatgaaacttagccagctttccacccaccaggaatgcatattagcatgaaagttaacttgtcctcacttcagtgacaaccagggagcactatggtagctctgcagggctgtcaggccagaaacaaccttcagaatcatcatattattaggatgtggtgctttattccaaataaaggagtaaatgtcactgtgtctcatccttcagaaaagacaattagatggaaatactcaactsattctcagttaagcagaattatcaacaagccagaatgtcacaataagaaagcaggcagtagacaggatggagagttctcctaaatgctctgccctctgttagtccttagattccccatgactcaattcaagcttgagggtcttaggggtgcaacacagattgggagctgtacagagctcagaaccacaggcaagaaagaaggaagacttcagagctggagtctaaaagagaggattctgccattcaattccgcttatcaaatgtctggtattatgtcccccaagccagaccccagaccaggagcaccagagtggggacagagtgaagtgaccccagtccctgagcttcaggtggaggacaggcaagtatgtgactaattgtgagatgca

SEQ ID NO: 744819 - DNA, 513 bp, Homo sapiens
aggaaacagaaccaggatctatcgggtggaacagatcccagtccagtataagattgttcttgcaattggaactcctcagcggacgggctgtcttggaaggtaatgagatcctcatccctggaagtgtttaggcagaggccagatgccatgggtcagggatttcctcactagttgagaagctggacaagatgacgmtaaggtacgactatcaggttctattctatgaaggcgtcaaagcttatcctcagggatccatttctagtggtgagctttcagacaatgagtgggctgatatttctcagcaagtcacctccaggaaacactgaaagcctacatgtaggtgacagaggctcaacctacaccccatgtccccaacctcattaagcacagcctcaacaacaacatgcttttctgcaggaagatgtaggtggaagcgtacagggagccttttcccagcttgaagcaccactggggcaaaggagctgttcatcttccaccagggtctgagtggaa

SEQ ID NO: 744820 - DNA, 513 bp, Homo sapiens
aggaaacagaaccaggatctatcgggtggaacagatcccagtccagtataagattgttcttgcaattggaactcctcagcggacgggctgtcttggaaggtaatgagatcctcatccctggaagtgtttaggcagaggccagatgccatgggtcagggatttcctcactagttgagaagctggacaagatgacgctaaggtacgactatcaggttctattctatgaaggcgtcaaagcttatcctcagggatccatttytagtggtgagctttcagacaatgagtgggctgatatttctcagcaagtcacctccaggaaacactgaaagcctacatgtaggtgacagaggctcaacctacaccccatgtccccaacctcattaagcacagcctcaacaacaacatgcttttctgcaggaagatgtaggtggaagcgtacagggagccttttcccagcttgaagcaccactggggcaaaggagctgttcatcttccaccagggtctgagtggaa

SEQ ID NO: 744821 - DNA, 597 bp, Homo sapiens
agcggtggggaggtgaagggatcccaaaaagccctcgtgtgcgggagcttcaccagggtggaagagggtgaggccagtttgtcacctttctctgataagaaagctgtctctcgggaggggacctcacaaacaattctgatttacttgatgcttaaatcatgagtcttaaatgtctgcctcatgggcttctcgtgcgaaccggggagctgtttttaaagccagtggagtggaatgtcctttcactaagccgttctgcaaaggtccagtgtggttctctaaggacttcgctgccgtcgagacgcgcagcggwtgccgctgcttgccgcggcggaggaagctacgccgctgcgccttcggttcaccttgcccccattaaagcgttagttagacagctccaaacgccagctggccggagagacttcctgggagaaagtgctgtcgtcggggtcacagactcggagttgatccgcgagccttgggcaccggcggccagagcagaggggtgcccttccgagagcagccgtcggtgccgagaagctgttgccccagcagccccaccgagtgacgcgcgggttttggccgggtcagcgcgcatac

SEQ ID NO: 744822 - DNA, 393 bp, Homo sapiens
aaacacctaaaacaaaacagcacaataaagttgaaataaagagatggaaaaaggccatacaaatgctacaaaaaggaaagcatgaatagcaatgttgatatctaacaaaacggaattaaaggcaaaaataattttaaaggatatgtcataaaaaggaagagttcaccaaaaaagtccagcagtcacaaactttatgtccctaacaacataactgggaactacatagagcaaagcraatagaaatacaatgaaaaaaattgacaaagccataatcatagttgctgacttagaaatcaccaagtcaagtggaaggtaagaacagatgtagaggatttgggtggcgtaattaacaggtttgatagaacttttttgtttcttttcaaatgcaaatga

SEQ ID NO: 744823 - DNA, 644 bp, Homo sapiens
tgatatctcactgtagctttaatttgcttttctctgataactagtgatgttgagcatttttgcatatatttttgggcatttgtatgtcctcttttgagaaatatatattcagatcttctgcccatatttttattggattatttgatcttttcctattgagttgagtttcttatatattctgtttattaatcccttgtcagatgggtagttcacaaatattttctcccattctgtgggttgtctcttcactttgttgtttcctttggtgtgaagatttttagcttgatgtgatcccatttgtccacttttgctttagttacctgtgcttctgaggttttactcaaaaaatttttgcccagaccaatgtcctggagtgttttgctaatatttttttctagtagtttcatagtttctggtcttagatttaagtttttaatccattttgattmgatttttgtatatggtgagagataggggcctagtttcattcttaatatggatatctagttttcccagcaccacttattgaaaagaccatccttcccccaatgtatgttcttggcacctttgttgaaaatgagttgactgtaaatgcgtgaatttatttctgggttctgtatactgttccactggtctatgtgtct

SEQ ID NO: 744824 - DNA, 589 bp, Homo sapiens
tgaatgttgcagaaaatttagggaaaagaatacaaaacattcagcaaaactactaactttttttttaagatgaaatttaaaagttgaataaatggtcaataaaagaggatatttgaacttttatcaatttattttctctgcgttatatttcccattctaagaataatcagaagacagggcgctgtggctcacgcctgtaatcccagcactttgggaggccaaggcaggtggattgcttgaggtcaggagttcaagaccakcctgaccaacatagtgaaaacctgtctctactaaaaatacaaaaaattagctgggcgtggtggtgggcacctgttgtcccagctactcaggaggctgaggcaggagaattgcttgagcccaggaggcagaggttccagtgagctgagattgtgccattgcactccagcctaggtgacagagcaagactctgtctcaaaacaaaacaaaacaaaacaaaaaaaatcagaagttaattgtaaatggaagcaatgcggtatgctatattgtttataaaaatgaaagatgactgaaaatttctgttatgattgttaaaaacatatgttttgag

SEQ ID NO: 744825 - DNA, 616 bp, Homo sapiens
caatgtaaagcatctgaatatacaagttatcagtatccctgaaaacagcaaattaaaggattagacaatatgaaatagatgaaaacttacatttggtcagagaattagacattcatatacagaaggttcaacaatccccaggtagatacaatgcaagaaggtcttctctatggtatgttataatcagaatccctaaagtcaaagayaaaatgtgagtcctaaaaacaacatgaaaaaggtgcctagtcacctataaaggaaacctcatcagactaaccacagatttctcagcagaaatcttacaggccagaagagaatgggatgatatattcaaagaactgaaggaaaacagctatcaaccaaggatactatctccagcaaaattatccttcataaatgaaggagaaatagtcttccagacaagaaaatgctaaggaaatttgttaccaatagactgaccctgcaagaactgcttaaggagtcctacactggaagtgaaaggagacatctaccatcatgaaaacacatgaaagcataaaactcgctgatgaaacaatcacacaaagaaggatgagaaagcctcaaacagtaccagtactaaaatccaccagaccgc

SEQ ID NO: 744826 - DNA, 596 bp, Homo sapiens
tgtatctttctagttataattttcaggcacatgagatctcttcctagtataccttctccagctctcctttccttctttgcctaacttggaaatcctttctattgtgcctttcatgagtcactgggagaagctctagcacaaactgcttgccacctgtttcttcaagagtatcttaaagatattctcactctattttcttatgccatcactaggtagtgtttgaaggagaattttcacrtaatcctgtcatacctcatcttagtgatgaagacttggagagaattctgctaagatccagtactaagaagctaagattctccaggctaccaatgtcactgctcatcttcccatatccatccttgcctcaccctgtgtggatgtgatacttcccacagccttacaaccacagtttgcacagccctccagcataatcttggttctcccttccttgctcacctctcaagtctgcattttgtgggtaaacatcccagatgacttcactcaacactccttcctgggtgttacctgcttctactgggttcactccaaccctcggagagagacccagccagaaatccagctgtaacataatggtt

SEQ ID NO: 744827 - DNA, 594 bp, Homo sapiens
atatatgtattatataatcatataatttctatatttatagttagcaatataattgctaaattgtatttctaaaatattatttctaaaagtgacaaggaggataagaacaagagaaacggaaaaaaaggtggaaactcatggagaattagggcttgtttttgccagagatgcctccccctgtttgctcgtactsaacgtgtttcatgtgtataaggagtgacgcatttacatgtgcatctctaggtgtctgcagggcaaagatgagggaaatggttcccattttcagagggccacctttgacactgcaatgtggcctgtcttctctgaaatctgtcctgcattacagcattttcaggatgcaaaataggaaaggccctccttccttaggaataaacccagatggagagcaaaagtccggagatatatctctctcctacaattatttcacagaataaaaaagtggcagggttcatcttcattattttattttgtatagtgcctttcacatgaatgcaattggataatttgatgataagttatgatgatgaccaactaaaagtgaagtattgttcatgaaatttcatgaataataaa

SEQ ID NO: 744828 - DNA, 594 bp, Homo sapiens
atatatgtattatataatcatataatttctatatttatagttagcaatataattgctaaattgtatttctaaaatattatttctaaaagtgacaaggaggataagaacaagagaaacggaaaaaaaggtggaaactcatggagaattagggcttgtttttgccagagatgcctccccctgtttgctcgtactgaacgtgtttcatgtgtataaggagtgacgcatttacatgtgcatctctaggtgtctgcagggcaaagatgagggaaatggttcccattttcagagggccacctttgayactgcaatgtggcctgtcttctctgaaatctgtcctgcattacagcattttcaggatgcaaaataggaaaggccctccttccttaggaataaacccagatggagagcaaaagtccggagatatatctctctcctacaattatttcacagaataaaaaagtggcagggttcatcttcattattttattttgtatagtgcctttcacatgaatgcaattggataatttgatgataagttatgatgatgaccaactaaaagtgaagtattgttcatgaaatttcatgaataataaa

SEQ ID NO: 744829 - DNA, 636 bp, Homo sapiens
gcaataatgaatagaatgacaattaccagaggcttggaagtgggggtggggaaagtgggaatggttaatggatactgaaatgtagtaagatagggtgaataaattctagtatatgaaagcacaacatggtgactatggtcctacaacattcttgattactgaaattccaatattgtgtcatatttattggttttcatgatgttcacagaactttcacatttacgatctcaagttttccgagttccccaaaggtaatcatgggcaattatttcctattttacaaatgtagaaattaagcgtattacatacttggctaaatgttcacaagtaaaatgatagccattgagccaaagctaaaatgtgaacttccgattcacaaagaagtcttatgttaaattccagattcctaaatttattcacacaaataatcttcagcagtggcggaagaattggaacaaaacttagaastttttattttaggccactgttagttccccctgcttcatttctctttcattggccactatgaggctttctttggtttcaggacccttgatccatgcctccatgtaattgccatcattttagtgccccccttatgagtacatagtatgagcaactcctctcctccaaatg

SEQ ID NO: 744830 - DNA, 513 bp, Homo sapiens
ggtgagttgtgagcgctgtaatgcagaaaatacaggtgctctagagggcaaaggaatgatgtcaaatccagaggagagaagtcaaggatagcttcttggaagagggagatccaagctgagactcaccagatgggtgggaattagcaagtgaggactgtgaactccatgacagcaggaccctcgtctgtcttcacacgaatgtayccccaggattcagaacagtaactggcacttaggaggtgctgcataaatgcttattaaatgaatgagtggataaatcgattgtaatggcaatcaatgagtggataaatcagagcagataaatcaacacaggtataagggaaagcacatggaggtgagaatgcagagcatgttggaggaccaaagttcagtatggctacaaaggcgagcacgtatgtgagtaggggaaggacagatgaaagatgagtctggaaggctggacaggggacacctgaggccaggttagagggtttgaattatattctatgagca

SEQ ID NO: 744831 - DNA, 605 bp, Homo sapiens
gggcccaagtagaagttataataaggatccatatacatactgcaggttatgaaaattactgcagcattaaaagtgatagtagaataatgtcatctagtgtatatgaaatcctggacaatataagatgggttgcttaaggataaaggctaatactgcttagaaacaccagggaaataagaactgtatgtaagaggaaaaatattcacttggtatttctggatcacctctctgctctttgcaggagagtaaacagcatttccggatggcatctcagcagttctttacattgagagaacttctttctttcttaagccaggctctgctgtttgagctgaaaagttcgggaagacattattccacattatttcttcactccccgttctatttctaaaatctcacaatggataacagagagggctctcttctattgtggagaagactgagaacyaagggaagcatttgaaaaggggcagttttggaaaactgcacaccaacggtcttttctaagaatccagacacaagacctatgcagctggaatatattttaaagtgtctcctccaaattctcaattttaaaaatgaggaaaagaagactcagggcagtg

SEQ ID NO: 744832 - DNA, 659 bp, Homo sapiens
ctgtgaaaccaaatatttgcagaatctaagcacttatgtaaaaaatctacatttgtagctgtgtgcccttaaataaataaactagttgatcactgcaaattaaaagaacttaaatggtaaaaactgccatttctttaaaaacgatgacagtgaagaaaaagcttttgcaaataaaattgggtggagaatctaataaacagggagctatgscatcccaaaggagaaaaaagcaaaaagaaatttcagaaaagataacaaattagtttagcaaagtcacaaaaagagagggcagacaaaaataaaggcataggatgcagcgtccagggaaagaggaaggggcgagtggaaacagctggaattgttcagctgtgtcaacattcggctgtttcacagattgactagcaaagtgtcatctgaaaccaattacattcccaaaaccccacggacccagttcataacattgattaatccacattgtgaaaaagtccccaagcaaaactagaacagctgtcagcccttggagctcaaaaaacagcaattgcttgaggaaaaaaaaaaggaaagaaaaaagaaaagaaaagaaaagaaaatctcctcttgaaattttagggattttcaggaggtatgtctactgaaaccgaagatagatttaaaacgaa

SEQ ID NO: 744833 - DNA, 582 bp, Homo sapiens
cataaaaatgtagttatatgttatacgttttctattaaaagctgtttttataccgtttgttctatttcacagaggtagaagaatacataaagtcctcgatttgcaagcatccaacttgtgcatgactcaaatacaaaaatggcgaccacacctctctgatgtgcaaaactactggtataggagcctgtaaaggttttcacacacacccgtatgcccccatgggatcctagatacctsgtaccttctagcaaagccactcatccgaagatgactcactcatggcaaatgccttggccttgactctgaagctactgcagctagaaatccaccaccaggtatggtagaagagaccccaacaccatataagcagccacgaacatctccttaagaagtctcaatttctgtagaccctggcctaaactcaccactgtgaggatgcagaagttgtaggcatctgatcctttggacagattttttccacggaaataaaatacatgcttattcatctgctcattcattcagcaaacatttattgaatgtctattctatctcaaacactgggttgtacccaaaaaagcaatg

SEQ ID NO: 744834 - DNA, 580 bp, Homo sapiens
caaaatgagggagtagggattaggtcattatcacaatcatgtcattcttagcattcttgttcttagacagtacttatctttttttgacaaataattctagttagcaacctgattttagtattccattcccctttacagagagaaatcctattttattttttgctgacaataaaccacaaggtaaaaaaaaaaaaaaaaagaatactacatattagcagctttattcttgttcarggtggtccgtaaaatataagcagtagtcattgagaacatttattaagaaagctctttaaagattatttatatgcaagtttttgttaatacagagctaaaaggctagtcaaaaatttcaggagcattggccgggcgcggtggctcaagcctgtaatcccagcactttgggaggcctaggtgggtggatcatgagatcgggagattgagaccatcctggctaacacagtgaaaccccgtctctactaaaaatacaaaaaattagccgggcatggtggcaggtgcctgtaatcccacctactctggaggctgaggcaggagaatggtgtgaaccctggaggtggagctt

SEQ ID NO: 744835 - DNA, 522 bp, Homo sapiens
aaaggaattcagaattttatcagataaatttaacaaagaaattgaaataataaaaaagaagcagaaattctgcagctgaaaaaatgcacttgcattactgaagaatgcatcagagtcttttaatagcagaagtgatcaagcagaagagaattagcaaactttaaggcaggctatttgaaaatacattgcragaagagacaaaagaaaaaaatttaaaaaatgaagcacacctacaggatctaaaataaaaaaaaaaaaaagcctcaaaagggcaaatctaagcattattggccctaaagaggaggtagtgaaagagatagggataaaaaggttattcaaagcaataataatagagaacttctcaaacctacagaaagatatcactatccaaacacatgaaggttatagaataccaagcagatttaacccaaagaagactacctccaggcatttaataatcaaatccccaaacatcaaggatcaagaaaggatcctaaaagcagcaaaagaaaagaaataaat

SEQ ID NO: 744836 - DNA, 522 bp, Homo sapiens
aaaggaattcagaattttatcagataaatttaacaaagaaattgaaataataaaaaagaagcagaaattctgcagctgaaaaaatgcacttgcattactgaagaatgcatcagagtcttttaatagcagaagtgatcaagcagaagagaattagcaaactttaaggcaggctatttgaaaatacattgcaagaagagacaaaagaaaaaaatttaaaaaatgaagcacacctacaggatctaaaataaaaaaaaaaaaaagcctcaaaaggrcaaatctaagcattattggccctaaagaggaggtagtgaaagagatagggataaaaaggttattcaaagcaataataatagagaacttctcaaacctacagaaagatatcactatccaaacacatgaaggttatagaataccaagcagatttaacccaaagaagactacctccaggcatttaataatcaaatccccaaacatcaaggatcaagaaaggatcctaaaagcagcaaaagaaaagaaataaat

SEQ ID NO: 744837 - DNA, 500 bp, Homo sapiens
tagaatagtatatccagtgaaaatatctttcaaacaaggagaaataaagactttcctagacaatcaaaagctgagggatttcatcaacaccagacctctcctgcaaaaaatgctgaagggagtacttcagtcataaagaaagggatatcagtgagcaataggtaatcacctaaaagtataaaagtcattggtaatagtaagtacacagaaaaaaacacaggatattacaacactgtgagtgtagtatgtawattactcttatccctagcagaatgactaaaggatgaacgagtaacaacaaaacaacaaaaagaactacaacaacttttcgagacatagacagtacaataacgtataaatagaaacaaaaaagttaaagagcagggggacaaagttaagatgtagagtatttgtcagttttctttttgcttatttgcttgtttatttgtttaagcaaacagttttaagttgttattagcttaaaataatgggttataaga

SEQ ID NO: 744838 - DNA, 500 bp, Homo sapiens
tagaatagtatatccagtgaaaatatctttcaaacaaggagaaataaagactttcctagacaatcaaaagctgagggatttcatcaacaccagacctctcctgcaaaaaatgctgaagggagtacttcagtcataaagaaagggatatcagtgagcaataggtaatcacctaaaagtataaaagtcattggtaatagtaagtacacagaaaaaaacacaggatattacaacactgtgagtgtagtatgtatattactcttatccctagcagaatgactaaaggatgaacsagtaacaacaaaacaacaaaaagaactacaacaacttttcgagacatagacagtacaataacgtataaatagaaacaaaaaagttaaagagcagggggacaaagttaagatgtagagtatttgtcagttttctttttgcttatttgcttgtttatttgtttaagcaaacagttttaagttgttattagcttaaaataatgggttataaga

SEQ ID NO: 744839 - DNA, 513 bp, Homo sapiens
ccactctttcaagcttcaggtgaatttggacccaggatcccggaacttagccatgcactggccctttgggcagcagcaatgagctgccgtgggggttagttcacctctgtcctgtgggcacctgctctctaatagctgggtgttgggctttctagacacctgttattccaggaatcagctgtcttcctagcaagcctcctgccacacatctttgctgagcccctgatctatcaggaaacaartgtcctggccttcccagcgagggtcactgggaaaggggcacagcactttctgttttatggctgccttaaggtgtcctctcactctcaagaaaatctggggcaaccctgagggtacctgctgtgtcccccacatggccgtcctatgacccttgtcatagtgctgtcccacggaaggtggggagtcctagcctcctgcgcacaggtcagcctgtgggagccacttaggaaacagcatctgtaattgtcttcctcatggcaaggctttcactgg

SEQ ID NO: 744840 - DNA, 541 bp, Homo sapiens
acctgaggagagatgaccaggaaaatccagagagaaggcatttgctgggctgaggggaataaactgcctgtggaaaggtggattggtccttggatctcttcacctgggggctgtcaagttgggacagagccaagataagagccctttttcaaatgtgttctttcatcttttaatggagttggtttctttggcaggctagcaaatcctgcagggcccctgtgcagccactctggagggtcagggagacactctgtggttggcacctgcgaaggagcaggggtgagaaatgaggagaaatgtctgtctgtgccgaacccccagtggagagcgtgtgggctcrgaattagggtaaatgaaggcacgggcgcactgcagacccctgatgggagaggcagtgggcgatgcttccatggtgaaatggaatactgggagccaggtgccctggcgcctcatggcaacgcctccttactctaggtcggcctccctggcattcctctttgagctgatgagggaccagaccagtcccaggttagcacctgga

SEQ ID NO: 744841 - DNA, 541 bp, Homo sapiens
acctgaggagagatgaccaggaaaatccagagagaaggcatttgctgggctgaggggaataaactgcctgtggaaaggtggattggtccttggatctcttcacctgggggctgtcaagttgggacagagccaagataagagccctttttcaaatgtgttctttcatcttttaatggagttggtttctttggcaggctagcaaatcctgcagggcccctgtgcagccactctggagggtcagggagacactctgtggttggcacctgcgaaggagcaggggtgagaaatgaggagaaatgtctgtctgtgccgaacccccagtggagagcgtgtgggctcggarttagggtaaatgaaggcacgggcgcactgcagacccctgatgggagaggcagtgggcgatgcttccatggtgaaatggaatactgggagccaggtgccctggcgcctcatggcaacgcctccttactctaggtcggcctccctggcattcctctttgagctgatgagggaccagaccagtcccaggttagcacctgga

SEQ ID NO: 744842 - DNA, 622 bp, Homo sapiens
gtagcttcttctccaatctccctgcccaaccccaggctctccatgacccacctcctcttccggaagctgctctgatggtgtcgtggtccgacggcccccactgtttgagaatgcagcctgcacatcccagcccagtattcccagcctcccaggaaggcttctacttgttcctctgccacaatctgagccacatgcacacccacctgcccacggttcctgaagcatacgcacacgttcctgccctgtgcctctgaacaggcagcctctccttgaggtcctcaccctgccccagtcctttaaggccctttaaatcccttcatccatggcatccactgtaattccctaaatgcaggtgcagcttccggaagaggaggtgagtcatggagagcttagsgtgggcagggagattggagaagctactgcaagttcaaaggcaacataccccttccataaccctgaagcacttcttgcccctgtcacatgtgagttgatcacagtcctccctcgttttctcctctagcaccatcccccaccctatagatggagggtcctgagagcaggggtgccacatggctctgtgctgcagtggcttctaaggtgagtgtggctggatggggcgcaa

SEQ ID NO: 744843 - DNA, 547 bp, Homo sapiens
aattctcacaacatttcaaactttttcatttttattatctctgttatggtgatctatgatcagttatctttgatttactattgtagatgtgttggggctcattaactgcacctgaacttaatcgataaatgtgtgtgatctgactttcccactgactaaccattctatctctctctctctcctccagcctccctagtccctgagacacaagaatattgcagttaggccaattaataacccaacaacggcctctgagtattcacgtgaaagggagagttgcaccctgattagtcagcagccatcaacatggaggcaaaaccctccaccagcaagaagattatgactcacygaaggctcaggtgattgttagtgttttttagcaataaaatattttaaattaaggtatgtccattggtttaagatataatactattgcacacttaatggactacagtatagtgtcaacataacttttacatgcactaagaaagcagaaatttcatgtgactcattttattgcaatatttgctttattgtggtggtctag

SEQ ID NO: 744844 - DNA, 624 bp, Homo sapiens
atgtgaaagatctttacggagaaaattacactactttattgaaaggcatagaagactgaccaaatgtacagttatattactttcatgaatggaagacccaataatgtacagatatcagttccaaccaaatttatctacaacatccaagcaatcgtttcctattgctcctgcaacaaatttccacaaacttagtgacttaacatttatcacctcagtgtttcgaagggcaggagttcacaatgagasctgcagggctgacatcaaggtgttggcccaaactgtattcttcccagaggcttaaggtgagactttccctttaccttttccagaacagaattaaaaactaacattgtacgattatctcaatagatgtagaaaaagcattcaatagtatgcagcatccctttatgacaaaaaccctcaagaaactaggcatagaaggagcatacctcaaaaaaatgaaagccatctgtgacagactcacagccaacgtcacgctgaatggagaagagttaaaagcattccccctgagaagtggaacaagacaaggatgctcactttcactacttccattcaacatagtactggaagtcctagccagagcaatcaggcaagagaaagaaa

SEQ ID NO: 744845 - DNA, 569 bp, Homo sapiens
tttggatatatacccaataatgggattgctagtattgaaatggtgtttctgtcttaagtctttgaggaattgtcacattgtcttgtacaatggctgaattaattaacactcctaccgacagtgtataagtgttccttttctctacaacctctccagcatctgttatttttttgacttttaaatgatagctatccattctgactggtgtgagatggtatctcattgtgtgtttttattttattttatttttttgagacaaagtctcactctgttgctcaggctggagtgyggtggtgtgatctcggctcactgcaacctctgcctcccaggttcaagtaattctcctgcctcagcctcccgagtagctgggactacaggtgtcgcctccacgcctggctaatttttaaacttttttagtagagaaggggtttcaccatattggcctggctggtctcaaactcctgaccttgtgatccatctcccttggcctcctaaagtgctgggattgcaggcgtgagccaccacgcaagtggccttttttttttttttttttttttttgacagagcct

SEQ ID NO: 744846 - DNA, 569 bp, Homo sapiens
tttggatatatacccaataatgggattgctagtattgaaatggtgtttctgtcttaagtctttgaggaattgtcacattgtcttgtacaatggctgaattaattaacactcctaccgacagtgtataagtgttccttttctctacaacctctccagcatctgttatttttttgacttttaaatgatagctatccattctgactggtgtgagatggtatctcattgtgtgtttttattttattttatttttttgagacaaagtctcactctgttgctcaggctggagtgcggtggtgtgatctcggctcactgcaacctctgcctcccaggttcaagtaattctcctgcctcagcctcccsagtagctgggactacaggtgtcgcctccacgcctggctaatttttaaacttttttagtagagaaggggtttcaccatattggcctggctggtctcaaactcctgaccttgtgatccatctcccttggcctcctaaagtgctgggattgcaggcgtgagccaccacgcaagtggccttttttttttttttttttttttttgacagagcct

SEQ ID NO: 744847 - DNA, 569 bp, Homo sapiens
tttggatatatacccaataatgggattgctagtattgaaatggtgtttctgtcttaagtctttgaggaattgtcacattgtcttgtacaatggctgaattaattaacactcctaccgacagtgtataagtgttccttttctctacaacctctccagcatctgttatttttttgacttttaaatgatagctatccattctgactggtgtgagatggtatctcattgtgtgtttttattttattttatttttttgagacaaagtctcactctgttgctcaggctggagtgcggtggtgtgatctcggctcactgcaacctctgcctcccaggttcaagtaattctcctgcctcagcctcccgagtagctgggactacaggtgtygcctccacgcctggctaatttttaaacttttttagtagagaaggggtttcaccatattggcctggctggtctcaaactcctgaccttgtgatccatctcccttggcctcctaaagtgctgggattgcaggcgtgagccaccacgcaagtggccttttttttttttttttttttttttgacagagcct

SEQ ID NO: 744848 - DNA, 719 bp, Homo sapiens
agcgccgcccatggccccagtaccggatccactaggtgaagccagctgggcttctgagttgggtggggtcttggagaacttttatgtctagctggaggattgtatatgcaccaatcagcactctatgtctagctcagggtctgttgatgaaccagtcatcactctgtwtctagctaatctagtggggacttggagaacttttatgtctagctagaggattgtaaatgcaccaattagcactctgtgtctagctcagggattgtaaatacaccaatcagcaccctgtcaaaacagaccaatcagctctctgtaaagtggaccaatcagctctctgtaaaatggaccaatcagcaggatgtgggttgggccagataagggaataaaagcaggctgcctgagccagcagcggcaacctgctcgggtccccttccacaatgtggaagctttgttctttcactcttcgcactaaatcttgatgctgctcactctttgggtccgtgtcacctttatgagctgtagcactcactgcaaaggtctgcagcttcactcctgaaatgagcaagaccacgaacccaccagaaggaagagactccagaggcatctgaacatctgaaggcacaaactctggacacaccatctttaagaactgtaacactcactgcgagtgtccgtggcttcattcttgaagtcagtgagaccaagaacccaccaattctgga

SEQ ID NO: 744849 - DNA, 618 bp, Homo sapiens
ctctggacacaccatctttaagaactgtaacactcactgcgagtgtccgtggcttcattcttgaagtcagtgagaccaagaacccaccaattctggacacattttggcgacccagatgggactatcgcctttcaccaagtggtgagactatcrtcaagtggtgagaccatcacctatcacaaagcgctgagactatcgcctatcgccaagtggtgagtaccattggacctctttcgcttgctattctgtcctatttttcctagaattcgggggctaaatactgggcacctgttggccagttaaaagctactagtgcggctgctggactaaagacacgagtgtcaggcattctgggaaagggctctctaacaacccctgactctttggagttgggagcgttggtttgcctggaaccagcttccgcatttcctgtacttctgggctgagccaagggtcagcagagaggaaagtcattcagctccgggggtcccgacaagttggttgaccttgcagccatgaacagaactctcaaagtcatgtcacccaagcgagactcacccatctattctatctaccctgacatttgcccgttggatcctaatgcctgccatacaaact

SEQ ID NO: 744850 - DNA, 477 bp, Homo sapiens
gtataatgcttttcattatgaaatcagtgtctcatttcagagactctcttttttcttttgccatcacatttgccaaagtcctttaaatatactgtagttgtttttattttttaagaaattaaagtggcttcagcgtgagtcatgattatattatttaaatgtcatttatgaacagcgcattgttttacttaaatcatgyttggcccaggagttctgtaacctaacccattattttgttggtcgaaacaacagctacatcattgaatgaagtgtctttgctgtcaaaaaggaaaatggaaccataacatgaaaactgtttttgataaggactggaaatccagaacctgttaattgaagatttaaaccatttgttttcctcagatatttaaatcacagtgcctgcagttcaactttttaaagtgagactcaaaccaagtctaattgaaaacactatatttcctccattgaaataaaaat

SEQ ID NO: 744851 - DNA, 595 bp, Homo sapiens
gtatgcattgctttgcaaatatgaaacatctgctttttatttgcaatcatttatttgtaactattttgcaaatatgacacatttgcttttattaatgcagatacgtgagccttaaccccctacctaatttaattttgtaatgaaaattcattgccccccctgagcaagtgtatatgtgtgtgtgtgtgtgtgtgtgtgtgtgtgtgtaaaaaaaaaaaaaaaattttttttttttttttttttttagtggaaacatggaattggtgggtaggcaggcaagttggttttttggtttacctcagttggccatggccccaaaatttaagagccaccgttttagattattttgcatttcctcctctgtattggtggtctaagaatagaaaatacttttattttytactttggccttaaacttaaattaatgataccctacatagtattttttttttgtagcaaacagtgctagatgactcagccttgaaacaattttgatgaacactagacagttaaataaaagtctgcctttaatttgcttgcttttgaatggctagaagcatcatttatgccatagtgatcttttaatttactttaa

SEQ ID NO: 744852 - DNA, 587 bp, Homo sapiens
agcatacaaaacctaagaatacggactcctatgtgaaaaccttctgatgtaaaatgaagtaaaatgagataacaatctaaaaatgtttcagaagaaagggaaaaaaatataccataagaaagcacagtttttgccaggtgcggtggctcacgcctgtaatcttagcaggttgggaggccaaggcgggcggatcacttgagatcagsagttcaaaaccagcctggccaacatggtgaaacctcgtctctactaaaaacacaaaaaattagcagggcgtggttgggcacctgtaatcccagctacttgggaggctgaggtaggagaattgcttgaaccgggagtcagaggttgcagtgagccaagatcgtgccactgcactccagcctgggcaacagagagagactgtgggcaacagagagagactgtctcaaaaaaaaaaaaaaaaaaaaagaggcacagtttttgggtattttctttgacatatccaggtggatgtctacaggaatgtctgtatacttcactaatttagtttaaaaaaaaaaaaaagcattgtgcaacagtgaatattggctgggctatctgatgct

SEQ ID NO: 744853 - DNA, 608 bp, Homo sapiens
attaaaacattaaggaaaatgcttgttgttgttgttgttcttttttcctcagaatctttcaaaaatgaatttcattttctatttaccctccttccacccgctcccaagttttccagatatacgttcctcttaaaacctttttaatcgctcaggttattatcaactcttctgcaaaaggaatcaggtttgcccaggaacttcactgaataaagatgagtttatatcttaaaaaggaaacagctggatggcaaaagccagggmgggaggcagctcttgtttcattagtgaagggaaactcgagggcccggagagaacaactgggctggcagccacggcggggagaagaaaaggaaacacacgatcataaagaactaatcatgaaaaatggaaagtgagaaagagccaagaacaacaagcaataaatagatttggaagggggaaaaagatgaggaggaatgaaaagctatgctcaggaaagaagcaacaagagcatgtgcgtttcatttgaaaaaaattaatgattctgaaaatcattaaaaagtcttaaggaaaatgttttaagatagcttttcagacccaggttttatttctatgtgttgtttcagagt

SEQ ID NO: 744854 - DNA, 694 bp, Homo sapiens
ggtggggaagggagggaattaataaattacaagatattaggaagtaaatcagtgggtcggtgccagagagcatcggggggtaagaaaggcaactttaaatggtaatgccaggaaagttgaggcctgaaggatgagaaagagtctgccaggcagaagcctggggaagaacatttcagacaaaacaggcataaagttttgagagcgagaagcttggcacagtcgaggaggtaagaggaggccagtgtggctgaagctgagagagcaaggggaagagcgatggtaactgagatgggtctggggagcccggcagtacagtgggcagccttgaaaatattgagaggggaggcgtggcctgactcatgtttcamgatggtcctggttgctgtgtatggagtgcattgtaggggcaggaatggaggccagctggcaagttaagcatgaaatgctgtggcaggtgactgagaatgaattagacatgtacattgtatatggaataaaaaaaatctgaagggctccttatcattgtttcagtgacatttatttctagaggctgatatgtttattgtcattttccagagaatgacagaagagattctgagggtatcctttttcttttgtgcttgaaataatttaattagctgtttaggaaggaatgctcatgctattggacatggatgatgcttttgcctggctc

SEQ ID NO: 744855 - DNA, 637 bp, Homo sapiens
ctggctaattttaatttttttttctttttttgagacggagtctggctttgtttcccaggctggagtgcagtggcacaatctcagctcactgcaacctccacctcccaggttcaagtgattcttctgtctcagcctcccgagtaactgggactacaggtgcgtgccaccacatccagctagtttttgtatttttagtggagatggagttttgccatgttggtctcaaactcctgacctcaagtgatctgcccacctcagcctcccaaagtgctaggattacaggcatgagtcactgcacctggcttaattttaatttttttaattttttgtagagatgagtctcactatgttgaccaggctggtcttgaactcctggcctcctaaagcactgggattacaagcatgagccaccatgcctgatccataaattgttctactgataccatttggttttgttagaatttgggggggctrtagaaaacaaggttacagtcttcattagtatttctttttagcaataacaacaaaataggcaattagaccagtgttcatttggtacagtctttaaatcggtcatccaattaacctttaaaaagtaggttatgctcttaaattgtattggttctttaatatgtgt

SEQ ID NO: 744856 - DNA, 630 bp, Homo sapiens
gttggttttcattgtggcaaaactttaaattttaagtcatcacactatgagaattgtttgtacacatttataatttttttaaagtatgtaaagtaaggattttttctccattcttcactcacaaaggatagcatttttatggaacctrgatttacaaaggaacttgtgattcttttcaatgcttttgtgtcgttttacagctgattaagaaaaaatgtttacatttaaatcagctgtatttcctagtagctgtataatcttacacattattcttatataattttgacctattttatatgaaaataattgtattggcatctcttcataatttaattctcttctctccttcttttgttccgattagatgaatttgggaaaggagtaggaagactaggtatcgcatgccttccgtctgattgtaatcagtctcctgggttttttactaatttaatcttaatcctgtgcttctttagtcatcaaattgatataggattacaattttctctcaggatccaagtcttctaagaatgaaaatgttgaagtctacccagaaccagccatccttgtagacatttctatttggttgatttataaagatttaatatataaagatttaatatgagttaaaca

SEQ ID NO: 744857 - DNA, 630 bp, Homo sapiens
gttggttttcattgtggcaaaactttaaattttaagtcatcacactatgagaattgtttgtacacatttataatttttttaaagtatgtaaagtaaggattttttctccattcttcactcacaaaggatagcatttttatggaacctggatttacaaaggaacttgtgattcttttcaatgcttttgtgtcgttttacagctgattaagaaaaaatgtttacatttaawtcagctgtatttcctagtagctgtataatcttacacattattcttatataattttgacctattttatatgaaaataattgtattggcatctcttcataatttaattctcttctctccttcttttgttccgattagatgaatttgggaaaggagtaggaagactaggtatcgcatgccttccgtctgattgtaatcagtctcctgggttttttactaatttaatcttaatcctgtgcttctttagtcatcaaattgatataggattacaattttctctcaggatccaagtcttctaagaatgaaaatgttgaagtctacccagaaccagccatccttgtagacatttctatttggttgatttataaagatttaatatataaagatttaatatgagttaaaca

SEQ ID NO: 744858 - DNA, 618 bp, Homo sapiens
aaatattttgaaaataacaaaagctctctactaaagtactgatgagtcactgtcttctattctgcagccgaagaattatgttgagctctttttactatctcttggacagctcaagactaaaagccctttggggctaatggaatgtcctcatcagcctcaaataatattagacaagctactgtacaataataaaaacagcagaagaatttaaacactccatatgaagtgaatcattttttgacaccagacttgttggaaaagtgtttgctaaatatgggaaatayattcatacactatgtatgcaagcttctgatttctcacatgtccaagtgaccagaaaggcagaaggagggaagttgttctctgacagcagattgggtacagttgagccagattaggggaactgttggtaacagccccctagggcacaggtaatgcatgggcctccactcatcaatttggtggattccaaattaacccttattatagtgacagagattcccgtgcattctcagcgtgatggtaagcatttctgaaaattccaaaaatgtgtgggccagatattggcttatttctggagccactgctgcagcactaaaattagcaaatccagagctt

SEQ ID NO: 744859 - DNA, 618 bp, Homo sapiens
cactccagcagccctgtggagaggccaggtgacaaggagctaaggcgttggggcaagccaaggccttggaagcagctactctagccctggtgatgccctcacacgaccacagccctggctgacggctccttgtgagacgctaagccagaaccaccaaaccaagccacgcctggactcctgactctcagaaactgtgaaatgatcaacctttgctgcattaygctgctcccttttggagtaatttgttatgccacaataaataactaacacaagattaatttgaagaagttatcccaaatgcagcacagaaagacaaagaaatagacgtgaaatgacattaaatcagcattctagaaaaagtaatgggaaaaagaaacatttcaagtgctaagagctaagaattttctagaattgttgaaagatattgatcatcaagtccatggagccaagtcaatgctaagatgagtaatttttttacgtgcatttggacaccttataggaaaatggaagaataccagaagggaaaaaatgaagcagccagaatggagacagatcagtcataaaggaatagcaattacaccaaaggctggtttctttacagcaatagcggaagtcagg

SEQ ID NO: 744860 - DNA, 632 bp, Homo sapiens
ttagattattttgcccaactatcaactaacataagtgttccgagaacatttaaggcaggcgtggctaggctgtgatgttctataggtgtattcaacgctttttttttttttttgagacagagtttcgctcttgtttcccaggctggagtgcaatggcatgatctcagctcactgcaacttttgcctcctgggttcaagcgattctcctgcctcagcctcctgagtagctgggattacaggtgcccgccaccacactcagctaatttttgcattgtttgtagagacggggtttcatcgtgttggccaggctggtggaactcgacctcaaacccctgacctcaagtgatctgcccgcctcagcctcccaaagtgctrggtttacaggagtaagctacggcacccagcctcctcaatgcattttcgacttatgatattttgaatttacaatgagttaatggggatgtaaccctgtcctcattgaggagcatctgtatgtgaatcctccattgtacaaatgagaaacaggggacttgagaggtaaacaggggacctgagagccaaggtaaaacagcctaacagaccgcagggctgtgagccctgctgttgcaatcgaatggtgcacctcggtgagt

SEQ ID NO: 744861 - DNA, 512 bp, Homo sapiens
taattaaatactttaacataaaagaggaaaactcaaatttctttccccgacagcttctgctgcctagaaaaaagtgttggcaagaatgtcagaaaagaaccatcagcaaaaatgacagcctcacacagaggctgaaagcgagactcccaacgtgtagggatcaggcgtgaactttagagacagacagcctgggtttgaataccatctgctccactggcttgtctcctgaacttaacrtaacctctctgatgctcagctgccataccgtcagatgacaacaggaatccctgcctcacacagttaatgagaaaatgagattatgtatgagtgattatgcaggcaatcattccacacagtggctgtcacataaaaagaactaaattgaggtctgtaatcccaacactttgggaggccgaggcaggtggatcacctgaggtcaggagttcgagaccagcctggacaacatggtgaaacccccgtctctactaaataaaaaaaattcattgggcatg

SEQ ID NO: 744862 - DNA, 617 bp, Homo sapiens
acgaggcctggtatacagcaggtgtgcagtcgcggtcgctcctctcactcgcatcgcactccccccgttccacgccccttaaacaagatgagttgctaagtttatttcagactgcttggccggcaattaagagacactcccccaacatgggcagagccagcttggttccagcctgatggaactccctggaactccatattctactagatttgtgacagcctgatgcagctgctttgatgcaagagcatttttgatacagttttaaaaaccatcattgtttttgtttttgttttgtttttgaggagtctcgctctgtcacccaggttggtgcagtggcgcgatctcggctcactacaacctcygcctcctggggttcaagcgattctcctgcttcagcctcccgagtagccaggactacaggcacgcgccgccatgcccagctaatttttgtattttttagtagagatgtgttttctccatgttggccaagctggtctcgaactcctgaccccaagtcatccacccacctcaccatcccgaagtgctgggattacaggcgtgaaccaccgcacccaacccattgttatttaccttaagaaacattacgaattgtaaac

SEQ ID NO: 744863 - DNA, 652 bp, Homo sapiens
gtgatgtatgcatcttgaaattgacctaaaacctagaaaggtaaccgatatggtttggctgtgtccccatccaaatctcatcttgaattgtggcttccacaattctcacgtgtcatgggagggacccggtgggaggtaattgaatcggggggtgggtcttccctgtgcagttcttgagatagagagatctgatggttttataaaggggagtttccctgcacaaactctcatttgctcttgcctgyggccatgtaagatgtgcctttagccttccaccacgattgtgaggcctcctcagccacatggaactgtgagtccattaaacctctttctttataaattacccagtcttgggtatgtctttatcagcaacctgaaaatggactaatagagtaagcagaattctagagaacttcaaaactgtatagatgacactcttccttttagcaggcattttcatcactgtgtggttgctcagtttagtcatatgcccatgaaatggttaattttatctgtcaacttgactagccatgggatacccagaataaacattatttcctgatgtgtctttgcgggtgtttctggctaagattgacattggattctgtaaagtagattgccttccctaatgtgagcaggcatcatctgatcg

SEQ ID NO: 744864 - DNA, 632 bp, Homo sapiens
ttttttttagtttaattttttttgaggcactgtcacccaggctggagtgcaggggcatgatctcggctcacagcaacctccatcccccaggttcaagtgattctcctgcctcagcttcccaagtagctgggattacaggcacgcaccaacaagtccagctaatttttgaatttttagtagagayggtgtttcaccatgttggcaggctggtctcgaactcttgacctcaaatgatctgcctgccttggtctcccaaagtgctgggattacaggcatgagccgctgtccctggtgaccaactacatatttttaatgcataaattatacattttatattttacaaaactgcaaaagcaaatcctaaacatttggttaagatccttctgcactctcctcccgtgacaaatacagttatgatttcttcactccattaaaataatccagattagaaaatccaggcatctggatctccatgaattctttattttgtctttatttttgtaaagaacactgtttacattagttgctgcaaatagttccaaatcctttcatatttattataaatgggtttaattactgttatgtgaaaacagggccagtaaataaaccaattcttaggagtagattctttg

SEQ ID NO: 744865 - DNA, 636 bp, Homo sapiens
ttatctgaccaactaatgaaagaagttacttggttactattctgtaatcttatttaattttctatgtaagccctaatcagatgctgaccccatgagaatgtaagcctcatgggagaatgaattttgtgtctcttggttctacatcagtgcctagggcagtacatgatactaatgtatgtcaaatgtgagttatgtgacaaacttttgagagatgaaaaaatctaatgggatgtaataaaaatagctatataaattgtggtcctatcacataggagaaagaggaacaatattttagaatagaatttggcagtaaattrattagttgaattcaatgaacagatcagaaaatttggttggtaggttctgatttaaatcaggtgaatatgtaggattatagttcttagtaaatcatagaaatttgtttttgtgactataggggttcatggtctcaattagtatattaagcaagaattgacaccagcattctgatcaaatatctctatggatgatgtaaaaatactgaaaagagaatcctgatttttttggaataatacaattggtagtagataagcactgaatatgaattttagaatagtcagaaataaatattcaaaatttcgaagccaatcaaactca

SEQ ID NO: 744866 - DNA, 612 bp, Homo sapiens
cagagctgctttaatcatgtaaatcttgctctctgccttctttgtgcagtgtttgttgctctaccaacatgggatgcctttttctccttccttcttgcttgacaaattcctgcacatcacttcatatgtcaaatttctgaaaagatctccctgccctgtctcctctgagttgtctaattgtcactccaatytgctgccctcataccctgaacttactgtgataatgtcacttttcacgtttatttgagcatatcctgatgcagtgcataacacataatagccactcaataaaaccagttgaattaattcattcttccatcctccttcatcttctccatttttttcatgccttctctctctttttcttctcttttattcatttgttatattttaatcaagcatattatttaaaatgtataacctcgggtgttttccattaactagcttattatcactacattctctaattttgtgtcacaacattaaaaaatcttcagtgttgtgattttaactgttctatttgttcagtgacatgtgtacaactatttatcttaaaaaatagaactataaaatgctttacattttgtttgtttttagtggtacaagccaact

SEQ ID NO: 744867 - DNA, 578 bp, Homo sapiens
gcaggtgctgagcacattccaaatgtaacctccctttttctgcttctcatgcattaactcacggctgtcattcctgtaaaacttgttccactcctgtttcatctgacaaactgctgtgatatttcttccctgcagtgaatctggaggagtgtctcaagtcggccagcctaatccggtccagtgaccctgccttcagaattctagaagatggctcaatttacacaacacatgacctcattttgtcttctgaaaggaaaagtttttccattttcctttcagatggtcagagacgggaacaacaagagataaaagttgtactgtcagcaagagaaaacaaggtataaggcaagggcttaagcagcctagcacagtmatatgcttacgggagtccttcgtgtttcatgtgttttaacgtgtttcatgttaaaatctatgctattgaatgacaaatttgtcttttccacttacaattagtgtaaataaagactagacttttaaggagtggcagagccatttacaaacttttataaagatgaatgactctgtagaccaggagcaaagtaagaatatcagagttt

SEQ ID NO: 744868 - DNA, 618 bp, Homo sapiens
ctaaaactcagcgaaatgtgattcaggctggagatgtgggctccaccctgtgcggctctcttcccactgattgcgggtttgagtctctctttaaagaggagaagagactgtttaaagcttactcccatcttactagaatattctatagggcagsccctctcttcagagagtggaggtgtggccaatccacagaattgatttgaatgtttaactctaggctcattttcttgcactgagcggtagagatcagttcagaaagcagggaggaaaaagttgctggaattcacatctcattttcagcaaattcaccacaatgaatttcgtcttataaaaccatttcttaataaatgattctatttaggagaggatttcccaactaaattctttttgattgtatgaactcctcttaatatgcttaagactttaaaaatgttattttatatccacattgtaaaatccccacattatataaaatcaagtatacttgagcaaatgctgacctgtgtctacatagatgtataaatgattgtattgtggagtgagggttttaacagattttggttgtgccagtcctagtggaataaagttgatccttaaatatttattaatgaattatct

SEQ ID NO: 744869 - DNA, 618 bp, Homo sapiens
ctaaaactcagcgaaatgtgattcaggctggagatgtgggctccaccctgtgcggctctcttcccactgattgcgggtttgagtctctctttaaagaggagaagagactgtttaaagcttactcccatcttactagaatattctatagggcaggccctctcttcagagagtggaggtgtggccaatccacagaattgatttgaatgtttaactctaggctcattttcttgcactgagcggtagagatcagttcagaaagcagggaggaaaaagttgctggaattcacatctcattttcagcaaattcaccacaatgaatttcgtcttataaaaccatttcttaataaatgattctatttaggagaggatttcccaactaaattctttttgattgtatgaactcctcttaatatgcttaagactttaaaaatgttattttatatccacattgtaaaatccccacattatayaaaatcaagtatacttgagcaaatgctgacctgtgtctacatagatgtataaatgattgtattgtggagtgagggttttaacagattttggttgtgccagtcctagtggaataaagttgatccttaaatatttattaatgaattatct

SEQ ID NO: 744870 - DNA, 639 bp, Homo sapiens
aaaagctacagttctatgtagcttgttcctgagaaagtaatagtagaaattaatttatttaactatggttaatatttgactaatcagttttgggaaagccagctaataaatatgtgtagctatggagatggatggatagatatgtagatacatacatacacaaatagatagatagatagatagatagatagatagatagatagatagatagatagatgtacagatacagatagatatcctgatggtgattaaaatatgatcttttattttatttaaccagaaagatgatgggaagtcattttacaaaaggcatggatttgcacagacagaaagagacagatgttctagatcagcaagggatgatctttcawggtatcgttgggagtggattattttttagaatggctgctaagaaacttgaggaatttttagaatggctgctaagaaacttgaggaacttgagcactgcaagttgccaccgtggggtcatgagctgaagatacttatcctcaaatggagaaagaggagatttaggtggaaagatcaagagcatcgttttggacatgttaagtttaaggtgtctaaagacatgacgagtaggcagttgtgtaagtgaattgaagggaaatctgagcctga

SEQ ID NO: 744871 - DNA, 608 bp, Homo sapiens
tccgtttgatgattccactcaattccattcgaacatgattccatttgagtccttgtgatgattccattcaatttcattcaatgatgattccatttgattccattcaatggtgattccattgaattccattcgatgattccattcgattccattcaatgatgatttcatttgattccatacgatgattgcatttgattccatttgatgatgattccattcgattgcatttgatgatgattccatttgattctaatstatgatgattccattagaatccattcgatgatgattccattagaatccattcgatgatgattcccttacagtccattcgatgatgattccattcgagtccattcaatgattcccttcgattccattctatgatgactctggtcgagtacattcgatgattccattcagttcgatttgatgatgattccactcgagtccattcgatgattattccactcaagtccattcaatgacgataccactcgaatccatttgatgtttccatttgtttccatttgatgatgattccattccattccattcaatggtgattccactcatttccattcgtgtttcccttcgattccatttga

SEQ ID NO: 744872 - DNA, 608 bp, Homo sapiens
tccgtttgatgattccactcaattccattcgaacatgattccatttgagtccttgtgatgattccattcaatttcattcaatgatgattccatttgattccattcaatggtgattccattgaattccattcgatgattccattcgattccattcaatgatgatttcatttgattccatacgatgattgcatttgattccatttgatgatgattccattcgattgcatttgatgatgattccatttgattctaatctatgatgattccattagaatccattcgatgatgattccattagaatccattcgatgatgaytcccttacagtccattcgatgatgattccattcgagtccattcaatgattcccttcgattccattctatgatgactctggtcgagtacattcgatgattccattcagttcgatttgatgatgattccactcgagtccattcgatgattattccactcaagtccattcaatgacgataccactcgaatccatttgatgtttccatttgtttccatttgatgatgattccattccattccattcaatggtgattccactcatttccattcgtgtttcccttcgattccatttga

SEQ ID NO: 744873 - DNA, 448 bp, Homo sapiens
gcctagtttttatgtgaagatatttccttttccaccataggcttcaaagcactccaaatgtccacttctagattctacaaaaaaagagtttcaaaactgctaaatcaaaaggaaggtgtaactctgtgaaatgaatgcacacatcacaaaaaagtttctcatattgcttctgtctagattttatgtgaagataattccttttctaccataggcttcaaagcrcttcaaatgtccacttgcagattctacaaaaagagtttcaaatctgctctatcaaaagaaaggttgaactctgtgagttgaatgcacacatcacaaagaagtttctcagaatgcttctgtgtagtttttatttgcagttatttccttttccacaacaggcctcgaagctctccaaatatccacttgcagattctgcaaaaggagtgtttcaaaactgctcaataaa

SEQ ID NO: 744874 - DNA, 625 bp, Homo sapiens
aatcaccaaatggacatgaatggaatcatcatctaatagcattgaatggaatcatcgaatggactcgaatggaatatcagcaaatggaatagaaagcaatcatcgaatggactccaatggaattatcgaatggactcgaatggaatcactatcgaatggactcaaatggaatgattgaatggtctcgaatggaatcatcatttggactcaaatggaattattgaatatcctcgaatggaatcattgaatggactcgaatggaatcattattgaatggaatcaaatggaatcatcaaatggaatcgaatggaatcatcgaatgcaattgatcagaatcatcatcgaatggaatcaaatagaatcatcaaatggaatcaaatgcagtcatcatcraatggaatcgagtggaatcatcattgaatagaatcgaatggaatcatcgaatggaagcaaatggaatcatcatcgaatgtaatcgaatggaatcatcaaatggaattgaaaggaatcagcatcaaatgaaatcaaatggaatcatcatagaatagaatcaaatggaatcatagaatggaatcatcatcaaatggagtcccatggaatcatcaaatggactcgaatggaatca

SEQ ID NO: 744875 - DNA, 579 bp, Homo sapiens
atcctcagattcactgcttgaaccgttggttattatttggggatcaggatccctccttcagatgaccagctaaccataggcttttctggatttctctaacctgattatgcaagaggaagaagtatctctgaaatattttagccagttgtcttgaataccactaattccaccaatgaaggcccacttctaatacccattatgctgattaagtatccactaattggctgggccttatggctaacacctgtaatcccagcactttgggaggccgrggtgggcagatcacttgaggtcaggagtttgagaccagcctgggcaacatggcaaaaacctgtctctactaaaaatacaaaaattagctgggcatggtggagagtgcctgtagtcccagctctcgggaggctgaggcaggagagtcgcttgaacctgggaggtaaaggttgcagtgagccagatggtgccactgcactccagcctgtgtgacagagtgagactctgtctcaaaaaaaaaaaaaaaaaaaaaaaaaaaaaaaaaatccactaagtcagccaatgaaaatccttttctaacattctgac

SEQ ID NO: 744876 - DNA, 617 bp, Homo sapiens
taaaattgtaactttatgtcatatttggaagcaggaaagtataaaagcttactaaagaggtgcaattgactctgtgtctgaaacacctaagtccttctcacaaggcattgtccaacatgctacccaaaatgaatagattcctgacagctatgaaagtttggaagacagaaaagaatgcttctgatgacagatgttgcagtggactattactttagtggccttaatggggcatttcagtgttcatgtcgttgtgtagttttttcccatattgattctgggcttttctatgtaacaaaccttggccaatgggacattagcaagtgtgatgcaagtaaaggcatcttacatgtttgtacgttggagcttgtcctcttgcmacactctttcctggaacgagtctctatgcctaataaaggcaatccataagatgaggccacatgcagtactccaaagaagagaactgaggtgattcagccaatatccacatctgaactccaagcggaatgtcagcactgaatgcagccttgtgagtgaaccatctctgatgttacaactccactacaactgctattagatagctatagctgtggttgacatcttgtgcaggaaaggaacca

SEQ ID NO: 744877 - DNA, 521 bp, Homo sapiens
aaattataaaagaagatattctattataacaaaattataatagacagatattctgtctcaaaggcaagataatgccaaatgatcattggcattctgtcaaaactttgtttataaattttagagcattctatgaatgtacttagcccccaaatacttttcacatttcctcttaaaaagaatgaaatagttagaaacctgcctactgaagatacaagtcaattcaagcaaagccctgtataataaaatacagaggaagaatggtcatttatatgaaaagggtgggggaggagccaagatggctgaataggaatagctccggtctacagctmccagcgtgagcgacgcagaagacgggtgatttctgcatttccatctgaggtaccgggttcatctcactagggagtgccagacagtgggcgcaggatagtgggtgcagcgcaccatgcgcgagccgaagcagagcgaggcattgcctcccttgggaagcgcaaggggtcggagttccctttctgagtcaaaga

SEQ ID NO: 744878 - DNA, 558 bp, Homo sapiens
aaaaaaaaaaaaacagagatgaggatccagtttcattctcctacatgtagttcaccaattatctcagcaccatttgttgaatagggtgtcctttccccactttatgtttttgtttgctttgtcaaagatgagttgtctttaagtatttggktttatttctgggttccctattctgttccattggtctacatgcctatttttatatcagtaccatgcttttttggtgactgtggccttatagtatagtttgaagtcaggtgatgtgatgcctccagatttgttctttttgcttagtcttgctttggctatgtgggctcttttttggtttcatataaattttaggattttttttcaagttatatgaagaatgatggcagtatttttatttgaagtgcattgaatttctagattgcttttggcaatatggttattttcacaatattgattctacccatccatgagcatgggatgtgtttccatttgtgtgtgtcatctatgatttctttaagcagcgttttgtagttttccttgtagaggtctttcatgtccttgattagg

SEQ ID NO: 744879 - DNA, 569 bp, Homo sapiens
ctagcagccttttgagtcttttgaaatgtagtagtttgtgagtcttttgaaatgtagtagtttgtgattttgatgagatgagcaagagggaaccccttctctggtaagtgaacctggaaagcgctgaagacctgagtctcagttgagtttaatctgttgctctcagctsaattacggcttctctacaattctcatgaagtgatttaaacaaataagaacttgggggtctgcacaggacttaaagaaaaggctccctaaaagaatattaactgctagcactatttaaagaaaggagaaaaaggtgaaaatatgtacttaaaaatggcttgtggccataaaatagaaattttaggaaatttaataataaaatgtcaaatttataaatagtttacagtcacaaaaaacaagtccatgagtacactctagtatggatgaaaatgtggttcacaaaatagtttagggactaaaaattttgtagtttagtgctacaaactagcagttttgtactagtattccaactagtacaacactgcttatcaagtgacaaagagcaccagagaaaacatcac

SEQ ID NO: 744880 - DNA, 612 bp, Homo sapiens
ggttctacaaactggatgtgcgttgaagggagctatggagtgggaggtgggagtgggcgaataccatcctcctgccactttgggctgtggttgctggcaagcaaggccacggatgttgataggcaattgtgatgcaggcccagtcaccagcttcctgggtgctgctatgaggcygcacctcatagagagatcgccattatatttcctgggagctccatatctcatggagataacaggtcctttttgattctacttgcggatccctggattgcagctctcatgctgtttacctcaagagcttcgctcacagccccctaactccctatattcctgcttacagcacaggctgtagctccccaggcaggtcagtgctagaagttgctggggcattctggaatttgttcttggacacctaccaggagtgcactcctctcacccttccaacagattctgtaagcattcagttttcagcattatagccttttctgcgtaaaagacctacactggtttctagttccttcaataaccctgacagaattacacattaaaagtttaatagatatgatccttgtgtagtgcataagtgtgatgactgggttttcccactcttgt

SEQ ID NO: 744881 - DNA, 612 bp, Homo sapiens
ggttctacaaactggatgtgcgttgaagggagctatggagtgggaggtgggagtgggcgaataccatcctcctgccactttgggctgtggttgctggcaagcaaggccacggatgttgataggcaattgtgatgcaggcccagtcaccagcttcctgggtgctgctatgaggctgcacctcatagagagatcgccattatatttcctgggagctccrtatctcatggagataacaggtcctttttgattctacttgcggatccctggattgcagctctcatgctgtttacctcaagagcttcgctcacagccccctaactccctatattcctgcttacagcacaggctgtagctccccaggcaggtcagtgctagaagttgctggggcattctggaatttgttcttggacacctaccaggagtgcactcctctcacccttccaacagattctgtaagcattcagttttcagcattatagccttttctgcgtaaaagacctacactggtttctagttccttcaataaccctgacagaattacacattaaaagtttaatagatatgatccttgtgtagtgcataagtgtgatgactgggttttcccactcttgt

SEQ ID NO: 744882 - DNA, 612 bp, Homo sapiens
ggttctacaaactggatgtgcgttgaagggagctatggagtgggaggtgggagtgggcgaataccatcctcctgccactttgggctgtggttgctggcaagcaaggccacggatgttgataggcaattgtgatgcaggcccagtcaccagcttcctgggtgctgctatgaggctgcacctcatagagagatcgccattatatttcctgggagctccatatctcatggagataacaggtcctttttgattctacttgckgatccctggattgcagctctcatgctgtttacctcaagagcttcgctcacagccccctaactccctatattcctgcttacagcacaggctgtagctccccaggcaggtcagtgctagaagttgctggggcattctggaatttgttcttggacacctaccaggagtgcactcctctcacccttccaacagattctgtaagcattcagttttcagcattatagccttttctgcgtaaaagacctacactggtttctagttccttcaataaccctgacagaattacacattaaaagtttaatagatatgatccttgtgtagtgcataagtgtgatgactgggttttcccactcttgt

SEQ ID NO: 744883 - DNA, 612 bp, Homo sapiens
ggttctacaaactggatgtgcgttgaagggagctatggagtgggaggtgggagtgggcgaataccatcctcctgccactttgggctgtggttgctggcaagcaaggccacggatgttgataggcaattgtgatgcaggcccagtcaccagcttcctgggtgctgctatgaggctgcacctcatagagagatcgccattatatttcctgggagctccatatctcatggagataacaggtcctttttgattctacttgcggatccctggattgcagctctcatgctgtttacctcaagagcttcgctcacagccccctaactccctrtattcctgcttacagcacaggctgtagctccccaggcaggtcagtgctagaagttgctggggcattctggaatttgttcttggacacctaccaggagtgcactcctctcacccttccaacagattctgtaagcattcagttttcagcattatagccttttctgcgtaaaagacctacactggtttctagttccttcaataaccctgacagaattacacattaaaagtttaatagatatgatccttgtgtagtgcataagtgtgatgactgggttttcccactcttgt

SEQ ID NO: 744884 - DNA, 631 bp, Homo sapiens
  misc_feature 451, 452: n = A,T,C or G
tcattcattaaacctcagggagttttcctggagtatattatttaaggggaaagaggtaagaaaacataataatagttaattgatttcttattcaataaacagaaaatgattctaggaaataaaattaaggttcactgttcatcaggtagactgccatacttcaaattactcaaatgccaaatataacttctgatgtctccctgattaattatagattttgattctaagatactatacgtacttggatattcagctagggtttttcgtttttgttttagaatttgtttctaatcaaatcatttgaaaatttaagtaggaaaataataatggttcagaaatgtacttaaaaaattaaaactcacttatgtaaccttcatactattgtttttaatctccaggcaagtaacactaaatagactttgctgtggttgctcaactgttagactctgcnnatatgatcatatggaaatctctagamcggcagaagtttttcaaggtgcgttcactgattagaacctatccataaattatttacactgtggcaattcattaatttgaataatgtgcttgcttttttccccttaagatctgaaatttctatttgaaaataaagtggttttttcaaatacaa

SEQ ID NO: 744885 - DNA, 530 bp, Homo sapiens
tatatatatatatatgtcattctcatgttaataatattcatgaaagaaaaacgagaaaaaaaagacatataagcaagagaaaatacaagactttcccaatcctacccacagaccaacacataaaatacctttgcgtatattcttcaaactttctgcatagtcatttatacatttatattatttccataaatcatgttcagttgttaaaaaactgccttttaaaaatcttactgtattgtgattatctttccatatcaataaaatagttktatatgatcattctgatatataattgtaaataatttaaccaatctgttgttggcttttaggctgtttctaacagcagtgtaactaatatccttatggctaaatcctgaaagccatacttcactattttcttaggatgaattccaggtagtttaaggactagcatgtgctttttttaagttatactttacgttctggcgtacatgtgcaagacgtgcaggtttgttacataggccatggtggtttgctgcatgcatcaacct

SEQ ID NO: 744886 - DNA, 534 bp, Homo sapiens
tctatgtggtcttatcagacgtgaagcattgtttgaccaccactggcatagtcaatataaacacaattctatcactagtctccatcctgctgacctcaaacagccacagccaatgcttttatctcccatcatgatcctctgacaaccactaatctgttttttagttctccctctcaatagtttgttatttcaagaatgttattgaaatgatcatatactatgtagtcttttgagatttgctttctrtactccacataattcactggagagtaatccaagttgtgtgtttgtcactgagtactatttaatggtgtggacataccagtttgtttagccattcacccattgaaagatatttgggttatttccagtgtttttttattattacaagaaatgctgctatgaacatttgtgtacaggtttctgtgtaaacataagcctttatttctctggcatagctgttcaggggtggaattactgagtcttagggtaagtgcatggtttgcttcgtaagaaactattttccagagtggc

SEQ ID NO: 744887 - DNA, 613 bp, Homo sapiens
aaatgtaggctgggaggctagccccatctgtctttcacgtttttctgcctgctttttctttgctggcagctgattagattgtgcctaccagattaaggatggacctacctttcccagcccactgactcaaatgttaatctcttttggcaacaccctcacagacacacccaggatcaatacattgtatccttcaatccaaccaagttgacactcagtattaaccatcacagtatatacgcagaaaagcaaagaatattatagcactgcaactgtggtatgtaaactgtggtatgtggtactctgatcttaagtagaaagactaaaaaaaaatgaagcaatcaaaaataactgcagcaacttttcaagacctaggtagtacaataaggtataaatagraacaacaacattttaaaagttggggacaaagttacagcatagagtttttgttaggtttctttttgcttgtttgtctatgcaagcagtgttgttaacagcttaaaagaataagttttaagatggtatttgcaagcctcatggcaacctaaaaattaaaaatcatacaacagacacacaaaattaaaagcaagaaatgaagtcataccactaaagaaaa

SEQ ID NO: 744888 - DNA, 583 bp, Homo sapiens
ttgaatccattctgcatgaagtccacttggcaggcaagatggctgtttgcagttccagacttccatcctcctagtttaacaaccacagtagaaaatgcttctttattttctctttgaaattactaaaaaaagactttgtctgaccttgcttggytcatatgcgcacccttggctcctgccatggttacatgcccattctgtatcctgaatggtgatttcctcaaggagaagaagctgccagacacaaagaagaggtctacttcaaagactgagtcaaatctgagttacctttgtattcctcctctacaggtattcaacctcccagatttttaatcagtggatgccagagaagcaaagtaacattgtcactgatgaatttatttaatatgaaaagaggccaaggtatgttactagaaagaaagaagtaaagcaaaagcagagaagattggcaggtaggagagcagatgtgaagagaaggggaaaacatacacaatgtgaaaaataaggtgaaatttgtctttgctttgttttatgtgcttgtagagagagtcagtaaaaaaccatggtgactttattcatgaga

SEQ ID NO: 744889 - DNA, 541 bp, Homo sapiens
ttttgagttctgagcacaggctgcctggaaccacaatagctgctgctaatggaacactgtgggtgtgagatctgcctttccaagtgagtggcagcaaggtggggcttactgccacctgctaaccccactccccttgcagatccttttgtgcagcagaggcagctgtgctcctccatggaacatcacaccagtagccagataattgccctccaattccgattacgcccattgctttcacccccaggtggggagccagagcatagattgccyggcccagcccccgcctggctttgcccctacaccctccctggtagcttaacacaacggacagggacttttgggaactccatcgccctgcccactgccagagtacttaccttgggtaacgtaaggcaagcacaaatctcaccactaccaccgcagctggctctcatttgcaagtttcacctcttggcgggaggccagcggacacagtccattacggcatctgcagcacaataactgggcccaagaaggagaaaacttttgtgcaaccgcagct

SEQ ID NO: 744890 - DNA, 627 bp, Homo sapiens
tgtagtttagttgagtcttctatctcaaggtttttttaagtccagaaccaagaggttagccagggctacaattatcgcaaagcttgaggagtgggtgatatgcttcccagttcactcatgtcgttgctggcaagattctgtttctcatggctgatgaactgagtgtttcggttccatgctggctgttggttggaggcttcccatggttcctgctctctgggcctctccatacagaagcttgcttcatcaaagaaagcaaatccmacccaagaaagagagagtaagcaggatggaagtaagtcttttataatttaaccttaacattgacctcttatcatatttgtcatgttatgttcattagaagcaaatcacagggtcaagcccacattcaaagaattactgggagtaatctcagaaaactcctcacatctcctttatatttcctagaaagccacccttgttgttactgctgctgctgctgatcttcttctttttcttttttttttttttttttgagatggagtttcgctcttgttgcccaggctggagtgcaatggcatgatctccactcgctgcaacctctgcctccctggttcaagtgattctcctgcctcagcctcccaagta

SEQ ID NO: 744891 - DNA, 627 bp, Homo sapiens
tgtagtttagttgagtcttctatctcaaggtttttttaagtccagaaccaagaggttagccagggctacaattatcgcaaagcttgaggagtgggtgatatgcttcccagttcactcatgtcgttgctggcaagattctgtttctcatggctgatgaactgagtgtttcggttccatgctggctgttggttggaggcttcccatggttcctgctctctgggcctctccatacagaagcttgcttcatcaaagaaagcaaatccaacccaagaaagagagagtaagcaggatggaagtaagtcttttataatttaaccttaacattgacctcttatcatatttgtcatgttatgttcattagaagcaaatcacagggtcaagcccacattcaaagaattactgggagtaatctcagaaaactcctcacatctccttyatatttcctagaaagccacccttgttgttactgctgctgctgctgatcttcttctttttcttttttttttttttttttgagatggagtttcgctcttgttgcccaggctggagtgcaatggcatgatctccactcgctgcaacctctgcctccctggttcaagtgattctcctgcctcagcctcccaagta

SEQ ID NO: 744892 - DNA, 623 bp, Homo sapiens
cgaagtgggaggatcacttgagtgcaggagttggagactagcctggataacatggcaaaaccccgtctcttactaaaatacacaaattagctgggcgtggtggtgagtgcctgtccccagctactcaggaggccaagacacaagaatcgtttcagcctggaaggcggagatggtagtgagctaagctcgtaccacagcactccaacctgggtgacagcatgagactctgtctcaaaaaaaagaaaaaattatatatatttttttttctggaaaaataaatacatttttgaataaatgaaaaatgtgagttttaaatcagaactgagktggaaaactagctccaatacttactaggcttttcagtttgggacaaattattattgctttttctgagccttagtttctccatatataaaaataagatttatagtatctattcaacagaattgctataaatgtgttttcaatattgttaataagacagtatgtggagaaagtgaaacccacatacactactggttggaatgtaaaatggtatagctgctttggaatcagtctatcagttcctccaaaggttaaacagagttactagatgacccagcaattccatctctaggtattta

SEQ ID NO: 744893 - DNA, 573 bp, Homo sapiens
aaaccaatagattttaatataaaagtatgaaaagtccattgatagggtttcagatcctctactggacctaacttttaagaaactgccacttgccaaatttggtgaagtatcaaagaagaatattcacaatagcacgaaaaggttgtaaaatactcctctctttaactccatatcaaaatgaggtcagattgccttcatacacttcaatcaaaaatttatcaaagccgactaaatgcagaaacagatacgagtccaacatctattaacccatacattaaagagatctgaaaaatgtaaaccaatgccactcttctcactaatttgtttttgtttagctatttggttacagctatttttcataaaaatttgtttcatgttactatgcagtggtaccatgatagctcactgtagccytgaacccctgggctaaaacgatctgcctgcctcagcttctccagtagctaagactacaggcacatgtcaccacacccagctactttttttaattttttgtagagatggggtcttgctatattgcccaggctggtcttgaactcctatctgcaagcattc

SEQ ID NO: 744894 - DNA, 573 bp, Homo sapiens
aaaccaatagattttaatataaaagtatgaaaagtccattgatagggtttcagatcctctactggacctaacttttaagaaactgccacttgccaaatttggtgaagtatcaaagaagaatattcacaatagcacgaaaaggttgtaaaatactcctctctttaactccatatcaaaatgaggtcagattgccttcatacacttcaatcaaaaatttatcaaagccgactaaatgcagaaacagatacgagtccaacatctattaacccatacattaaagagatctgaaaaatgtaaaccaatgccactcttctcactaatttgtttttgtttagctatttggttacagctatttttcataaaaatttgtttcatgttactatgcagtggtaccatgatagctcactgtagccctgaacccctgggctaaaaygatctgcctgcctcagcttctccagtagctaagactacaggcacatgtcaccacacccagctactttttttaattttttgtagagatggggtcttgctatattgcccaggctggtcttgaactcctatctgcaagcattc

SEQ ID NO: 744895 - DNA, 484 bp, Homo sapiens
tcatttttatccttgcttctcaatgccagccagtcatgaagctccatcagctattctttaatgtttcttatgctcatctctcttaccatacttataatcaccttagcacagggctttttcacacctcatacctaaactcttacaacagaccctaaactactttctctattttagtatctcctccaccaaatcaatcttaactgctactcccttcatcaagccactctcctgatcaaaaaacatcagtggctctccccygatgacaaaataaagtccaaactcctgaccctggcacttgaggccctccatccagatacaaccaatctttatacatttatcttcaccagtcaaacttcacttattgttgcctcctagcctttgctctgcctgtctctccctattttcctcactttcctttcttagtgttaggaaaccaactgagactattccaggtaactacgatctacccctcttctaaacacct

SEQ ID NO: 744896 - DNA, 569 bp, Homo sapiens
aaattatgctgcagtcccacaatggagtatatgtagctataaaaaagattgaagaaactatctgtaatttggtatgaagtgatttccaatgtaatttaatataaatttagaagaatgtttatagaatgccatcttttgtatagaaggaagaagaaatgagataacatacacatatctgttcaattgtgcagaaagaaacagaggaagggtaaactataaactattgagactggttatctagagatgatgggtgcaaatggagtagaaaagatggggttggtgtgagtagggtagaakggatgggatggggattagtagttgagtgactacttttcatatatttgtgtatttcagaaccatactactatttctcatactaaatatacaaacaaacaaacatgaatgaagaacccaaatgattacacacagagacaaagggatttaactgtatttcagatgatataaccatactgagcatgtataggggtagtgggtgggactacctaaataacattggaccagtattttgactatgtattttaagtccaaagaataaaagtactaaaaat

SEQ ID NO: 744897 - DNA, 573 bp, Homo sapiens
gactttgagaaaacaaatatataaactctcaggtactatggattatcctttcttccatatctgatgagcagcttacttgaaggtgtatcaaggattctattcaatggcttacaatagttccttgcaaaagtttaaaatagaaagcatagaatactttcactttctatagtacaaattgaagctataataasctgcatataattactcctggaaattttgttttggttaggaatgcaatgggagtgattaggacttagtattgtgatacagagtaagttacatctaggagaactctagggttctttgggaaactataaattaggatcaaggctattgttcttaagcaatttcaactcgcattggagtctcttttaagtttagagttcatcaccatcattgttattattaatatttttattactgttgttatccttgataaaagccacttgacataaactccctaattatcagaatgcttactttacctgcagatgtttaagttttggattttgagaacatcttacagtgacaaagacaggtgaatttgagggagaaaaatcatctggcggtgga

SEQ ID NO: 744898 - DNA, 573 bp, Homo sapiens
gactttgagaaaacaaatatataaactctcaggtactatggattatcctttcttccatatctgatgagcagcttacttgaaggtgtatcaaggattctattcaatggcttacaatagttccttgcaaaagtttaaaatagaaagcatagaatactttcactttctatagtacaaattgaagctataataagctgcatataattactcctggaaattttgttttggttaggaatgcaatgggagtgattaggacttagtattgtgatacagagtaagttacatctaggagaactctagggttctttgggaaactataaattasgatcaaggctattgttcttaagcaatttcaactcgcattggagtctcttttaagtttagagttcatcaccatcattgttattattaatatttttattactgttgttatccttgataaaagccacttgacataaactccctaattatcagaatgcttactttacctgcagatgtttaagttttggattttgagaacatcttacagtgacaaagacaggtgaatttgagggagaaaaatcatctggcggtgga

SEQ ID NO: 744899 - DNA, 599 bp, Homo sapiens
acacatgttttacaaacaatttgtacagttaactcaatcatcacagggtcctgaggcaacatacatcctcagcttacaaagatgatgggattaagagattaaagtaaagacaggcataggaaattataagagtattgattggggaagtgataaatgtccatgaaatcttcacaatttatgttcagagattgcagtaaagacaggygtaagaaattataaaagtattaattttgggaactaataaatgtccatgaaatcttcacaattaatgttcttctgccacggcttcagctggtccctccgttcagggtccctgacttcccgcaacattcagccatacatgatttcaaagggactataaaaagagtgtgcctttggtgttgcacagaatctcatgagggaaaaagggagatttttttgtccaccactggagggttactagagccaacttggtgagtttaacaagagaggtaatttttttcaactttgcctgaagattgaggcctgtagggtgtgtggagaacccattttatacctaaggatatagagatgccttgggtaatttgtctgaggaaggcaggcccattattggactggat

SEQ ID NO: 744900 - DNA, 624 bp, Homo sapiens
aaccaacaaataaataatagtccaatattattgtgcagtctctaaatttatttttttaaactaggataaaaaaagaaaactatctgagttttaccaaactatacaaatggaaaaatcaaattaagcctcttagaacctgtatcttagaagacaagtgtatttttcacaaaaggaaatactgggaaagttagcacactctgccagctatggctgaccagtcagaaaccctcagagaacatgcatattctctaaaaagaaaaaaggtagatggcagtgacttttctcggatcatggttgattgttatcagaacccaatttcaggtgttatttagtaagtacataagcaactaagctctggcaccagattgtctgggtctgaaacctggccacgcactcactacatgaactttgcttcttatctttatgcttcagtttccaattctttgtatactttctgtttctaaaattatattagyaaagcaagttttattttatgtttataatttcagcttttattttagattcagggggtacatgtgcaggtttattacctgagtatactgcatgatactgaggtttggggtattattgatcccatcactccggtattgagcctagtagttt

SEQ ID NO: 744901 - DNA, 648 bp, Homo sapiens
attattcataaataattttgatagttataaaaattaaattctgctacttaagcttttaaataattgcctttgctaaatatgattttatgaattaaaactgtgtcataaaattgaagcttgtacttgagttatacatattgctattattacattttcaccttaaaatacatggccacataaattcatacgaacagcgattcacagtcacaataatagtatttgataaaactagctaaatgctaacatttattgagcacttattgtgtgcaaatyagtttacatcaattattttaattatcccactcataataatatttatacatttttaaaatgaggaagttttgcaagtgtacatagctggtaaagggtaaaactggaattgaatcttaagtagaaatactgtagagcttgcatgattaaccacagtcccatatagcttcctataaaattaaaaagatatttggttcatcatgaagggcttatactatttactaaaaatgtgattgatatatttctggttgtatgtctatgtacgtatatatgtatatatacttttacacatgtaggtatatatgtatatgcacttacatatgtacacatttcacatttatacatgtatatatgtatttatacatttatacactacag

SEQ ID NO: 744902 - DNA, 565 bp, Homo sapiens
atcaactgagactctccaggggaaggatcctggcatccatatttgtcaaactcctcaggtgattccagagtgcagccaaggctaagcatgagctatttgagggcagcgtatctgtcttactaatcattatatctccrgggcttcctatggtgcttggcacagagtgggttttcagttaacatcagtgcctcctgtcagtatctcctcatggatgtcaaatgacttcaaccaacaggattctgaaaccaaacccagagcccgtctctcttccaagttttccttctcagcatttgcatccccatatatctagtagtatgagccagaaatttaggattcaacttcaatgccccctatcacccccaacattcgggccctttactgtgcttgatgatttgacatgctgaatctctctcatatctatgcattcatttctatacccaccagcaccacccaaatactatccaagtatccaaattcaagatactatcatcaatcccctcaactaccttaaaagctcccaagctgggctatctctgtagcgtagtccaaccaatccattctccac

SEQ ID NO: 744903 - DNA, 565 bp, Homo sapiens
atcaactgagactctccaggggaaggatcctggcatccatatttgtcaaactcctcaggtgattccagagtgcagccaaggctaagcatgagctatttgagggcagcgtatctgtcttactaatcattatatctccagggcttcctatggtgcttggcacagagtgggttttcagttaacatcagtgcctcctgtcartatctcctcatggatgtcaaatgacttcaaccaacaggattctgaaaccaaacccagagcccgtctctcttccaagttttccttctcagcatttgcatccccatatatctagtagtatgagccagaaatttaggattcaacttcaatgccccctatcacccccaacattcgggccctttactgtgcttgatgatttgacatgctgaatctctctcatatctatgcattcatttctatacccaccagcaccacccaaatactatccaagtatccaaattcaagatactatcatcaatcccctcaactaccttaaaagctcccaagctgggctatctctgtagcgtagtccaaccaatccattctccac

SEQ ID NO: 744904 - DNA, 650 bp, Homo sapiens
gtgctttacatccacccttctcagaacacaagaccctccctagatccctgaggattgtgggcattcctagcacactccagagttttacttttttgttttgttggtgaggaggcagttatgcaaaggtgggagagaagtgagctcgggtaacaccaccaccatgataactgtcatgaaatttcatcaattctttcactgctttctgtttgctcacccctccccgactctctctgttgtactttcattgtaagagaagaagccatgtctctgttcccaccaccattcctgacctggagcgaacattcaacaaacgtttgtggactgaatgaatgatgggactttactccatttcatcacttcccattttccattctctatttttcctccttttttgctgatggttcactctttatttttttggaaagccagttctaagataaacagtagcaaaagcaatagctgaaataaagacaaaagamttagtttctttgaactgtttttattttacaatttgatattacattattaaattatgttactgtttcctaacacattttcctttgtgtaactcacttatcaccatttggctccttgtaggtgcataaaataattttctctttgattgtaatgaactagagtaagggtacaac

SEQ ID NO: 744905 - DNA, 576 bp, Homo sapiens
gatgaaattaaacaaactactacagacttgtatgctaacactcaatattcaaagtgaacccaaatcattcaacaaatatttatttaatgccttttgtgtgcaaggcattgtagtagagaacacaatagactttctcatttagatataaacagtttaatcttttcagaaaggacctaatcattaaatggaaagtatgtccactattcatgagaatctcagtttgcatcttttcaggataaagttaaaaactgtggtctgggtgcagtggcttacgcctgtaatcccaacactttaggaggtgggcagatcacgaggttaggagattgagaccatcwtggccaacatggtgaaactccgtctctactaaaaatacaaaaattagcccaggtgtggtggcacgcacctgtagtcccagctacttaggaggatgagacaaaggaaacacgtgaacccaggaggcagaggttgcagtgagccgagatcgtgccactgcactccagcctgggcaacagagcaagactctgaaaaaaaagtgcaagaagaataaagcagaactggtgagtagttgaatataga

SEQ ID NO: 744906 - DNA, 615 bp, Homo sapiens
tatgtatgtaatcaattcatgatactgactccatccaccaaaatcacataaatgttgtaccactactggccaggtgagttttggcaggttactttaagacttacaaactcagtggggtttttcattttgttttgtttttgtctaaccttggccagcataatttgttctaattttcctatagctagaagtagaaaacacaaaactgtaatataagtatcattcccatgagcattaccctattgatatccaacctctcccaagagttcctagaaagtgtctaggaaagacacatgggaacattgaggtaggtgtttcaagtagaaaaaaaaaaaattcaatgggtagagaaagaccctcactgaatggggataaaaaaattccactccatgttttgggttgaaatgtaatgaaagatgacaataataagcctttttttccttattaaacctgaatcttctcacatttcmttgatggcttctgagtggttactaagtgtgcagctcagtgattgccaaaagaaaaagttattttaagaatgaaaagttgccaacattttctgaagggaaaaacactgaatagcaaagagctaatgccatcatgttcatcctgaatatc

SEQ ID NO: 744907 - DNA, 368 bp, Homo sapiens
aatgtattttttctaaaggaatgaagagaatcactctcacattctgagtctgctttccttttcagtgtaaatgggattatgtaattgtgtagatacttaaaatttaagaaattgtagttaaatgcacatgattacactgatgattatattcccagtttttccctttttttttttttgagttggaaaggtaatagatggacatagtgaacaattcatagtaraaaagcttgtacactgaaaagtaggctttttcctactccaggtatccagaacctttttttgagacagtcattgtttacagctgtttctgaatctttccagaaaaaatgaattcttctgtcagcacatacatatgtttatacaaaaga

SEQ ID NO: 744908 - DNA, 577 bp, Homo sapiens
aaaggctgattcgaggaagttttgggcttcaagagtcagccaggaggcaggcgctaggcctggaaatggcccgacagtcatgagttgggcctaaatgggccactgtgagggaggagctgtgcctgttgaggctgctggcaggcaggcagaaacttggcctggggcagctgccatgaggcaagagctgggcctggagaagcccctgggaggcaagagcagggcctgcagaggctattctcaagtcaaagctgggcctgttcatgccaccgggaagcagaaggtgggcctggagagtttgacttgaggaagttttgggcctacattkgccgccgtgagctggacaggaactgggccaaaaaaggctgttgtgaggcagcagttgtgcctgtagactcagctaagaggaagagctgggcctggagaagcccccatgaggcagaggttgggcctgtagatgctgacaggaggcaggaactgggcctggagaggtcaacttgaggagattttgggccttcataggccaccagaaggcagcagttgggactagagaggctgatttgaggaagttttgggcctg

SEQ ID NO: 744909 - DNA, 608 bp, Homo sapiens
aaaaattcgtgagactgcaaaggcaaccaatgaaagaaaaacacatttgatatggatttcaaaatatcaagagaatctggaaaggaaaccaagatcagcttttggttgcagctcatatggctgtttgtgagttaactagcttagaagggaagtaaatagtttatgagagagaaaaagatagatattctggaaatcattattaagctgaaatttctgcatctaattttggaatgtttatgtttagaaagtcacatgcacaatgaaaatgtgtgtttcaggtttgtggagaaaaacagcgctttgagaagttgatggaacatttcaggaatgaagacaataacatagattttatggtgagttatttcagtattcaataaagcaaactcagtttcaatactttttttctaaatacacacacacacacacacacacacacacacacacacrtatttatattacaaaggacagggaattgcaattaatatgctatagatccaatctagaatgtccctcttaatctgtatttctctttgatttccattttattccttacatacacggtatagtaaagacaaaagtactaatcatagcaaataaaggggaagccg

SEQ ID NO: 744910 - DNA, 637 bp, Homo sapiens
gtctctttttcattgtgcactattatattttatgttatctggtttccaaggaacacatacagatgcaagtattatcaaatttaaacatagctgaaggtcattgaagattttagcatttacctgcaatgcgacttgtccatagtaaccttagtttcagactgtctgtaatacatagtggtagaaaggtttatgtcgtatgggggaaaagccaaaaacatggtttccagattctggcttttagaaggaggtggaaaatttgaagctaagtaccaaagccaagcgcttaggaaagagcattagcaaagtcagcagtgtggccatttaaagtaaatgaaatttacttgaartttgacttaacctttgcaatttggtcatccgttagaatataaagaagccgtcactaattgcaatttaaatatcttaatttcttggaactttgaaacatacatattcatacttttgctataggaacaagcaaagcagttgcgaaagagaaattgggaagccttaaaaaacatacttgacaacatggctaatgtaacatgctctaccacttggtctgaagcccagcagtatctgatggataatccaacttttgcagaagatgaggagttacaaagtaagaataatggctaag

SEQ ID NO: 744911 - DNA, 655 bp, Homo sapiens
attatgattttaaaaaatgcaaacagtacaaaaggtatataaccctttccctcccaatagacaaccactcttaaccatttctggaatattctcccagatacatttttaggtatacctcccccctctacacagatgtacttaggtgatcctcctgcctcggcctcccaaagtgttgggattacaggcgtgagctaccgtgcatgcctggccaccaacaatattctttatagcaaaaaaacaaaaaacaaagaaaatmatttagtttgaaatcagctgctgcatttagttgtcatggttctttagcttcctccttttcagaaaagtcctttagtttttcctcatctgagggttaaaggccagttatttcttggaatgtccctcaatctgagattctctaatgtttccttcagattagattcaagtgatgtgtcttcagcaggaatatcacaggagtgacgctgggatctcagtgcatcgcagtacatggtttttacttgttctgtcactgctgacgctcactttgatcacttggctcaggcggtggctattcagcttcttcactgtgaagtgactccttttctccttaggcctaattagtattttgtcaggaggaattttgaaaatataccccgtttctcatcagactttcaatgta

SEQ ID NO: 744912 - DNA, 655 bp, Homo sapiens
attatgattttaaaaaatgcaaacagtacaaaaggtatataaccctttccctcccaatagacaaccactcttaaccatttctggaatattctcccagatacatttttaggtatacctcccccctctacacagatgtacttaggtgatcctcctgcctcggcctcccaaagtgttgggattacaggcgtgagctaccgtgcatgcctggccaccaacaatattctttatagcaaaaaaacaaaaaacaaagaaaataatttagtttgaaatcagctgctgcatttagttgtcatggttctttagcttcctccttttcagaaragtcctttagtttttcctcatctgagggttaaaggccagttatttcttggaatgtccctcaatctgagattctctaatgtttccttcagattagattcaagtgatgtgtcttcagcaggaatatcacaggagtgacgctgggatctcagtgcatcgcagtacatggtttttacttgttctgtcactgctgacgctcactttgatcacttggctcaggcggtggctattcagcttcttcactgtgaagtgactccttttctccttaggcctaattagtattttgtcaggaggaattttgaaaatataccccgtttctcatcagactttcaatgta

SEQ ID NO: 744913 - DNA, 612 bp, Homo sapiens
atgtatcaatgcgaagacatttgctacaagtgaagtttacttcatgacataaatttacaagaggaaacagcttgctcttctagattttctgttaaacaacaatcactaattattgagcttatttgagcttagtttatgagcttacgtagaaaaagtcacttgtactgtcaaattgtactcatgatttctactgtttatatttccaactgcaaagcaaatmtgttttgtttctagttaggaatggttggaatgaaatgaaaaggctcctgactggctgtcaggagacctgggctttggctcctgccatgacaccctcccactgccaccaagtcccttgtctagcataattacctcatttgcaatatgaagaggttggatggattaacctctaaatctatagtgtgaccctcagtgcatcctagatcctaactttatataaccaaatgtaagtgaacattatagaagctctccaagatcttgcaaaaaaggttaactaaatggagtaatgatttgacactttggctgtatatcctgagacctggcttagtttggttgattgtcaaaaatcactagaagagtaatagagaactggaaatagagtagacgtcaaat

SEQ ID NO: 744914 - DNA, 646 bp, Homo sapiens
tccagctattgatcttataaatttcttatatatgttttctgcagatatgtaagagtagcttttggacactcacacacacatacacatgtacacacacctaggaatggaatggaattgctatgtaataaaggtgtttgaatatctagtcttacaagaaaatagaaacctgtcttccaacagtaatttacacatctatcagcaatgtgaaatagatttcattgatcccattctctcaaacactggatttcttgatttttgccattgaatggttgtagatgatatctcattcagatcttgactgcatttcccacatccctaatgaaatcaaacatttctcatatttattggtcttatgtaattactcatgtaaaataccgttcatgtcttttgcctacttttcttttgaattcttttcttttttatttctagaagtttatgtttttgatacttaycctaatgtcggttatgtatattgcagtatattctcccagtttatagcttagcattctgctcttttaaaaaatgttttgctatatacagacattttaattttaatgtaaacaaaattaccaattgtctttattattagcaacatggttattttaagaaatcttcccctacttaaagattagaactacagttttca

SEQ ID NO: 744915 - DNA, 608 bp, Homo sapiens
cctgcttcacttttgcctcctgtcatgattgtaagtttcctcaggcctcctcagaagttacgcagacaccagcattgtgcttcctgtatagcctgtggaaacgtgagccaattaaacctcttttctttataaattatccaatctcaggtatttatttatagcagtgcaagaatggactactacagaaaattggtaccagagaagtgagaaataaccataaagatacctgaaaatgtggaagcagctttggaactaggtaacaaacagaggctggaagagtgtggagggctcagaagaagataggaaggtgagggaaaatttgaaagttcctaaagacttgttgagtgttggtgaccaaaatactaatagtgatatggacaatgaatttcaggctgaggtctctgatggaaatgaggaacttactgggaactggaataaatgttttgctaygctttagtgaggagcctggctgcattatgcctctagatttgagatctgtggaacctttaacttgagagaggaaatttagagtatctaacagaataaatttctaagcagtaaagcattcaagatatggcctggatgcttctaatatcctgcactcatat

SEQ ID NO: 744916 - DNA, 603 bp, Homo sapiens
cagaggctcaaagtgacacctgtgcagaggctgccagtgctgtggtattgcaggcccagattcccttcttttaccttaattagctggacgtataggatttggctccagaaaacccagtttttaatgcaagcttcgaccatcttacttgctgtgtaaccttatggaagtgagtccacctctctgagtatttgtttcctcatttgtacaaccagcctgagcactatctaaactctcataggtttcatgaggttgtttgttttgttttgctctattgtgggtcaagttcagtgagagaagccaggtacaaggagtggagcttgcagtcgaattaaaaaacaatcaaagcaataattttaatgcaacatgaggaatgtgagaaaagtgttaaaagtgatttaataaatgcatatgtgcrtagtgttcaataaagcctgagggaaatatgtggtgtaggcagaaacgacgaatcaggcaaagcttatgtgaagtggtgcttcatctgaggatggaaggtgaggagtcaggtcagggaaacacagtgggaggaacatcaatctagagaagcttcagtgtttggcttatttcacttagcacaatgtcctg

SEQ ID NO: 744917 - DNA, 603 bp, Homo sapiens
cagaggctcaaagtgacacctgtgcagaggctgccagtgctgtggtattgcaggcccagattcccttcttttaccttaattagctggacgtataggatttggctccagaaaacccagtttttaatgcaagcttcgaccatcttacttgctgtgtaaccttatggaagtgagtccacctctctgagtatttgtttcctcatttgtacaaccagcctgagcactatctaaactctcataggtttcatgaggttgtttgttttgttttgctctattgtgggtcaagttcagtgagagaagccaggtacaaggagtggagcttgcagtcgaattaaaaaacaatcaaagcaataattttaatgcaacatgaggaatgtgagaaaagtgttaaaagtgatttaataaatgcatatgtgcatagtgttcartaaagcctgagggaaatatgtggtgtaggcagaaacgacgaatcaggcaaagcttatgtgaagtggtgcttcatctgaggatggaaggtgaggagtcaggtcagggaaacacagtgggaggaacatcaatctagagaagcttcagtgtttggcttatttcacttagcacaatgtcctg

SEQ ID NO: 744918 - DNA, 562 bp, Homo sapiens
gagagggcactggcctccatagagaggcaacatttgttccccatgagcaatgcaaggaagcacagagcatagttcctggtggaagtggtcacacctacccaagacatggacatgggtcctgtgtcccccatctgtgctgagatgragctttcagctgtaactcagatatgacgtcttctgcttcctgactccatatgctaggtatttgggttggtaatctattgtggggttgtgtgggcttttttttttcctgctttaatatctttaatctgtgtggagtttcttctattagtttctgccagaaagatgcagaccaggttttcacaaatcccaacttaaatcctgaatatggagccaatgtcagataacattgtcaaccttattgtgtgctgggtgctgtaatttgcatgcattgcctcatttaatccatgtaaggattttatgaggtagtactgatattccgactattttacagatggagaaacaggtgaggaaaggccacagagctaaaaagtgctggagtcataactggaaccccagctatctgaccccttatttgtat

SEQ ID NO: 744919 - DNA, 562 bp, Homo sapiens
gagagggcactggcctccatagagaggcaacatttgttccccatgagcaatgcaaggaagcacagagcatagttcctggtggaagtggtcacacctacccaagacatggacatgggtcctgtgtcccccatctgtgctgagatggagctttcagctgtaactcagatatgacgtcttctgcttcctgactccatatgctaggtatttgggttggtaatctattgtggggttgtgtgggcttttttttttcctgctttaatatctttaatctgtgtggagtttcttctattagtttctgccagaaagatgcagaccaggttttcacaaatcccaacttaaatcctgaatatggagccaatgtcagataacattgtcaaccttattgtgtgctgggtgctgtaatttgcatgcatkgcctcatttaatccatgtaaggattttatgaggtagtactgatattccgactattttacagatggagaaacaggtgaggaaaggccacagagctaaaaagtgctggagtcataactggaaccccagctatctgaccccttatttgtat

SEQ ID NO: 744920 - DNA, 598 bp, Homo sapiens
ctatacatctatctacaaatttactttgttattactgataatttttttctttttttttttttctcaagacagaatctcattctatcacccaggctggagtgcagtggtgcaattatagctcactgaagccctgacctcccagactcaagcaatcttcctgcctaagcctccaagtagctgggactacaagtgtgtgccaccatgcccagctaatttttgtattttttgtagagttcagggtcccacaatgttgcccatgctggtcttgaactcctgggctcaggtgatcckcctgcctcaacctcccaaagtgctgggattacaggcatattttcttggctggaagcctcttgcattctggaggtccaatagtgcttctacacctctgttggaacttcctggctcctgaaagagtttggtcattccttcctcccttccacaaacatttactgagcacctgctaacttccagatactttgttaagctcttaggtcccgaagaaagattgggccacctgaactggtcacatggcagcacccctgacttctaaaaggttatggtttgcttgggaagacagagaagttaacacataatttca

SEQ ID NO: 744921 - DNA, 598 bp, Homo sapiens
ctatacatctatctacaaatttactttgttattactgataatttttttctttttttttttttctcaagacagaatctcattctatcacccaggctggagtgcagtggtgcaattatagctcactgaagccctgacctcccagactcaagcaatcttcctgcctaagcctccaagtagctgggactacaagtgtgtgccaccatgcccagctaatttttgtattttttgtagagttcagggtcccacaatgttgcccatgctggtcttgaactcctgggctcaggtgatcctcctgcctcaacctcccaaagtgctgggattacaggcatattttcttggctggaagcstcttgcattctggaggtccaatagtgcttctacacctctgttggaacttcctggctcctgaaagagtttggtcattccttcctcccttccacaaacatttactgagcacctgctaacttccagatactttgttaagctcttaggtcccgaagaaagattgggccacctgaactggtcacatggcagcacccctgacttctaaaaggttatggtttgcttgggaagacagagaagttaacacataatttca

SEQ ID NO: 744922 - DNA, 596 bp, Homo sapiens
taaaaaaaaaaaaaatccctaaataaatatactttttttattctctaatttagcgtcatctatttctttctcttttatgtgacctgatccataaacttaataatagagcaaccaatgtctttcccgttcttactgaaagattatcttgggccttgacttttgctccaacrttttctggtctgcacctcagatctcctgtagtgctgacagttaaaattacctgacctagtaaacaacattacataggcagaattgaaaaataaaacttgaagagtaagttgacccttgtttgtaatcatactcaaatatcctcactgacctgtactacaggtacatcatcaaatgctttaataaaatcctcttcatcaacagcaccagctccttcttttgcagctgtaaaaaagaattttaaaaatgtaaacaatatgaaacaacgtctataacacatacactgaagaagtctaaacatacacaatcaaaattacattttggaagattcagaacatttttttaaaaggcttcatataactttgaagtgtcatgaaattgacaaacattactgacttcatatcaagatgaaatatagtaattctaca

SEQ ID NO: 744923 - DNA, 596 bp, Homo sapiens
taaaaaaaaaaaaaatccctaaataaatatactttttttattctctaatttagcgtcatctatttctttctcttttatgtgacctgatccataaacttaataatagagcaaccaatgtctttcccgttcttactgaaagattatcttgggccttgacttttgctccaacattttctggtctgcacctcagatctcctgtagtgctgacagttaaaattacctgacctagtaaacaacattacataggcagaattgaaaaataaaacttgaagagtaagttgacccttgtttgtaatcatactcaaatatcctcactgacctgtactacaggtacatcatcaaatgctttaataaaatcctcttcatcaacagcaccagctccttcttttgcarctgtaaaaaagaattttaaaaatgtaaacaatatgaaacaacgtctataacacatacactgaagaagtctaaacatacacaatcaaaattacattttggaagattcagaacatttttttaaaaggcttcatataactttgaagtgtcatgaaattgacaaacattactgacttcatatcaagatgaaatatagtaattctaca

SEQ ID NO: 744924 - DNA, 703 bp, Homo sapiens
acaaaatcctggtctaattcaaggatccaaacaggtcttttgctgaactctggagtacaccacagaagattttcaaggactggaagcctcagtttagccgctaatagtagcaggaggagagggtaaacaaaggagacctggtacgaatcctggcctcacaattttactgtcttttagactatgggcaagtcacttaycctctctcaacctcagcctcatttataacatgggaattaaaaagcctaacttgcaaaactggggaatcttagggaaggtggagctaaacatctaagaccatacctagaacacaggataggctcattaaaatggcagctattatacatgcaattttacatctcttgacacaaagtatttaaaattgccttaggtaacatgtgcaaaagaaaaattttaaaatgttcagagctacttgaaatcagtatcacattataattaaagaccaagaaaaaatgggccgggggtggggagggtccaatacaaggataaaaacagcataaacagattattaacaaatccattcctaatagtttttagcaacgattaattatatcacttattttggtagaaactagcaaagaaaaaattggcacaaacacttcatagttataataagctcagaaacaagtgaaatataatttaactgtgaaggcagtcaaagagcaataagtactagatcaggatg

SEQ ID NO: 744925 - DNA, 669 bp, Homo sapiens
aacactgcacagttattctatctgtgatacataaaaatgcctgaatctcagttttcctctcctgtttgattaagctgaagtaaaagaagcagaaccttaagtatgctcgactatataaaagtaaatagagtatatcataaaagccaagtaaacttctcaaagagaaatagaattaaaagtcaagtgcatgcckttatgttttctgattcccgctgtgatttaagtttaatctctgggttcctaaacaaaaatttcagataactatccacttaacatttttctaaggatctagacttgcagtaaagatacttacttacttaaatagacctactgtatgagacaatactattaaaagaaaatgtactagtacttttgtgtatgcctgaagaaatcagtttgctaattttaggactttgccaggtggactgatgctgatttccaagattgtctggccctatgtctttcttgacatactagaaaggacatttgatgtacacactgtgatatgtacagggaaaccatagcccttgtcctgaaatgacttaggaaataaatttgtctatccccactgcctttgatcttattaaaagtcatcgaggcttattcctagcactgagaacatagaaacaggcatttgattatgcgcacatcacatggtgatacgatggt

SEQ ID NO: 744926 - DNA, 467 bp, Homo sapiens
tttgagaagaacagaagggttattttgtaattgaatttacatacctttgatgtttcacattgttacattctaatcatgatttgtggcaggaccaccaaaggaatgacagtgtgcccttcccaggaagcatgtgagactcactggtcccaggatttgatcacttgattaaggggctgttcccattagacactgtgaaagtactgcttttccctttgtaattaaggagcgytaatgattttggcaggggcaatttgggtaattcaaaacattcgattttttgaaagattttttttctagtttttggctcttataaataaagcttctatggagagtgtcagataaaggttcctaaatacattgggttgtcagggaaggtttcgttaacaaggtaattatcaattagaagtgcaatgtggaaaccagtttgagtagggaatacttatttgtataacttagagtaggtttgg

SEQ ID NO: 744927 - DNA, 467 bp, Homo sapiens
tttgagaagaacagaagggttattttgtaattgaatttacatacctttgatgtttcacattgttacattctaatcatgatttgtggcaggaccaccaaaggaatgacagtgtgcccttcccaggaagcatgtgagactcactggtcccaggatttgatcacttgattaaggggctgttcccattagacactgtgaaagtactgcttttccctttgtaattaaggagcgtyaatgattttggcaggggcaatttgggtaattcaaaacattcgattttttgaaagattttttttctagtttttggctcttataaataaagcttctatggagagtgtcagataaaggttcctaaatacattgggttgtcagggaaggtttcgttaacaaggtaattatcaattagaagtgcaatgtggaaaccagtttgagtagggaatacttatttgtataacttagagtaggtttgg

SEQ ID NO: 744928 - DNA, 662 bp, Homo sapiens
tatatacaataaggatcaaaataataaaagaatagaaattgtccttcaggctagaggataggcatagggtgggagacaagaagggaaataagtaggataaattgctggaaataatcagacttttcatggaagttagtacaaggtgcaaattcacatcaatatcccttttagttgggtgccagtgtcagaatagagagtatacaaaatgttgtggggataccatgagaagaactcactaggagagattaagaaaggcttcagtgagaaaatgacatttcagtttcatcttgaagatttatgatacaggcagttggtgagaatgtttcaggcacaaaagacrccaaaaataaaatcagaaagacaggaaacaatgcatttagaagaaagttggagctattttccagattcctgaaaagcagtagctgttgacttgggcattctgaaaagcctggacctggaattccctccagaaatctctggtactcacagtcttttctcctgctgccactgcaaattagaggaagtgatgagttgctaagagtcgtactagggagtcagcagactgtggcccctaaagattcacatcttaattttgttataaaaaacctttgcttataagactgaaatcactttaccttaaaccagagattctttcttcttgc

SEQ ID NO: 744929 - DNA, 662 bp, Homo sapiens
tatatacaataaggatcaaaataataaaagaatagaaattgtccttcaggctagaggataggcatagggtgggagacaagaagggaaataagtaggataaattgctggaaataatcagacttttcatggaagttagtacaaggtgcaaattcacatcaatatcccttttagttgggtgccagtgtcagaatagagagtatacaaaatgttgtggggataccatgagaagaactcactaggagagattaagaaaggcttcagtgagaaaatgacatttcagtttcatcttgaagatttatgatacaggcagttggtgagaatgtttcaggcacaaaagacgccaaaaataaaatcagaaagacaggaaacaatgcatttagaagaaagttggagctattttccagattcctgaaaagyagtagctgttgacttgggcattctgaaaagcctggacctggaattccctccagaaatctctggtactcacagtcttttctcctgctgccactgcaaattagaggaagtgatgagttgctaagagtcgtactagggagtcagcagactgtggcccctaaagattcacatcttaattttgttataaaaaacctttgcttataagactgaaatcactttaccttaaaccagagattctttcttcttgc

SEQ ID NO: 744930 - DNA, 662 bp, Homo sapiens
tatatacaataaggatcaaaataataaaagaatagaaattgtccttcaggctagaggataggcatagggtgggagacaagaagggaaataagtaggataaattgctggaaataatcagacttttcatggaagttagtacaaggtgcaaattcacatcaatatcccttttagttgggtgccagtgtcagaatagagagtatacaaaatgttgtggggataccatgagaagaactcactaggagagattaagaaaggcttcagtgagaaaatgacatttcagtttcatcttgaagatttatgatacaggcagttggtgagaatgtttcaggcacaaaagacgccaaaaataaaatcagaaagacaggaaacaatgcatttagaagaaagttggagctattttccagattcctgaaaagcagtagctgttgacttgggcattctgaaaagcctggacctggaattccctccagaaatctctggtrctcacagtcttttctcctgctgccactgcaaattagaggaagtgatgagttgctaagagtcgtactagggagtcagcagactgtggcccctaaagattcacatcttaattttgttataaaaaacctttgcttataagactgaaatcactttaccttaaaccagagattctttcttcttgc

SEQ ID NO: 744931 - DNA, 530 bp, Homo sapiens
agaatggagtcaaagagaaacagatgcagcatctctgtggtactctccccaaaagtccatcatctcagtctaaagtgaaagaacatcagacaaatccgacgtgagggacattcaacaaaatactgatcagtacttttcaaaaagtatcaaggtcatgaaggatwaggaaagattaagaaactaccacagaatgaagagactaaaaagacacaataattaaatgcaatgtaatatcctgtattggattaacaaaataaagtaacaagtcacagactgggagaaaatattttcaaatcttgtatttgataaaagctatgtaagaagaatatataaagaattctttaataagaagacagacaacccaattaaaacttaggtaaaatatgtgaatagacaattcactagagacaatacttaatggcaaacaagcacatgaaaagctgttcaacatcattacttacatggaaatgcaaattaaagccacaatgtaatacacattattagaatggctataatcaaaaagacaaaaa

SEQ ID NO: 744932 - DNA, 500 bp, Homo sapiens
tgcggttttggcatttagtattgtattagaaaggtctcctcctgttagaatattattaaaatattcatattttcttccagcattttaatagtattattttttcatatcaaaattgttaatttatctgaaatttatttccatgtaaagtgtgaggtaaggatctaaacttttcccccaaatattagtctgttatcataatgtcttttatttgaataaaccatccttctactttacctttatattamattctaatgaatatttagatccattctgtggacatctattctggcccattgattgatttctactgttatggccagtatcaccctgttctaattagtgactctttaaaatacatttttatctcttttagagcaccttacccactactcttttctgagctatttttgtgtaatattattccaaatgaattatataatttttgtcagatttcaaaaaatcccattagaactttgattgcatttgcattaaatttttgc

SEQ ID NO: 744933 - DNA, 583 bp, Homo sapiens
ttgtgttcctggaacctggttccatgccttggcacatagtgcatgctcaatgtatatttctcaagtgagtgaattagtgaatgagttctatttctcagtttgaaagagcttgctagttgatgggaaatgcctgtaaaacactgctggatgtgttaaatgcttccagaagttcacagaacatgcactcagaggaagatattactcccccggctcgttcatacacattcctcatcccttgctttgtttttagmaactttttgtagtatcattcacagacaatggtgttgttttagaatttaaagtaatatttattaagcagtcctacacctgaatccatgcttatttcatggattaaccaacctttctctgtgcagagatgtctgtactctctagtagcctggttgtgaagatgtccttcgagtaaccttaagaaagaaatgtggaaatgccatctttataacatgactttgtattatctgtgagtatgaacagaaacatattttggtaagtttttccccaaataaaaatagatgtcttattttttctttttttaaattagtaattcactaataatcaaagaaaa

SEQ ID NO: 744934 - DNA, 485 bp, Homo sapiens
tccaaaaattcccccaagaaaacgaccaccttgtagtaatctcaatgcaggtaaactgctttgagagtctttcttcagagatgccagaggcatggaaaggatagcaacatctgcacactttaccatcaaacatccagacatattagaaagagaaatcaaatattctgattggctaatawgtctgagcagggacaaatggaccataattctctgttcagaatttatgaagattcatcatcatttaattaacaatataaatattaaaaaaacattttataataaaattttataattgtaataagacaccctagtgcatgaattatggggtactaattcccacccagttttgttgaaactggacatgaatgaatacattaaaatgcatactatgtcatgtcttagcagttaaaaaataaagtggcaaaaaagtgtttcaaaattcaaagtcctattcccttagaatataagcaaagaaattcaatgaa

SEQ ID NO: 744935 - DNA, 604 bp, Homo sapiens
cagctggcctcattaaagcaagggaggaagggagagagggagggtgctgggacaagacagtgagagcagaacagaagccactgtctttttatgtcccatcccattacttctgcaatgttctgtgtagtcccctccatactcaaggagaggggtcccacagggtgtgaatgccaggargtggggattgctgggtatctcagaggctgcctctcacaggcataaaggcaggcctgtgccttgttcacctgtcctggggtggcacacttcacttttgctatctgtctcatcaggtgaccacgactgaccacggggacgctgggaaggcagtctagtggaggttcaggagccacaggatatggtgagaagagtgaccacagtcaggctctgcctcaccaggtggaagctcccttcctccaggacctgcaaggctccctgccctcatcagccccccagcctatgagatgctctgtctcacctgctggaaggtattttccccttcatgcttctggctaagatagtttgtacttcggattctcgctcttccactcaaacctagggcttgggtttttggaaacaaaatccataaattcttgcgggggatgag

SEQ ID NO: 744936 - DNA, 610 bp, Homo sapiens
aggctggcagcacagcaggaagagctggcttacacaggccagccctataggtggcccagttatcacctcccagatgctagtcactgagctctcaggaggcagcggacacagtggttcagagcttgggttttggggtcagttggcctgggttcaaatcccatgactgttctttttttttttttttttttgagacggagtctcgctctgttgcccaagctggggtgcagtggcgtgatctcggctcactgcaagctccgcctcctgggttcacgccattctcctgcctcagcctcccgagtagctgggactacaggcrcccgccaccatgcccggctaatttttttgtatttttagcagagacggggtttcattgtgttagccaggatggtctcgatctcctgaccttgtgaaccaccagcctcggcctcccaaagtgttgggattacaggcgtgagccaccgcacccagtgactgttctttctgttggcaagattatttttttccccactaagagccttagtcttcttatctgtagagtgggtttacttccctgggtgatgataaggattagtgagatagagtttgtatgcactccttgcatggcagtatt

SEQ ID NO: 744937 - DNA, 610 bp, Homo sapiens
aggctggcagcacagcaggaagagctggcttacacaggccagccctataggtggcccagttatcacctcccagatgctagtcactgagctctcaggaggcagcggacacagtggttcagagcttgggttttggggtcagttggcctgggttcaaatcccatgactgttctttttttttttttttttttgagacggagtctcgctctgttgcccaagctggggtgcagtggcgtgatctcggctcactgcaagctccgcctcctgggttcacgccattctcctgcctcagcctcccgagtagctgggactacaggcgcccgccaccatgcccggctaatttttttgtatttttagcagagacggggtttcattgtgttagccaggatggtctcgatctcctgaccttgtgaaccaccagcctcggcctcccaaagtgttgggattacaggcgtgagccaccgcacccagtgactgytctttctgttggcaagattatttttttccccactaagagccttagtcttcttatctgtagagtgggtttacttccctgggtgatgataaggattagtgagatagagtttgtatgcactccttgcatggcagtatt

SEQ ID NO: 744938 - DNA, 657 bp, Homo sapiens
gggggttcccttgtaagtgatgaattgtttttcttttgctgctgtcaagattttctccctgtatttggctttcagcttttctttctgtctctctctctttctttctccccttccttcttcctttccttccttccttccttttctttctttctttccttccttccctccctccctccctccctcccaccttccttccttccttccttccttcctttcttccttcctttcttccttccttccttccttcaacagagtcttgctcagtcacccaggctggagtgcagtggcaccatctcagctcactgcaacctccacctcctgggttcaaccgattctcctgcctcagcctcccaagtagctgggattacaggcccccaccattatgcccagctaattattttttgtatttttagtagagacgaggtttcatcatgttggccaggctggtctcaaactcttaacctcaggtgatccacccaccttgaactcccaaagtgctgggattacaggcgtgagccactrggcccggcggctttcagcatttctaatgtgatatatttatttgtggatctctttgcatgtatcctatttagagtttattgagcttcctgggtatgtagattgtttttcaataaattcgtgacattttcagccatt

SEQ ID NO: 744939 - DNA, 625 bp, Homo sapiens
aattatccaccctccagatggatgatctggtccagtcaaccctattttagtggaaacatcatcacacagggtttgttaatccatttatttttataaagagaacttcctatgcgatctaaaattcatcagaaagccaagactaacagctctgaccaaatccaaattctatctgtccatcctataatggttttcactcggcagggcgcggtggctcacacctgtaatcccagtactttgggaggccgaggcgagcagatcacgaagtcaggagatcgagaccatcctggctaacacaatgaaaccccgtctctactaaaaatacaaaaaattagctaggcatggtggcacgcacctgtagtcccagctactcgggaggctgaggcaggagaatcgcttgaacctgggaggcagaggttgcagtgagctgagattgtgacactgcattccagcctgggtgacagagygagactccatctcaaaaaaaaatcagttttcacgcagccatgagaggatttaagaggaacgatctgatgaaaagtctctctacttaagaatttgacctttccagagactaggcatgacaccaagagcagacactgaatgtaaaaaatatgcctttacagtt

SEQ ID NO: 744940 - DNA, 670 bp, Homo sapiens
tttcctaattgaatacagtgttggaagttctggccagggcaatcaggcaggagaaagaaataaagggtattcaattaggaaatttttttttttatttttagtagagacggggtttcactgtgttagccaggatggtctccatctcctgaccttgtgatcggcccgccttggcctcccaaagtgctggtattacaggcgtgagccaccatgcctgacccttcctctgtatttttttaaaagctgatatgaggacttgtttccaacacatctcttcattcattgcatttgcttattcgacatttgctgaaggcctgttataccaggcatgtgctaagctaatgcacagctaatgaccgcacagtgagcaaatcacagactttaaggagcttgtagacaggtagtaggggtrgtggaagaggcaggccaatcagtaagtcattagttatgatttgtttggctctcagtggcgggaatcccgggaggggagcccctgggagcgtgcatagtggttgaaagcagcgactcagaagccgcactgctgtggctcattaactgcatccttggtcaagttacttagcctcttggtgcctcaatttctttgtctttggaataaagatgaaacctgtaggctgtggtgtggctgaaatgagttaatacacttggaacagtg

SEQ ID NO: 744941 - DNA, 564 bp, Homo sapiens
cagcttccttccccaggggagtagagtccttagcttcctctcaccaaccaagtctccatccagctccgtcctctggggaggacatgcccttcactcaaaacaccaagtaggagcttctcagccccctccccccggcttctcctgagagacaccccatgattctctgctgctggctgacacaagagaagacaaagagggcacaggtgagatgctgattggtgagacctccctcagggaagacgaggaggaggtaggagggccaagaaggaccagagagtctccaccttggcttagcctgggaggcrctgccatctaaggtgatgttttctcagagatcacagccagatctccatgtggtcggggtgggcgtgaggtgagcccctcctcagaccccatctccttgaggagctcaggctcttggaattcagtatacacacagatcgggaaacttcatttcatagacggggatggagtggttctgcggctgaccgtaggctgcagtgatggttcctgatgggcttggtgggggcctagggggcaggaacacatggggagaaaggcatg

SEQ ID NO: 744942 - DNA, 567 bp, Homo sapiens
aaatgtggtgtctacttttctaacagacatctactgataccgatatcactctacattcacagggtgtgctgtattttatgaaggcatttcatagacatggttttatttaatcctaaaaatgtcacaactctgctagtttataatcgtcttctgggtttaggtaccttcctcaaatgagaatccttcaaagtattgtgatttctaaagctccccaagtggggagcttatacctgtgttctttccagtaacgttagtggaattatatttaagcttcacaaagttctgtagattcttcatgtatttgactgtgacaaccccatggtctgaayctgttgagaatccatttacacttcttaaagagcccatctgcacagtgttctgggactggtgtccaggtatttccctcccaccagggagattctatgggacaaatctttcttttctctgtcctggtacagaccgatgtgtaagatgagacttgcaaacatggagaacagggtaagatctcatgctccccagagactggctcgaaccaggtaattcctgcaatgaggatggtcctcgtgg

SEQ ID NO: 744943 - DNA, 577 bp, Homo sapiens
tcaaatagatgtagtagcctatcagttggtttgtgtctgtgtgtgtatacacgtgtttcccaaaagattatggcgctcagtagcaatcaatacagacacacaggatgagatttaaatatgcagctggatctttcaatagatagacttctggctctctaattcgactcatatgaattgccttcatttctttaggacaagcattttgaggtgtaagaaaaaaggtattcatctaagatgacatgcatgtcggactcacattctatgcttggctgaacaaggatcaactgctttattagaccagattcacagcatacrtgcaggtccaaacaatatgatttctgattttaagagttcttattactcaaaatatcaaaagatagtcactgcaaaagcccaaaaagaagtacagaatccatcaagagttaagattccctgcaaatcataaaccattctttagacagactgaaaggcattatcttcttttgttttgagacagagtctcgctctttcgtccaggctggagtgccgtggcatgatctcggctcactgcaagctccgcctcccgggttcacaccat

SEQ ID NO: 744944 - DNA, 625 bp, Homo sapiens
ggatttttttttttttttttttgagtctgggtcttgctgtgcaaggctagagtgcagtggtgtggtcatagctcactgcagctgcagtcttgaactcctggactcaagcaatcctgccttggcatcccaaagtgctgggattacagacatgagccaccacacttagccagtcagaggtcttttttaatggaaattccagtttaaagaaatattctatatagacacatttgctagaattcacctggggtaatgaaggaatagttgatgacaaaaagaaatgttattcaatgttttctttagaaagggcagaccaaatyattttaactgctggtattttttatatgatgtgacagaacataatcttccagggtgttagaatctggaacattaattatttgtgctatagctatatatttattactcttcaaaaggccacttcctaatccactgtttgactttgggcacatcatctactctagggtcccatttcctttctgaaaaataaggaaactgcattggaatctactagatcagtgcttctcaatactatctgacccaatgccccatttttagaacaaatgttaaaataaatctcatgcataatataacctacctagaaacagaa

SEQ ID NO: 744945 - DNA, 653 bp, Homo sapiens
atgaaactgtacatagacagctctcaaaaacttcccaagtccaagaaacccagaaaaacacccataacagctttcttccgtgtcataggaaaactgttcttttagcgaaaatttataatgaagcagaattctgctaaataagatggctgtttatttgggagactrtccttgtgactttaagacattggagctgttagatttctcactgtcactgatcctttcaccctgtttttacaatgttttatatatatatatatatatatatatatatataatatatataagatatctgaaatatatttatatattatataatataatatataatactacatatatataatatatatgtagtatttgagtctatcaactttaagctaccagaggcaaaaccagtttaatgttcatgtcttctgaatccaaattctaatatttattcaaatattcactaatctaggagcatttctttggggaggcttcaggagtacagattatagtgggccgaatgtagacaccagaatagactataatgcaagagacaacaattgagatggatgaagttggtcactgcatttggccatttgtaagaaagattgtacacaatgttttatacttatgatgactttgtgctatattaaattttaaagaggata

SEQ ID NO: 744946 - DNA, 653 bp, Homo sapiens
atgaaactgtacatagacagctctcaaaaacttcccaagtccaagaaacccagaaaaacacccataacagctttcttccgtgtcataggaaaactgttcttttagcgaaaatttataatgaagcagaattctgctaaataagatggctgtttatttgggagactgtccttgtgactttaagacattggagctgttagatttctcactgtcactgatcctttcaccctgtttttacaatgttttatatatatatatatatatatatawatatataatatatataagatatctgaaatatatttatatattatataatataatatataatactacatatatataatatatatgtagtatttgagtctatcaactttaagctaccagaggcaaaaccagtttaatgttcatgtcttctgaatccaaattctaatatttattcaaatattcactaatctaggagcatttctttggggaggcttcaggagtacagattatagtgggccgaatgtagacaccagaatagactataatgcaagagacaacaattgagatggatgaagttggtcactgcatttggccatttgtaagaaagattgtacacaatgttttatacttatgatgactttgtgctatattaaattttaaagaggata

SEQ ID NO: 744947 - DNA, 653 bp, Homo sapiens
atgaaactgtacatagacagctctcaaaaacttcccaagtccaagaaacccagaaaaacacccataacagctttcttccgtgtcataggaaaactgttcttttagcgaaaatttataatgaagcagaattctgctaaataagatggctgtttatttgggagactgtccttgtgactttaagacattggagctgttagatttctcactgtcactgatcctttcaccctgtttttacaatgttttatatatatatatatatatatatatatatataatatatataagatatctgaaatatatttatatattatataatataatatataatactacatatatataatatatatgtagtatttgagtctatcaactttaagctaccagaggcaaaaccagtttaatgttcatgtcttstgaatccaaattctaatatttattcaaatattcactaatctaggagcatttctttggggaggcttcaggagtacagattatagtgggccgaatgtagacaccagaatagactataatgcaagagacaacaattgagatggatgaagttggtcactgcatttggccatttgtaagaaagattgtacacaatgttttatacttatgatgactttgtgctatattaaattttaaagaggata

SEQ ID NO: 744948 - DNA, 608 bp, Homo sapiens
atgaatttcattcaatattcattcaaacaaattattggatacctattagtattcaagtgagctaggacaatgttcttgctttccaggtgctcatcaactgtctgggggggataacagttaacaaagcagttaagcaacaatctaaatgttcagcattggtagttcagctcagagtaccataggtggatggattaactgggtcagaaaagtctgggaagcattttggaagaggttgtactagctggtccaggaaggacgggtgagaagggtcatatttttctcctatttcaagtatggagatgccatcctttaaaatgtgagtggggctcgcgggcattgtagcctctgcatccaatgtcacctggggayagtgctttcccagtacatctcagatgtcccatccagaaccagatggatttcaggaacagcaggaattccaagtaaagggccagatagccggaactctctgaagagagccaaagtagatcttctccaccctgacataccacaggcatagcctttgccaggagtagaaatatgagcctcagtacctgtgtatttaataaattcaccattacttttccttgaggattcctgcctgtgagata

SEQ ID NO: 744949 - DNA, 608 bp, Homo sapiens
atgaatttcattcaatattcattcaaacaaattattggatacctattagtattcaagtgagctaggacaatgttcttgctttccaggtgctcatcaactgtctgggggggataacagttaacaaagcagttaagcaacaatctaaatgttcagcattggtagttcagctcagagtaccataggtggatggattaactgggtcagaaaagtctgggaagcattttggaagaggttgtactagctggtccaggaaggacgggtgagaagggtcatatttttctcctatttcaagtatggagatgccatcctttaaaatgtgagtggggctcgcgggcattgtagcctctgcatccaatgtcacctggggatagtgctttcccagtacatctcagatgtcccatccagaaccagawggatttcaggaacagcaggaattccaagtaaagggccagatagccggaactctctgaagagagccaaagtagatcttctccaccctgacataccacaggcatagcctttgccaggagtagaaatatgagcctcagtacctgtgtatttaataaattcaccattacttttccttgaggattcctgcctgtgagata

SEQ ID NO: 744950 - DNA, 629 bp, Homo sapiens
ccccccctgcaataacatctgcagacacgttgaatccactaatagactcactgggggcagatggtgctccagaatcccaagcctgacccaaggcacaagttcatttgaaggccagcataggccagggtgagtgtactcagcgatggacaactgaagcctctggcatctgccttatggaaaaaaggaaagttgtgccactatatttgaaattgcttcggattccaatgacttctgtttttgcttttggtggggacagcaatttaaaggatagactcttagggagtggaacattttaacwtgtagaattttaggtagccactcttgaaaaccacataaaataagtccctaagtgcctcaaggctcattgcgcaaaatgtttaattgtggctcactggggaggtcggtcagcaggtatcctgctgttctgccagaactcagcctccgtatcttttctctggggttctcacaaggagcccaggacattgtctgccttggaggtgggttctcttctcctccccttctcctgtcctttatcagcctccctacctgccctgcccagcctgatgtagtgtggttgcataatttagttatatgatttgatacaagcataccttgttttattgtgcttc

SEQ ID NO: 744951 - DNA, 605 bp, Homo sapiens
cctatctgaatctttggccaattgctgacttcccccatgaaacatccatatttaaccggagtaactggtggcagcatgcaacaccatctatgtctcaaacgcagaagttttcaaaattcacccgtttgttgtgtcagtgtagtaggggcactctcgccgccattaatgagagtgataacgctgatatcatagtcaatgcccggctccagccctgtgactgtgtagtatcctactgaggagtccacaaaatcttcaaaaatagggataccttctcctgccgcaactactgtgatgcggtacccaataatggtggaagagtttagcggggtccacctcaggccgatgcttgaatcggttatatcaacaaagcttargtcagtgagttggggcacctctattgagttacaaagcaaaggggggggaggcaaaaggaaaatagagggaaaaaaagaggaaaaaataaagcagtgtatatcaggttactagtagtaaaattggtggaatgttaaagcaatgatggtaatatgcaatctgttttaaattctctgaaaagacttcctaagcatcatgaacagtttgcttccctagaagaataaacaggaata

SEQ ID NO: 744952 - DNA, 626 bp, Homo sapiens
aaaaattaatctgaagactacaaacataaaaaggttactgtctataaaacacacaactttgccattcagatgtcctaaagtctttcatatactttatatgtagttttaccaatgttagagcaagagaaaaagacaaccttctctttaaatccagaaaagagcgagaaaaatagttttgtgggcatactcaaagaaacagaggtggtaattacggcagcccactctaagagtgacatttctctgtttcagcccactaaaaaaatgtgcaaagaaacaagtaggccattgtggctgtattttcttttttcttttttttttttgagacggagtctcacactgttgctcaggctggagtgcggtggcayattcttgcaatctccacctcccgggttcaagtgattctcctgcctcaacctcctgagtagctgagattacaggtgcacaccaccacgcccagctaatttttgtatctttagtagagacagggtttcaccatgttggctaggctggtctcgaactcctgacctcaagtgatccacccgccttggcatcccaaaatgctgagattacaggtgtgagccaccgcgcccagcctgtggctgtattttctaaagcttgttgcacca

SEQ ID NO: 744953 - DNA, 643 bp, Homo sapiens
ccagtactatgcctctcattcacagccggtgcctcgggcctggctcactctgccagccaactgactctcttctctgtaccgaggtctcagttcaagccccacctctaaaaggccagctctgattttccaatccaaagtagctctttctgcccgttttcagtctttgtcttacttaagttttctccacagaatttatgaamcactgaaattactatctttatttgttcatttccctaaggagtgagagacttcactttccagctcactgttatatttcaatgcctaaaactgaaccaggttcttatggtgaatgaatgaatgaatgaatgaatgaatgaaaaaaatgtaggtcaagaatacaggttctgtgggaaggaccaaacaaatacttttcagttcagaaaataaaatttaaaaacaaaacaaagaaaatgaatagctgaaattcataataagtcagaaaaggtaattcaaataactttataatgcagtactctgacaatatattctcagtaagatatagtctaaaaataaaacaaatgtaaagaaatcttgacctgagtaggtttttattggtaatgatattggtgttgtttaacaaactattttgtgtataataaagcaattaatatatagatttaca

SEQ ID NO: 744954 - DNA, 582 bp, Homo sapiens
cattaggtatatagttgatttgttatgcagccatagataaccaggacagctatgccagctatgaagtgccatgcagtcatctcgggggtcccactcacaacatctccccatactcctaggaagctggctgggctcaactctaagtgcaaagcattgtgcaaagggaagggcatgaaactggggggccctgcatctcctgggggttagagtactgaacttcctccacccactgccttctcagagatgagcaccctacatctggatctgcctcaggccctcttgtatatgactaagaatattggcttggtgtggtggctcatgcctgtaatccyggtactttgggagactgaggcgggaggatccttgagcccaggagtttgagaccagcctgggcaacacaacaagaccctatctctacaaaaaatagaaaaaaattgggcgggcgcagtggctcacgcctgtaatcccagcactttgggaggccaaggtgggcagatcacctgaggtcgggagcttaagaccccatctctactaaaaataaaaaattagcccggtgtggtggtgcatgcctataatcccagg

SEQ ID NO: 744955 - DNA, 623 bp, Homo sapiens
acattttgaaaagtaaatgcaaaccatttttccttagcataaagcctccacacccagttcatcaacttctaaaaggcttctacctaagcagcaagactttactgtctacaaactaagactttctttagcaaaggacagttggacacaactcatgagcattctgtgtkcaaatgagtaacacgatggccatgcaacatcactcttttgtacttgtgctgcaaggtaagcgaagtggcttcctccataggaagtatgtggctcacgcacactgcagtgtccaagccatgacagtggttttaaataagtcagagcacaaccaaccacactaaacatctatcagggcccacaaaggtaacgatcaccaaaacgtacaacacaacatttatttagtataacatctttttaaagaccatctgtctttctagcaaatgaaaaacaaaaaaattaaactcaatttataccaaaatgttcatctctctctctcacagccctacagaaactcaccaaatattttctaatatttacagaatgacaaagagacattaagctttttagaaattgtgcctcagtgagaacattattggtataagaacaacatgtactactctctcttaaatggatcc

SEQ ID NO: 744956 - DNA, 623 bp, Homo sapiens
acattttgaaaagtaaatgcaaaccatttttccttagcataaagcctccacacccagttcatcaacttctaaaaggcttctacctaagcagcaagactttactgtctacaaactaagactttctttagcaaaggacagttggacacaactcatgagcattctgtgtgcaaatgagkaacacgatggccatgcaacatcactcttttgtacttgtgctgcaaggtaagcgaagtggcttcctccataggaagtatgtggctcacgcacactgcagtgtccaagccatgacagtggttttaaataagtcagagcacaaccaaccacactaaacatctatcagggcccacaaaggtaacgatcaccaaaacgtacaacacaacatttatttagtataacatctttttaaagaccatctgtctttctagcaaatgaaaaacaaaaaaattaaactcaatttataccaaaatgttcatctctctctctcacagccctacagaaactcaccaaatattttctaatatttacagaatgacaaagagacattaagctttttagaaattgtgcctcagtgagaacattattggtataagaacaacatgtactactctctcttaaatggatcc

SEQ ID NO: 744957 - DNA, 623 bp, Homo sapiens
acattttgaaaagtaaatgcaaaccatttttccttagcataaagcctccacacccagttcatcaacttctaaaaggcttctacctaagcagcaagactttactgtctacaaactaagactttctttagcaaaggacagttggacacaactcatgagcattctgtgtgcaaatgagtaacacgatgkccatgcaacatcactcttttgtacttgtgctgcaaggtaagcgaagtggcttcctccataggaagtatgtggctcacgcacactgcagtgtccaagccatgacagtggttttaaataagtcagagcacaaccaaccacactaaacatctatcagggcccacaaaggtaacgatcaccaaaacgtacaacacaacatttatttagtataacatctttttaaagaccatctgtctttctagcaaatgaaaaacaaaaaaattaaactcaatttataccaaaatgttcatctctctctctcacagccctacagaaactcaccaaatattttctaatatttacagaatgacaaagagacattaagctttttagaaattgtgcctcagtgagaacattattggtataagaacaacatgtactactctctcttaaatggatcc

SEQ ID NO: 744958 - DNA, 571 bp, Homo sapiens
caggctctgtaagaggatctcctcctcctgtctgtctttcagacaaaagaagataggatgacaaagcagaagaccagagagaaagagatttgaagatgctaccctgctggctttggagatggaagcaagggccatgagccaagaggtgtatgtggcttttggaagcaggtaaaggcaaggatagcccctggagcctccagaaggagccagccctgctgacgccttgactttagcctagtgaaactgattgctgacttctggcctccagaatgataagagaatacagttgtgttttcttgtttgtttgttttgagacagggtcttgctctgtcacccagactggagtgagtgggtccattttggctccctgaagccactacctcccaggctcaagtgatcctcscaccttagcctctcgaatagctgggaccacaggtgcacaccaccacacccggctaatttttttttatagatggggtctccctatggtgccagggctggtctcaaactcctgagctcaaaggatccttctgccttgcctcctaaagtgctgggattacaggtgtaaagc

SEQ ID NO: 744959 - DNA, 571 bp, Homo sapiens
caggctctgtaagaggatctcctcctcctgtctgtctttcagacaaaagaagataggatgacaaagcagaagaccagagagaaagagatttgaagatgctaccctgctggctttggagatggaagcaagggccatgagccaagaggtgtatgtggcttttggaagcaggtaaaggcaaggatagcccctggagcctccagaaggagccagccctgctgacgccttgactttagcctagtgaaactgattgctgacttctggcctccagaatgataagagaatacagttgtgttttcttgtttgtttgttttgagacagggtcttgctctgtcacccagactggagtgagtgggtccattttggctccctgaagccactacctcccaggctcaagtgatcctcgcmccttagcctctcgaatagctgggaccacaggtgcacaccaccacacccggctaatttttttttatagatggggtctccctatggtgccagggctggtctcaaactcctgagctcaaaggatccttctgccttgcctcctaaagtgctgggattacaggtgtaaagc

SEQ ID NO: 744960 - DNA, 655 bp, Homo sapiens
ataagttaggggtccaatttattcttttgcatgtgaatatataacaccattattgaaaagacaattctgtcattggattgtttgacacgcttgtcaaaatcaattgatcacagatacatgagtttattttttactctcaattcgattccattgatctatatgtttatccttatgccagtactacacyattttgattgctcttgccttgtaataaattttgaaactgagacatgtgagccccccaaccttgttctttttcaagattatgttggaatgggtgcagtggctcatgcctgtaatcccaacacattgggaggccaaggtgggaagatcacttgaggccaggatttcgagaccagcctgggtaacaaagagcctgtctctccaaaaaatagaaaaatattagctgggcatgatggtgtatacatatagtcccagctacttgagaggccaaggtgggaggatcacttaaaccagtgaggttgagactgcagtgggctgtgatcacacccttgcactccagcctgggtgacagagcaagactctgtctcaaaaaacaaagattattttgggttctttgaatttccatatgaagtttaaggattaggttatcaatttctgccaaaaagccaactgagatttaatagggattgtg

SEQ ID NO: 744961 - DNA, 638 bp, Homo sapiens
gcatcacattccacactttatggaggaagaaacaagatgagtgaggctatgtaagaagagggaggatgaaactcaggccagctgtgaacttgataaaatcactatgtggtttggttttagctttgcgcttttctttttttcttttttcttttttttttttgagacagartgttgtcctgttgccaaggctggagtgcagtggtgcaatccgctcactgggctcaagcaaccctctgaagtagctgggactacaggtgcacaccaccatgcctgactaattttttctttctttttttattgtttagaaatggggtcttgctatgttactgaggctgatattgaacttctggcctcaagcaatcctcctgccttggcctcccaaagtgctgggattacaggcgtgagccactgcgcccagcctgtgagtttattttataactttatatttgtgatttgtgtgtgtgtgtgtatcatagttagaacagcgataccattttcaggagcacactagaaacctagggccatgggtgcaggttgatgtcttacactagtcccagctcctgattaatttcagtactttagtgatagagtgatttccagttgatacaaagaagcagtcagtttttcaaacactcacc

SEQ ID NO: 744962 - DNA, 638 bp, Homo sapiens
gcatcacattccacactttatggaggaagaaacaagatgagtgaggctatgtaagaagagggaggatgaaactcaggccagctgtgaacttgataaaatcactatgtggtttggttttagctttgcgcttttctttttttcttttttcttttttttttttgagacagagtgttgtcctgttgccaaggctggagtgcagtggtgcaatccgctcactgggctcaagcaaccctctgaagtagctgggactacaggtgcacaccaccatgcctgactaattttttctttctttttttattgtttagaaatggggtcttgctatgttactgaggctgatattgaacttctggcctcaagcaatcctcctgccttggcctcccaaagtgctgggattayaggcgtgagccactgcgcccagcctgtgagtttattttataactttatatttgtgatttgtgtgtgtgtgtgtatcatagttagaacagcgataccattttcaggagcacactagaaacctagggccatgggtgcaggttgatgtcttacactagtcccagctcctgattaatttcagtactttagtgatagagtgatttccagttgatacaaagaagcagtcagtttttcaaacactcacc

SEQ ID NO: 744963 - DNA, 629 bp, Homo sapiens
gtagtggtgcatgcttgtagtcccagctactcaggaagttgaggtgggaggatcaattgagcctgggatgtcgaggctgcagtgagctgaaattgcacactgcactccaacctgggcaacagagcaagaccctgtcttaggaaaaaaaataaaaaaacactgatgaaaaaaaattgaagaggatacaaacaaatggaaagacatcccatgctcattaatcagaagaattaatgttgttaaaatgactatacaacccaaagcaatctacagattcaatgtaattcctaacaaaataccaatgacattcttcacagaaattaaaaaaagaaatcttaaaattcatatrgaagtacaaaaatcctgaatagccaaagcaatcctgaagaagggggaaaaatgcaaagctgtagtcatcacactaccagacttcaaaatataccacaaagctatagaaaccaaaatagcatggtgctgtcatttaaaaaaaaaaaaaaaaaaaaaaagacacatgggctaatggaacaggataaagaacccagaaattaatctgcatatctatagctaactgatttttgacaaagcctccaagaatactcactggggaaactacagtctcttcaataaatggt

SEQ ID NO: 744964 - DNA, 638 bp, Homo sapiens
aaactatccaccagagggcaacagattgtaaaagactgggcacggaacaataagacagacaaaattatgatttattgagtactaggtttgtttccagggctatgttcaacacttccatatgacaaacagtgaaagaattgggattcattggcccggaaaagagaaaacctagtgagggggctgtgattaaggcatcatgtggatcagtgtgataattacagccaggtatttgaaatgctggtgtttggtgtcaaggggtctccatggacagaactagtaaaccataaatgttgctccaggaaagtagagcatttcaacctacagatttccccctaacaattgtcatcccggaatcaacagttaaagccaagactggatggacctttgacatatatgttwttgtgggaatttctcattgtgtagttgaatcttgaatgtccaaaaacaaacacggtctcgctctgttgttcaggctggagtgcactggcatgatctcggctcactggaacctctgcctcctgattcaggcgattctcctgcctcagcttcctgagtagctgggattacagatgtgcaccaccacatccggctaatttttgcattgttagtagagatggggtttcgccgtgttggccagg

SEQ ID NO: 744965 - DNA, 517 bp, Homo sapiens
tattaattcttccaatccatgaacatgggatagctttcaattttatttgtgtcatcttcaattttttcatcaatgttttatagttttcagtatacacattcttcacttcctcatttaaatttactcccagctattttttaaatgatattgtaaataaaattgtgtccttgttaattgagagtttttagcttgaagggtgttgaaatttatcaaaggccttttctkcatctattgagataatcatgtggtttttgttatcagttctgtttacgtgatgggttgcatttattgatttccatatgttgaacgaaccttgcatcccagggatgaagctgacttgatagtggaggataagtttttgatgtgttgctggattcaatttgccagtattttattgaggatattcacattgatgttcatcaggtatattggcctgaaattttctttttttgttgtgtctgtgccaggttttggtatcaggatgatgctggctgcataaaatgagctggggaggagt

SEQ ID NO: 744966 - DNA, 549 bp, Homo sapiens
aatcagaaatgaaaaaggagacattacaaatgataccacataaatacaaaagatcatcagagacttatgaaaaactatatactgacaaactggaaaacacagaggaaatggataaattcctagaaacatatgacctgtcaagattgaatcaagaagaaatagaaaacctaaacagactaaaaatgagtagtgagattgaatcagtaattttaaaaatttcccaamaaagaaaagccctgtaccagatggatttatagtcgaattacaccaagtgtacaaagaactaataccaatccttatgaaactattacaaaaaatcaaaaggatggaatattttctagttcatttgacaaggctagcatcacctgataccaaaaccagacaaggacacaacaaaaaaaacaagatccttgaagaacatagacacaaaattcctgaaaaagcatttaataaaattcaacatgtcttcatgataaaaactctcaaaaaactaagcatagaaggaatatacctcaaataataaaggccatatatgacaaatctacaact

SEQ ID NO: 744967 - DNA, 529 bp, Homo sapiens
ccaaggaggtgaacaatctctacaagaactacaaaatactaatgaaagaaattgaaggtgacaaaaagaagtggaaaaacatcccatgttcatggatcagaagaattaatatcattagtatgaccatattgcccaaagcaatctacagattcaatacaatccctatcaaaatgccaatgtcattcttcacagaattagaaaaaacaatcctaaaatttatatggaaccaaaatagagcccaaatagccaaagcaatcctgagyaaaacacaacaaagctggaggtatcacgtcacctcacttcaaaatatattacaaggctatatagtaacccaaacaacatgatattggtataaacatagacacaaagaccaatggaacagaaaagagaatccagaaatagtcacatatttgcagccaatggatcttcagcaaagcctaggagaacttaggttaaggaaaggataccatgttcaataaatggtattgggaaaattggatagctactttcagaaaaaggaactggatcc

SEQ ID NO: 744968 - DNA, 573 bp, Homo sapiens
cagttttccattgacatataattctaaagtaattggaaatatgctttctgttttcttttcctgtctttcaaaatttatgtttaaaatataatttccagaaggaggaaagaactaacattgtttgaataccacacattaactctacacaacaggtatttttattgccattttctttagagatataaaaacaaagtcttaaattgattaagtaacttgtcaatttttagattgcagaataagtcytgctctagaattaatacgtgtgtttaatcataacatttatatactttttctataatgttattatcctactcatcacacctgcaagaaaaacctacagtgcagaagatgaaaactgaaagataattttttatcatataatactgaaaatatatagcatgggaaatctattttaatctgttaaaatatccaactatcatacaagatctgtaggtgtatttgcatgtgtaatatttagttaatccactgtattttaggctcctcattgcgggagggtgacacatctgttttgtttgctcctatatcaccagcgcctagtatggaacctggcac

SEQ ID NO: 744969 - DNA, 573 bp, Homo sapiens
cagttttccattgacatataattctaaagtaattggaaatatgctttctgttttcttttcctgtctttcaaaatttatgtttaaaatataatttccagaaggaggaaagaactaacattgtttgaataccacacattaactctacacaacaggtatttttattgccattttctttagagatataaaaacaaagtcttaaattgattaagtaacttgtcaatttttagattgcagaataagtcctgctctagaattaatacgtgtgtttaatcataacatttatatactttttctataatgttattatcctactcatcacacytgcaagaaaaacctacagtgcagaagatgaaaactgaaagataattttttatcatataatactgaaaatatatagcatgggaaatctattttaatctgttaaaatatccaactatcatacaagatctgtaggtgtatttgcatgtgtaatatttagttaatccactgtattttaggctcctcattgcgggagggtgacacatctgttttgtttgctcctatatcaccagcgcctagtatggaacctggcac

SEQ ID NO: 744970 - DNA, 573 bp, Homo sapiens
cagttttccattgacatataattctaaagtaattggaaatatgctttctgttttcttttcctgtctttcaaaatttatgtttaaaatataatttccagaaggaggaaagaactaacattgtttgaataccacacattaactctacacaacaggtatttttattgccattttctttagagatataaaaacaaagtcttaaattgattaagtaacttgtcaatttttagattgcagaataagtcctgctctagaattaatacgtgtgtttaatcataacatttatatactttttctataatgttattatcctactcatcacacctgcaagaaaaacytacagtgcagaagatgaaaactgaaagataattttttatcatataatactgaaaatatatagcatgggaaatctattttaatctgttaaaatatccaactatcatacaagatctgtaggtgtatttgcatgtgtaatatttagttaatccactgtattttaggctcctcattgcgggagggtgacacatctgttttgtttgctcctatatcaccagcgcctagtatggaacctggcac

SEQ ID NO: 744971 - DNA, 535 bp, Homo sapiens
gcacccattaacccatcatttacattaggtatatctcccaatgctatccttcccacctccccccaccccacaacaggcccgatgtgtgatgttccccactctgtgtccaagtgttctcattgttcaattcccacctatgagcgagaacacgcrgtgtttggttttctgtccttgcgacaatttgctcagaatgatcgtttccagcttcatccacttcatccatgtccctacaaaggacatgaactcatccaaaaaaaaggtctttatataatgataaagagatcaatttaacaaaaagatctagcaatcctaaatatatatgcacccaacaccacagcacccaaattcataaagtaaatactactagacctaaggaaatagatagacagcaacacaataatagtgggggactacacactgacagcattagacataccactgaggcagaaagtcaaaaaagaaactctggacttcaatcagactctagaccaaatgaatctaacagacatttatagaacattgtgcccaacaattg

SEQ ID NO: 744972 - DNA, 615 bp, Homo sapiens
tcacattcttcaagataacataataatgatgcttgtttcatgaaagaagggattaaaagaagactgaagatcacttagtacagtgcctgacatgtaacaaatgctcattaaatgttattattattattataaaatcaatcatatgtgcaacttgatgaagccctgggggatgaaaaaggggggctcattggcagacaatttaagcagcttggaaacgtatgttggcatacctgtgagcacatatgataatattgcataatgaatcctctaagttccattctattgtcaaaaaaatttgtttcagaaatggagctacaacttattccagagttagacttttgtggccatggtgaacaygatccttttaaatagagagaagggcctgggtaagtttaaactgaattaggttctcagttctcccaggctttgactttgtcatctgtcacttccctctcaaagggctggcaaagcccagggcagttcaggattctctcatctgaagttctgtccgtcgattctgaggggagtctggggctgctgacagtagatggcctgcctctcacatctcactattctttgatctcacagttacaattgtgttgcttttggttttta

SEQ ID NO: 744973 - DNA, 563 bp, Homo sapiens
cctgaggcacagtctcaagaggtcctgagaacatatacccaaggtggtttgggttacagcttggtttgatacatcattcaatgcatgtgagatatacattggtttggaacggaaaggtgagacaatgcaaagcgggaagggggtggggctgaaggtcagaggtggattcaaagattttctgattggcaattggttggaagagttaggttaccatctgaagacgtggaatcaatagaaaagagtgtctgggttaaaataaggggtkgtggagaccaagggtcttaagaagtccttaggtggccacccttagagataatagatggcaaatgtttcctattcacacctttaaaaggggctagaatctcgattaatctcttcaggatttcagggcctggaagggaaaagatctaattatgttaatagagattctttacagatgcaaactatcccccacaaaagacggctttgcagagccatttcaaaatatggcaaagaaatatattttgaggtttttcagtctagttaaaaaaaaagtgaggtaaaatattttgatttccttttta

SEQ ID NO: 744974 - DNA, 556 bp, Homo sapiens
ttgagatggagtctcgctctgtcaccaggctggagtgcggtgacaactgcaagctctgcctccatgggttcacgccattctcctgcctcagcctcccaagtagctgggactgcaggcgtgtgccaccacacccagctaagttttgtatttttagtagagacggggtttcaccatgttgggcaggatggtctcaatctcctaaccttgtgatccgcccacctcgkcctcccaaagtgctgggattacaggtgtgagccaccgcgcacagccaaaattcttaccttactaaaaattcttagcttgtgaagaaaactaagaccaactagcttaagaaaaaaatgtgttgtctcatataattgaaaagcaaagttggctttagccataactagatcggggagcttaaaaactgtcattggtacttaatttctccatctttccaactcatggttctatctttttctttgttgattgtgcttccaggcagactttccccttatgatatcaagatggctcaccagcagctccaaactcacatctctgccagcatgacaactct

SEQ ID NO: 744975 - DNA, 574 bp, Homo sapiens
tttgttttcctttcacaccctatactggacataattaactcatgtccagaaggaaaatgtgtgaaggccaaatgtttttctcatctactattgttccaatacttgaaaacaacaacaacaacaacaaacctaagctaggaagatttgaacatttaaaagccagataattcttttagaaaaggttaaattgttaggacacagtgagaggtcttgagacttttggagggacttaagaattcaagaccctgtcaatgatttgacttgcctacagaaagtaaacataaaacacaaagggaacccctagttgcttttcaataacatggcaacttcatggtccccctcccacccccgcctctctgcacacaccctctcttgccattgcagaaagatractaatggcttatatacaagagatagcagttaatataagacacatgatgttatacaataattaggcaaaattagagtatttacatttcaactaccttggttctttattttttacaaaagtgaaaaatagtgatgggttgatacagccccctggtaaagctcaagttgtcactttcaactttta

SEQ ID NO: 744976 - DNA, 627 bp, Homo sapiens
ttgctacgacgggtgagtgccgctcccccaaatcccttgggttgtctgggttgcagagcaattcctccacttctctagacctctgttctttcccacagtggcgagaacgtcatctctttaatcattatctgatcattaagtaaaagttgaagaagacaatgtttgaataaagaggagcatcaacaactatttccatcttgtcaactgttgtttccaaatctttttttttttttagatggagtttcacccttgttgcccaggctggagtgcaatagcacgatcttggctcactgcaacctccgcctcccaggctcaagcgattctcctgcctcagcctcccaagtagctgggattacaggcaccggccaccacacacagctaatttttatatttttagtagmtatggggtttcaccatgttggccaggctggtctcaaactcctgatcccatgtgatccacccacctcagcctcccaaagtgctgggattacaggcgtgagccactgctcctggccagtttccaaatcattaaggaatagccgggggaagtgggaattttaactccactcactgcacactgccactcctgctacacctgggagatttctccctccattctgggtcaca

SEQ ID NO: 744977 - DNA, 627 bp, Homo sapiens
ttgctacgacgggtgagtgccgctcccccaaatcccttgggttgtctgggttgcagagcaattcctccacttctctagacctctgttctttcccacagtggcgagaacgtcatctctttaatcattatctgatcattaagtaaaagttgaagaagacaatgtttgaataaagaggagcatcaacaactatttccatcttgtcaactgttgtttccaaatctttttttttttttagatggagtttcacccttgttgcccaggctggagtgcaatagcacgatcttggctcactgcaacctccgcctcccaggctcaagcgattctcctgcctcagcctcccaagtagctgggattacaggcaccggccaccacacacagctaatttttatatttttagtagctayggggtttcaccatgttggccaggctggtctcaaactcctgatcccatgtgatccacccacctcagcctcccaaagtgctgggattacaggcgtgagccactgctcctggccagtttccaaatcattaaggaatagccgggggaagtgggaattttaactccactcactgcacactgccactcctgctacacctgggagatttctccctccattctgggtcaca

SEQ ID NO: 744978 - DNA, 267 bp, Homo sapiens
cctccaaactgggaaaagttaatgtcccaaaccttaagctggttggcttaggactaggctcagcggaagggaacccagaagcctgatgtaccatcaaaagggtaaaaktttttttttttttttttttttttttttttagccaatcaggctttttgcccccttctccccatacaaactggtaaaagcccctgggatttttgagctgtccttaccacacactcttatttcatatttatacgtgttttctaataactcagtttgtctctt

SEQ ID NO: 744979 - DNA, 689 bp, Homo sapiens
ctctgtattatgggacactcccttcagatggatcctccaaactgggaaaagttaatgtcccaaaccttaagctggttggcttaggactaggctcagcggaagggaacccagaagcctgatgtaccatcaaaagggtaaaagtttttttttttttktttttttttttttttagccaatcaggctttttgcccccttctccccatacaaactggtaaaagcccctgggatttttgagctgtccttaccacacactcttatttcatatttatacgtgttttctaataactcagtttgtctcttcttcaggccatgaaactccagtcatgcaactggagccttgggcaatggccccttctcgtgggaacccttggataggcccctgagggcaatttgactgccgttttcccaaaacagcaccccctgtcaacaggaagcagttaagatctgtcttcatccttatccttatccttattctaatggcagttagatgtacttctttagaggagggaatgatagatgcaggaggctggtaaggtccctggagaatccccaaccagcctgtgcaatgggatgatggggtggggctgcaggaagtttgtgccgcttgcagggaggaggagcctggcctctcctgttcctaggtggtgacctgggattccaactgagagatggaaacctgttaacgggaa

SEQ ID NO: 744980 - DNA, 267 bp, Homo sapiens
cctccaaactgggaaaagttaatgtcccaaaccttaagctggttggcttaggactaggctcagcggaagggaacccagaagcctgatgtaccatcaaaagggtaaaagtttttttttttttttttttttttttttttarccaatcaggctttttgcccccttctccccatacaaactggtaaaagcccctgggatttttgagctgtccttaccacacactcttatttcatatttatacgtgttttctaataactcagtttgtctctt

SEQ ID NO: 744981 - DNA, 616 bp, Homo sapiens
aaagtaatggcgaaaacctcaattacttctgcaccaacaatatagtgataataatgaaaataagaaaagatgttggtactccaatagtaagcaagacagataatgttcttcatatgatagagtgagtcctcaaagttatatctttaaaagactgaattagatatccaaaattttaccgtaaaattaagttgtcattatttcactacatttctcatgactattattggataattatttataaatctttgtttcttcmgtgacacttgcagaaaagcaagtcatgtgatgacaggacaataataattatttattgaaggggatcaaaatatgccagccaaaatatactatcccctaataagcgactttgggcacatggattattttgagtggaaggccatcgagaatcaacagatgcaggaagaagccttcttggagcttctcctacctgactatgtgcagacacttctgagaaattctctctccctgggagagttttatggccaagaagaagacggaaagtgggtgctgagtgggcacacaaacctcacaaaaataaaccttagcatccattggtttccccatatatttccttcccacattatactgcctctagaag

SEQ ID NO: 744982 - DNA, 576 bp, Homo sapiens
acactctaaaataagtattgtataataagtacataaaccagtagcatagtcattaattatcattatcaattattatgtactgtacataattgtatgtgctatatttgtatccaactgatagtgcagtaggtttgtttatgccaggatcaccataaatagatgagtaatgcactgtactgtgacactgggatggctacaatatcactaggcgataggaatttttcagctccagtataatcttaggggaccatcatcctatatgcggtcgcttgttgactgatacatcattatgcggtgcatgactgcataaatttgggtatggayatagatatagacagagatatcttcagccctgaacagtctccttaactccatacttaaatacctgctggatatttccaccaaatgtttcatatgcatttgaaatttaacgcataaaaaaccaaactcatgttctgcttgcaaaacctgactcttccccaatctaccctatctgcatgataccctccctcattatggtactcaaaaaactttgcaataatcctattctcctctcatatctcacatttactccat

SEQ ID NO: 744983 - DNA, 562 bp, Homo sapiens
aaccattcacatttctccctcttacatcctatttcccagaatttaatctcatggctacactcacccacaaagcaagcttgaaattatagtcgttgctttaaaccatcacgttcccaattaaaatttgatactgtcttactaaaggaaggtgggagaatygatattgaaagacaaccatcagtatctttcattttttatgcaattttataatctactctcaaactaacccatatgtcttaaaaaaaccatttcattccagtgaatgcaagtatgccttatccttcacatgaattcttagtattcattgaaagaatgtaccatgatttatttaatttgtctcctcttgttggaaacttggctaattcctcatatttttgcaattataaacaatgctgtgatgaacacctgtgtaaaatcacttagagtacttgcccaattacctctgcagaataaagcccgcaaaatagaattgttggctgacagggaaacaatattataatgatttgaattgccaaaatgtcttctaaaagtcttgcatacgtttacagtcttaccaacaatg

SEQ ID NO: 744984 - DNA, 628 bp, Homo sapiens
agttcagaacactgctttaaactacattatattttttttgcttctcaaaccagatcacactataaatccaacctgatttctaagtagagtatagatgtggcttgagataatgaattgatttttgtgggttttttttttttgtaattagcaaatatttgcttcgaaaacctttttataaaaaatcrgaagttacattttttcattaaagaacgtttgaaaagtttagaaaaggaggagagagacacattactaatcttccaaacccagtcatggttaatattttcatatatttacatagttgttcatggtacatataaccaaccattttatgttctgcgtacagttttccccaaattattacgtagtctttatgaacataatttttaaggtctgtataatattccattgagtggatgtatgcagtttacttaggtatttttcaattattagatgtttctctttttttccctattataaataatgctctgatgaaaatctttgtgcaaaaacaattttccctttctggttcagaatatttccttagagtaaatttctgaagataaagttgctggaataaagatctcaatatttttaaggctgctgggtttttttttttttactagatgaa

SEQ ID NO: 744985 - DNA, 602 bp, Homo sapiens
ccgcccctggggagaaaaaaacacacatgcacaaacgcacgcataatttcgcaggcaatttcaagggatggatgttagctccccagggtccatccatggattccaataagaattgctggtcttgaggaatgaaggtttyaaaatacattataaagttatcttaataaagacactttaaaacttttaattgcccattactgatagtaatgtaatagctattattaaattctcattttatcatcaagaaaataaaacaaaaaagctatgctagacagaatgacattcaatttcttccctattcagccactgaaggtccccctatcaacacacagctcttgatctttcaatctctgagcaaaacgggcaggagtacattcaagtatccaaaaagctattattgacacctagccattgccatgaatcaatacattctatcattcatttgtacaagaaggtagcttggcagaattagtgcattaagacaatacagttccatagaataaagtcactatgaaaaagagaaaagtaactgctactgcaaagatcaaaaactcattggtgagggtggacaatgaatgtgaagttctgattaatcctttaat

SEQ ID NO: 744986 - DNA, 538 bp, Homo sapiens
cctgcacagacagacatactctggaaagaccaaggcaaaagcaaagactagaataaataattctcccttaagtgcaaagacatagacataagtccacagaaaacaagagtggatagagaaccatgacctccccaaatggacaaaaaaatgagacagcactgaccctaataagatgtttatgtgaaagctctcagatcaataactcaaaccagcagtgtaaggaaatctggtgaatttcaagatttgtcatataaattcagaaatttatgagaaatttaacaaagattttgaaataatttaaaacatcaaacagaaatcctggagcttagaaatacaatggtcaaaatgaaaaatacattagagggtctcaacagcmgactgaatcaagcagaagaaataaccagtgatctggaaaataggcaatttggaaataaataaaagagaaaaaagaaaacaaaaagaatgcttacaaatctagaggatagcctaaaaagagcaaatctgagtcattggtctttaacagggagttgagaaagag

SEQ ID NO: 744987 - DNA, 563 bp, Homo sapiens
catctcatatgtgattattagaaagccaatactcagttacaaagtgacaatagaattaggtaagaattactagaatccagctgcaaagatggtggtaagcattgaaaatgaaaaaaaaaagtaatcataggtagctatatatgaagggaaaccttggaaaagaatataattattgggagaagacacggagacaatatgtgttttcaagagaactggtacaatgctgaaataggtttaaattttgtaactgccacttaagaattgtataatcttgggcaaattctttaacactctgtgttgttttacttagttataccatttggacagctgtcaagattaaataagcaatgtatatgaactatgcacartagataataaagatgataataataacaggttgagtaatagaggtggagtgattaacagcagcaaacaagtcagcatctaagacagagaacaatatcatttgcagagatagtgtatagagaaaaatataacactgtagaagcaagcaacttcagaagcaataggcccactctgtcaatgttttagaccagaaattg

SEQ ID NO: 744988 - DNA, 640 bp, Homo sapiens
ccctagtcccacccaattctaaaaatctacccatgccggagcccacacctccataaacccagtaaaatgagttctctgctattctcagagagactgttttacaagcacatgtctccctcgcatagccagcaacaaactcagccttgttagtttgtttcagatattgaatagtgggtggcttccttgacaagtgtctgacatacaagaaacagttaataaatttaatgacagtattgtggctgtttccactgttattacccttaatcaatgcattaccattgtagggtgcactgggagattgacctacctcctttggcaatcatgaaaaaaattaattataaaaataagaattagggagaaatgattgaagatttttcatcagtcaatttgsgataacttttttatgtaatgcagagctgtggtgggaggaggggtgttcagcattattacttctcaggaaatccatgcaaagttaaatagcagaactatgaagctatgggcagatcagacagtggttcttgaaaaattaatctgtaaaatatgaggaatgctaaattttcaacatagtattagaagagcgtgcctcagcctgggccctggaatagaagaaaccaccatttttactctggggtagagaaag

SEQ ID NO: 744989 - DNA, 655 bp, Homo sapiens
atacaagatatcatttggaatttattcaaacctaagcaacacaaaatccatcctatagtagcttaaacaagatacgctttttctcacgtaacataaaatctggaagtaaggaaactcaggactagtgagcagtcgatgattatcaaagacccagagtcacccatcatgaatgacaacacctttgtgaagcatctctgaatcaattagttgggctctctccctgtgttcaactttgtatattagcctttgcacaactgtcttgtgctttttctgtttccaagtgtctcccacctctgcagtctgagattgcttaaattaagccttcctatgctcttcctgacacacrgcaagacctcaatacatttgtataaaaattaattaaaatgagtgaattaagaagggaagttattgaagtggttagccaagtactaaagaatcagtttttacgtcaaaatatggcaatagacccaaagtttggggaaaaaatagaaatgattcagaaacctgagaaagagaaaaagaaataaaaggtgaaaagctcaaggaatctgggattcaagaatcaaaatgtgaaatccaggaatctgggcaccaagaagaagagcaagaaaggagcttgaacatcatcagggtgctaacaagatatcacctgggc

SEQ ID NO: 744990 - DNA, 655 bp, Homo sapiens
atacaagatatcatttggaatttattcaaacctaagcaacacaaaatccatcctatagtagcttaaacaagatacgctttttctcacgtaacataaaatctggaagtaaggaaactcaggactagtgagcagtcgatgattatcaaagacccagagtcacccatcatgaatgacaacacctttgtgaagcatctctgaatcaattagttgggctctctccctgtgttcaactttgtatattagcctttgcacaactgtcttgtgctttttctgtttccaagtgtctcccacctctgcagtctgagattgcttaaattaagccttcctatgctcttcctgacacacagcaagacctcaatacatttgtataaaaattaattaaaatgagtgaattaagaagggaagttattgaagtggttagccaagtactaaagaatcagtttttacgtcaaaatatggcaatagacccaaagtttggggaaaaaatagaaatgwttcagaaacctgagaaagagaaaaagaaataaaaggtgaaaagctcaaggaatctgggattcaagaatcaaaatgtgaaatccaggaatctgggcaccaagaagaagagcaagaaaggagcttgaacatcatcagggtgctaacaagatatcacctgggc

SEQ ID NO: 744991 - DNA, 600 bp, Homo sapiens
ctagatttttaatataatactgattactttaaattggtccctaaagtgtgttttataataaatatttcctcctaggtttgctagtgaagcacacacagtagtatacatcctccataaagttttctttactcagaaccaacagtggtagaataatttctcagatttaaaagaggtctaggtgtaaattctgcaacttgtaccacctaatttttttttcctgaaaggcaagtatttatgggaacaggctrtagaagggacaacatcattgtataatttggcctattcttagtttctctaggcaggccccatttattctctccctagatttttccttgttcagaacttgttcactccaaagttgcctaatcaggaattgactccctgtttctattctctcttcatcgagcctctttttcttactctcatctttcctatccttttaatccattggctccttatgttggtcactgcatttaggcaaccgttcgggttactttgtcaattttctcatttctgtgggctcctccaacaccaccaatcacgaaaggccctagcgaggcatgagaggtcctcctatcccctgctggtcaggacccacat

SEQ ID NO: 744992 - DNA, 555 bp, Homo sapiens
atcagtaaggtggtaatttcagcaaattcatatgggtagataatcctatctatacatattttgctagatctttattaagattcatcccatctagactaagcttctaggaaaagcaaaacaaaatcttaacagatasaatgttttaggacaagaacacagccaagatgaaggccctccatgccctttttgactgttcaatatctgaaaagaaaaaaatttgaaatatctagaaaggttattggattttttttttttttgagacggtgtcttgctgtgtcacccaggctggagagctgtggcacgatctttgctcagtgcaacctctgcctcctgggttcaagcgattctcctgccacagcctcccaagtagctgggattacaggtgcatgccaccatgtctggctaattttcgtatttttagtagagatggggttttgccattttggccaggctggtcttgaactcctgacctcaggtgatctacccacctcagcctcccaaagtgctgggattacaggagtgagccaccatgcccagcttggaaaaaaagttttt

SEQ ID NO: 744993 - DNA, 632 bp, Homo sapiens
atgcttccagctttgttctttttgcttaggattgtgttggctatgcgggctcttttttggttccatatgaaatttaaagttctttctaattctgtaaagaaagtcaatggtagcttgattgggatagcattgaatctataaattactttgggcagtatggccattttgatgatattggttcttcctatccatgagcatggaatgtttttgcatttgtttgtgtcctctcttattttcttgagcagtggtttgtagttctccttgaagaggtccttcacatcccttgtaagttgtattcctaggtattttattctctttgtagccattgtgaatgggagttcactcacgatttggctctctgtttggctgtttttggtrtataggaatgcttgtgatttttgcacattgattttgtatcctgagactttgctgaagttacttatcagcttaaggagatttggggctgagatgatggagttttctaaatatacaatcatgtcatctgcaaacagggacaatttgacttcctcttttcctaattgaatatcctttatttctttctcctgcctgattgtcttggccagaacttccaatactgtgttgaataggagtggtgggagagggcatccttg

SEQ ID NO: 744994 - DNA, 625 bp, Homo sapiens
tcttattgcatggttgattctccagcagccacccccacacctgtcacattagcctacaaaagacacttaccacttcagagagtccaagagttttaggagtcctgtgccaggaaatgggggcggagaccaagaatagatttattattaaaagtcacaatatgacaggcagtttctttaaaacctaagcattcacttaccatacaactcagcaattttactgttgggcatttatcccagagaaataaaaatatattcaatacagaaatttctatagtttcattcacagtgccacaaattggaaggaaagtacttaaatgcycttcagcgggtgaacagtgaaacaaactatgcatccatgtcatggaatactacgtggcagtaaacaagagcaaactggacatgtggagcaacttggattgatctcagggcattgtgctgaatgaaaagccttaagatgtcacatgaacgattccatttggtaacattctttaaataacagaatcatataaatgaaaaacacatgagtggttgccagaggttaggagtgttggagtgtgcagaggtatgtgatggtcagagataacatgaaagagaagtctgtggtgatggaatagtcctgtaactt

SEQ ID NO: 744995 - DNA, 625 bp, Homo sapiens
tcttattgcatggttgattctccagcagccacccccacacctgtcacattagcctacaaaagacacttaccacttcagagagtccaagagttttaggagtcctgtgccaggaaatgggggcggagaccaagaatagatttattattaaaagtcacaatatgacaggcagtttctttaaaacctaagcattcacttaccatacaactcagcaattttactgttgggcatttatcccagagaaataaaaatatattcaatacagaaatttctatagtttcattcacagtgccacaaattggaaggaaagtacttaaatgcccttcagcgggtgaacagtgaaacaaactatgcatccatgtcatggaatactacgtggcagtaaacaagagcaaactggacatgtggagcaacttggattgrtctcagggcattgtgctgaatgaaaagccttaagatgtcacatgaacgattccatttggtaacattctttaaataacagaatcatataaatgaaaaacacatgagtggttgccagaggttaggagtgttggagtgtgcagaggtatgtgatggtcagagataacatgaaagagaagtctgtggtgatggaatagtcctgtaactt

SEQ ID NO: 744996 - DNA, 599 bp, Homo sapiens
actctaaaaagaacttgtttgtataatgttattctatacaaggtatgtagcccaggaaatgaccaacctgatgtgtgttatgacccatctcagcctcccatgaccacaatttttaaaataagattaaggactgaggactggtgggggctcataaacgatacgagtaaagtgttagctaaaacagaagaaaaaggggtgcccaaacaagtcaccttaaaagttaatgtctgcgctgtcattaatagtaataagttaggaataaggygtggttgtcttaattagaaaagaggctatatggcagaaaataagtacatctgtcataaattaggactgtgtggaaataaatataaatactggtcttgtgtcatttaggccacttagaaaaaaaaatgaaaaagatccagtccaccttcagaaaggaaaaaatggcccttcctgtactaagggacaatgtaaccccttagagctagtaataaccaatccccttgatcctcgcaggaaaaaagaggagagtgtgaccttaagaatcgacggggccggactggatcctcaagtaaacatcttagttcgaggagaagtttataaatgctctcctaagc

SEQ ID NO: 744997 - DNA, 599 bp, Homo sapiens
actctaaaaagaacttgtttgtataatgttattctatacaaggtatgtagcccaggaaatgaccaacctgatgtgtgttatgacccatctcagcctcccatgaccacaatttttaaaataagattaaggactgaggactggtgggggctcataaacgatacgagtaaagtgttagctaaaacagaagaaaaaggggtgcccaaacaagtcaccttaaaagttaatgtctgcgctgtcattaatagtaataagttaggaataaggtrtggttgtcttaattagaaaagaggctatatggcagaaaataagtacatctgtcataaattaggactgtgtggaaataaatataaatactggtcttgtgtcatttaggccacttagaaaaaaaaatgaaaaagatccagtccaccttcagaaaggaaaaaatggcccttcctgtactaagggacaatgtaaccccttagagctagtaataaccaatccccttgatcctcgcaggaaaaaagaggagagtgtgaccttaagaatcgacggggccggactggatcctcaagtaaacatcttagttcgaggagaagtttataaatgctctcctaagc

SEQ ID NO: 744998 - DNA, 587 bp, Homo sapiens
atagagcttatgccaaattacccgaccagcaggcaggtagttgtgttactggcactattaaaccatctttcttcctactgcccataaaaacaggcgaaatcctaggcttccctgtctatgcttcccacgaaaagagaagcatagctataagaaattgaaaacatgataaatggccccctaagagaatcatgcaatattataggcctgctacttaggcacaagacggctcgtgaggataccagacccccatttgcatgatcaactgaatcatacggttacaagctgtcttaaaaataaycactaataaaactggcagagccttgactcttctggcccggcaataaactcagatgagaaatgctatctatcgaaatagattagctctcgactacttgctagcagctgaaggtgaggtctgtaggaaatttaaccatactaattactgcctatacatagataatcaagggcaagtagttgaagacatagttacagatataacaaaattgacacatgtgcccgtacaagtgtggcatggatttgatcctgaggccatgtttagaaaatggttcccagcactacgaagattt

SEQ ID NO: 744999 - DNA, 587 bp, Homo sapiens
atagagcttatgccaaattacccgaccagcaggcaggtagttgtgttactggcactattaaaccatctttcttcctactgcccataaaaacaggcgaaatcctaggcttccctgtctatgcttcccacgaaaagagaagcatagctataagaaattgaaaacatgataaatggccccctaagagaatcatgcaatattataggcctgctacttaggcacaagacggctcgtgaggataccagacccccatttgcatgatcaactgaatcatacggttacaagctgtcttaaaaataaccactaataaaacyggcagagccttgactcttctggcccggcaataaactcagatgagaaatgctatctatcgaaatagattagctctcgactacttgctagcagctgaaggtgaggtctgtaggaaatttaaccatactaattactgcctatacatagataatcaagggcaagtagttgaagacatagttacagatataacaaaattgacacatgtgcccgtacaagtgtggcatggatttgatcctgaggccatgtttagaaaatggttcccagcactacgaagattt

SEQ ID NO: 745000 - DNA, 587 bp, Homo sapiens
atagagcttatgccaaattacccgaccagcaggcaggtagttgtgttactggcactattaaaccatctttcttcctactgcccataaaaacaggcgaaatcctaggcttccctgtctatgcttcccacgaaaagagaagcatagctataagaaattgaaaacatgataaatggccccctaagagaatcatgcaatattataggcctgctacttaggcacaagacggctcgtgaggataccagacccccatttgcatgatcaactgaatcatacggttacaagctgtcttaaaaataaccactaataaaactggcagagccttgactcttctggcccggcaataaactcagatgagaaatgctatctatcgaaatagattagctctcgactacttgctagcagctgaaggtgaggtctgtaggaaatttaaccatactaattrctgcctatacatagataatcaagggcaagtagttgaagacatagttacagatataacaaaattgacacatgtgcccgtacaagtgtggcatggatttgatcctgaggccatgtttagaaaatggttcccagcactacgaagattt

SEQ ID NO: 745001 - DNA, 629 bp, Homo sapiens
catcaattttaagtacagagaatgatgagtacatctttggagccactttaattctttgaaaagccgaaagtctaaaatgggtgacctaattttataagccagggaagctaaattgtaacattataattgataattctaaataattttcattggttcaaggaattaagataaataatgtaagtagtattttacacagtcactcccacagctagcccatgtgacgactttgtaggaattagaaaaatatacccctttctcagacctrtcttcttcaaaacccagctgaagtgtctcttctgtaacaccttccctcatcacttcaagcagatttaatgttccaaatgtttggagtaaataagtgagtaaatgagtgactgaatataaaatacttacagataacatgcagagttagtggaggtaacatgtatgaattaggccattaggcattaaacctggtactgtaagtcttcatatacttcttcatatattttttctgggtgcattatgtcttcatttattttaatgacaaaaatgttttccttttagtctggagaagaatggaggaccatccataattcctatctttaaaagaggtaattgatttttcttttatctatgaagtaccttct

SEQ ID NO: 745002 - DNA, 562 bp, Homo sapiens
tttcaaaaatttcatttatgtgtaacaataatgataaagtggcactatgtaccaggcacctgctgtagattaatttctttcaaaatcccatgaaatagtttctgtcctcattttacaggcaactgggccacagagtttgggtgctttggaggtcacacaactaggaaaagcaaagctaggattagaagtcaggccatctggcactggagtctgttttyttaactgctagaagagaaaataactcacattttctctagggtgcactgttggcctaaacaagggaaaaaagaaaaattaaaacctaaaagttaagaaaaattagtcatacggttagagaggtcagagcttatttctgttatacactggaatccagtttgaacataaaacctttcacatcaggtattatttttcttacaattccacttatgttcagcaagtatatcccaatgctcttctgtgctgtcaagacaagcaagatcctattgtgtgtgctatcattggtagattcctcgtctaggcactcttggccagtgttgagtccgaatgctgttattatgtgaaa

SEQ ID NO: 745003 - DNA, 562 bp, Homo sapiens
tttcaaaaatttcatttatgtgtaacaataatgataaagtggcactatgtaccaggcacctgctgtagattaatttctttcaaaatcccatgaaatagtttctgtcctcattttacaggcaactgggccacagagtttgggtgctttggaggtcacacaactaggaaaagcaaagctaggattagaagtcaggccatctggcactggagtctgttttcttaactgctagaagagaaaataactcacattttctctagggtgcactgttggcctaaacaagggaaaaaagaaaaattaaaacctaaaagttaagaaaaattagtcatacggttagagaggtcagagcttatttytgttatacactggaatccagtttgaacataaaacctttcacatcaggtattatttttcttacaattccacttatgttcagcaagtatatcccaatgctcttctgtgctgtcaagacaagcaagatcctattgtgtgtgctatcattggtagattcctcgtctaggcactcttggccagtgttgagtccgaatgctgttattatgtgaaa

SEQ ID NO: 745004 - DNA, 636 bp, Homo sapiens
ttatcaccatttaattggtttaagtataattaaacaattttgagtaacaaaattttaccataagtgttttgcaggttcaggactgtggagcccttctatattggttccatatccctaaagtgtcatttctttagacctgataaagatcagacacagattgaatagttagttaagatcatgctcgtaggctaggtgcggtggytcactcctgtattcccagcactttgggaggccaaagcaggtgggtcacttgagttcaggagtccgagaccagcctgggcaatgtggcgaaatctcatctctaccaacaaatacaaagattagctgggtgcggtagtgctcacctaggcaaaaaaaaaaaaaaaaaatcatgtttgttttcaaggcctccacaaagataccttgtaaaacaatttgaaattatttctggacacaataaacctaatttatttattgagatttagactattttgtagtatatgtattaaaattagtcatgttgtgaaacaatttggttaaattttagctataaaactgtgtataaatcaaagcaggttgattttatttttacatagtggttatattatctgtctattttagatttcctttcctggatgaaaatgttgtctcctttct

SEQ ID NO: 745005 - DNA, 721 bp, Homo sapiens
cctctgggtagatacctggtagtgggattgctggatcaaatggtagttctacatttagttctttaaagaatctctatactgttttccatagtggttgtgctagtttacattacaatcccaccagcagtgtaagtattcccttttcaccacatccatgccgacatgtattatttttttatttttaaattatggccattcttgcgggagtaagatggtatctcagtgtggtttgatttgcatttctctgataattagtgatgttgagcatttttcatatgtttgttggccttttgtatatcttcatttgaaaattgtctattcatggcttttgcccactttttgatgggattgtttgtttttttcttgctaatttgtttgagttcctggtagattcyggatattagtcctttgttggaagcataatttgcaaatattttctcctactctgtgggttgtctgtttactgattgtttcttttgctgtttagaagctttttagtttaattaggtcacatctatttatgtttgtttttgttgcatttgcttttgggttcttggtcatgaactgtttgcctaagccaatgtctagaagggtttgtccgagttatcttctacaatttttatggtttctggtcttagatttagttctcgatccatctcgagttgatttttatataaggtgagagatgaggatccagtttcatgtggcttgcaattatccc

SEQ ID NO: 745006 - DNA, 607 bp, Homo sapiens
attggaaacatttagtgtaaataaaatgaaaatctatttcaaagtgatattacaaatctcacaaagctgtgaagtgatgtttcaggaattactgaaaaagcctttgactaaagacaaattcaagaaggcttatatataatacaataggttcttcaagagagaatattttgaataccaaaatacttagagttaactttgggaaaactgatgaagtatgaagtttgcaaatatttttggaaaatcagcactttttggtcatttcaggcaaatcaaatgtgaagtgaaagatgtcaagtcaggctctcttatgttgttggggttttttctggtgcttacaaaagccaacacaattcattctttgttcattccaaaaattatggcatagttgacatataactccattttcttaaatatcagatggtatgaatttattttaataactgttaatattcraagctttttctgtatttatgataaaatttgttttcactataaatatattcaatgtaataaagtgttcttgtacaaattatcccattattacacttagcaacattcccagaaagtttagcaaccttcccagaaaccatgtgaaaaccattttttc

SEQ ID NO: 745007 - DNA, 619 bp, Homo sapiens
gcatttcataaaacacactgcatgcaatccaataaacaagaaatcatatataatttaacttcaaaatttcatattaattgccattagaaattcaaattcaagtactgtatgcagggtaaatagatgaatagatgcagtgtatgatggatgaagccagcccatgttccataattctatggtgtttatcagtatcaaggaagatggcaaaggcaagtcagaggctggtacaaaatttaaggctaaaagtatctaagcttgcaagaaaaagcaggcgatatctaattatacactaattctaaaatgctttgttccaaagtgtttacccagaaactcaattattcyttccacaaacattgatggagatcacaccttgtttaataaagtattagcaatatgatggtatgttacctccccaccccagtagggagagaacctgtacagaaataaccatagaacaaagccaaatatgctaaggactaaagaaaggcacaacgttctatgagagatctatcagagaggggtttactgctggctgaggtgttagagaagctctaatgtagagacaaacattcctgctgggccctgttagcactgcaacatgccaagagggagcctggga

SEQ ID NO: 745008 - DNA, 587 bp, Homo sapiens
gcattgtcatggaaaattccaagttttttgtagaagagttcattctattccctgatgtactactcctaattccttccttccttccttctttctttctttccttccttctttccttctttctctctttcgaaatgaggtctcactgtgttgcccagactgcagtgcagtggctgtttacaggcacgatcccagcactgatcagcataggagttttgacctgctccattttcaacctgggcaggttcacccctacttaggcaacctcgtggttccccgctactgggaggtcaccatattgatgctgaaattagtgcaggaacccaattagcatagcacacaacagcccaggactcctgggctcaagtgatcctccagcgtcaccctgctgagtagctggaactacaggcamgcaccatggcaccaggctctccttgttttaattaagtagtttatgaaacatgaaccacaaaagctacagcaattgggagtccaatggacaaaacaaagtatgtacagaccctttatcgatgctctcagtctcacacaaaccatgttgaaggaaaagaagtttgagatcaaaaggaaaa

SEQ ID NO: 745009 - DNA, 641 bp, Homo sapiens
ttgtcctccagcttcccctctgggggatttatttctataccactatgacatctacttcttaccttagtagattttaacagtgcattagccatcacgtcatcaaagcctctgaggctggcatgagccttcctgccaattctgggaaacacttctgggaaagtaaacaagaatagataagagagaatattcacagcctctgtcccatttgaatggccttcagactttaaaaggttgagaatgacatacagtaattacatgtctcatacatgagtaggtttatcctaagtgggacagaggcaactgggaattagaaaactagggagaaaggacagaggcaactgcgaattagaaaactagggaaaaaagaaaatttagtccctagatgggaacagaggtaagtgagaagggccctaaaaggcagtgcagtaagcaccygccaaggctgctttccaatcacacatctacctgaaaaggtatcatgttgcagaatgctgctctcttctctccttcctaaccctttcaatttcaggacatttagtcctctgacttcaagagaaaaaaaaatattggtggggaaaaatagcttgaggaatattgatctggcaaagatttgagtcctagcatccaagatggtcctcttc

SEQ ID NO: 745010 - DNA, 535 bp, Homo sapiens
gagaatgcaaggcaatcacaaccaatttcataggtacataagagacaaggtacataagatctggctcttttgaagaaattaacaagctaattctcaaaatcacctgaaaaggaagaagatgcagaatagtcaaaacaatttttgggaaaaaggagaataaagaaaggatgctacatcccactccaaagctcttcagagacaagaagcccaacyttcagaatacaaaactgaaaatgtgatgagttatttctgccctgctaaaaaggtagtttcattcaaaacctttgaccctaatacctagaaaagactaagcatagtaaaactaaacaaccacaaacaactaacttcctatgagccttatttcatgtccacagggaaatcaaatcccacatatggtcttggtgtaaagcacaggggctgtaaggtattagaaaaatcggtgtagaaaaaagctggactgttttcagaaaaatgaccaaccatgttactaagacaaaacctctctctatggactgcattctcacaagataattac

SEQ ID NO: 745011 - DNA, 535 bp, Homo sapiens
gagaatgcaaggcaatcacaaccaatttcataggtacataagagacaaggtacataagatctggctcttttgaagaaattaacaagctaattctcaaaatcacctgaaaaggaagaagatgcagaatagtcaaaacaatttttgggaaaaaggagaataaagaaaggatgctacatcccactccaaagctcttcagagacaagaagcccaaccttcagaatacaaaactgaaaatgtgatgagttatttctgccctgctaaaaaggtagtttcattcaaaacctttgaccctaatacctagaaaagactaagcatagtaaaactaaacaacmacaaacaactaacttcctatgagccttatttcatgtccacagggaaatcaaatcccacatatggtcttggtgtaaagcacaggggctgtaaggtattagaaaaatcggtgtagaaaaaagctggactgttttcagaaaaatgaccaaccatgttactaagacaaaacctctctctatggactgcattctcacaagataattac

SEQ ID NO: 745012 - DNA, 548 bp, Homo sapiens
atgtatgaagcaataagtatgctgattctttattggatgaaatcctttcattcccttacatttcctcccctaaatccttgccacttaaagtgggtcctcacaccagcatcagcctcaccagggagcttgctagaaatgcagtatctcaggccctattgcacagtacaatcyacaatttaacaagattcccatgcaattcatctgtgcactaaagtttggaaagcctgttctaaattacaaactcaatgtcaagccctacaggtaaatggaggaaccaacgtcattattctgggcatttgatgttgatgcagacaaagatcagataatcaaattgaagctgtaatgatcacacgatacaccacaaatgctggttattaaaatacatgcatgatctctgtttcgcatttccctcattcttttttaaaattatttttatagattttgggtatataagtgtcattttgttacatggatatactgcgtagtggtgatgtctgggcttccagtgtaaccatcacctggatagtgtgtattgtacccattaggta

SEQ ID NO: 745013 - DNA, 548 bp, Homo sapiens
atgtatgaagcaataagtatgctgattctttattggatgaaatcctttcattcccttacatttcctcccctaaatccttgccacttaaagtgggtcctcacaccagcatcagcctcaccagggagcttgctagaaatgcagtatctcaggccctattgcacagtacaatccacartttaacaagattcccatgcaattcatctgtgcactaaagtttggaaagcctgttctaaattacaaactcaatgtcaagccctacaggtaaatggaggaaccaacgtcattattctgggcatttgatgttgatgcagacaaagatcagataatcaaattgaagctgtaatgatcacacgatacaccacaaatgctggttattaaaatacatgcatgatctctgtttcgcatttccctcattcttttttaaaattatttttatagattttgggtatataagtgtcattttgttacatggatatactgcgtagtggtgatgtctgggcttccagtgtaaccatcacctggatagtgtgtattgtacccattaggta

SEQ ID NO: 745014 - DNA, 602 bp, Homo sapiens
gaaaaaagcatacctgagagaaatacagtgccaccattttttaaatctcaaaagcaagataaaagaaaaaagcaagaggatatatttttaaattcaatatggtggttcagtattgtgattcgttgagagaggtagaaggacgtgagcagggaagagctctgagaaaacttcaaatatgacaatgtgctctcaaggaggctgggaaattcatatatgcgatggctttattgatgtggcaactctgctcggatatagtccccagttactcatacatttatctaggtgttgctgtggaggcattytgtagatatatttaaagcccataatcaggtgacataaagtaaagcaatattccctcaggtaatctgggcaaacctaactgaatctgtgggaaggccttaaaagcaggtttgaagtttccctgggagaaagagagagaaaaaaatctgcctgttctcctagaggtctgtactgctcattatctccccttcctgactgcctgtcctgtggttttggactggcttagccaacccctatatcctgttagccaattccttgtaataaataatacatatatctgtcctatgagttctatttctctg

SEQ ID NO: 745015 - DNA, 602 bp, Homo sapiens
gaaaaaagcatacctgagagaaatacagtgccaccattttttaaatctcaaaagcaagataaaagaaaaaagcaagaggatatatttttaaattcaatatggtggttcagtattgtgattcgttgagagaggtagaaggacgtgagcagggaagagctctgagaaaacttcaaatatgacaatgtgctctcaaggaggctgggaaattcatatatgcgatggctttattgatgtggcaactctgctcggatatagtccccagttactcatacatttatctaggtgttgctgtggaggcattctgtagatatatttaaagcccataatcagrtgacataaagtaaagcaatattccctcaggtaatctgggcaaacctaactgaatctgtgggaaggccttaaaagcaggtttgaagtttccctgggagaaagagagagaaaaaaatctgcctgttctcctagaggtctgtactgctcattatctccccttcctgactgcctgtcctgtggttttggactggcttagccaacccctatatcctgttagccaattccttgtaataaataatacatatatctgtcctatgagttctatttctctg

SEQ ID NO: 745016 - DNA, 612 bp, Homo sapiens
gaaaggaacagaagagagtgcagaaatggacctcacatacacaacctcttgatttacaccagaagcaccaatgcacttcaaagggaaaataaatatcttcaaaataaatggtattggagccatgggatattcataaaaaattataaataaataaataaaccctatatgctcctttacattacacagggaaattaagttgacttaactgtagtagttaaaagtataattttcccataaaacataaaagaatatcttcatggaattagattgacaaagatttcttatacaaagcaacaaaatccctagctacgaaaagaaaaaataacctggtaaattgtaatttacccaacttgtacattttatcatcaaaagataccattaagaaagtaaaaatgtaagcatcagactggggaaaatacataatagacaaagaactgcacatgtaatatrtattaaacttacaatacgaaaaaggaccaaaaatggccaaaagagaatatcccaatggacaataaacatatgaaaatgcgcttaatataattaatcaggaatatattaattaaaagcataatatactactaaacacccatcaaaatggctcaaagatgtttg

SEQ ID NO: 745017 - DNA, 624 bp, Homo sapiens
tttttgtataaaacgagaattaaggatccagttttattcttctacttgtggcttgcaaattatcccagtaccatttgttgaatggggtgtttttcctcacttcatgtttttgtttgctttgtcaaatatcagttggctgtacatatttggctttatttctgggttctctattctgttccattcgtctacatgcccatttttatacatgcccattttattggtaactatagttttgtagtatagtttgaagtcaggtaatgtgctacctccagatttgttctttttgcttagtcttgctttggctatgcaggytctcttttttggttctatatgaattttagagtttttttttctagttctgtgaagaatgacgatagtattttgatgggaattgtattcagtctgtagattgcttttgacagtatggtcatcttcacaatattgattctacccatccatgagcatgggatgtatttccatttgtttgtgtcattgatgatttctttcagcagtgttttgtagttctcttagacctgatttttctttcagcactttgactatgccatcccattggcttccaccttcattgtttcgacaatgaatcagctgacaatcttgggtttt

SEQ ID NO: 745018 - DNA, 605 bp, Homo sapiens
aatttacaaataatgtggaaatcaaataatgtacttaaataaccaatgggtcaaataaatcacaagtaaaattagacgtactagttcgttttcatgctgctgatagagacataccagagactgggcaatttacaaaagaaagaggtttagtggacttacagttccacatggctggggaggcctcacaatcaaggtggaaggcaaggaggagcaagtcacgtcatcaatggatggcagcaggcaaagagagaaaattatgcaggggaactcctctttataaaaccatcagatagtcaggaggtggctccagtggctgtggtggcagcatgagtgccaggaggtggtggctgcagtgggacaggtggttgcacagtggcgggcacaggtgtaatggataggtaacagagaagacctcatcccttcctagtcagggcatcagcatgacaaagtgctycctgccccccaccagcagccccagtgaacaccacagggtggagcatggcagtgggcttacccagacccccagctctgaagagatcagccctactaaatttcctggattgtaccacactggtgagccctcacctccccatgacatcctccac

SEQ ID NO: 745019 - DNA, 473 bp, Homo sapiens
catttttgccagaaccattattgatcaagcaaataaattcagccatttgggaaaaagaaaaaaaaaacccatcagatctcgtgagatttattcactatcacgagaacagcacgggaaagacttgcccccatgattcaattaactcccactgggtccctcccacaacaagtgggaayttaagatgagatttgagtggggacacagccaagccatgtcattagaaaatactttcagatgaatgaaaatgaaagtaccacataccaaaacttattgggatgcactgaaagcaatgttcagaaatttatagctgtcaatgtcaacttttaaaaagaaaaaaatctgaaatccaacctaatctttcaccttaaaaaactataaaaagaatagcaaattaaactcaaagcaagatgaagaaataataaagagtagaaacaaatgaaggagaaaataggaaaacaatagagaaaatcaac

SEQ ID NO: 745020 - DNA, 619 bp, Homo sapiens
aaatcactaagctaaagggaaaagtcaagctgggaactgcttagggccagcctacctcccattctattcaaagtcacccctctgctcactgagataaatgtatatctaattgcctgctttggagaagctaatcagaaactcaaaagaacgcaaccattyatctcttacccacctatgaccttaaagtcccctccccacctcaagtcttcctgcctttgcttcgagttgtcctgcctttccataccgaaccaatgttcttgcatatgttgcttgatgtctcctgtctccttagaatgtgtaaagccaaactgtgctctgaccaccttgggcacatgtcatcaggacctcctgagcctgtgttatgggcatttgtcctcaatcttggcaaaataaactttctaaattaattgattcctgtctcagatctttggggttcacacagttatatctcaacaaaattgtaaagaaatcatcctggatggaggctagaattacaaaatggtaaaaagaaacattacccagggattagcaaccacagaaagcctcattcatgcctagggtttgaggaacttaaggaaaaatggtgtgtttgcaaagcctgtgtttacttggccactaa

SEQ ID NO: 745021 - DNA, 607 bp, Homo sapiens
aaactagcaaagcattgtttattgaaacttgatgaatgcacagatattattaatgtggcaattatttcagtataatttgaacagtgtgttgatgtggagaatcccttattacaaccttattgccaacaaacaacgagttctgaatagtayacaggtaggaagaactgcatgagaagaattacagcaaagtgtttggattttaggttttgtgtagacatgtgttctgttggtgaagctgcaatgataggaaaacattctggagttgtcagattaagcacttgtaccagaatgtaaaataatgcaccactgctttcacggagaaacgcttgctctgaaaacaagtcagctcaactaaagtgacatagtataaatagtaaaatgtgttaaactcaagattttttttaattgtgtgaaaccatgacagctgatcacaaataactattattattgctcttgagatatttcaaagaaaaaagttctgttgagaatgtttgaacttcaaaatgaatgcttaggctcctgcaatataagaaacaagttcaatcccactttttaaatatgtaaattggacagtcagacttgttcatttgtctggtattatttttaa

SEQ ID NO: 745022 - DNA, 599 bp, Homo sapiens
tgatacacttatttataaagcagcaatgtatcctagcgtataaagtactacattgtaaatgaactacggatacagataacatatagtcaaatctcacaatgatataattttgagtgaaagaggctagagacaacactattagactctaacgatataaattttaaaaaatatatagcaaattgatgtgttgcaggcccaggcaatttttaaccttcatgaggaagaaagaatgaagtgatctagaaggagtatagggaggacttctgtctattcttatttttggacctggatggtatttctggtaattttttcttgataakttttagctgtatacttaaggtttaggcatctttttcttttatatttttaaatatgtgtgtatgaatatatgtagactatgtgaagagattttgaaatatattctctaaaaatatcttactttgtgacacccaagcaattcaaaaacagcaatacaactattatattagcctcaaacattcaataaaattcaacagcatatattgtataggctccatatactgaggatgatataactttagaaatatatagcaaaaaaaaatgtttaaaatgcattacat

SEQ ID NO: 745023 - DNA, 492 bp, Homo sapiens
tgatttcccaaaattcatttgttgaaatcctaacccccaatgtgatggtataaggaggtggggcatttagcaggtagttaggttgggatgtagtaaagccatgaaggtagaaccctcatgtatagcattattaatcttataaaaaggactccagagagcttttttgccctctttttgccttgtgaggacatacatgggaagaattcagaagtctgcaatcctgagaagggcccccaccagggcttagccatgctggcactctcatcttggacttttagtctccagaactgtgggtaattaattcattgtttatmagtcaccgagtctatggtacttagttatagcagcccaaactgagatacgatgtaaaggattctttcaaattacaacaagacaatataaattgaaaaccagacaaacattttaaaatattaatttaacaacaacaacaaattaaataactagaagtcttggtcaaccttagtaaagatc

SEQ ID NO: 745024 - DNA, 543 bp, Homo sapiens
gaaatattattcagccttaaaaaggaaggaaatcctgttacgtgctataacgtggatgaaccttgaggatattatgctaactgaaataagccagtgacaaaaagacaaacagtatataagtccaattacatgaggtgtctaaatagtcatattcatacaaatagaaagtaaaacggtcactgccagggtttagggagagggggaaagggagagctgctgtttaatagacagaattttgattttgcaagatgaaaaagttctggtagaccggatgcagtggtcatgcctgcaatcacagyactttaggaggccgaggtgggcgaatcacttgaggtcaggagttcgagaccagcctgaccaacatggtgaaaccccatctctactaaaaatataaaaaattagccaggtgtggtggcgcacgactgtagtccaagttactcaggaggctgaggcatgagaatcactggaaggcagggggcggaggttgcagtgagccgagatcacaccacttcacaccaacctgggtgacagagtgagactccg

SEQ ID NO: 745025 - DNA, 543 bp, Homo sapiens
ataaaggaaagaaaaagaaagagaagttaaaagacaagaggtagatgagaaaactagaaacaaatcaaatgtccactaacagatggaaggataaataaatagtggtatatccacacaacggaatactactcagccaaaaaaaaaatgaactactgatacaaagaacatggatgaatctctcaataaattaatccaaccaataaagagtgtayagcaatatgttttcatttgtataaaactagaaaatgcaaaccaatctaaagtatcaatgcagagcaaggtttgctgtgaagttaggaatgtgaggcaggagggagacaagggagggtatcaaaggaagacgtggaaaattttagaactgatggaaacatttactctcttgattgtggtaatgactttgtgggtatatacatttatcaaactcgtgagattggtcaatttaaatatggcagtttattgtatgtcaattacacctccaaaagttgtttaaaaatcactggatatatccttccaattaaacaagaatattaactgttagattat

SEQ ID NO: 745026 - DNA, 471 bp, Homo sapiens
agaagaggggcctgactgttagaagaaaaactacaaacagtaataacatcagtatccacaaaaatgacccccccccccgccaaagaaaccccatccaaaggtcatcagtctcaaagatcaaaggtagataaatccacaaacatgagtaaaaaaaagtgcaaaaatgctaaaattccaaaaaccagaatgcctcttctcctccaaatgmtcataactcctctccaggaagagcacaaaactggacggagaatgagtttgatgaattgacaaatgtgggcttcagaaggtgggtaataacaaactcctctgagctaaagaagcattttctaactcaatgcaaggaagctaagaaccttgataaaaggttacaggaactgcaaactagaataaccagtttagagaagaacataaatgacctagatggagttgaaaaacatagcatgagaacttcgtgaagcaaacacaagtgta

SEQ ID NO: 745027 - DNA, 471 bp, Homo sapiens
agaagaggggcctgactgttagaagaaaaactacaaacagtaataacatcagtatccacaaaaatgacccccccccccgccaaagaaaccccatccaaaggtcatcagtctcaaagatcaaaggtagataaatccacaaacatgagtaaaaaaaagtgcaaaaatgctaaaattccaaaaaccagaatgcctcttctcctccaaatgatcataactcctctccaggaagagcacaaaactggacggagaatgagtttgatgaattgacaaatgtgggcttcagaaggtgggtaataacaaactcctctgagctaaagaarcattttctaactcaatgcaaggaagctaagaaccttgataaaaggttacaggaactgcaaactagaataaccagtttagagaagaacataaatgacctagatggagttgaaaaacatagcatgagaacttcgtgaagcaaacacaagtgta

SEQ ID NO: 745028 - DNA, 665 bp, Homo sapiens
gggaagcccatcagaataacagtggatctctctgcaaaaccctacaagccagaaaggagtggggggccaatgttcaacattcttaaagaaaagaattctcaaaccagaatttcatatccagccaaactaagcttcataagtgaaggagaaataaaatcctttacagacaagcaaatgctgagggattttgtcaccaccaggcctgccttacaagagctcctgaaggaagcactaaatatggaaaggaaaaaccggtaccagcaactgcaaaaacacaccaaaatacaaagaccaatgacactatgaagaaactgcattaactaatgggcaaaataaccaacaaaataatagcatcatgatgacaaaatcaaattcacacataacagcattaaccttaaatgtaaattggctaaatgccccaattaaaagacacggactgacaaattggttagagtcaagacccatcagtgtaaagggatcaatgcaacaagaagagctaactattctaaatrtgtatgcacccaatacaggagcacccagattcataaagcgagttcttagagacctacaaagagacttagacatccacatgttaatagtgggggactataacacctcactttcaatattagacagatcaacgagacagaaaattaacaaggata

SEQ ID NO: 745029 - DNA, 635 bp, Homo sapiens
atttgggatctaatttattcccaaatgacagccttaatgtggaataatgacaggtcaaacttttatggcgttatattataaaacagggttctttcggaagattaagttattgaccctgaggcttcactcttttgttgtagtattatggaaccayatgcttgttaagccttcaaggtggatgtacagtaatgtactcttctttttgacttttgacttggccatgagacttgctttgacaaatggcatagtagcagaaaataaatgtgcttgcatgactaagtttgccttgtgggagattctgatggctaccatgagagaaaaaaaaaaaatccacctttcccggaaaggcactgacccatttacatggagtagaaccagagtcttatcagaggaaatttctttcctttacagaagaagacctgacaataactgcccaatataatttcaaaatgtccagagaccagtgattaaaatatgcctgccattcttccccttttcgtgtggcagtgtttactgcagtgaccttgtcccttttgacaccatggtagaacttgtctttttacttcctagatctacagatcaagagtggccacattcggacctgatgtagatcaggactttagtttgatgttgtg

SEQ ID NO: 745030 - DNA, 542 bp, Homo sapiens
aaagatagtgaaagaaggcaggattgcagcaatatggacaactagatgcagccaggtggaacagctgctaccaagtgactgggacaaccaacacacttctaacagatcttcagagggaaggcactgagagtggatggagggaaaacacagggctaaactgaagcyggaagttgctgggaaccctatgtagggataccatgcaccgggactcattttgggcccccagtgactctgggagaagagatgagttaaactagtgaggagcaacctgctctttcaccatgggcctctggaattccagcaggaggagatgcctcaaccaccaccgacacttgagttggcaaggagagctgcttagagaagtggtaggggcagcacaccagctgatatggagcccagatggtttggtgcaggagtgtctgtagcagggcatagccagggatgctcatccccctaggctggacttactcccatagaagactgtagccctggaggaaccgtcagacctgaactctgcagggcagtcttacctatgagatatg

SEQ ID NO: 745031 - DNA, 459 bp, Homo sapiens
caatttcatttatttctgctcttgtttttattatttattttcttcacctaattttgggtgtaatttgttcttttctagtttcttgaggtgtatgattaagttacttatttgaagtctttccactcttctgatacaggcatttattgcaataagcttccctcttagtactgcttctgcagtatcccatagatttttgwatgatgtattttcatttacatttatttcaagaaattatttagtattattcttaatttcttcattggcccactggttgttcagaagcatgttgtttaatttccatctgtttgcatgtttttagtttattcccttgtgagcagaaaagatacttgatatttctacctttttgaatttgttgagacttgttttgtggtctgagatgtgatctactctggagaacattccatctactggtgaaaataatgtgtattctgcagcagt

SEQ ID NO: 745032 - DNA, 527 bp, Homo sapiens
ttcagttagaaaaacaagtgctgctatcaaaatactatatagctctgacttcacaattacatttgtagtaattggaattatattattaaaaaggatacaatatacgtacttggtactcggcatccaaatcttcaatgttaaaggcaaacagaaaatkggaataattgtcaagggatatttagaacaaaaaactgcattattagttagttatctgtctaggtaaaatgaaagaaccacagtcagtcatcactagaaagttttagagaagtgctgtcttctgtttgcagaagttccataaaagtgaatagctcaatcagatgcttgataatgttcagatgttgatttgaacctcagggccttatctaaagtggctgcattatgtatttacttattatttttaccatttgtctatcaagtactaaaaattgaacttgagtcaactgaagtgatacaataataagtcatttttaaatgtaattggatttaacactctcagaacacatggagtacattgttcgattgtctct

SEQ ID NO: 745033 - DNA, 561 bp, Homo sapiens
gcaaactcatttttagcaggttgtgaagactcatgtctcatgaagaaaacaaataggaggagatagggagaaagaaaacggagcaaaagatggaaaataaaaaacaaaaaggtagcacaatcctggaaaactgatagaagccatattattctgaagtccataaatcagtaggcaggtatgaaaatgtttcatgtatatgaatacgttgctgttattttcctcaaaagtttaagtcatcttgtatccatttgcaaaaatttaaggaaagcataacttaatttttagtgttttgaaatcaggcamaatgtcaatagaagaaaaaagtcatgattttggagacttgcagccagaaaaattttaggattcagtccaatttgtagaaaataataaaaactgaaaaacactggacaaggcaagaatctaataacaggtatagtatagtttatttggaaacataattttatctcttcaattccccgattttattaaagaaaaaatgatagtaagaccaattaatttgtaaaataaattgtagtcttatatacttagcttgattatttg

SEQ ID NO: 745034 - DNA, 547 bp, Homo sapiens
cagttagcatttttgttacatagccatctattctttttttccttatgcttattctgtaaataacattttctaatttgctttccttttacttaacaatatgtcacaaaatcctttcatgtcaataaatacagatccttatttttaatgaccgtgtactacttcattcaaatgtacctgagtttatctaatggatcctgtattgatgagtatttagattgtttcaaatttttcagaatgataaaatatttataaataaatctcaagttgctcgttatygctttgtggattggaattttgcagggacaatattcagctggccaattattttctgtagggtgctttaccctcctcccctcctccatgtctgtgtctgtgcctctaggggcgtagttacactcttgtggactggctagctattctctctatgagcattcgcagagagaagttagcgtgtcctccctctcaattaaatgctatttttaaaagccattttatttaaataactaggtagaaacagcaactaatatctttggcaattgtatttaaa

SEQ ID NO: 745035 - DNA, 574 bp, Homo sapiens
cactaagaattaatcattaaaacctttttaagtgttaatgcctgagatcctttataggagaatactaaaaacttagaaaaatcagaagactcattatcacatgcaacgttttccaaagaaataggcaatttctttcaccttaaggacattgaaatgattgaaattaataactaagcatttcacaaaagttatagaacaaaaataagccaatcattttccttaacataattattttctcctataggtaacaaaatatagtaaaagcaatagtacttaatggtcatatactctatgtactatgtatgttaaatataaacaatatttaagaaacatatactataatcttacttatttggagatcatatctatcaaacacaaccctgaaacacaggagagaatcaggaagtaagcacaagtcatataaaccacawatgtatatactagagttcatacattggactcatttgctctgactttaaacactattcattttattattacatatactttaagttttagggtacatgtgcacaatctgcaggttagttacatatgtatacatgtgccatgctgg

SEQ ID NO: 745036 - DNA, 523 bp, Homo sapiens
gtatgtgccataggtcagtgcttctcaaagttcttggtcaataggttattaggttgaatgttaccagtttaatgttacctaaaagggagttctgtggctaattaaatttgggaaatactaagtttaatgaaataaagcatgttactttactttttgcagccaaatatgcactgtgattctctaaggtttgtaggtgaagaaggagttagcatttcccagacttatttgtttgagatttgtgtagattaagaatgtaggctgggtgcgaaggctcatgcctataatcccagcactttgggaggmtgaggcgggaggatcgcttgaacccaggagtttcagaccagcctggaaaacatgatgagacacctgtctctacaaaacaatacaaaaattagttgagcatagtggtgtatgcctgtggtcgcagctacttgggatgctgaggtgagagaatcgcttgagctcaggaggtcaaggcttcagtgagctatgatcacactactgcactctagcctgtgcaata

SEQ ID NO: 745037 - DNA, 643 bp, Homo sapiens
tacttttttccccctcagctcagcctgtctatccctggagcccttcctgaagcctccagctgtgcaatgctttttgaagttgtcttttaattaggagattagggaactaagtaaataccagtgggactcaaagctaggacctcagcaggaaagtctcgaacacccaggacttgggacattaaaaatcttttaatggcttaagtatatctttgaaggttattgaacaagtcttttagtcatataaagtaatgggagagagtgtaattaacaagcagagccagcctgtcagctcttaccctgtggtaggaaaagaagattctctaagttgcaggagttcctaaatttatcatgatctgttagtggagtcgcctttaatgtcttgcctgaggacacttcatcacacttttattcctctcattttaagcattctrtattaacagaaattaacacatggtgaccaaagaacacattttctatcttttatttcctcaacttctgcaattagaatgatgagatttatcagccggtgtcactgtgcagttgtgactatcagatgggtgtcagatgacattgctgtaagtgattggtatctaccatctagcatcatataatgacaattgcctgcttctgtcacagctgaata

SEQ ID NO: 745038 - DNA, 631 bp, Homo sapiens
  misc_feature 631: n = A,T,C or G
acaaaatcaacatacaaaaatcagtagcatttttatatacaaataatgacctaactgaagaagacatccagcaaacagtcccatttactatagcataaaatgatactgagaaataactttaaccatggaggtgtgagatctgtacacttaaaactataaatcactgatgaaagaaactgaagaaaatacaaataaatggaaagatatcctatgctcctggattggaagaagtaatattgttaaaatgtccatactacctaaagcatatccagattcagtacaatacctatcaaaattccactggcattcttacagaaacagaaaaaaccatcctaatatttgtataaaaccataaaagaccycaaatagccaaaacaatactgagaaagacaaacaaaattggaggcatcacacttcctgatttcaaattatattacaaagctatagtaataaaacagtaagatattgacataaaaactgacacacaagccagtggaacagaatatagagcccagaaataaatccaaaccatgtatggtcaactaatttatgatgaaagcaccaacaggacacaacaggaaaataatggtctcttaaattaatggttctgggaaaactagatttacaaatn

SEQ ID NO: 745039 - DNA, 584 bp, Homo sapiens
agagtaagggttctactaaactatggctgctacctgatcattttgttatcctgatcctgatatattagaaggaaaatataaaacagtgagtatgctgacacaaataaatcataatcataatgatgagaaagaagtattgatgcaaaatgataatgaacagtatgtcttagaattcaggggactcactgaggagctcttggtgcccccaagcctagtgataaccatggacaaacaattacagtgacctctgtctgaaaaggtcatagtaaccaggggctcaagcccctcaggatgaaagtctttgttacccataggacaaacctacacctacagaactactggccaaggatgagaggaatcyagaatgagtgatagaggaggggcatgatgattattaattatagttttaggattaattgcagcagtaaggactacaaaatctaccattaagtctcctgtactaagttgttgggtttttaaaagaaattgtaatctcttgccacctagaagaatatgtagcaggaatggggtgaagttaatggaggcaacagtggatattaatagtggtaggctggattttagca

SEQ ID NO: 745040 - DNA, 497 bp, Homo sapiens
tttctctacattaaaccaagggagatcaggcatttccagctcactcacagtggggcatctttggtccatgtttcagttaaccaagcaaataaactattagaacgttttttaactcccagagctggcaacattaaatgcagatatgggccctctaaggagggccttctaaggagggcccatatcaatataactcccagagctgcaacgttaaatgcggatatgggccctccttagatggcccatatctttcaggccatatcarcctgaaccaactttatattctttccaccattatctcacacccttaatatccattttcagagccgttctccagatttctgcttatattagaaaactcaagcagttcttttggaattttgtgcacctcctgtgagacacactctgaacctcacctctaggggtctgctggcccttgattctagttgtaggtctagaagcaaacagggctgttgtggtgggtcctgaggagaatcagc

SEQ ID NO: 745041 - DNA, 669 bp, Homo sapiens
gggattgctgggtcaaatggtatttctggttctaggtccttgaggaatcgccatactgtcttccacaatggttgaactaatctactctgccaccaacagtgtaaaagtgttcctatttcttcacatcctcttcaccatgtgttttttcctgacttttaaatgatcaccattctaactggcgtgagatagtatctcattgtggttttgatttgcatttctctaatgaccrgtgatgatgagctttttttcatatgtttgttggccagataaatgtctacttttgataagtgtctgttcatatcctttgcccactttttgatggggttgtttatttttttcttgtaaatttgtttaagttccttgtagattctggatattagcccattgtcaggtggataaattgcaaaaattttctcccattctataggttgcctgttcatgctgatgatagtttcttttgctatgcagcagctctttaatttaattatatcccacttgtcaattttggcttttgtcgccattgcttttgatgttttactcatgaagatttgcccatgcctatgtcctcaatggtattgcctaggttttcttctagggtttttatgatttaaggtcttacgtttaagtctttaatccatcttgagttaacttttgtataaggtgtaagga

SEQ ID NO: 745042 - DNA, 669 bp, Homo sapiens
gggattgctgggtcaaatggtatttctggttctaggtccttgaggaatcgccatactgtcttccacaatggttgaactaatctactctgccaccaacagtgtaaaagtgttcctatttcttcacatcctcttcaccatgtgttttttcctgacttttaaatgatcaccattctaactggcgtgagatagtatctcattgtggttttgatttgcatttctctaatgaccagtgatgatgagctttttttcatatgtttgttggccagataaatgtctacttttgataagtgtctgttcatatcctttgcccactttttgatggggttgtttatttttttcttgtaaatttgtttaagttccttgtagattctggatattagcccattgtcaggtggataaattgcaaaaattttctcccattctataggttgmctgttcatgctgatgatagtttcttttgctatgcagcagctctttaatttaattatatcccacttgtcaattttggcttttgtcgccattgcttttgatgttttactcatgaagatttgcccatgcctatgtcctcaatggtattgcctaggttttcttctagggtttttatgatttaaggtcttacgtttaagtctttaatccatcttgagttaacttttgtataaggtgtaagga

SEQ ID NO: 745043 - DNA, 556 bp, Homo sapiens
gtttgcatcagtaggttcctttggtttttgtttgcttgttttgtttttttgagtacttttttgaattcatgaaacaaaatgtgtttatacatttatgtctttattgcaattatggttgtttccagatctgggctcctgtgatgtaagctactattattgtactggtattcctggatacatttttctgtggacaaatgtttttattctcttgggtaaatgccaaggagtgaaatgaattagtctttttattttgttgttgttgtttttgttgttgttgtttgtttgtttgttttgagacagagtctcgttctgttgcccaggctggggtgtgcttatagtaggtgaatgtytaacattttaagaaattgccaaacagatttctaaaggattgtaccattgtgtagtcctaccagtgatgtatgagaattctagttgttctacatcttcactaacacttagtatattctttttagttttagtcattgtaataaaagggaaaaaaaagaaaggcaaaataatcaagaaaaagaagtaaaattgtgtctattttcagtag

SEQ ID NO: 745044 - DNA, 633 bp, Homo sapiens
atggttttaggtctaacgtttaagtctttaatccatcttgaattgatttttgtataaagtgtaaggaagggatccagtttcagctttctacatatggctagccagttttcccagcaccatttattaaatagggaatcctttccccattgcttgtttttctcaggtttgtcaaagatcagatagttgtagatatgcggcgttatttctgagggctctgttctattccattgatctrtatctctgttttggtaccagtaccatgctgttttggttactgtagccttgtagtatagtttgaagtcaggtagtgtgatgcctccagctttgttcttttggcttaggattgtcaggcagaagaaatttctaagcagcaaagcatttaagaggtgaccgagcataaaagtttggaaaatgtgcagcctgacaatatggtagaaaagaaaaacccattttctggggagaaattcaagccagctgcagaaacgtgcacaagtaatgaggagccaaatgttaattgccaagacaatgtggaaaatgtctccaggatatgtcagggacctttatggcagcctctcccatcagaggcctgaaggctacgaggaataaatcggttctgtgggcctggtccagggc

SEQ ID NO: 745045 - DNA, 616 bp, Homo sapiens
ccgtctgaagcagccgctgcgaggactccagctgcagcaggggaggctccgcaggtctgcgcactccgtggaactggtgggaacagaaacaggtggaagcccgccccgttttcagttggcagggcgggacgagctccctgacgcagctgcagctgcccagccatggctgctgactgaggcakccctgcactctcagggaccctgaagctcctgtttccccgcagctcaaaagtacctgtcccgctgcctgcctctccccacacacagcgcccgctatttccttctctcttcctctgtcctctcttcctggacgggtaatcacgtttctataaccacaagacacttccctcggatgcatcccccaaactgggaagggtttaatttccccaaaccttaaactgcctgccaatctcttggggaaggacaacttctttgtctgtttcaccttcgcaggactccagggtgatagggctaacggctcagaggaagagaacccagaaacttgacatgccggcaaaagggttaaagttcttaggagatttataggggggaagatggcagataggagtcaggactaccatgcagctcccacttgggagacagagcagcctgcgga

SEQ ID NO: 745046 - DNA, 453 bp, Homo sapiens
aagtagaacatataggtaaaatggaaaatatataacagcaggaaaaattccccaacaaattacccataataacggtaaccaagcataatcactattaacatgttactgtctttatttcatggttgatttttccctcatgcaatttttctataattgagattatacataatatatataatgctacagccggcttttcccmtgtgctataatattataaacttgcaaacatcattttttatgatcatgtaatattccactgaacagatagttttaaaatccttcctctgttataggacatttagatttgtccagtttttttggtggggctggggcaggatgaggaggatattgtaaatgtaactgtcatgaaaattatgttcctggctttttctctgcttattatgggttattttatcagaagagagctcagaagtaagattactaggatataag

SEQ ID NO: 745047 - DNA, 631 bp, Homo sapiens
cagttcaaggccagcctgggcaacataacaacactccatctctatatatattttacacacacacacacacacacacacacacacacacagagtatatgtgtgtattttatacacatagtataaaattatacactataattttatatgcatagtacatagtattagtccattttcatgctgctgataaagatatacccaagactggrcaatttacaaaagaaagaagtttaattggacttacagttccacgtggctggggaagcctcacaatcatggtggaaggcaaggagaagcaagtcatgtcttacatggatggcagcaggcagagagagctctcacagggaaactccccttgttaaaaccatcagatctcatgagatttattcactatcacgagaacagcatgggaaagacctgcccccataattcaattacctcctactaggtacctcccacaacacgtgggaattcaagacgagatttggggtgtgggtgggacacagccaaaccatatcacatagtataaaattatcttcaggctatgtgtgtaaggtgtgtatgaaacataaatgaattttgtgtttagacttgggtcccacctccaagatatgtcattatgtatatgcagaca

SEQ ID NO: 745048 - DNA, 642 bp, Homo sapiens
tcctctgtattttcttccagtagttttatagcttcaggtcttacatttaagtctttaatccattttcaggtgattgttgtgtatggtgagagacagaggtcgtttcattcttctgcatatggatatccaattattctggcaccatttattgataagatatcctttctctgatgtatgttttaggggcctttattgaatgtcaggtgaatacacagatttatttctgggttttctattctgtttcattttttttatgtgtctatataccaataccatgctgtcttggtaactgcagctttatagtatgttttgaagtaaggtagtgtgatacctctagctttgttttttttgctcagcattgctttgactatttgggatctttcrtggttccatacaaattttaggattttttttttctgtctgtgaagaatataattggtattttgatagggattgcattgcatctgtggattgttttgggtgagtatgatcattttaacaatatcagttcttataatccatgagcacaggatgtttttccattattttgtattctcttaaatttctttcatcagtattttgtagtttttattgtggaggtttttcacctccttggttaactgtattcctagattttttatt

SEQ ID NO: 745049 - DNA, 545 bp, Homo sapiens
tggttcagtcacagtgttagtcactatggtccagggttccagaagtggagacttctcagtggtccttcccttgggcatctcagtagatctctaatggtttaggcccaggatatttttctatcctttccccagtggtacaaaagggktttctttctgttcctttacctgaggaaaagcagatttgctgttctttccagctgcttaatgctttgttccatatgggagacagatgtgaaggatctgggtggggctttgggctttttcctacagtagctgttgcccacgtcccctaggtctgcaccatgaaggaacctttctctgaactctcatcctgacccaacctttctgagaatccagtaaagtctgtggagaagagcctgcatgtacatgtaaatttctttcatgtccatggatctctggggttctatattctcatgttagcccacacatactcactttagcaatttggcaaaaaaaactttgaatttttcttaccagtttatttggcgtccagcctctgccccagggaggcatttgcacatggc

SEQ ID NO: 745050 - DNA, 545 bp, Homo sapiens
tggttcagtcacagtgttagtcactatggtccagggttccagaagtggagacttctcagtggtccttcccttgggcatctcagtagatctctaatggtttaggcccaggatatttttctatcctttccccagtggtacaaaaggggtttctttctgttcctttacctgaggaaaagcagatttgctgttctttccagctgcttaatgctttgttccatatgggagacagatgtgaaggatctgggtggggctttgggctttttcctacagtagctgttgcccacgtcccctaggtctgcaccatgaaggaacctttctctgaactctcatccygacccaacctttctgagaatccagtaaagtctgtggagaagagcctgcatgtacatgtaaatttctttcatgtccatggatctctggggttctatattctcatgttagcccacacatactcactttagcaatttggcaaaaaaaactttgaatttttcttaccagtttatttggcgtccagcctctgccccagggaggcatttgcacatggc

SEQ ID NO: 745051 - DNA, 536 bp, Homo sapiens
caattgccctgcaacttcagctctctgatcagttcaagaaaagattttattttgtagattatacaactataaatttttgttgtaagagtggagatgacactctttctgaattttatcatcctaagcagaagctgaatttccctggatatattttccatatagaactcataggatttgctaatctgtagagtgagagagagagagaagtcagtgatgtccccargattttgggcctaagagactggaataacacattgccgtcaagtgtgttagaaaaagcagcacatggagcacctttggatggggagatcaggcttttaattttgaacatgttgagttttagggctgtaactggaaaccctattgtctctcataacatttccatttctgagtgtgatgcttaaaaacctctgttcttcaaacctccacctttagataaatagcatattttctaaaggaaaggctccctgcacttcccacaggattgtgaatgcataataagggtctcccccatctcaagagggaagaatgatgag

SEQ ID NO: 745052 - DNA, 536 bp, Homo sapiens
caattgccctgcaacttcagctctctgatcagttcaagaaaagattttattttgtagattatacaactataaatttttgttgtaagagtggagatgacactctttctgaattttatcatcctaagcagaagctgaatttccctggatatattttccatatagaactcataggatttgctaatctgtagagtgagagagagagagaagtcagtgatgtccccaggattttgggcctaagagactggaataacacattgccgtcaagtgtgttagaaaaagcagcacatggagcacctttggatggggagatcaggcwtttaattttgaacatgttgagttttagggctgtaactggaaaccctattgtctctcataacatttccatttctgagtgtgatgcttaaaaacctctgttcttcaaacctccacctttagataaatagcatattttctaaaggaaaggctccctgcacttcccacaggattgtgaatgcataataagggtctcccccatctcaagagggaagaatgatgag

SEQ ID NO: 745053 - DNA, 640 bp, Homo sapiens
ttacagtgataggcaatccataatccataaaagtacacgctggtcctaccagattcctccttctcttagctcagaggacttctcccaatgtgtctctctgtcagtcttatttctctctcttgctctttgccatctcttctgaggcatataagcttctctttgtcactttcctctctatcttggtcccttctgggtcctaaatcctggctctgagtttatgtgctgcataaacttcagcatagcacagggcaaccctcctgactgtggatactctcaaacttcatagaaatttctcctggggaactggctaaatgcagagtcctggttccaccggagagaatcagattctataggtccaggatggggtgagagaatctgcattttaaccactgtcctctccaaaacctttcaycctgtgacctcccaggctggctcttgaactatactttgagaagcactgcatttgccctcagtttcctcatctgtcaatttggagtaaacagaaactacctcccaaggttgtaaagatgaaatgaaataatttgtctggaaagcaaacaccttttctctgtcttggcttttgtaaaatttattttgtctctgactttcccattctctgtttctggtgtttttcctattt

SEQ ID NO: 745054 - DNA, 633 bp, Homo sapiens
attccagcagcactttgctatggtctatggtcaccaccaccatcactggaatcatcatcaccatcactaccatcctcaccatgactgagtgtgtgtcgtatgctgcactcagcgctagacacttgaaatgcagtgttttgaaacccaactacaatattttaaggtgagaagtgatgcagctgtcctatttaacagatgaagaaagagattcagaatttaagttaaatttcccacttcatacggctgaaatgtggcagagcaagattacagcctacgtctgccttacttctagtccatcctgtttccaccttacctcacttctttagcatggcctggaaagaattgtgtacttcttcattaaatgtatctttgttttatattcttttgactattcacayatgctgattgctatactttgggcttcaggggagtatttattacctgttttgaaagaaggccctttaaagatgattttaaacatttttcaagtaaatgcaatagctcttgtttattgcttcttgccatgtggaattactgtaaatccaattagtttgatcaagttccctgtagacatggtgttgtttggcacagatgttatgtttgatcctgacattatgcagtagagagacatgt

SEQ ID NO: 745055 - DNA, 611 bp, Homo sapiens
tagtaaattgacgtttttctccttcatttatctgtgtctgctagaactgtttgacattctccacccacacaggttctgatgacattacttttactcattgtctatttacctgtgaaaggatgagctgttcattcatgggcataaagagcaatgactgaggaaatggactagtgtttttccattaatttttataatcatgtcttagttcactatgatgacgtacagttttctctttgttccagagaactatcaaaattgtcactgacatttatttacaaccatgatttgtataggacagttttagaaacttgaataccagtagtttgtcaagcaagatacagcgcctgcttctctagaatcaggggatgtttaagaggttatctagtccagcytcacagcttgtctcttagatatctttctgcttctgtgggaattaatgacttctactgactgtagatttgtctggagttttgcagaacaaaccaaatccttccccacataactatcttggaaaacctggagaactttcgacctttggaaacttgatgctgcctcctaaacttttcttctcaacctatgaaatgagcttctcatggaaattattttccaaa

SEQ ID NO: 745056 - DNA, 611 bp, Homo sapiens
tagtaaattgacgtttttctccttcatttatctgtgtctgctagaactgtttgacattctccacccacacaggttctgatgacattacttttactcattgtctatttacctgtgaaaggatgagctgttcattcatgggcataaagagcaatgactgaggaaatggactagtgtttttccattaatttttataatcatgtcttagttcactatgatgacgtacagttttctctttgttccagagaactatcaaaattgtcactgacatttatttacaaccatgatttgtataggacagttttagaaacttgaataccagtagtttgtcaagcaagatacagcgcctgcttctctagaatcaggggatgtttaagaggttatctagtccagcctcacagcttrtctcttagatatctttctgcttctgtgggaattaatgacttctactgactgtagatttgtctggagttttgcagaacaaaccaaatccttccccacataactatcttggaaaacctggagaactttcgacctttggaaacttgatgctgcctcctaaacttttcttctcaacctatgaaatgagcttctcatggaaattattttccaaa

SEQ ID NO: 745057 - DNA, 628 bp, Homo sapiens
ccctttatttcttattctgtttacctggatttttatttcaatttataccttatatgaaaaaatacaaaattcaaaaggtgagtataagggactagaaatagaatattatcattaatgttgctgaatattttaaaagtacatagggctttgttttgtgaggctaaagcagtgatatccaatagaaatatgaagccacgtatgtaattttaaattttctagtagaatacatagaaaaggtaaaaagaaataaggaaattaatttcataatgtgtrtcatttagctcaataaatgtaaactatcgctgggtgcagggtccatgcctgtaattccagcactttgggaggccaaggcaggaggattgcttgaggccaggagttcaagaccatcctgggaaacatagcaagaccctgtctctacaaaaaagatacaaaaatacccaggcatggtgatgtaagtcctagctacttatgaggctgaagcagaaagattgcagcactatactctagcataggcgacagagtgagaccttgtctcaaaaaaaataagaaataaatgtaaattattatttcaatcagtaatcaaattctaaaaaatacttaatgagatatttaataagtctttgcaatt

SEQ ID NO: 745058 - DNA, 618 bp, Homo sapiens
tgggtgaagccagctgggctcctgagtctagtggaggcttggagaacctttatgtcttgctaagggattgtaaatacaccaatcggcactctgtatctagctcaaggtctgtgaacacaccaatcagcactctgtgtctagctcaaagtttgtaaatgcaccagtcagcaccctgtgtctagctcaaggtttgtaaatgcaccaatctgcgctctgtgtctagctgatctggtggggacttggagaacctgtatgtctagctaagggattgtgaatacaccaattggcactctgtatctagctcaaggtttgtaaatgcaccaatcagcactctgtatctagctaatctagtgaggacttggagaacttttgtgtctagctcagggattgtaaatgcaccagtcagctccctgtcaaaamggactaatcagctctctgtaaaacagaccagtcggctctctgtaaaatggaccaatcagcaggatgtgggtgaggccagataagagattaaaagcaggctgccccagcctgccgtggcaatcgggtagggtccccttccagagggtggaagctttgttctttcgctctttgcaataaatcctgctgctgttggctgtt

SEQ ID NO: 745059 - DNA, 636 bp, Homo sapiens
aacaagccagaaagtagcatccgggcacattttgggagacagctggccaggcaggactaccacccagggcctgcttctcccataacctctggagggaaacagagtcttggtgggcacaggcatgctggagcccagtgcagagctggaatcgggccctcagccgcctccccaggggaggcctctcaccttgtcccagatctgctcactggtccccagagtgctccctaccagagggttgacccctgcgctgcacaccaggaagtcgacgcccccacagtgctccagggcctgcggagaggagattggatgagtgtggagatggcctgaggaggactrtccctcccagggcagcccaggtcataaggccttcaggcaaagcttgcagagctcctaaaggaaaatgacctaggtgtcccaagggcaggctcctggggccaggcactgagagaggaaggtctgctccaggagtccctctgggacctccctcaccccttcagactcctcctccacagtgattctccccgggcctgggggtggggtgagggtcctctcacgaacaggtcactttcctgagggaccttctgggtagcgaggttagcttgggcagcctgggtgcagtcatggtctcaggacata

SEQ ID NO: 745060 - DNA, 640 bp, Homo sapiens
actaggacagaaaaagcacgagaagtgactaaagtactgttaagagacattatccccgggtttggactgcctctaactttaaagtcagacaatgggtcagcatttgtagctgaaatagtgcaagatttaacaagactgttaaaaataaaatggaagttacacacagcctatcggccacaaagttcaggaaaagtggaaccaygaaccggacactcaagcagctactgaagaaatattgccaggaaattcatctgagataggatcaggttttgcctatggtcctcctctgagtcaggtgcacccccaccaaacaaactgggtatttaccctatgagattttgttcggtgggccacccccaaatcataagtcaaattaaagatgatctccaggaactaggggaattaactttaagaaaacaaatgcagaaatagccatgcaaagtgttcataattaggtacatgaaaaaaatgcctaaaaacctgatacccctttaaacctggtaactctaggttaaaaagtagaacccaacttctctaagactcatgtgggatgggccccatacagtaatcttgtcctttcccactgctgttaaagttgcagctgttgtgtcttggatccaccacagttggctgaaaccgg

SEQ ID NO: 745061 - DNA, 583 bp, Homo sapiens
tgcaaaacctacatgcatattgttttgcaaccttctccaccatctatctccagagcatttcattttcttaaactgaaactctttgcgcattaaacgataactctctccccacatcccctggcaactaccattctacctctgtctgtgaatccaatccatactactctaggtacctcatataagtggaatcctccagtaatggtcctttcgtgactggcttatttcacttagtataacgtcttcaaggttcatccacgctatagcgtgtgtcaaaagttccttcctttttaaggctgaatcatcttccattgtatgtrtctagtgtattttgtttattcattcatcactgacggacacttgggttgcttctaccttttggctattgtgaatgtggttgctatgagcaacactagtgtatgaacatctgtttgggtcccagctttcactttttttgggtataggctcagaagcagaattgctggatcagatgataattctatgtttaattttttgaagaatggccataatgttttccatagcggttgcacaatttgcattttcatgagcagtgcataagggttgc

SEQ ID NO: 745062 - DNA, 621 bp, Homo sapiens
tcttgggtaaatatctagaagtggaatgacgggctgcatggtagatgtacatttaacttgctggagtgcagtggcacaatctccgctcactgcaagctccgctcccccaggttcacgccattctcctgcctcagcctcctgagtagctgggactacaggcgcccgccaccacgcccggctaatttttttgtatttttagtagagacggggtttcaccgtgttcgccacgatggtctcgatctcctgacctcgtgatccgcccacctcggcctcccaaagtgctgggattacaggcgtgagccaccgcgcccrgccagatttaacttatttttaaaactgccaattttttccaaaatggttgtatccttccacattcttacgaagcattacaagaattccaattgctccacatacttgacaattagtagtcagtcttttgtatttttagccattgtagtgggtgtgttgtgatatgttattgtgtttctaatagcatttccctaataactaatgatgttaagtatattttcaggtcttttcctgccactgatatataacttctttggtgaagagttattcgtaaaatcttttgtcctttttttaatcgggtcatttgtcttt

SEQ ID NO: 745063 - DNA, 636 bp, Homo sapiens
taggcttttcatagatgtactttcattgattatccttactgttttttatgtcattgctttctgcttttatcttcattatgtcccttcttctgctaactttagatttcattcgcttttttttttatattctaaagtagaagcattgatcagaagtcagcaaatttttttcatgaagattagaggataattattttaggttttgctatgcatacagttaaccaactttattgttatagcatgaaagcagtcataggccacgcacaaatgaatcaacatggctgtgtttcaatcaaactttatttacagaaacaggcagcaggttggacttggctcatctgttatactttgacaacccctggtttagatcactgatttgaggcctttcttyttttctggtgtaggcatttagtactataaaatttcctctaactattgctttatatgcattccacaaattttcatatgtcatattttcacatttattgagttcaaaatgttttctaatttattttatttcttctttgactgaagaaatattttaatgtattatctagtttctaaatatttggggattttccagatgtcttgctgtgattaatatttaacttaaatccattctgatcacagaacatgcct

SEQ ID NO: 745064 - DNA, 608 bp, Homo sapiens
tcagacatggcttctgtccatgtctctgttttccacttcttggactcaaattccatttatgttggttcttttcattgtgtcccacatctttcttatgcttctctctccctctctctctgtctgtctccttcgctctgtttgtacatacatgtgtgtttaatcttttttccttctgcttcaatttggttatttttctgctgacctaattgccaatttactaatcctttcttctgctgttaaatccatctattgaatttccttctttctttctttctttctttctttctttctttctttctttctttctttctttctttctttctttcyttccttccttccttccttccttctttcctctctctctccttccttccttcctccctccctccctccctctcttctctctctctctctctctctttccttcaagacagggtcttgctgtgtcacccaggctggagtacagtggtgaaatcataggtcatttcagtcttgaactcctgggctcaagcagtcctcccgcctcagcctccccaaaagctaggactacaggtgtgtgccaccacactcagctaatttttaaatttaaaaataaatagagatgaggg

SEQ ID NO: 745065 - DNA, 631 bp, Homo sapiens
tccatgtgaacccaatatttagctcccacttagaagtgagaacagaaatcataaatcataaagtttgctaactgtcttgcatgtaaaaccttgtagccggtatgttgtcatctgtagccaatgactgtaaccgctgtattgtactgtccaatgaagaggacagctctaataagaggctcctctcttctcctaaactttcccatagaaatgttccaacttagaacagactctggaacacattgaattttgttggtgtatctgcccatgtsagtcttcacatttggcttccaataaaccttcatcaaattagtttggtcaacaatcttgactgtatcatgtcaatattgggttgtgatattttgtaagagataaccattgagggaaacttggtaaagacacacagaatctctttgtaatatttcttgcatgtgaattttctattatctctaaagaaaaagtttaaatagaaacattgagttggcattggaattgaacagttggtagaggctgacagaattttgaaagacgagataggaaaaaacccttgattgctctgatcaaactagtagaaatgtggacattaaagacgctgttagtaagtgctcagaaggtgtaaggagcatagcagcga

SEQ ID NO: 745066 - DNA, 664 bp, Homo sapiens
tgggctcaagggatcctcctatctcaacctcccaagtagctgggactacaggcgtgcaccaccacaccagccaattaggtaaacttgatgaagaagcttgcagtggggggacaggtggacccccacttgaacctactaatcaatcttatcatcactaaaagtagaacaaatatgatgagtctcactgatgggacccattagaaagtgacagcgccacctaggaagtgttcttgccttaaaaagtgaacctaaatctaatcaagtctctggatctaaccaccaatttataggaaatatgaggcacagcagaataagtattaaaagccctctaggctgcaatcagcaaaatccaggataagggccattctacagatccaatgaaccagtttctccagggaaccagtggcatctacaaataataaagaataaagcaaaaagmacaaaggatatttaagatataccaaacaatgtatgggtcttgtttggatcttgattgagacaaaataactctgaaagacctttttgagaatttgaacgttaattgtgtactagatgatattaagaaacgaatttaatgttgataggtgtgataatgtgtggtggtcttgttttttaaatgctctagttaattaaagatacatactgtggtatttacaagcaaagt

SEQ ID NO: 745067 - DNA, 664 bp, Homo sapiens
tgggctcaagggatcctcctatctcaacctcccaagtagctgggactacaggcgtgcaccaccacaccagccaattaggtaaacttgatgaagaagcttgcagtggggggacaggtggacccccacttgaacctactaatcaatcttatcatcactaaaagtagaacaaatatgatgagtctcactgatgggacccattagaaagtgacagcgccacctaggaagtgttcttgccttaaaaagtgaacctaaatctaatcaagtctctggatctaaccaccaatttataggaaatatgaggcacagcagaataagtattaaaagccctctaggctgcaatcagcaaaatccaggataagggccattctacagatccaatgaaccagtttctccagggaaccagtggcatctacaaataataaagaataaagcaaaaagaacaaaggatatttaagatatamcaaacaatgtatgggtcttgtttggatcttgattgagacaaaataactctgaaagacctttttgagaatttgaacgttaattgtgtactagatgatattaagaaacgaatttaatgttgataggtgtgataatgtgtggtggtcttgttttttaaatgctctagttaattaaagatacatactgtggtatttacaagcaaagt

SEQ ID NO: 745068 - DNA, 563 bp, Homo sapiens
attaatatatgtaccatgctttctacttttccccacggttttccttttttatcaattgaccagctcttcttcatttaatttctgattaagtgcttacctttaaattttaactccaacatctgtccattattttattttcccttatagcctgtgtaagtgtagtgccccttgtcattatgctcggcaaagcacaaaccttagcccacttggacttccttcctctccttctcctccccacctgcaatgttaataccacttgagcttttagttccagttccatttagacttagcagcaaattctaattcctttactcaccrctgcttcttgaatctgtagctttctcttggatttattttcattgtgttgaagtacctcctcctacaggtaggatggaaggtgactcattttctcatctgtggatgtctgaaattgtctttacatattttaccttcacacttgaatgatggctttagccgattcaaacatgtgtcccttagatctctaaaaatatttcccctgggtctctgaagatcttccaacatgcagtgttgtagctaaatct

SEQ ID NO: 745069 - DNA, 670 bp, Homo sapiens
agaaccagctccctcaagttcccaagacctctgtggggccaagaggggctggggacttcatgcaaggtgctgatttcagaggcagctgtgattaattttagaaggccctgacattctaactgagtcatcctgaggtggcccgattggaactaattgggtgagcccatttcaagctggctgtcttctcaagtgtcccaaccctctggggttcttccagctcctggaattggaaggtcttgatcctgtcagcaagtgccatctcaccaacaaggagggccagggtctgcccacccagagtgacaggaccacctcaaaacatgcaaagagggtcctggcagctctgtgtccatgggcaactcaaagacagccaggatgatcactcctgggaagctgactccagtctttcccattacaccagcaactataaagcacttactgtatacaaacaccatgcagcaaccattcccaaaactaattattcatattccctacagagcttattaaaaatataaatgccygggaccagccctgggcaggggcccctgggggtttgtcaggtaggccaggtctgggagccaccattgtgccgcacccagagctgagtggcatgcagaccctgccctcaaggtgctggcagtctgctgagagccggggctgtggtcacaggaaa

SEQ ID NO: 745070 - DNA, 490 bp, Homo sapiens
tgccccctgtagatatcctattccccaacttttcattttaagctttttggttggtctgttatttgccccagctgttttctactccctcaggcatccatgaagttaatcaatttggctgtaattgtttctgataaatggccctggaaaagagcttttcacactgtgtaagttcagagtcaggtcaaatacagacaaccttacaaagggggatcttccagagaatcaccagacaggtcaaataatgacagctctctggtaatgggcctttaacgagctccaggccaattctgttcccttaggtggctgccaccatgctaattttcactgttagtgtacrctttaatttttcaaggttaccatggggatgggactaggataaattaaaatgtcacaaagctttttttcttaccaggattctgccacttttcttaaatattaacactacttggattgttgcaatttaatttccaaagttcaaaaaaaaattggc

SEQ ID NO: 745071 - DNA, 554 bp, Homo sapiens
atcttgattattaaatgctatatttacatttccaagtatatcataaattcccaagaagtgattttttttatttctttacctaagagtaattttaagcttaaaatccttttaatccagctcagcggaaattcttggagccttgactctgagccaagtgctgtataaaagaccgtggggagcatcattggggtgtattgtgtgtggggtggcaggggcatggagggtgaaggtgttaccctctcccayccctgaaaaatgcactgaagcaaataaaaatattttacggcaaaatatatgtttttgacacattttgagttggctgttcagagagccagcaaacagaagtaggcttgcaaagctgtcttttgtgggagagatttgcatctatagagaatctgcattgacgctgtcaggccttcccttgtccagatctaggaaagattaactgagaatctgatacctctaagggactgaaagaaatatttcccatctatactctctgacaactgctacctgtgaggtttcatttatataagaagaccacctttgttagc

SEQ ID NO: 745072 - DNA, 594 bp, Homo sapiens
cttaccctgtgacactctttgacaaaaatcatctaattgaatcctcatcacaaccacataacatgggaatctatatctctattatctaggagaaacaaagtgcaaagaatttcagtcatctagaaagcaagggtgactgttaagaagtatgaggcagagacattattggactgcttggcacccctgtggcccccgctcgtttttatagcttcatggagttagrgacagcttagagaccagttctgtccaatggcttgagagcaaaagcagagtgtgccatttctggaccacggttagaatcagtttgtgactcactagctttcctcccctaccctgctgaccatggaagcttcatgttaagatggaagacagttttgctgctgctaagaaatgcaaatcctaattgccgatgatgtaaaaccacaggtttatttctttctcactctacctgtacaagaaagggttgctggggactgtgctcactgtagttactcaagtacccaggctggtggtggtccattgcataagtgcccacgattgctgagatgggaaataaaatgttggattgtatactccataattcaacaactcttg

SEQ ID NO: 745073 - DNA, 594 bp, Homo sapiens
cttaccctgtgacactctttgacaaaaatcatctaattgaatcctcatcacaaccacataacatgggaatctatatctctattatctaggagaaacaaagtgcaaagaatttcagtcatctagaaagcaagggtgactgttaagaagtatgaggcagagacattattggactgcttggcacccctgtggcccccgctcgtttttatagcttcatggagttagagacagcttagagaccagttctgtccaatggcttgagagcaaaagcagagtgtgccatttctggaccacrgttagaatcagtttgtgactcactagctttcctcccctaccctgctgaccatggaagcttcatgttaagatggaagacagttttgctgctgctaagaaatgcaaatcctaattgccgatgatgtaaaaccacaggtttatttctttctcactctacctgtacaagaaagggttgctggggactgtgctcactgtagttactcaagtacccaggctggtggtggtccattgcataagtgcccacgattgctgagatgggaaataaaatgttggattgtatactccataattcaacaactcttg

SEQ ID NO: 745074 - DNA, 629 bp, Homo sapiens
attttatatgttattataactttgctaaccttattttctatgtcataattctagtgtataaaatatgccataattttattagtcatcctttccctgttggacacttagattggatgactaatagatctattttaacttcttcctatgaggacacaaagtatttttatttatttattcaatcttaatttatttttgcaatggcaaattaaagaagaaaagacaaattgtgttgagacatgcctaggtttttcactgtccacatgtctaaatctaaactcatcagcttattccagaaaaaaaaaaaaaaaaaaaaaaaaaaaaaccacattgtttctcttacacctcctcccttggttaaggttccctatttttcagactgccctggctcaraaaagcccagtcagcctgactttttgccccttgaacattaaaatctaatcagtctccaaggccattcagcccttctttcagagtacagtaacgttacatcccctgctcctccgattttccgagtgagtatctaaagtcgggctcctttatctcatgttttctttacttatgagccagggtcatgactgaaataactctatttgcatgtggtcaatgctggatgagtactggacacatgc

SEQ ID NO: 745075 - DNA, 611 bp, Homo sapiens
catcttcaaattctagcacatcaattcatactcatcctctggagattttggggttaggaaactgcatttgcctcttattatgaagttagttgaatgatatttctttgatttccgtgcaagaaattaaagttaaaaaaaaaagtgtttgcaaatgacagtgcctcctcatctaggtgttcccaggccccattgactgcacttccctccaagggagagaaaacagggaggatgccctggtggttgctattctggaccagtgctgagcatctgcaggcctgtgtgggaatgagggaaaggaccacaggcagaggaacaggagcaggcttgagaaccagcgtcctggaycacagccccagctccgccatttcctcattgaggaacccgaccccagggcacagagttgtgttggttcctgctgtatgccagtcttagaatatttatgtgactaggaacttgtagctctattgtgtagattaaaagaacacaggatcggtgagattagggagagtaagtaactttcccaaggttacctgacaccagacttcatctcctactacacactcctccggagggagcatctgtcaagccctggctttcccaaatgaatggtg

SEQ ID NO: 745076 - DNA, 512 bp, Homo sapiens
tggtatctaatcctctcaactaatttgtgccatgcaatattctaaaatctgtgattacagagatgaaccaaagagacttggtccatatccttgtggaatgtaaattctactgggtaaaagcagatgataaataagttaagacagagcagatgaataaataagcaaaccaaacacaaawatataagataatacatgctagttcataggccattatatgaattaaaaacaactgtctcctctaggaggacaaaacagagaagaaaaataccactcccactgcgatgaaaggcttgtctactcaatactgcctcttactaatacaaagaagatgttcctctagagctcaggaggaatctgtgagtcagatttcaacccacactcatcctcccagcctgcagccattggcaatgcccaaaccaagcagccttggacatggacacaagacagggccttgtgttaaagaagaaaaagatgcagagggcaggtatgtcagtcaatacgattgccttgca

SEQ ID NO: 745077 - DNA, 343 bp, Homo sapiens
tttgttaaatttttatatgtagtatctctgattcttattctaaacttgttaggtcagagaagttggataatttcttactgttactcagtgagcatcttttagggtcaaaattcaaacccagttacttctggcttcaaaggcccratgttttctactacactatactatcccacaaatatatcaaaatgataacaatgagttggttatataggagaaggcgtagtaacttggcatcccaactccaaatctgagaattacttaatgaagaaattgagccacagcatttgacctggctagtggttcccgcatgaaactaggcaccaacatttttttgttgctgcta

SEQ ID NO: 745078 - DNA, 604 bp, Homo sapiens
ataaattacataaatcatgaaatataacttaaaattaattatttaccaatttaaataccactcttagtaagcaatagaaaaattaaaatcaaagataaactataagaatcatctcatggagaaactcacaaatgaatactctggaaagtcatcacagatggccataaagaattctacccctccttggacatacatcttactgttcttatcaagggtggagtcagtttcctcttttctcgagtcttgactggctgatgacttgttgtaactaatataaaaatggcagaaatgaccatgtggtcttccaggcttagccttttagagttatggaagatggttcttttgccttcttgacaaccagctgtcttgcaaagaaaatccaagccatcctgcagaagagaggttaygtgaagaaagctgtgaggatgagaaaccataaggggagagggttcacatggacaatagagatgccctagctgacagttagccccaaagccccagacagctgagagaaaccagccaccaaatgaatgcaaaaccacttgaatggccatagcagatgccactgtgtgctatgttgtaaatgtttgtgtttccctcaaaa

SEQ ID NO: 745079 - DNA, 619 bp, Homo sapiens
caccttaaaaaactatttcattagtttcatcaaaactatttcattatctattagtagatgccttacctttgtaaagctccatttgaaaagctatgtgctgataaactgcttataatagagccaagaacacaaaacatgctctgtaaaggttaactatagatacaattatcatcatcgtcttcattatttcatttgctatgtctctcagaattcttattwgcatcccctgtgagcttaatatgaccatcttcatgtaacaaatgtgaaagcatagcattaaggtgttaatgatttatttataaggtcacaaagccaataagtaaagggattaaactttccattgctcttagggtcaacatcaagttctcaacaagatgcacatgacctcgtgctgtctgactgttctccataccttcagcctcaactcaccccgctctctagtattcactcccccacaccatctgcactctggtaatggtggggaaagtgcctgcatggccatctttgaagttcctcaggtgtgctcctctcctcccaccatagcaccaaccacacacttgtccctcctcctgtaactgttccacaatccactccttttctccttgacccaagtcaagtt

SEQ ID NO: 745080 - DNA, 619 bp, Homo sapiens
caccttaaaaaactatttcattagtttcatcaaaactatttcattatctattagtagatgccttacctttgtaaagctccatttgaaaagctatgtgctgataaactgcttataatagagccaagaacacaaaacatgctctgtaaaggttaactatagatacaattatcatcatcgtcttcattatttcatttgctatgtctctcagaattcttatttgcatcccctgtgagcttaatatgaccatcttcatgtaacaaatgtgaaagcatagcattaaggtgttaatgatttatttataaggtcacaaagccaataagtaaagggattaaactttscattgctcttagggtcaacatcaagttctcaacaagatgcacatgacctcgtgctgtctgactgttctccataccttcagcctcaactcaccccgctctctagtattcactcccccacaccatctgcactctggtaatggtggggaaagtgcctgcatggccatctttgaagttcctcaggtgtgctcctctcctcccaccatagcaccaaccacacacttgtccctcctcctgtaactgttccacaatccactccttttctccttgacccaagtcaagtt

SEQ ID NO: 745081 - DNA, 478 bp, Homo sapiens
ttgtaccgacagtaactcactacatcggcaatggaaacgagaagacaaggaagtagtgtcttcaaaccattaagagacaataactgtcagcaaaatatctttcaagaataagagcaaaattttaagacctaatataagcaagcctaataatgtttactatccacatatacacgctaaacaaattcaaaaatatggtcttcagaaagaaagaaaataacccaagaaggaaggtcttagaaggaagaagaaatagtgatcaaaaacaataatgtaggagccaggagcggtggcccatgcctgtaatccyagcactttgggaggctgaggcagtcagatcatctgaggtcaggagttcgagaccagcctggccaacatgttgaaaccccgtctctactaaaaatacaaaaattttctaggagtggtgacacacgtctgtagtcccagacactcaggaggctgaggcaggagaattgcttaa

SEQ ID NO: 745082 - DNA, 622 bp, Homo sapiens
ggtcagatccaatcatatgagcccttctgtttgtttttgagacaggctcttgctctgttgtccaggctggagagcagtggcccgaccacggctcactacagcctcgacctcccaggctcaagcaatcctcccaccttagcctcccaaatagctgggactacaggtgtgcaccaccatgtctggctatttttaaactttttgtagagaagagggtatcrctatgttgtcagggctggtctcaaacacctagattcaagtgatcctcttgcctcagcctcccaaagtgctgggattacaggcatgagccaccatgctctgcccatatgagccctttaaatctgggtctagaggataaaaagagaagtctgaagtaagcaagatgtatacttcctactagcctggaaaaaagcaaacagcactgttgtgaagtgcctatgagggggccatgtggcaaggatctataggcagcctttaggaaatgagtggttccagtggacagctagcaagaaaatgaggatctcagtcctataaccataggatctgaattctacccacgaccttaatgagatagaagaggaacctgggctccagatgagagcacaggcagtaatacctttatttc

SEQ ID NO: 745083 - DNA, 571 bp, Homo sapiens
cgagtaagtctcacaagatccgatggttttataaaggggagttcccctgcacatgtgctcttgcctgccaccatgtaagatgtgcctttctcctcctttgccttctgccatgattgtgaggcctccccagccatgtggaactgtgagtgcattaaatctcttttccttataaattacccagtcttgagtatgtctttagtagcagtgtgagaacagactaatacagtaaattggtactggtagagtggggtgctgctgtaaagatacccaaaaatgtggaaatgactttgcaactggttaacagacagaggttggaagagtttggagggctcagaaaaagacaggaagatgtgggaaagtttggaacttyttagagacttgttgaatggctttgcccaaaatgctgatagtgatgtggacaataaggtccaggatgaagtggtctcagatggagatgagaaacttgttgggaactggagtaaaagtcactgttgctatgcaaggagactggtggcattttacccctgccctagagatctgtggaactttgaacttgggagagatgatttag

SEQ ID NO: 745084 - DNA, 605 bp, Homo sapiens
ctcatgcaccattcccttagctcttgtgttcgtaatagaatccttatttgagaacctgggtccctatcagtacaagtaaaaggaaaagaagaaacacccagagtgagattcttcaggtagctttgaggatgcccaaggtgaaacattaatcaatcaataacaacatgatggagaggcaggtgttccctcttctgtaccccctttcctggagtgtgggaactactgaggctctcacaatgcaactcaaggctagggaggagatagataccattttgtttttgttttggttttgagacggagtctcactctgtcgctcaggctagagagcagtggcatgatctcggctcacggcaacctccgcctcccaggttcaggcaattctcctgcctcagcctcccaagtagctgggactactggtgcctggccaccaygcccggctaatttttgtagttttacagaattttttttgtagagataggatttcaccatgttggtgaggcttgtctcaaactcctgacctctggtgatccaccaacctcggcctcccaaagtgctgggattacaggtgtgagccactgcacctggcctagacatataccattttt

SEQ ID NO: 745085 - DNA, 626 bp, Homo sapiens
ctgctggtgtaagagttcataggccaagtccttctcgcattctaatttggtaccttataattggtttcctgttactgaacagtcctgtgtgagtttgggtgataatattacactgaggcctgaattggggcaggaccagcatcaaactaattagggccagcattccacatcaatagcatatatgtggctatgtttgggggttccaaaagtccttgtaatctcaaattatctttgctgctcatctgctataacgtctgaaatgctaccattaaatttatcccattagactatagttccaagaattaycaaaatgtaagttcatttcaacctaataaactcttactgggtaaacctttagtttagggcattgcgatgggtactcggagttaaaaaccaaaagcaaaaattaagatggtgattaagtaagtttatctatcaccctcaacagctgcaaaacaaattgtacgatgcaatgaaaagttaatatatccaaaaatgcccaaaagagggataaggactcttatgcaataaaaattcaaagaactgagtgattagtaggtgctggagtagccagacatatgacttgcatcaggacttcagaggtaaatagcccatttgtggtggtc

SEQ ID NO: 745086 - DNA, 549 bp, Homo sapiens
tggtatgaatcacttagccctcccacactaaagatggaggatccctgatcagaaaatataaagaagccatatatgtctccatctgtgttttaaaatccttactttttccaacagtgtctgctgcacagagctttacatccccgggagcctctacccccaattcagcagcatatttggaatatgctgaatcctcccgctgaggtgacaacraaaagtcagattcctctctctaaaataaagaccctttttcctctgattgaagccaagaaaaaggatcaagtgactgctcaggaaattttccaagacaagtaagtacttggtatagttgcatttaacattggggtacataagagttgtggtcattttagagtggctctggaagtgtcacataggggtctatggaatttaaaaggtgagaggaagaagccttttgctatttggcccttatattgaaatattgatttcttatatctgtctgctgtgatcatattttatccttgctgttcactttggatttagagctaccttctgggctgatgactttttgat

SEQ ID NO: 745087 - DNA, 691 bp, Homo sapiens
gatgcattttctgcctctattgagatgactgtgatttttattcttctgctaatatattaattgacttatagttgttaaatcaaccttgcattccaagtataaaatccagtcgttctataaaatcctttttatatgtactgaattcatttagctaatgctacagtttgaataatgtcacccaaagtttatgtgttggaaacttaatccccattctaacggtgttgagaggtgggacctttaagaagtaattaggtcatggaggcatcattctcatgaaaggattcaggccattatcactygagtgggttagttataaaaaggatgagttcggcctgatttcttctctgtctctggcttgcttctgccttctgatgtggggtggtctcctccagctgccggtgtcatgctcttagacttcccagcctccagaactgtgagctaaataaatatctgttctttataaattacccagtcttgggtattctgttatagcagcacaaaatacactaagacagctaatattttgttgggaaattgtttgtagttttcttgttttgtgtgatgtctttggttttggtaacaggaaaatactggactcatagaatgagttaggaagtttccttctcttcaagatttctattatttattctttacatatttcatataatttaccagtgaagccatctgagtt

SEQ ID NO: 745088 - DNA, 564 bp, Homo sapiens
gagaagaaaatataactaaggttggattatcccacaatttgctctgtgtctaattattctgaggtggattgtaatgaagccagcaagacttatacattggaattttaaatgtatgggattgtaaggagggtagaagctacaaaccaaagataagatatgcctgcagatctgcttcagatttcctgagggcagtagatgaaattatttctaagggcctttttyaccactgctctttaagtatatgagtaataaacaaaaagaacaaagtatgtggttcagaaggaataaaacaaaaaagaaagaaaaggatcaatgaaatagaagtattgtgtcaccccatgaaaattgtcttcctgttgagagctcactagaaatagaaacaattgttttttatctccttgtatgacaatctcttaactgtttcgagatgatttacttgcttcttaggcttccattaaaaataagcacatgcttatatgggggaaaatgcaaatagtaatataatagcatataaagttaaaaagtggacatctccttctttattgtctccctccctttgaaact

SEQ ID NO: 745089 - DNA, 632 bp, Homo sapiens
tgatgcagacagactcatttctagaaggaagataaagatacaggccctagggacccatctgattcttggcctttctatagcacactacttccaaagggtctagccaaaataacagaaagaattgagttccgagactcacctcacaattccctaatcttaacacagacacagacattatatataaacttgtaacctaaaacatctactcatcatttgttgttctttttggtatgttttctacttctgccccctattatattttattacaattgttttaaatgacaggctctctggaagactggacctgtggctctaagaataattctatataggaccctgacatttgcagccagatgctcaatcaggagctttcacatcaagcctgaagtaactcctaaaagccagaaataagtaacaatgagacttggactgttggtgcaaactacaaaaacagggcaaaragaaaagttaatcttcagcactgtcacttttcatttcaaagctacatcagactttacacagaacactaaagtcacaggtttgatactgctcagattcacttcggcaggggcaaactctgctcacaactagagatggacatccattaccatcaagctttcccctaggtacat

SEQ ID NO: 745090 - DNA, 632 bp, Homo sapiens
tgatgcagacagactcatttctagaaggaagataaagatacaggccctagggacccatctgattcttggcctttctatagcacactacttccaaagggtctagccaaaataacagaaagaattgagttccgagactcacctcacaattccctaatcttaacacagacacagacattatatataaacttgtaacctaaaacatctactcatcatttgttgttctttttggtatgttttctacttctgccccctattatattttattacaattgttttaaatgacaggctctctggaagactggacctgtggctctaagaataattctatataggaccctgacatttgcagccagatgctcaatcaggagctttcacatcaagcctgaagtaactcctaaaagccagaaataagtaacaatgagacttggactgttggtgcaaactacaaaaacagggcaaagaraaaagttaatcttcagcactgtcacttttcatttcaaagctacatcagactttacacagaacactaaagtcacaggtttgatactgctcagattcacttcggcaggggcaaactctgctcacaactagagatggacatccattaccatcaagctttcccctaggtacat

SEQ ID NO: 745091 - DNA, 715 bp, Homo sapiens
tgagcacgagagtgaggatggggacttcagctcctggcacagtctcactcctcctctctggggtggtggtggaggggggagtcctgaaagcccaggaggggtaatgggggttgggagggatggtggcggtggggtctttgcatggaggagcagctggaagcacccacagctatggtgtccagggtgttttattttacaccccatagagttttacatggggcaatcccaggaatgagtgtgtgtgtatgtgtgtgtgtgttgcacacacacaagtgtgctggggttgcagggcatttctggaaggtggcactaaaagccccaggcaccttagccctcttagtagtataccaaggggycataaagaggtgcctttccctgctgctggttccatcttcaattcatttcaaaatctcaaagtgtcttaaaatagcagtgtcacgagacagctgactccacgtcctctgggttccagcaggggtctgaatgcattaaccctccccttccttttcagccagctcaagcctcaagaaaggatcagattccaaactcatgagcccaccccaaagtacccttccttggctccacccttggctcataaagtgaaaatgcatttagggataactttttcctgggggtaaaaaatgaaaaggttattctaatctcccaagtcaggtaagcaagtggcagtgttagcaatatggatctataaggatcc

SEQ ID NO: 745092 - DNA, 715 bp, Homo sapiens
tgagcacgagagtgaggatggggacttcagctcctggcacagtctcactcctcctctctggggtggtggtggaggggggagtcctgaaagcccaggaggggtaatgggggttgggagggatggtggcggtggggtctttgcatggaggagcagctggaagcacccacagctatggtgtccagggtgttttattttacaccccatagagttttacatggggcaatcccaggaatgagtgtgtgtgtatgtgtgtgtgtgttgcacacacacaagtgtgctggggttgcagggcatttctggaaggtggcactaaaagccccaggcaccttagccctcttagtagtataccaaggggccataaagaggtgcctttccctgctgctggttccatcttcaattcatttcaaaatctcaaagtgtcttaaaatagcagtgtcacgagacagctgactccacgtcctctgggttccagcaggggtctgaatgcattaaccctccccttccttttcagccagctcaagcctcaagaaaggatcagattccaaactcatgagcccaccccaaagyacccttccttggctccacccttggctcataaagtgaaaatgcatttagggataactttttcctgggggtaaaaaatgaaaaggttattctaatctcccaagtcaggtaagcaagtggcagtgttagcaatatggatctataaggatcc

SEQ ID NO: 745093 - DNA, 637 bp, Homo sapiens
attttaaaatacagtataaaaactctttacatagcatttacattttattaagtattgtaagcaatctagagatgatttaaattacagtcatgagctgcataatgacatttcagttaattagaggccacttgtaagaagattcttcccctaaaattataataccgtaattttacagttcgtcttataaatatcattatgtttagatacacaaataccattgtgttacaattgtctgcaatattcagtaccttaacatgatgcataggtttgtagcctaggagcaataggccatataccatatgccttaggtgtgtagcagactctaccatctaactttgtgtaaacacactctatgatgtctgcacatgatgaaatcgcctactgacgcatttcttagaactttaagcaatgcatgactgtatacaagaggatgtgcataggttgtatgcacatactatgccattttatattaaggactgggrcatctttgaattttggtatccttggaggtcagggacccaattctctgaggatacccagggagagctgtattcacaatctgatgtggttgaatgttgttgggtcgaagaaacaattccccaaatatgacactttgccatactgactgctttggaat

SEQ ID NO: 745094 - DNA, 615 bp, Homo sapiens
tgccttcagcctccctaatctatccattctccctaatgacttaatacctatcacaacaattatatacattccccatctccccttgaaaaagggtatataagtgtctgaatctgtgatattctgaaatatacatgtggtttccctcctgcttcctggcatacaacccytaaaatccttggaatctccaaagttctttctttttgtatgctaaagtagactgatagcttcagagtaagactggtcacctgaaagccaaaagcatgattagagggttgggactttcagccctaccttccaacttccaccaagaggaaaggggctgaaggtccacttgctcaccagtggccaatgggttaatcaatcatgcttatgtaatgaggccgccatagaaacccaaaaggacagggttcaaagagcttccagatagctgaacatacggagtttcctggagggtggtgggcccaacgaggaaatggaaattccatgcgggtatacctcacccgcctagagaggaggtcttcggaatcccaacttgaagccagtagaccagaagttccagaggcctgcttcttgatgaatagataatgaagagaaaaaaaaaaaggaagaaagaaa

SEQ ID NO: 745095 - DNA, 523 bp, Homo sapiens
ataagtgtctgaatctgtgatattctgaaatatacatgtggtttccctcctgcttcctggcatacaacccctaaaatccttggaatctccaaagttctttctttttgtatgctaaagtagactgatagcttcagagtaagactggtcacctgaaagccaaaagcatgattagagggttgggactttcagccctaccttccaacttccaccaagaggaaaggggctgaaggtccacttgctcaccagtggccaatgggttaatcaatcatgcttatgtaatgaggccgccatagaaacccaaaaggacagggttcaaagagcttccagatagctgaacatacggagtttcctggagggtggtgggcccaacraggaaatggaaattccatgcgggtatacctcacccgcctagagaggaggtcttcggaatcccaacttgaagccagtagaccagaagttccagaggcctgcttcttgatgaatagataatgaagagaaaaaaaaaaaggaagaaagaaaaaga

SEQ ID NO: 745096 - DNA, 608 bp, Homo sapiens
atgttttttaatcctcacaacaaccctttgctatatgaagttgacttttcccagggtttttagtccttcaaaccattggtatttggccatgcttttgcaagagattttcaaacagtgatttttaaacagaactcagtggttctcaatcttcttaatctagagtggtgtgagtatttyctttactgcaaagaaaagcagcctttttataaattgtcagtttgaatttgagtttcttcctgtgatgtaacctgatgcaatgtttgcctgaatcactaataatgtaactgatttcccctagccagtcataaatgagtcagtgatcacggattcttttagtttatactcaagttgctttttctgtgtgcagatatcctcattgaatagcttgctgttgggcttgtatagcattatggtttacatcagggaagtagatagccagcagagctttgtgctaatttattttgcaatcctataggaaacaaaggacccattctttgttgaacctgaagagacttctagggaaaatcagcctctgaccctttcagaagtcttgcatcttaaagctcgtgtgtggttcaggccatgcttgaacctatgtgtgtagcctt

SEQ ID NO: 745097 - DNA, 490 bp, Homo sapiens
ccccacatgtcatgggagggacccggtgggaggtaattgaatcacaggggtgggtttttcccatgctgttctcatgacagtgaataagtctcacgagatctgatggtttcataaagggcagttcccctgcacatgctcccttgcctgccaccatgtaagatgtgcccctgctcctccttcaccttccaccatgaytgtgaggcctccccagccatgtggaactgtgagtccattaaacttatttcccttataaattacccagtctccgtatgtctttatagcagtgtgagaacagactaatagtgatacagttagatactaggtcactgtcacagctcctgtaccaaatagtccacagttcttaattatacacatttgagagaccatttgattaaggattgtctccccactgtactgtaaactctacggatagagagatctggaccactttgctcaccattgtattccttctacccagctcagcagtaca

SEQ ID NO: 745098 - DNA, 588 bp, Homo sapiens
ttaaccaacacctgtctttttcctgtaaatccagataaaccaggtttctgtctactcatactagacttatgaggcttttttttagcctaagctcaaaactttatgtttatccttttacatttcttccactaatttgggacaytacttccagacttctcttatattataaatcttaaatctttcatataagaccttaactaagctgtatgtactaatttaatcattaaatccaatatccctgcagaattctcatctgaatttctgattaaaatgattagaactgaatcaaacttagatccagctttcttccacaccccattatcatcaatttacccacatagcagtctatgatcttttaaaataacaaatcagtgactacataggcacaggattaatttaaaaaatcaggtcacatcatgctccaaattaaaattctctgttgaatgcctttgcattcactatagccttcaacactgcactgacctggcctcttggacttcatctgcctctttactgttctgccaacatgtcaaccttatatctccagcctcaggtcttcatatacctgctagttccttggtctagaat

SEQ ID NO: 745099 - DNA, 625 bp, Homo sapiens
aagttaaaaggaaggaagccgtattcccgatggctagtgtttaatgactacaggtttccaggctccctttaatcttgggagcaaataaatctactattggacttctccctgcgtgacttttaacatttctgatactctctcttcttcctctttacagaagagaggtatgataactgaagttgtactttgcatattgaagtttaaagatacttcctctccccttttcacccctatttcaaatgatgtgataaaatcctcttgataggctatatggagaacatttgtcaatagttttatctatgcatggaagtcttcaaaaagtatatcttggattgtctaaaactgaatagatttcttatttatctgaargtatacagactgccaacattttagacttatctctcagtctctgccactgaacttttatatatggctgctatcaaaatataaccggtttattttcatatttggaactaatataacagtatcacaaaatcttttacagtaagatagtttgtaataccagccgacccagctgcttaactgagtacttaaatcatttaatatatgggactgtaaatagagaaatctgtacattatgagatctgatttctggttatgccta

SEQ ID NO: 745100 - DNA, 444 bp, Homo sapiens
aataaatcattagcattcaactttcatcataagaactctgcaaattatgagcggaaagaatctcccttagcatgtgaaagggtattatctccctcagcttttggttgctatcacagaacacctcagactaggccatttacaaagaatgataatgtatttctcacagctctggaggctgcgaatccatgatcaaggtgctggaatttggtgttggggaggggtgcattctccggagaggaggaacgctgtgtccttgcagggcaggaggaacaaggccaaggggccaatcgytgagtgaagcctccttttcaagagttttaatcccttccaggaggaaggaattctcatggcctaatctcttctcaaaggtctgcttcttggtatcaccatattggtaacagctgaattttggaggggacacattcaaaccacaggagatatcta

SEQ ID NO: 745101 - DNA, 638 bp, Homo sapiens
catggcttgatagttcatttccttttagcatgttttagcaccattgtttggatgcaccactgtttgtttattttagatcttttttattattttaatatatgttaaatctctctgataaatttctgaattgcttttctgcattatcttggagatcactgagtttccttaaaactgctattttgaattcttggccagagagttaacatatcacagtctcattggggtcagtcactggttccttgctttctccatatgaggaggtcatagtttcccatttgctgttgtttcttatggacrtacataaatatgtctttctattgaataatttgttctttatttcagtcctctgtctggcttgtttaggtttttattggatatgtttgcttagagattctttgtaatttatctgttggttttctttcttttcccctaggttactgccttcttggcactagatgttgccttaagcccaggtttgtcttgattgtagtaaacaatcagagtgccactcatctcaaatggtgggtgtctcagaggggatatcccagtagtgtgggaaggctggctagggttcatgcccaagggatgtatggaaaaaagccatctacagtgtggtgctgctgaacagccactctgat

SEQ ID NO: 745102 - DNA, 627 bp, Homo sapiens
aaattatgtggtaagacttcttgtccaagaagcaatatattctgcaatctccttgacaaaattgttaaaagaccctccctacagtttttgggtcagtggggatatcactgttacgaaccaaggatttacagatcactggcaaaaattctgaggtatgtggacttggatggttttgacgcactactcacagattacattgcatttgtggaaaaatcaggataccgttttgaagctaagttttaacctcgacttcactgaaatatgtgtgaatacaattctgtactgggyttttgccagaaaaggtaatcctgactttgtggaattgcttctcaagaagacaaaagactatgttcaagacagaagttgtaacctggcactgatatggaggtaataatttcatatgttttcactatagaacaagaaaatttatctttacgagagtagagtgcttcttttttctaaaactcacatgtatagtggctatatgtgaagtaaggaattctcacctaattgcttgaccacgtgttcactccttcactcttttattatgtattccatttttatttatatgtaaattattatgtaccaataaatcattagtgattctgctctacacagcttacatgt

SEQ ID NO: 745103 - DNA, 623 bp, Homo sapiens
ttaaaaagatttatcagccccatttgaagattggattttgggaaaacaggctgcagctagggcagggaaaccagttagtagactactcaagcactccaagtacaatgttctatgtgggaagagttggggggaaagtgatctaatttttttaaaggggggtggttagagaaggtccctgaggctgaatttgcatagcatgcatagtacatgtacttagtttacatgtgtatttataatagttttgaggggagaactaattctcttctaccaacatccctcccaacctctgktcaccctttgatactacaactgtccaggcaaattatgagaacttaaactaaaacagtagcagtgggagaaaggagagagatttttagacagaattacaagacacggtaagtgatcagaattggaggatctaagagaagaaagagttaatcttcagatttctaaattttgagagtggtcgaaagttgtattagtttcctgttgctgctgcaacaaattaccacaaacttagtggcttaaaacaacacaaatttatagtttagttcttatagttctggagttcaaaagtccaaaatgagtcttatagagctaaatcaaattgttagtaggtccag

SEQ ID NO: 745104 - DNA, 595 bp, Homo sapiens
tcctagccagggcaatcaggtaagagaaagaaataaaaggcatccaggccaggcacagtggctcacacttgtaatcccagcattttgggaagccagggcaggcaaatcacttggggccaggagttctagacaagcctggctgacatggtcaaactccatctytaataaaaatacaaaaagttagctggatgtggtggcatgtgcctgtagtcccagctacttgggaggttgagacaggagaatcgcttgaagctggaggctgaggttgcggtgagccaagatcacaccactgcactccagtttgggcaacagagcgagactctgtctcaaaaaatcaataaataccacccaaattggaaaaaggggaagtcaaattgtttctctttgtagacaacatgatcttatatattaaaaaatctaaagattccatcagaaaactattggaactgttcaacaaaccaacatacaaaagtcagtagcatttctacacatcagtgatgaaccagctgagaaagaaatcaagaagacaatcccatttacgatagctccaaaaaattaaaaaaataaaatacctagggataaatttaaccaagga

SEQ ID NO: 745105 - DNA, 595 bp, Homo sapiens
tcctagccagggcaatcaggtaagagaaagaaataaaaggcatccaggccaggcacagtggctcacacttgtaatcccagcattttgggaagccagggcaggcaaatcacttggggccaggagttctagacaagcctggctgacatggtcaaactccatctctaataaaaatacaaaaagttagctggatgtggtggcatgtgcctgtagtcccagctacttgggaggttgagacaggmgaatcgcttgaagctggaggctgaggttgcggtgagccaagatcacaccactgcactccagtttgggcaacagagcgagactctgtctcaaaaaatcaataaataccacccaaattggaaaaaggggaagtcaaattgtttctctttgtagacaacatgatcttatatattaaaaaatctaaagattccatcagaaaactattggaactgttcaacaaaccaacatacaaaagtcagtagcatttctacacatcagtgatgaaccagctgagaaagaaatcaagaagacaatcccatttacgatagctccaaaaaattaaaaaaataaaatacctagggataaatttaaccaagga

SEQ ID NO: 745106 - DNA, 595 bp, Homo sapiens
tcctagccagggcaatcaggtaagagaaagaaataaaaggcatccaggccaggcacagtggctcacacttgtaatcccagcattttgggaagccagggcaggcaaatcacttggggccaggagttctagacaagcctggctgacatggtcaaactccatctctaataaaaatacaaaaagttagctggatgtggtggcatgtgcctgtagtcccagctacttgggaggttgagacaggagaatcgcttgaagctggaggctgaggttgcggtgagccaagaycacaccactgcactccagtttgggcaacagagcgagactctgtctcaaaaaatcaataaataccacccaaattggaaaaaggggaagtcaaattgtttctctttgtagacaacatgatcttatatattaaaaaatctaaagattccatcagaaaactattggaactgttcaacaaaccaacatacaaaagtcagtagcatttctacacatcagtgatgaaccagctgagaaagaaatcaagaagacaatcccatttacgatagctccaaaaaattaaaaaaataaaatacctagggataaatttaaccaagga

SEQ ID NO: 745107 - DNA, 632 bp, Homo sapiens
atatcactttcgctgataagaggtgggagctcatctagaactgcatcaatcatggcagctgtcaagctgtcactatagttttttattagaatatcaagggcagaaagagtacccagtttcaaagctctctggttttttctaagaaatgaagcaaggataggaaccccttctccagaacaggcctcaaatctatcttcaaaggtgacccagcaatcagtgtcaatgcctttactgtagttaacctggtaatttcattctttagtctctccaagaaaatctgaagtgtattaggcaagtcagaacccaaattgtctccaaggttgcaaataatttgtcccatacaggaaatagccctttccttgacttcctgatcaatgtcagctgcttttaatctcttaatggtacaggkaaatagatctttgatataaggagttgcatcaaacgaggaaggctgatctaaaggacgaattactttgacaagctgttgagtaacaagaagtgcttcagatgtaattttgtaaaatgggtctccaacacaagccaccactggaggaaccaaagcctgaacgtgaggatggaagacttgaggagaatggttacagaggattacgtatagacatgacaaagcatcg

SEQ ID NO: 745108 - DNA, 574 bp, Homo sapiens
tcttataactgaaatatattttaaattgatacctatcttctgttttcttccaattataactatgctggtctgtgacatctgattatcacctattttattatgatttttttttttttttctgagttggagtctcgctgtgtcgcccaggctggagtgcagtgttgtgatctcagttcactgcaacctctgcctccccggttcaagcgattctcctgcctcagcctcccgagtagctggaactacaggtgtgcgccaccatgcctggctaatttttgtatttatagcagtgacagggtttcaccatgttggccaggatggtctcgagctcttgacctcgtgatccscctgccttggcctcccaaagcgctgggattacaggcatgagccaccgtacccggctgcaactccttttccttctctgcccaaatttgttttatcacattgagcttccaaaagagcaatatagacatttctcccttgctcattgtcctttaatgctcttcattgtctgctaaattaggtacaaacttctgagccagaattcaagaccttctttaatttggctttattctat

SEQ ID NO: 745109 - DNA, 518 bp, Homo sapiens
cctgtactaacagcttccttctcacattgtcactgtctctctctctgtcttcttttctttttaacacaatgttatttgaattcatgcagtgtgagtcagttttatagattaggacacatcaggaatacaaagttgtggaggtagaatgtgtgtggccaatgagatttactttttgggaactagatgacataaaccaatgtatttrgtaatcatttggttctgattatgtatatctgtagataaatgtgaaattaggaatgcctcataaagacatattgcatatgttgcacaaaggtatctgctagtaccatttaatagttgtaataataacaacagttgacatttgtgagtgctcactatgtgcaaggcactgtgctaaacttatgttattcaattattacaccatctctatgagacagctatgattatactcattttacaggtaaagaaatggagatttgaagacattaagtaatgcaaagacacacagccactaagtggcagaggtgggactggaa

SEQ ID NO: 745110 - DNA, 548 bp, Homo sapiens
acccacgtgcagagatgagaaagaatgaacacaagcagtcttgtaactcaaatggccagagtgttgtatatcctccaaattactttaccaattctccaacaagagttcttaaccagcctgaactgtctgaaatgacagaaatagaatycagcatatggataggaatgaatatcgttgagattcaggaggatggcaaaacccaatccaagaaaaattaaaaattacaataaaacattatgggagctgaaaaatgaaacagccagtatgaaaaaggacctaagtgagtttgacagagctgaataacacaagaatttcacaatgcaatcacaagtattaatagcagaattaaaccaagctgaggagagaatctcagagcttgaagattggttctctgaaataagatagacaaaaataaagataaaagaataaaaagaaataaacaaaacctctgagaagtatgggattaggtcaagaggccaaatctataagtcattggcattccggaaaggaactgggagaaagcaaacaacttggaaaacatctcagga

SEQ ID NO: 745111 - DNA, 532 bp, Homo sapiens
tacctcatctgataaagacaccagtcagagtcatgctggattaaggtccaccctaatgatctcatcttaacttgattaactctacaaagaccctgtctccaaatgatgacacagtcataggtatcaggggttagggtttcaacataaacaytgggtgacacagttcaatttttgctggacacaattcaacccataacagtctcccaaggctgaactcaaggtatcataagacctggactcttatgtggaagctgtagtgaagaattcattcccaaactcagtttgttagcagagtttagttctctgtggttctaggaatgaggtctctgcctccttgctggctgtcagctggcggctgctctaagcttctaaaggccatcaacatgcttcatctcatgaccatccatcctcaagccagtgttggtgcatcaaatccttcccattcttggagtctctctttctctcagctaaaggctggagaaaatgctcttctttgaaagggatcctataattagattaggacaactgagat

SEQ ID NO: 745112 - DNA, 628 bp, Homo sapiens
ttcccaagcttccttctcccacattctctcccacatacacatgctacaaaactgtgtattacatttctgcttggttaaaatattacgtgtcagagatgaagtcagctttacataccaacacacacatacacaggcacgtatatccaggacaaagcccctaaccctaaatttgctttattttgtaaaagaaaatcactgtcatactgggaaataagaaaattggctatggacacttgtcatatatgcttgataatttcacagccttttrttctacattgcttgtttagacatggctttctgtcaaccaggaagttccgtcagtttctagaaagtcagagaactcagtttattttatgggtgggaggggcaccttttccttattagcttggaggggaactagcttcccttgggtgaatacccaaagtcagatatgttattaggcacttaatgtccttattttaggggttcccaaagtgtaatcataaacgggatcccaaaggctctcaaagtgtggtatgcaaaccagcagctacaatgcagcacctgggagcttgtcagaaaggcaaatgatcaggccttacatcagacctactaactctgaaactccgggcgtggaggtacagcaagc

SEQ ID NO: 745113 - DNA, 512 bp, Homo sapiens
ttcctagaatgccagttggagaatcctagatgtttcctagttgagtaactattgctcagttattctcattcatgtgtagacatgagactggggtgggctcagtaggttgagtcagtttggcagcagatctataaactccagtcctctaaggttaaggagatgacacattctaatcctacatttctgaaagacagagtgcaacccacattcccaggagggaacatattgtcagccgcatcaggagcattttgctctctgcaggcagtggcaytgctgtgcgtggatatcacatttccttcccagagtccgtgggaggcctccttgaatgtgagaagtgcaaacagagagggacacatttgttgtacagaagctggctccgggctttgggtttggagacaggctgaagatatttgctttaaaatgtcacaggtaaagtatggacctgtgactatagaacatttttcgtgaggggaaggaatcagaaggccttccaaacacagggactcctttgt

SEQ ID NO: 745114 - DNA, 643 bp, Homo sapiens
gggaaagcaatatctactttacagagtctttgtgaaaactaggtgggataatatacgtataatatatatatttataatacatgtaataatatatagcatagtatctggcatagagtaaggactcaataataaaaacaatacaggaagtattatttttttccctatcatttatcttttatcttctttcaatgctttttttatttactcagccttttgaaggtatcactgatgtggtattccttacctcattctttcttggcccttctagtttagaggctggaaagccaattactcccytcccagtttcgcttgctattatgggtggccatgtaacagatgcagaaaactactgggggcatcttctggagaaatattcgaaatcctcatgaaaatgaacatacttggtggtataatccttttctttcctgctgccccttcttctgctgagaatacaaatctattgtctatagccatggtatctatctcatgaccatccaggaaaggctaagagcatcgcagaaatgtggtccttacattttttgggtggctgaacaaatgtttgtaaacacccatctctggttttttcattatgtgagaaaaaataaatatatttctacttgttcaagtcactgtatgttttctc

SEQ ID NO: 745115 - DNA, 593 bp, Homo sapiens
agttaaataatatgatcataaggaaacaagtttgtttccaaaggcttacatgctttttacgtaatttttaaaagtaatgttgtttaagaattgttacaagttccattagtgacctgctaaattaggaatcttacctggaatttttttcaaataataacagcaagaacatgtggtgtttaacatgtgccaaacattgttttaaagcactttacagtattaatttattctttttattgaaaagattttgcctctaagggaactgtcaagaggcatgtgaaccggagcaactycatcttaaataggagctgagtaaaatgaggctgaaacctactgggctgcattcccaggccgttaaagcattctaagtcgcagaatgagataggaagtcggcacaagatacaggtcataaagaccttgttgataaaacaggttgcagtaaataagccggctaaatcccaccaaaaccaagatggccatgaaagagacctctggtagtccttactactatactcctatcagcgccatgacagtttacgaatgccatggcaatgtcaggaagttaccctatatggtcttaaaaggggaggcatgaa

SEQ ID NO: 745116 - DNA, 704 bp, Homo sapiens
ccagttggttggggaccttaattccatctgcaaccttactttccctatgccatgtaacctaacctgttcacagattccagggatttggatgtggacatcctttgggaggagcaggaagagacattattctaccaacaacgccctgctttaaaacttcacaatggctttcccctacactggaataaaatccctctcccaccaaggtctaggaggctgatacgatctgtggccccctgcaccatgcctgacctcttggatatcgccccacctctctcaagatgctacagtcatattggtattctgtttctagratactgaaagctcagtccactagaatacatttgactctgcccgagaggctctctcccttgctagattcttctctgattaggtctttgaatgccctcatgtgagtacaaacccccatccatccacatccccagtctctatgacatcaccctggttcatccttcaaagcacttatcactgcctgacatcaccgtacttattgacgttttcacttacttcttatctgtctctcatctctacggtgtaagctccatgaggtcaggcaccttccccgtctttgctctactctatctccagggcctagaacatggcctgacacatagcaggtgctcaattaactattgtagaataaattcttactactgagaggctatcttcaggccatgatgttgtag

SEQ ID NO: 745117 - DNA, 622 bp, Homo sapiens
cagaaaaattcaacagctttttcagttggtaaagattttactgtttttattttttgtggggaggagaaaaagtacgaattttttctacctttctcatttaactcagttttcaagttaccctaccaaatcctattaccagtcttcccatccctggaggctaaaaaggaaactccattcaaaactgattgtgggtgagtcaatatagcacttaatgttttaatagcacatgtgtgcaaaacttgttttaatttttctaatgaatggagcaattgtttaataatttataaattatgcarcttctctaaagttaagataaatagtccactataaattttttaaaagcaatacagagaaaaaagggacaatacatagaaaaaagggacaatacatgcttcctctagatttttaattcttgcctacaaataaagctatgaacaataatttcaattctagccctcagtcattcagacctctattccctttgaatgctaggcaagcaggagaacgaagctacagctagaaagaggtcaaaaaagaaacaaagcaaacagtggaggaatggcaatcagggaaccaagagccagactaagaaatctaatctggatttctagaaaatacccaa

SEQ ID NO: 745118 - DNA, 513 bp, Homo sapiens
atctttgtgggctaaagttccttcaatctttaaagttgctgtcctttggctattttttttttcattcttttatcctatttgatgaccttgggtgtttgattgtggtataagatgggttcagttgatgggcttagtttctagaggattttagggggccaaggctcagctcaggactcctggactgtgtgccccaactctggggtactagtatcaggccctggcttytggataaaagccattttaactggagtgatatgatatctcattgtttgttctgatgatcagtgatgttgagcaccttttcatatacctgtctgccatttgtatgtctccttttgggaaatgtatattcaggtctttcgcccactttttaattggattattagattttctcttaaggagttgagttcctcatacattctggtaactaatccattgtgagatggttagtttgcagatagttttttcccactctgtgggttgtcccctcactttgtttcctctgctgtgcag

SEQ ID NO: 745119 - DNA, 583 bp, Homo sapiens
aggggccccagcccccccaggaacttggggctgccggtgagcaggatggtgagtagagctctcaggcggggtgggcaggcaggggcaggggaggctcgcactgtgctcagacccccgcctccctctctctgaagatttttatgaagtgagcctggacaacaacgtggagcctgcaccaggagyggccagggagggttctccccatgacaaccccactgtacagcagatcgtgcagctgtctcctgtcatgcaggacacctaggagcacccaggcttgcccagcaaaccctgcgtgccattcttctaccaggcagccgagaacagggagataaacatcatcatcttctaagagctgatcaagaaatttaaaacaacaacaacaacaaaaagttacggggttcatctcctacacaattcatttactccatttgaatgctagagccactcacatttatttgtgtttctaatttaccgtttaaatttatttgtaaaaagttaagggagagttggtctttccctgatgttctttctggcatcctttagcatttttatttttaatttgataattgtaggtcattagtat

SEQ ID NO: 745120 - DNA, 583 bp, Homo sapiens
aggggccccagcccccccaggaacttggggctgccggtgagcaggatggtgagtagagctctcaggcggggtgggcaggcaggggcaggggaggctcgcactgtgctcagacccccgcctccctctctctgaagatttttatgaagtgagcctggacaacaacgtggagcctgcaccaggagcggccagggagggttctccccatgacaaccccactgtacagcagatcgtgcagctgtctcctgtcatgcaggacacytaggagcacccaggcttgcccagcaaaccctgcgtgccattcttctaccaggcagccgagaacagggagataaacatcatcatcttctaagagctgatcaagaaatttaaaacaacaacaacaacaaaaagttacggggttcatctcctacacaattcatttactccatttgaatgctagagccactcacatttatttgtgtttctaatttaccgtttaaatttatttgtaaaaagttaagggagagttggtctttccctgatgttctttctggcatcctttagcatttttatttttaatttgataattgtaggtcattagtat

SEQ ID NO: 745121 - DNA, 634 bp, Homo sapiens
atctagtagaaaatataattccaaaagttatggctttgaagctgttaaattgtttagtctgaagctgccttcttacatattttaagtttgacctaaaggtttctctgtagatcatgaactataacctaaatggacatgtaagcaggctgtagctactcttgtgctgatcacagagtttgggccaatcaaagtggccaactgttcaaattatgttcaaataaggcaaacgccaagctgtaaccaatctggctgtttctatacctcactttcattttctgtagatcactttccttyttctgcccataaatcttctcccactatgtggctgcgctggagtctctgagcctactctggcttgggaggctgcgtgattcgtgaatagttctctgctcagtgaaactctgttaaacttaattcagctaaagtttttctttcaataatgtcttaaagcatactaatcagttttgtttgtatgaccctattctaaaattcatacttacatgaacttcagttctcaaagtcttttgaaaccagttttatcatttttctcctttcattcattaatgtgttcaataaaatatctgacatatatcctttccctatttgtatgagtcatgttttagccctttgaaat

SEQ ID NO: 745122 - DNA, 624 bp, Homo sapiens
tgagttcttttcagaaacctagacttaaagcttttcagaaaggaaaatggtaaaagacttgcagcttggagccgttactcaattggtgatgatgttacagcctagacttttgtccttgatctatttcctggaaagatttttgattttgctttttgttgtttagattttttaattaaagatgatgatgatgatgatgatgatgacttggtttaatatagcgaagataaaaaaatttcaactcacttcccaattctaattgattattagtagcttcctgaaaagctgccttgcactgtgtccaagcttatcagaaagaccatgctggattcatcagaagtgcctaggggaggggagaagcagtatacaccacattgcyccctccttggcctaattgcttgatacaatagaacttccctaagtgttttagaataaaggcatcatccagaggtagaaacaggtaattacaaccataaaatttccaaattaatgcttaggcagtttaggttggtggagtccacatttttgttggtgggtgggaggagcagggaagaattgtatttttgtaactaatataaattgttagtccctgagatttaaaaaatcatcattatataacatcctaga

SEQ ID NO: 745123 - DNA, 561 bp, Homo sapiens
ctccatgaaccaaaactacctcagctttcttactcttttagcactggtcataaaggcagtgcaggatagtcataggaacatgggctgggatcagggggctttaggttagaatcgcaggcctggagcatctgctcctcttccccatcctaatagactgatgtactgaatctatggaagactcccttaccttatctgattgactggtcaagaaaggctcaatacagagacatgttaagaaccaagaaaggacttcgtgttttcttccttttacaacagctctagaaaacagttcttgctgagayagataatccaacatgtacatgtgggctcagaatgctttacttaaactgaagaggaaaactgaaataatacttataattcaagcagagacaacccttagtctcaactatttaaatctttcaggcaaaagagtttcttaggcctgaattatgagtggttgcctcgtgctccacttcacctcacatgggtaaacacaggccaagtgtgcagcagtgattttaatgggctcagccaggctaaaagcctaatgaaatggttgca

SEQ ID NO: 745124 - DNA, 600 bp, Homo sapiens
aatagtaccatatattggactctgattcagaatatacacagctttctggagaacttcaccccagccctgcaaagtattgtcacctagttggcattgtaattgtgacgtcaaaaggccattccactgttctatcaatccagctgcttcaggatggtcaggaacatggtaagactagtgaagtccatgagcatgagaccactgcygcacttctttagccataaagtgagtgccttggtcagagacaatgctgtgtggaataccatgatggtggataaggcattccatgagtccatggatggtggtcttggcagaagcattgtgtgcaagataggcaaatgcatatctggagtaagtgtctattccttgaagacaaatctctgcccttcccatgacagaagaggtccaatataatcaacctgccaccaggtagctggttgatcacctcgagaaatgatatcatattgagggctcagtgttagtctctgctgctggaaaattgggcattcagcagaggccatagccaggtcagccttggtaagtggaagtccatttgctgagcccatgcataaccttcatccctgccaccatggccactttgtt

SEQ ID NO: 745125 - DNA, 602 bp, Homo sapiens
taaataatgaccttagttgatacggcattgtgcaaacattcatttgatcaatgacatgaaacaaaaagcaagtttccatatcatttataaaattcattaactatggtctagactcttgcagctgaatattatgagcctacaggttargtaagcctattttcaccgtcaaggcattgggagaatttgcctaagaatcttctgcgctgacccctcccctctatcatcattcaatccttctcatgaaagtttgtgtgtcaacaggcaacagggtcatgttacagagacactgggtctagcatgtgaaagcacagagtgaggaagacgtggaacacatacaagaagcatcagggtccacagtatcctgcagagaaattgtctatagaaacttgatagaagtacagaaaatcagactaaatatcttcaatactgagtagaagtcagacaaaagaagaatgctcctgaaaatttaccaatgattccaagtgaggtgaatgcattgttcctgaaagatccaagatgatttaaaatcgccaagagaagtagggacttccaggaaaacatgaaaatgtggatccatatgtttactttcatttcttccaaaa

SEQ ID NO: 745126 - DNA, 550 bp, Homo sapiens
atgtctctaccaaaaaaattaaaaaatcagttgggcatggtggcatacgtctgtggtcccagctactcgggaggctgaggtgggcctggtgggtggaggtagcagtgagctgagatcgtgccactgcactctagcctgggtgacagagtgaaactccatctataaaaaggaactaggaaagctggaagcagtggctcactcctgtaatcccggcattttgggaggttcaggcagggggatttacattagggctcactgtttgtattaggttggtgccattaaaaatggcaaagaccgcaattacttttgcaccatctaatatttacattctatggattttgacaaatgtgtactgccatgaatccaccattacagtatcatactgaatwgtttcactacactaaatatcccctttgttccacctagtcattgctcccctggagacctctgatcttttcactgtctccatagtttactttctccaggatgtcacgcagatagaattaggtagtaaccagccttttcagattggcttctttcacttagcaat

SEQ ID NO: 745127 - DNA, 639 bp, Homo sapiens
gggagacagagcaagaccctgtttctcaaacaatttaaaaaatatataaagaaatttgtaagtagttttttcaataccttctttattatgtctataaaattatatgtagcattggaaatgttattgaatatgacaccaacaacgtgctattgtattttttaaattttgacttcttttaaagaaggtgataacaatctgtggaaaatgcttttactgtatcatgccaatatactgcaaggagtatttcaaaataatataaaagtaattcacagacttagattacgtgaagatcaaatgaccccaaaatttttcttccttagtttttcacagcaactgctaaagtccataagctgatttttccaagaaaattattctawtaattttgagtgttcaatccgtgcaatggtccagtcaggctttactccttgtgtgaactccctctgaaacctaggaaagacattgcaaataatgtaaatcttacatcagtccaagtatgtgttagataactatgtaatttgcaagtgtatatttagaagaatttttggcaacaagataatggttaatattaaatcaaaatcaaaacaaaaaaaagtttaacctacccattcaatcacaataaatatacccacaaaattgaag

SEQ ID NO: 745128 - DNA, 630 bp, Homo sapiens
acctttggttatgctattataccttgtctccttgtcccctggcagcttaacaattaatcttttcagaggaaaggaaaaacaagttacacccaggaactacagagcttagaacagccctacactattaattttaataatgtgagaagataaacatatgtcactcactcatggccaaacgagcatctgtagagtcctgccctggtgtaggtctaaaatttattactcagattcctttacctaagacctttctaggccatttaaatgtgctcacattgcttaattagaaaaaaaaaatacagtttatatggttttattccactcacttaaaaataaatgcctttaaaatatttgtaaaaaaaaaaggttcattttcttaactagtgctaccttccttgcattttgaaaactacaaaagatgaagtaagaagaagatcatgcaacttcctattttatatagtttttcaacatactctaactcctggaagaaamgagatatgatgtaatttttttcatcctaaatcttctcctgaaaagcttttattctcagtttcatatgattcaattgaatcaaatgctgaaagaataaaacactctcctgcaatttcttaagcatgcatatagaaaagaaat

SEQ ID NO: 745129 - DNA, 604 bp, Homo sapiens
ctcccctgggacagcttgatgcagcaccgtagtgaacgtctccattttcccatacaccatggggcagagtctatgtatgtcaacccaggcagaaaaacccagatgtacttctttggttggtggcacttcccctgagaggtagtgacttctccctatatccggtattcctctattctttaaaattccttttacccctgaggtacacaatccttcatgtttttaactccttatatacttaatatttctttacatgaaactttctgtgtttaaattactttatggttttgctgtcttgagtggatgctgattaatatactaaatatcaaaatgatactaatcaccttgtaaagaaatatggaacttataatgatcggtcacacttaaatggttgcagagtaaccacaaaaaatgacactcaatgagaaatatctttctccctctttttttttgtgtgcgyacaagggatcgattagctgaaagttatatcagtaatcataataatgaaattaatttataaacctaaagttattacaagtttatggggattattggcagtgatttttatcagttggtttctaaaacagtctgaagttaaagttatgtg

SEQ ID NO: 745130 - DNA, 559 bp, Homo sapiens
gatattcaaaggacttagaatactcaaaacaatctttaaaaaagaaaaatttcaatattcatacctacctgattcagcactttctaggaaaccgcattgatcatgattccattatgcttgcattagacacatggattaatgaaataaaattcacgttccagagataaaaaccactgacattacccgtcaatttgatttttgacaagatgccaaaacaatcaagaaaaaaatagtttttcaataaatggtgctcagacaactgagtatccacaagagggtaccccttccttacactatccacaaaaaaattrataaatcatagacccaaatgtaagaagtgcagctcaaactctttgaagaaaatataggagtaaatctttgtaacctgatgttaagcaaagtcttcttagatatgacatcaaaagcacaagaaaagaattaactggaattcatcaaaattttaaactttgtatttcaaaaaacattagaacagaaaaagatctatagaatagggaaagtttgcaaattatataaaatataaataacttgcatctggaat

SEQ ID NO: 745131 - DNA, 662 bp, Homo sapiens
gacatcaaaagcacaagaaaagaattaactggaattcatcaaaattttaaactttgtatttcaaaaaacattagaacagaaaaagatctatagaatagggaaagtttgcaaattatataaaatataaataacttgcatctggaatacataaagatctcttaaaactcagcaataaaaagacaaattaccaagtatgggcacaataatcgaatagacgctgccccaaagaagatacacaaatggccaagaagcccgtataaaaattctcagcatccttagccatcaaggaaatgcaaatcaaagmcgtactgagataccagttcatgtccactaaaataggtaccatcaaaaagacagttagtaagtgttggtgaggaggtgtatgggtgtttcacttccctatggctggtgagaatatagaatggtgcgtctattttgtaaaatactccggaagttcgacataacattgccatatgaaccagcaaatccacagctagttctatacttaaaatgtgtccacgtaaaaatttgtatgcaaatggttatagcagagttattcataattgcaaaaagtggaaacaatacaaatgtcagtcaaccgatgaaaaaacatggtctatatccatcatattaaataggatccagaaatacagaagaagtga

SEQ ID NO: 745132 - DNA, 526 bp, Homo sapiens
gtactgacagcactaattcttttaaaaaattattttatcatagcaagaacgcttattatgagatctacccttataacgaatattcagttgcacaagacagcactgttgactatacacgcaatggtgtaccgcggatcccaagaacttacccagtgartattttccaatgtcatttaacattgattaggggttctaatacagctagtgttcaaaacccctgcaaatggaggacaaacgagagatttcggtagcttctggcaactaagcctagagataactaaggtgaggaccctacttctacttgttatgaaatgaggaaggaatgtgtttacaggaaggatacctgggtttaccagtctaagttacctaattagcccagaggaaagtaattattgaaattttgcatttgtttcaagctctataattgttataaatctacaacaatgttacactatgggctaatggagagccagctgctcttcttgtgctagcacgttcttgaaaaggaaacatttctatcctgcca

SEQ ID NO: 745133 - DNA, 594 bp, Homo sapiens
tgcgtatgggtcagataggaataaataaaattactactatttgaagttggcatgatgatctttatagaaaatgccaaggaatctacaagaaaatttgtagagctaatacttgatatcatcaaacgtgcaaggcacataatgaacatacaaaaatctattgtagttctacatactagcaatgaacacgttgacatcaaaatctgaaatacatcaatcacaacagctcaaagaaaagcttctgtataaatacaataagataagcccaacagtgtatacagaaaagtacacaacactgaagaaaaagttcaaagaaatgctaaataaatggacagatataccatgttaatagtatggaagatggaagactcaataatgtaaagatataggttacttccmaactgatacacaggttttacacaatttccaccaaaatcccagcaagaatttttgggtatatagcaagatctttctaaaatttatgtgggaaggcaaacaaacaaaaaaaaatagaatagctcaaacattttgcgagagaagaataaagcaggagaaacagttcacctgatttcaagacttattttatatctacaacgg

SEQ ID NO: 745134 - DNA, 478 bp, Homo sapiens
atataccatgttaatagtatggaagatggaagactcaataatgtaaagatataggttacttccaaactgatacacaggttttacacaatttccaccaaaatcccagcaagaatttttgggtatatagcaagatctttctaaaatttatgtgggaaggcaaacaaacaaaaaaaaatagaatagctcaaacattttgcgagagaagaataaagcaggagaaacagttcacctgattycaagacttattttatatctacaacggttaagactatttggtatcggcagattggcaaagacataaacccgtatgtcaatggatcagaacaaagaacccaaaaataaacctgaacaaatatctccaatttattttcaacagattcaaaagaaattgcatagaataaaccaacaaattatgatggatcaattggatgtccatagcaaatagtaagtttaacaccttatataaaaattacctcaa

SEQ ID NO: 745135 - DNA, 732 bp, Homo sapiens
atcaactgtaatctctaaaagtagtcaaccttcattttatagaagaggatgttggccaagctaacagagttattaccgagattccccctggagacttggcagctaagggtaattgtctttggtttctatgcttactacaccccagaagtcaaaataatagcaatgaagatgaaaatgatttagatcacagggctcaacattacatacacatggccagtggttctatacaaactgtaaagctaaattccttagaattaaaaaaaagtaattgaaacattttctaattaattacccaggcatagaaatatctagtacagatctcttaagaatacagcactgatgaaagtgctaaaggacacagaaatgaaatgttaaaatgcagtcatttctgtttagggatttaaascaagataaagaaacaaaaccaacaggaagatgccatcaaaggaaagcaagacagaaaattgaggagcctcagaaagacttcacaaacaaggtgagtcttaaataaatcttgggattctggataagcacaggaaagaagaaagcagcccaggtaaaagacgtcatgaaaaacgcttgggattaagaaccagggagatgcccatatggggaagtgtgagctcttcctggtacaatacaagcaggcaagtctgcagagaggggtcaggttcttattactttattgaggcatgcacacatctgacagacgaaactgctcttccacaaaga

SEQ ID NO: 745136 - DNA, 637 bp, Homo sapiens
attttcagtgttaaaaaacttttaaaaatagacattatggttacatgttcaccttgaggtgatacgagcgatacacattggtaaaagtgagaactaggaagagatcaagaacatagagaagggaacagaatttccactggacagctaagcttaggggtgatattccaggaaacctcatgcggaaccactttagttttttagttttaccacctgcccctggcaaaaatttccaagaggctttttggtactattagcattgtsttttaaaaaatatggtgagtgtggtaattgtcgtcatttccgaaagatgagtaatcgaacaataaaattgtacattcgtcgagcctcctctacttacacttttttaagtttatcacttaaatctttgaaacgttgtgacttcttagttgtgttcgtttattttcttctccttttataacacttgatacataactgcaaaagagtcttaaatcttaatttggagacttaattttggttttattaactatgagtgcactttctaaaacaagaggtcacaggagagtgtggaaaccattccttccttttccgtaaacctgtcgactttgaacaagcttagtcaagtgggaagtattacatgaaagcgttttctgttgac

SEQ ID NO: 745137 - DNA, 637 bp, Homo sapiens
attttcagtgttaaaaaacttttaaaaatagacattatggttacatgttcaccttgaggtgatacgagcgatacacattggtaaaagtgagaactaggaagagatcaagaacatagagaagggaacagaatttccactggacagctaagcttaggggtgatattccaggaaacctcatgcggaaccactttagttttttagttttaccacctgcccctggcaaaaatttccaagaggctttttggtactattagcattgtcttttaaaaaatatggtgagtgtggtaattgtcgtcatttccgaaagatgagtaatygaacaataaaattgtacattcgtcgagcctcctctacttacacttttttaagtttatcacttaaatctttgaaacgttgtgacttcttagttgtgttcgtttattttcttctccttttataacacttgatacataactgcaaaagagtcttaaatcttaatttggagacttaattttggttttattaactatgagtgcactttctaaaacaagaggtcacaggagagtgtggaaaccattccttccttttccgtaaacctgtcgactttgaacaagcttagtcaagtgggaagtattacatgaaagcgttttctgttgac

SEQ ID NO: 745138 - DNA, 544 bp, Homo sapiens
cataaggaaaatgtgatacacacacacacacacacacacacataaatatctatatatctccccatacacacacacacccaatggaataccgatcagccataaaatggaatgaaatcatggcatttgcagcaacctggatggaaatggagacaattactctaagtgaagtacctcaggaatagaaaaccaaacatcgtatgttctcacttataagaagtgggagctaagctatgagcatgaaaaggcataagaatgatacaacaactttcakgactagggggaaagggtgggaggcagatgggaaacaaaagactacaccttgggtacaaagtacactgtctgggtgatgagtgcaccaaagtctcagaaatcactaaaggacctattcatgtaaccaaacaccatctgttccctaaaaatctaatgaaattaaaaaaaaaataaagaaaaattattacccttctcaaattatgcacacttccccatctctcttttccctaagaagagtatataaccatctgcacgccatcacatggtcgagcaa

SEQ ID NO: 745139 - DNA, 487 bp, Homo sapiens
tgtctgtgagtcacaggaagttggatcccaatggactcatctaattatttagccattcccataatagagataatcaatattcactgctgtagccagaatacatcttggagcaatccacatagatcatgaacataatcagcctgagaggaaygggatgggaagagagggagagagagggagtatggggaagaaatgccagaatagggtcgggtgtagaaagagaaacaatggtggcaagcagttgggagcagctatgtttgggcatttttacataacagagccctgcaagcttcccctcctacgttccctatctcagtaaatgacttcatcctcacccagtttctttacttagcaatctcaacctccataacatatgtataaaacctgggcaccatgcccaatacacagaagatgctcaattttgctctttttcttgtttttccacattctgcctttcactggccctgtcctagccatctctcctgct

SEQ ID NO: 745140 - DNA, 661 bp, Homo sapiens
gaccctgtctctatcaaaataatataaaaataaccaagtgtgatgaggcatgtgcctgtagtctcaactacttgggaggctaaggagggaagatggcttgagcccaggaggtccaggcggcagtgatccaaccaatcatgactccatsaatcaaccactgcaccactccagcctgggcaacaaagcaagaccctgactcaaaataataaggcaatcacaagtgtttatggaagataattattgaacatgtgctatgatcagtgttttccacactgaaaaagtggtcagaaaagcttatcactctcatcaagtcccactctcctaaagcttacccatagagaaatattaaacaagttttcttatcacaaaaattccagagacagtgactctggaaaggtaaagggtgagcgatagagtgaagacaaagaaagccttaaaaagaagaccattttagaggttatattcaagaaggaatctactagaaggtaatgttaggatacattccttagtcaattgagttcactgatgaccatgaaatatcagttcttccaggcaaagctttttaaaattaaaacaaattacaacaacaaggcatcgaatgatacagatagaaccatcagtagtatttgagcaggatccacaatgccatcttaaaggatgg

SEQ ID NO: 745141 - DNA, 580 bp, Homo sapiens
atttgttgttttagaacaaaatgcgaactaatgttgttgtaatttggaaaaaaatattaattacaactctgaaaactcattggttaaatataaagtaaaaattagattatttcgtgctatgctttgcatttgggtaggcacttaaatccatccttcatcattgccaaacattactgcaagcagtatctattttcataaggtttaaactttttcaagcacaaaattcacaatgtataaattaaaaagtgcttattaacagacacattgacaaamattccttaaatactatcacagaaatttttaaaatacatagttgaggtattcttgttaatatgtatttctcaatagaaaactgatcagagaaagaatctgccttctcagagtaaagtgttgctttctatttttatttatgtctgaagaagaaacactggagaagtcttcctattaaatgaaactcaccaagtgtgataataactgacattcaataatagtaaaagtttaaacatttttcatattgaattcctaaggctactctttaaatgtattgaattgaattaccttaaacattttctttcatttc

SEQ ID NO: 745142 - DNA, 601 bp, Homo sapiens
tccatgagttcaattcttttaattttagatcccacaaataagtgagaacatgcaaagtttgctttctgtgcctgggttattttacttaattatctacagtttcatccatattgttgcaagtgactggatctcattttatatggctgaatagtacttcattgtatttctgtaccacaattactttatccattcatcctctgatagacacttaggttgcttccaaatattggctattctgaattgtgctgtagtaaacatgggagtggagrtatctctttgatatactgatttcccttcttgtgggtatatatccagtattaggattgccagtttatatggtagctctatttttattatttaaggaacctccatactgttctccatagtggttgtactaatacacactcccaacaatagtgtacaaatgttaccttttctccacattctcttcagcatttgtctgtcttttggataaaagccattttaagtggggtaagatatctcatttcaattttgatttgcatttctttaatgatcaataatgttgagcaccttttcttatgcctgtttgacatttgtatgtcttctttggagaagtgtc

SEQ ID NO: 745143 - DNA, 527 bp, Homo sapiens
gcacctccaacactggggattatgattcgacatgagatttgatggagacacagatccaaatcctatcaagtgacaactgctcctttagtaattccagcattatccaggctctaatctaccctccctgttaataagatttattaacaaacratcatagaattctccctactttctgacaacacctgatctagagtaaatccctgctccttaggccttccccaaaattacccaaccaaagtcccaggcctatatgagattctttctaataacctcttactgagacccattgcttcccatggtgagtgtttttccttactatagtgagtcatacaacccagctaatcaactagagatgtattcctggggatattcaggtgaagggtgttggcaaggtatatttaaaaattaaaaacatatatgtatatatttataatggagtaaatacagagaaacatagaatgtatctttatgtctaacatttctttttatactatagttctgtgtaactagctatataacaacctttt

SEQ ID NO: 745144 - DNA, 641 bp, Homo sapiens
cactgactgtttggcacctatcccagccagggtgagcttctactgctgcagaatcagaaaggaaaggggacattttacagcatggagactatgatgattaatattgactatcaacttgattggattgaaggatgcaaattattgttcctgggtgtgtcggtggaggtgttagcaaaggagattaacctttgagtcagtggactgggagaggcagacccacctgcaatctgggtaggcaccatctagtcagctgccagtgtagctagaataaaacaggcagaagaacatggaaggactagactgggtgagtcttctgaccttcatctttctcccgtgctggatgcttcctgccctcgaacatcggacttcaagttctttagcctttgggctcttgggcttacaccagtggtttgccagggsctcttgggccttcagccatagactaaaggctgcactgtaggcttccttacttttgaggttttgggactcagattggcttccttgcacctcaccttgcctatggtctattgtgggacttcattttgtgatcacgtaagtcaatactgcttaataaactccccttcatatatacatctatcctattagttctgtccctttagagaaccctgactaatacagag

SEQ ID NO: 745145 - DNA, 576 bp, Homo sapiens
ccccaaggatattcataggtgctgatggttctgaatgggcagaagaaataatatttgactgggtaccagaaaaattagaatcttcttccatctctggcaccgtctcatcgtgtagctttaatcaaattactcagcccttttgggtttattattgaagttggaaaaataaaagcattgcattagattttctttataaagttcctttcacactgtgatttgggtgttacctcttccagtggtatttgcattttgccttccaaaagatccctagaattgctaaatagtagaaaggagagctttattggcggtatcagtttgcaaactgtgaagagatagtcttcagcatggagcaaaggtgctctctcttcaaagagggaaagggcagttgggttttatgtctctcaggtccagcatcatgcaatagagtcctacacattgagsaggtttggggataaagttatacatatttatgaaggaagttgagcgcatgtgcgatgggtaaacatacatgtaatatacatcccacgttcactttgaggtggggtttcagccattaaaatgaggtggaatttggat

SEQ ID NO: 745146 - DNA, 601 bp, Homo sapiens
ccatctcttgactatttacccaacagataacaatgcttacaatgccttaaaaatattaccatttggcttaaacagtgatgaaagaaatatatttttctcttcattttatatgaggaaactagacaacaagagggtcagtaacttcctgaaagtcacacagatagtaagaggcagagctgggctatgcacttgtgcttatttttctcaatattcttgctgctacaaggaatcttgaaagaggagattttcaagaacgtgagcagattgtctcaggaattggaggaggataagcatctattacttatctctattcattttgactcaggcctgtgtaaaagcaggaaatagaaggcatgagtgttccccataatatttgcagttcataagttagaaattagcaatcagccccttttcacgtaggacacaataatagacactctggcacagtccctgcaatttggttatgcgaagaaaacaggaaacaagcacattttcactgtggtttcagtctgaggagggctggcatctgctgacgtgacggctagattttcttgtcaatatcgyatttactatcctgatcacatgagcggagagaggagga

SEQ ID NO: 745147 - DNA, 556 bp, Homo sapiens
caggaaggtgctgtatagagcctacctcccccactttctgaatggaagaaaactgatttcactttacagttaaagtgaaagcttaaaacagaaaatattcatgcaagaggtgacacatgcattcaaaatcacacagaacataaatgactggcaacagaccaagtcacctggtgaggaaaagaggggaaggagaaggatgagagggytgaggccaggacgcaggggccttgtgcatctgagagagacaggacatgggggaatagacttagggggctttccaggtaattgttttctgcttcacctctttgcctgtggctggccttaatccagggggaattctgagagaatggcatatatatgtatgtatgtatgtatgtatttatatactccaatacattgatctccctctcctccattctccaatttagggaagttaaaattaagtcaacacaggtgggggaaatcagtacaacagaatagtaacactcgtgcagatcttgttctttcagtctgacatggctgaatgtggaactcagtgatcagaatcagtcatgct

SEQ ID NO: 745148 - DNA, 615 bp, Homo sapiens
attctataactagttgtagaaatggaaagatgtacattctgagtccaatctgaaatcactgcctacctctcttcaaccttctccttctatatctgtagttcattaatatcatcatcttctatccagagacccaagagttgtcttttcatctctatgcccctaattctgtacatcttatgagtagccagatccctttgttacaccacctactgatgtctaaaattagcattttttctccccatttcctctgccctggtcaagccttcattggcccatctgaactgatctcccagcctctgatctcagcatccccccttgcgaacttcaagtgcctcggatgcaagccccttaactccttgccatcatatgtacaaaygttgcctgcatcgcctacaaggctgtgagttccagaggggttggcggggggggtctgtctgatccacctttgtgtcatcagtacaatgcctggtaggttggctgtgagtaaacctacatgctattcatctatctgtttatccaccatccatcccttcaacatatattaatgaggccctattatgggcaggcacacttgtaggtaaatgagaatatggaagtaaacaaaatagatattgc

SEQ ID NO: 745149 - DNA, 615 bp, Homo sapiens
attctataactagttgtagaaatggaaagatgtacattctgagtccaatctgaaatcactgcctacctctcttcaaccttctccttctatatctgtagttcattaatatcatcatcttctatccagagacccaagagttgtcttttcatctctatgcccctaattctgtacatcttatgagtagccagatccctttgttacaccacctactgatgtctaaaattagcattttttctccccatttcctctgccctggtcaagccttcattggcccatctgaactgatctcccagcctctgatctcagcatccccccttgcgaacttcaagtgcctcggatgcaagccccttaactccttgccatcatatgtacaaatgttgcctgcatcrcctacaaggctgtgagttccagaggggttggcggggggggtctgtctgatccacctttgtgtcatcagtacaatgcctggtaggttggctgtgagtaaacctacatgctattcatctatctgtttatccaccatccatcccttcaacatatattaatgaggccctattatgggcaggcacacttgtaggtaaatgagaatatggaagtaaacaaaatagatattgc

SEQ ID NO: 745150 - DNA, 615 bp, Homo sapiens
attctataactagttgtagaaatggaaagatgtacattctgagtccaatctgaaatcactgcctacctctcttcaaccttctccttctatatctgtagttcattaatatcatcatcttctatccagagacccaagagttgtcttttcatctctatgcccctaattctgtacatcttatgagtagccagatccctttgttacaccacctactgatgtctaaaattagcattttttctccccatttcctctgccctggtcaagccttcattggcccatctgaactgatctcccagcctctgatctcagcatccccccttgcgaacttcaagtgcctcggatgcaagccccttaactccttgccatcatatgtacaaatgttgcctgcatcgcctacaaggctgtgagttccrgaggggttggcggggggggtctgtctgatccacctttgtgtcatcagtacaatgcctggtaggttggctgtgagtaaacctacatgctattcatctatctgtttatccaccatccatcccttcaacatatattaatgaggccctattatgggcaggcacacttgtaggtaaatgagaatatggaagtaaacaaaatagatattgc

SEQ ID NO: 745151 - DNA, 458 bp, Homo sapiens
gaatggactaatgatacatgtaataatgtggatgaatctcaaatatatcatgcaaaacgaaaggaactagtcacagaagacaacatactgtgtaattccatatataagaaattctagaaaagcaaagactatagcaacctgaagcagctcagtggctccctgtgggaaaggatggactgcaaaagggcagaagggaaatttttgagggtgatagaagtgttttaaaactggaggccaggtgcagtggctcacgcctgtaatcccagaactttgggaggccgaggcaggtagatcacttaaggtcaggcattcgagaccamcctggccaacatggtgaaatcctgtttctattaaaaatacaaaaaaattagctgggcatggtggtgcacgcctgtaggtcccatatactcgggaggctgaggcaggagaattgcttgaactcaggaggtggaggttgc

SEQ ID NO: 745152 - DNA, 606 bp, Homo sapiens
attctaaatggtatataataacactatgtcacttactgttgtactttcttccactcagtcaaaagatcaattgctaaccaaaatattttatttgaagaataattttaaaaatcattgtctatgagctttgatatcattttatagaagatattgttaccttggatatttttctatttctctctctttctgtgtgtgtgtgtttagctttgtgcaaaagtaaytgtagtttttgccaattatagtatatgaaatatatattttaatggaatttttaaaaaattagaagttatagaccaaagtattttaaaaaatttggcagttacagacctagttattatcacctgaaatatgtagagtctctactcactgagaaactttcattgcatttcttgtggtgagtagataagtgaattcagagaagagacttgggatttaatccctgttaggccactaactatacatgtgacattgagtgggtcttatttcaagcatcatctataaaatgagtatattgctatgcaatctggtatcccttctagatatggagaactgtatcaaaatatttaccaaatatacccatttcaatccctgagagtgctgtcttgt

SEQ ID NO: 745153 - DNA, 606 bp, Homo sapiens
attctaaatggtatataataacactatgtcacttactgttgtactttcttccactcagtcaaaagatcaattgctaaccaaaatattttatttgaagaataattttaaaaatcattgtctatgagctttgatatcattttatagaagatattgttaccttggatatttttctatttctctctctttctgtgtgtgtgtgtttagctttgtgcaaaagtaactgtagtttttgccaattatagtatatraaatatatattttaatggaatttttaaaaaattagaagttatagaccaaagtattttaaaaaatttggcagttacagacctagttattatcacctgaaatatgtagagtctctactcactgagaaactttcattgcatttcttgtggtgagtagataagtgaattcagagaagagacttgggatttaatccctgttaggccactaactatacatgtgacattgagtgggtcttatttcaagcatcatctataaaatgagtatattgctatgcaatctggtatcccttctagatatggagaactgtatcaaaatatttaccaaatatacccatttcaatccctgagagtgctgtcttgt

SEQ ID NO: 745154 - DNA, 420 bp, Homo sapiens
catacatatgtcctgaatggtattgcctaggttttcttctagggtttttatggtttttatagaattaaagaaacccttaaagtgaatatattttttaaagccctagtatgtatcatttagtaatataatatgccttttttgttaataatatgaagaaaataagagagtcaattcagatgggaaattgagctccatattgttstgtgcattcttgataatatttgacaccatatttatcccttgagggttgagaaatagacttaatgattaaccaaaatcttaagagtactgtagagtaatgtgtggtttttgattgttctagcattagtaaagaaacaatatttgtactgtattagcacttgcttaataaaattgcatacatatagaaattcagactgaatagtctctttattgtgaaag

SEQ ID NO: 745155 - DNA, 599 bp, Homo sapiens
ctccccaacttggataaatacaacaacaaaaatccctgggcacaagtagtcagtctgcagaaaactaaagataaaaagcaagttttaaaagcagacagaggggtaaaaagacatattaaatactagggtaggggtccttctaacatctttacaaagctgaaagaaaatatagtatgaacctaagattctatacctagtaaaaatatccaccccgaataaggtgaagtaaagatgtttctgaactgacaaaatgaaaaaagtatctgttcccaggagacctgcactactagaggtttttcagcctgaagcaaaacaacactagaaggaatcggggtatcttaggaataaagatcagtagacasagcatatgtagaggaaaatagtatatatgtacatatgtataacatttatatagagacagatatttaaatttctttaactataaactattacaaataatgtataactatgtattgtagaatttatgtcatttatataaaaagaagaaatacaccattgtaaagtctttacactgtttgtgaagtagcatattacttgaagagaaaaataaaagtgtgcattactagagaaagacatgc

SEQ ID NO: 745156 - DNA, 603 bp, Homo sapiens
cagccagtgggctgtgggttggacaagcttgttgtagatcaaggtgccagcagggttggcttcctctgaggcttctatcctggattctgtagatggctacccttgatttacagatggctcgcctcttgctgcctcttcacatggtcttccctctgtgcatgcaggactcttcttcttctaaggatgccagtcatattgggtttgccccccttcctatttaaaaaacagatttacggggtacaagtgcaattttgttacatggatatactgtggagtggtgaagtctgggcttttagtgtaaccatcacctgaatagtgtacattgtatccattaggtaacttctcattcctcacctctytcccactttcccacttttggagtctccagtgtttgttattccactctgtaggtccatgtggacccattgtttagctcctgcttataaatgacaacatgtagtatttgactctctgtttctaagttttttcacttaagatagtggcctccatttccatccattttgctgtaaaagacatgatttcattcttttttatggctgagtcgtattcatataaatatatatacacacaccacattttctt

SEQ ID NO: 745157 - DNA, 593 bp, Homo sapiens
aagtggtaatgtgtgttcctgagttctgtgagccattctagcaaattatcaaacctgaggaggtagcagatatgtggctggttggtcaaaagcacaggaggcctgggactgaagaccagcatctgaaataggagggactgagtcattcacctgtagggcctgcacaggtagagtcggaattggttggaattgaacgctcagctggtgtccagagaatcagaaaataggttgttggtgtggaaaacccccataccttttgggtcagaagtgttgtgaggagatacagctcaacaataaacatttattatctcatcatttctgtgagaaaggaatttgggcgcagcttatctggttggttctggaytggagtcttgccaagaggttgtaatcaagacgttgtcctgggctgcagtcatctgaaggtttgactgggcctggaagatttacgtccaaagtgactcactcatatgactgtctggtggttacaggtgtaggcaggaggcctcatatcaccagttgggcctctccagggcgctgctcagtccatgacagccggcttccctcccagcaagtgcccaagagagcaaagtaaa

SEQ ID NO: 745158 - DNA, 532 bp, Homo sapiens
tttcttttggccattttttttcctttggtatgagaatatttacctaattcctggaacacaattgtatcttggaagtatgcaacttggtttttattttacagtctcacagggggaacgaactcatctccagaagagacaytggacatgagacatagaacttttgagttaatgcagaagtgagttaagattttgggggctattggcaggagatgattctattttgcaatgtgagaagggcatgagatttggggatgcaggagtggaaagatatgatttgggtatttgctctctataagtcttatgttgaaatataatccccagtgttggagacagggcttggtaggaggtgttgggttgccgaggcagatccctcataaatggcttcctgctgtcctcatagtagtgattgaattctcaaaggatttggttgtttagaagcgtgtgccactccggatcgagccaagatggccgaataggaacagctccggtctacagctcccactgtgagcgacgcagaagacgggtgatttct

SEQ ID NO: 745159 - DNA, 606 bp, Homo sapiens
aaattcacattaaatctcttcactttcttggttcttagtactcttgcaaatattttattatctagtgatctattgacttctccagagatttctttacaaactgacaaccaaaaataacaactactgtctttgaagagtaacctcctgtggttaacatctctctaattgtttctctaagataatcttgataaaagaagtttgttctattctcttttgtttttttctttaaaaagtgcattttagcatctactttatgctaggtacttttaatccccacaacataagtrttattggcttttttaacaactaaataaatagaaacccagagaagctcagctctttccccaatgacacacaacttataagtagctgagtcataacctcaaatgagattcatatgctggttctaatgctctcttctctttaccagatttacaatgaaataaataaaaaataagatactaatttaacacaaacaataattttcaacctcgatcgttcaaactcattttttaaaattattataaacacaaggtaatggacgaaaagcaaaaatattccaatgatacaggatccttaccttttcatgatttttaaaaattataa

SEQ ID NO: 745160 - DNA, 625 bp, Homo sapiens
tgctaaatgcggaaatggctcttgaaaaatcactgctttccctggatctctactttgtctcttatttactggaaaaagcaatttaaaacgacctctcaccaaactgctgtagttgccttacctgcaaaattgagaaataatgggttgatgggagaattaaataaatttacatatgcaaactgtttagaaaaatgcctgagcctactctgtatgttattttattagtcgtattattttctttcctttaagacagagtttcacactttcacccaggctggagagcagtggcgcgatctmggctcagtgaaacctccatcccctgggttcgagcgattcgcctgcttcagcctccccagtaaactgagatgacaggtgcacaccactacacccgactaatttttgtacttttagtagagaccggggttttgccacattgatcaggctggtctcaaactcctgacctcaggtgatccgcctgcctcggtctcccaaagtgctaaaatgacagtcgtattattttcatattagtgttagtgggatcattattgttaccgttattattaaaaaaccaatcattttcattcgtctaaattgaggcataatgaacaagtgttcaatcatctac

SEQ ID NO: 745161 - DNA, 349 bp, Homo sapiens
tatgtatattttcttatttcccattctttcattcaaaactgtcacacaacatatgatatacatatatattgttttgcacgtataggtgtgtgagcacacatacagaaggatagactgatagatgagagagagagagagagagagagaggtatgtgtgtgtttatgtgagagtctatggacccctgtaccctaactctatctgctaagaaggwctacggcagtgacatcccaacaccaaaaagcaaattggtaaacagatcttcaccataaatatcatttgccaacaaaagaaaccaggggtccttgaggtaatgactcattccatggccggtgcagggaaagtgcaggc

SEQ ID NO: 745162 - DNA, 581 bp, Homo sapiens
actttagcatgaagatttgtgttaatcggactaggagttggattatgtttaatgcttgctgtaggtgtaggtgtcagaggatttgattttcttctcagagaggactgtccctggcagggccttctgctgtaatccactcttataatgcaggaggcctgttgctgtggtagtgagggatggtagagtgttttataaccttcctactagctgtgagtcttttagtgatcctgtgtttcrgggctatgacttttctgagaattttcccagcaaaatacctccttttacctccttgccttctactacttttccagttatagaaatcccattttatttccttgaagccatgacacccactaagtatgaattttccactagcaagacaggaaggctaaaggggtctgtctgacatggaagtaacacccttccctgataaccttctagcagagatttttccctaaagagaaagccttcctgatgtagaaggatctaggatacttcacaatgtccatttttccttgacctgccagaggtaagaagggatattcctggaattttcaccgtgagcacttcatggggttcct

SEQ ID NO: 745163 - DNA, 623 bp, Homo sapiens
tgatatcaccaatataagaatgttttccttaggctggttgatgccttgtgtcaaagcctccacagttacaaatgaggcatcaccagctggatgacctactagaaagaggatatgcttgcagtttccactcaagtttggaggatgaataattgacacccttctgagtacaggcttcgggctggcttcagcctgttcatgacaagagctccctggagcaggaggccaagtgaaaagaggcactgcaatgagaaactgctaacccacacatttgaacaactcacagctaggttttccttagaaccagggaaagccatgtaatttgcataaacrttttaatgtttttctttatttaatgacaatacttccggtttaatcttggatacattgttctgaccagggcagcagattaccaaagccaaagcactgaattgagagtgaggagtcagaatgtagtttcagctggaacagccactgtacagctctctcccagcctctgattaggaggctgtggcgctgcgggtcttggggcactctggctggaggacagttttaccttgtgtggttttgagtgtattattcaccatcttgatttcctgttctgacagtggacatcatgatatgtt

SEQ ID NO: 745164 - DNA, 596 bp, Homo sapiens
ttttaattagggacactcaactggtaatatatatgcaaatattcccaaatctgaaaaaaatctgaaatctgaaatacttctggtggcaaacatttcagataagagatattcaacctgtatgagcatttcttgttaattggtcagtgctagaagtcatactcatccatgtatctttaaatgtcccatgtgttatattccagcaatgttgcagggatraagtattgtaagaaacccaatttcttacgttattcatcattaataacaggattaaatccacatttcatggaatgattcagaagcagacatacatatcaaacttaggaaatgttagtatccgaaattagatgagtaccttaagccctggaagactgatctgttagccaagaggttcttccgggatctgaatccacttcatctgaattcaagcctcaaacttaactcaatgcacatcctttcacagatacatttttatggcttcttttctgtaccttcagattccacatctttacatttttctttatgataaaaatactaagaaaaaattttaattcaaaacactttgatatttttcaatacactttaagacatatgtgact

SEQ ID NO: 745165 - DNA, 581 bp, Homo sapiens
ggtctcaggcaggtagaccagcagccagcggtgagggaggcagagccccagtgagctatgtgcgggattggtcaggatgatgttttaatgagaatgatagtgcacaggtaccagaataaaaagaaagggattatgtttcgtaaaggcaaatgtgattttcttcacaagtctctacatttgaaaataaatgtctattttctatcaccatgatagtcaactctacttgttttaaktggcatttaaaagttttgtttcttttcaccttgcatccatttgggactcgacagtgtacatctgcaaattatggccttcaataagctaagggcttttcagtgttcattaacatggtatgtccaaactgttattaacccactgcatcgctttgtcgaaatccaaatcatttttagatataaaaagttgggaggatttgtactttagataacattataaagcagtatttcctgaaaggtattatttagttgtatccatagtacatttttccaagaagacaagagctaagaaatattttcttttttagactatcttcttatcttaactcagtcaaagtgtctctgtacata

SEQ ID NO: 745166 - DNA, 641 bp, Homo sapiens
atactggcatataaaatgaggtatagacctgattctgcagggacgatgttttttccccctggatgtcagtttactcgtttgtatagagagataatatctgcgataatcatagtcctaaaattatatttcaagaatatatgtattgcacctgtccatctctttcatggatgtatttagtatatctttttattctatgcaatatgcttcatgttatagaacacttcaatatcctctgaaaattktgaagcactctgccaattcgtggtcttattctcatggtgatctaatgtgataaattatttcttggtcttcatgtgaccgagtccttgcctactacagccaggaggctcagtgggttgagaagcctgcgtcgagaagtcagcgagtgaaacgccaccactctgcattgtcactctgccacactccctcatcacatcacttaaccttcccctctcacttgctctaaatgtgaaatggagaggaagacgctgagccaaaactgaggaagtgctacatacattaaattacctagtgcttgtgaaccatctttaaacacataaattattttaaaataaaatactttgcatgcagatgacagaacagacctcataaagcattatattataatttgttcaaattcc

SEQ ID NO: 745167 - DNA, 641 bp, Homo sapiens
atactggcatataaaatgaggtatagacctgattctgcagggacgatgttttttccccctggatgtcagtttactcgtttgtatagagagataatatctgcgataatcatagtcctaaaattatatttcaagaatatatgtattgcacctgtccatctctttcatggatgtatttagtatatctttttattctatgcaatatgcttcatgttatagaacacttcaatatcctctgaaaattgtgaagcactctgccaattcgtggtcttattctcatggtgatctaatgtgataaattatttcttggtcttcatgtgaccgagtccttgcctactacagccaggaggctcagtgggttgagaagcctgcgtcgagwagtcagcgagtgaaacgccaccactctgcattgtcactctgccacactccctcatcacatcacttaaccttcccctctcacttgctctaaatgtgaaatggagaggaagacgctgagccaaaactgaggaagtgctacatacattaaattacctagtgcttgtgaaccatctttaaacacataaattattttaaaataaaatactttgcatgcagatgacagaacagacctcataaagcattatattataatttgttcaaattcc

SEQ ID NO: 745168 - DNA, 641 bp, Homo sapiens
atactggcatataaaatgaggtatagacctgattctgcagggacgatgttttttccccctggatgtcagtttactcgtttgtatagagagataatatctgcgataatcatagtcctaaaattatatttcaagaatatatgtattgcacctgtccatctctttcatggatgtatttagtatatctttttattctatgcaatatgcttcatgttatagaacacttcaatatcctctgaaaattgtgaagcactctgccaattcgtggtcttattctcatggtgatctaatgtgataaattatttcttggtcttcatgtgaccgagtccttgcctactacagccaggaggctcagtgggttgagaagcctgcgtcgagaagtcagcgagtgmaacgccaccactctgcattgtcactctgccacactccctcatcacatcacttaaccttcccctctcacttgctctaaatgtgaaatggagaggaagacgctgagccaaaactgaggaagtgctacatacattaaattacctagtgcttgtgaaccatctttaaacacataaattattttaaaataaaatactttgcatgcagatgacagaacagacctcataaagcattatattataatttgttcaaattcc

SEQ ID NO: 745169 - DNA, 634 bp, Homo sapiens
aatggagaggaagacgctgagccaaaactgaggaagtgctacatacattaaattacctagtgcttgtgaaccatctttaaacacataaattattttaaaataaaatactttgcatgcagatgacagaacagacctcataaagcattatattataatttgttcaaattccagaccctgtcatattccattratgaatacaggatgattcagggtgaacacgttgagatgaaatgtggtcctggaacatggaaaactcgaaagtggaagctcattgtgggatgcagcacagatatgctaaattattgtgaacgtaaccattcatggtgactcaaatgcgatggcttgtggacctcagagcagtaaacctgagcctttgctagacgattttttaattaccaagggcttttctttctcacacaaactaaatactcaaagaattatctgagtcctcccatgaaacagacagtgagatgacggaaacccggattttcggtgtcatttacagacccacaatctctaattttaaaatgaacccagcaaaaacgtttaattacctaactttcaaaagtctctaggaagtgataactcaattgcatgtgaagcacccagacagccacactctagacaaccacca

SEQ ID NO: 745170 - DNA, 452 bp, Homo sapiens
tctcctctccttgcaaaagcaaatattatacattatgttgatatatctagataaaagggaaacaagtgcaatggcatgtttcacttcaccaatgcagcctttggttattgattagccttaagatttttaaacatattgaaaacaatcatagacttatgctggttttggaactactttattctacagtttggaaccactgagcttcttgaaggcagggaccacaccttttctgccctttttattctaaaaatataacaaatccctaccwcatgttatgtgttcagtgttaaacgaataaactagcaaaggaaataccactggacaagtcactaagttttcttaagtaaaataaaaagtaatgtgtcatacataaaacaaaggtcaaatacaaaccatgaaaccattacgctgaaatataaataggagatttaagaaaataatcatatagaagt

SEQ ID NO: 745171 - DNA, 452 bp, Homo sapiens
tctcctctccttgcaaaagcaaatattatacattatgttgatatatctagataaaagggaaacaagtgcaatggcatgtttcacttcaccaatgcagcctttggttattgattagccttaagatttttaaacatattgaaaacaatcatagacttatgctggttttggaactactttattctacagtttggaaccactgagcttcttgaaggcagggaccacaccttttctgccctttttattctaaaaatataacaaatccctaccacatgttatgtgttcagtgttaaaygaataaactagcaaaggaaataccactggacaagtcactaagttttcttaagtaaaataaaaagtaatgtgtcatacataaaacaaaggtcaaatacaaaccatgaaaccattacgctgaaatataaataggagatttaagaaaataatcatatagaagt

SEQ ID NO: 745172 - DNA, 452 bp, Homo sapiens
tctcctctccttgcaaaagcaaatattatacattatgttgatatatctagataaaagggaaacaagtgcaatggcatgtttcacttcaccaatgcagcctttggttattgattagccttaagatttttaaacatattgaaaacaatcatagacttatgctggttttggaactactttattctacagtttggaaccactgagcttcttgaaggcagggaccacaccttttctgccctttttattctaaaaatataacaaatccctaccacatgttatgtgttcagtgttaaacgaataaactarcaaaggaaataccactggacaagtcactaagttttcttaagtaaaataaaaagtaatgtgtcatacataaaacaaaggtcaaatacaaaccatgaaaccattacgctgaaatataaataggagatttaagaaaataatcatatagaagt

SEQ ID NO: 745173 - DNA, 564 bp, Homo sapiens
tgttctgttgcataggccagaaggcagtggcacgataatagttcactgcagcctcaaactcctggactccagcaatcctctcctccagccttagctactcaagaagcaagttgctgggactacaggcacaccccaccatrtccggctaaagtgtttgttgttgttgttttgtagacaaggagtttttctatatcgaccaggctggtctagaactcctggcctcaagtgatcctcctgctttgccctcacaaaacatcaggattacaggcttgaaccactgcacccaccctgcaaagtaaaatttttatttgtgtgtgtgtgtgtgtgtgtgtgtttgtattttacttaataccgacagattttgtactaaaaatatcatacattggaataaattttaattttctcccattaaacatatagtatttagctgtagaggaaacacgttcagttttccaggaagcccagtgattacatgaagataagacaactgtttggaatgtttacttcatcctcataatgtctaatataaatactgaatctccagagcccaagtgtgtctttgca

SEQ ID NO: 745174 - DNA, 564 bp, Homo sapiens
tgttctgttgcataggccagaaggcagtggcacgataatagttcactgcagcctcaaactcctggactccagcaatcctctcctccagccttagctactcaagaagcaagttgctgggactacaggcacaccccaccatatccggctaaagtgtttgttgttgttgttttgtagacaaggagtttttctatatcgaccaggctggtctagaactcctggcctcaagtgatcctcctgctttgccctcacaaaacatcaggattacaggcttgaaccactgcacccaccctgcaaagtaaaatytttatttgtgtgtgtgtgtgtgtgtgtgtgtttgtattttacttaataccgacagattttgtactaaaaatatcatacattggaataaattttaattttctcccattaaacatatagtatttagctgtagaggaaacacgttcagttttccaggaagcccagtgattacatgaagataagacaactgtttggaatgtttacttcatcctcataatgtctaatataaatactgaatctccagagcccaagtgtgtctttgca

SEQ ID NO: 745175 - DNA, 564 bp, Homo sapiens
tgttctgttgcataggccagaaggcagtggcacgataatagttcactgcagcctcaaactcctggactccagcaatcctctcctccagccttagctactcaagaagcaagttgctgggactacaggcacaccccaccatatccggctaaagtgtttgttgttgttgttttgtagacaaggagtttttctatatcgaccaggctggtctagaactcctggcctcaagtgatcctcctgctttgccctcacaaaacatcaggattacaggcttgaaccactgcacccaccctgcaaagtaaaatttttatttgtgtgtgtgtgtgtgtgtgtgtgtttgtattttacttaataccgacagattttgtactaaaaatatcatacattggaataaattttaattttctcccattaaacatrtagtatttagctgtagaggaaacacgttcagttttccaggaagcccagtgattacatgaagataagacaactgtttggaatgtttacttcatcctcataatgtctaatataaatactgaatctccagagcccaagtgtgtctttgca

SEQ ID NO: 745176 - DNA, 652 bp, Homo sapiens
caaaacgtaaaaaatttacactgtttccaattctacttaactcagagtgccagaatatgatgtcataatgagataaagttttgagagaaaaatatgtcatctaaggatattttaaccgagtacaacctaatttatgtgctggtataacactgacctccctgctcagatatgcagaatttagaacataaactgcccatggatacttgctttgaaacttttacttagaagatgtccatcagcaggctaagagatggatagtattttaaaattaatgaatgagatatgtgaatctgaaattactgtggtacttcctgttatagttttaaaatatatttgtttaacatgctaagagctaccttgaaaggtcattgggactttttagagtaaaaaaaaaaattaaaaataaaaaaagaccaaaaagcagggatgttcacaatgaaagaaataagttgtttgtctatatactaatagcatacggatatcataatataagtaacaatataattytaatgtctagtagatataaaatttgctatatgatcatgaatatcttacaaacattacataaacagatgtaatattgctaaataattttggattaattggccttttggaaaataattcttaaattggatccttatcttacacttta

SEQ ID NO: 745177 - DNA, 493 bp, Homo sapiens
gaggtctcacccagaacatttaggtttgaattggttaacaattcaagcagccctaccttttcagcattttttattttttaaaaaaaatagcattttgtttttccttcaaacctcacatcttccaagcccttcaaagagctgtactgatgaatgcatgtttctaatagacttcaagagggttatcctggacgcctggtataagttcaggggycccctccccctttatttacctgttatgtgtcattagctcctgcttttttttaatgttacaaactctgtgtactttttgtaggcattggttttcaatgctgcgttgccatttggttttcattcataggagaagtttaaaaggagaaatgagatcttacatgaaagattgtgctcagcactttttatttggcaggggaaaatatgagtggagttatttcacctaagacatagaattattttgttacgtgaaagacattatttatattttcttatgttaatacaa

SEQ ID NO: 745178 - DNA, 563 bp, Homo sapiens
ttcctaccagacttctactgcaatcacgtatttttgacatccttggactatattgtgtccggaattggtgggttctcggtctcactgacttgaagaatgaagccgcggaccctcgcggtgagtgttacagttcttaaaggcggcggtgtgtccggagtttcttccttctgatgttcggatgtgttcggagtttcttccttctggtgggttcgtggtctcgctggctcaggagtgaagctgcrgaccttcacggtgagtgttgcagctcttaaggaggcgcgtctggagttgttcgttcctcccggtgggttcgtggtctcgctggcttcaggagtgaagctgcagaccttcccggtgagtgttacagctcataaaggcagtgtggacccaaagagtgagcagcagcaagatttattgcaaagagcgaaagaacaaagcttccacagcgtggaaggggaccccagcgggttgccactgctggctctggcagcctgcttttattctcttatctggccccatccacatcctgctgattggtagagccaagtggtctgttttgacag

SEQ ID NO: 745179 - DNA, 571 bp, Homo sapiens
aacaaaatattccaatttatggaatgtgtatttaaatattaacaatatcaataataaactctcctgatgaacaagttatttcatacttctgtcattaggaaagagaacattctaccaatccttcttaatgggggayaagagcagatcttaggatgaaattaaaaaataaaatgctgggaacatcatggtccagcatcacttgttaaatagaagtatgaacagaaaaaggtgtgtagtgacagggtgtcactatgttgcccaggctggtgttgaattcctggactcaagccatcctcctgcctcagccttccaaagagtactgggttacaggggtgagccatatacttggacaaaaagaagcagttttagctgtctggcttaaataattgaactatggcattagtttaaaaaagaaaatatatattcttccatctctctctatatatggaaacatacatattttcattttaaacctattttctattaaacatattttcttaaatacatattaagttgtggcattcacatgccacaagttgatactcgcatactggctacagaaaaactggtt

SEQ ID NO: 745180 - DNA, 631 bp, Homo sapiens
atccatatttaagcacatctcaaaagaaaaaaatcataaagtcaaatatgaaaaggaaaagctttcacaaacaagaattgtaaggttttgctaatttgtatttgccaaaaacaaaaacaaaacataggtaatatatatggaaattgattctgtgagagaagaggaagggagaaaaatctggattctgctgaatttatcackgagaatccacacaccagagattataaattaattgtgcttgcttaataaactgtatatagtattatttcttaggttagttctctaaaatctagacttaacatttcactcactaaatcaagttaaaatgatagaaattcagtgaaataatatagataaaagtattagaataatgcattagaagaacatccaatgaaaacgttgcacataactaattacttgtaactcacttgcccaccacccatatttttccagttttagggtcccagagttccttctttcaatgaagaattgaagaatactttggggaagggagaaccagtatatctgaaaggttatcgtggcagttattctgttttcaactagaaatttggtttggatatactggctttgaaatgggctcttattttaatgaggataattgtagtctaag

SEQ ID NO: 745181 - DNA, 600 bp, Homo sapiens
aaaaaaaagaaacttcattgataccaccttgaaattcacttggaagccttgattgcacctgattctaaatctgtcgttacagtttggagactccgttgaaattcatttttttctacataaaaacaataacaaagtaatctctccacctaacatgatgcaactattttgtgattgtaatttcttggattttagacatyaggaattttaggctttaggaatttagactttaggaattcaatcttttgggatttcaacattcggaagtatggcatttggaattgtgtctttagagattatgatccaaacccttctaagagaatctaaatgtcaatctagaaaagatagccagttaaagaccaattaagagagaggaaaactttcaaggtaaacaaaagtagaatctttgagtactattggcataggccatcaccttccagagccactaaaccccagagcctgtgttcatgcagacagggaaagatagattacacacagagaaactgaatttgctaatctaaactcagtctacaatatgaaacatatttctatgctgaattctgctgttaggggttaaattgtttccccaaaaagatgttgaag

SEQ ID NO: 745182 - DNA, 536 bp, Homo sapiens
aaaatttggagatagggatagacaaaatgtgaagatccagaaggaataccatatgggatccaagaaatgcccaaggttaccggaagctaagggagaacagaatactcctcgcaacctttagaaaaacaaaaaaacaaaaaaacctctattggcacytcaatttccataaccataaaacaataaatttcttttgaagccaccctgtctgtggtactacactgcagcagccccaggaaactaatatatctgagataaaaaattgggaagtagcagcttaaaatgttttttagccacaagtaacagaatatctgaatgctaatggcttacatttattttgctcacttaaaaatatgttttggagaccagcagcaactaaacgttgtgcagcaactcactgaagaaatcagtattcaagacatttctagcattaaactctaccattctcagtgttgagacagtcgcctgcctcatggtgagaatgacttactgttgatcaggctaccatgcaagatgaagaggatatcaaaataaaccac

SEQ ID NO: 745183 - DNA, 599 bp, Homo sapiens
atcaagagctaaatccagcctccatgtagacaagaggctaggaagacacagacaagatattagatagccatccattgtcagagcaatagaaggagaacatgacaaattgagtagagatttcaataaagcccgttgtcagattaactaataccacacgggaaggacctacagaagggcagytgcatccctcaagaggtaggagctgatactgactgaagtggtaattatctaacagctcaaatggcacatcaaacatgggtgtttgaagaataaccgaatatagtttcctatgtaaaaaatgagtttctaccttactatagcgatttttttacagaaggatttcacctaaatgagcatagtctacaggtcaagcagagcaaaagtaatatttaatacagaagaggatgtttactgttgagatgaaaacaactgggaacaagatgaaaactatgtttctgttgagatgaaaacaactgggaacaagatgaaaactggggactgagtcatcagatacttctggcatgaagtgtttctccccaaactttcctaacttttcatttatttcattttttaaaaaaagaaattatacattatttaaa

SEQ ID NO: 745184 - DNA, 561 bp, Homo sapiens
tgtgagttagtcaaagcagcattatttttctatttttaagagatcatattcatatttacagaacttgaaaatcacagggctagcaagtagcaaagctgaaatataaactcacacattctgcaaaatttcactggtgatgttatgatttgagtccaccacaattcttatctgcttctttactggcctggataaattytggaacattttcagaattatctaattgatattaaaataatttttaatatttttaaagaatattatatctcatgttaactttcaggttagaagccatctctttacaattgggaggaataagggcagcttatttgctcactcagcttccaaagcaatatccatgaacttaaatatatcatccaagtatctgtatcgagttgaagtaaaataaattttgcacaaagtgtcagctccgcatctaacatatattaagttaaataacatgtctcatccttcataacaaagtctatatcgcttccaacaaaaactcctataaagatatggaaagaattgtcaatgctatggaagagaaccttgggagagaga

SEQ ID NO: 745185 - DNA, 589 bp, Homo sapiens
atgtaatatctattacatgcaaaaccattgttttcatgacaaaaaaacaagtctcgacaaattttaaatcatgaaaatctacatttcgattagaaataaagataataaaaagagtatcatatttttggtatttaagsattgtacctgtgttactcagggttctccagataaaccaaacctaaagatatgtacttgtgtctttgtgtgtgcatttcaccatggagaatatttccagcaaagctgtaaactcttcttgctcttttcctgatcaaagagaatatttatgtaagtatctcattacaaaggctgagaagtcctgtgatttgcaacctgcaagctagagaaccaggagagccagtggtgtcattcagtttgaattcaagggcctgagaaccagaaaatggaagtccttgctcaagaaaagaaagcaaacatgcacttcctctacctttttgttcaattcaagccctcaaccagttgaatgatacccacccacactgggaagggtggctcttatctcagtctatagattcaaagattaatgtcttctggaaacacctaccagacttacctcaaaataatgttttgc

SEQ ID NO: 745186 - DNA, 614 bp, Homo sapiens
aacatttaggtcgtatctttttactttattgaaccatcttgtaagcaattttaattactcccttggcatgagtccttagaagggaattagtaggttaaaggatgtgactgttattaaggtccatggtacattttgccaaaatctttgattcacagtcccaatatgtactgactcygctttactgttttcacatttcataaatggcaacatgtattaatttggctctgtgattattaatgaagttgtacatttttatgtttggctgtttacactttgaattatttggccaaatctttcatcatagtttggtaaggcaagtgctaattgcatgtttaagtgctaatggcatgtttgttgatgaaagagctgaagttcaaataacatgttcagactcatataacgaataacaagtagagttggaacacagccctgtgctcccttctgacacccaaatacatggtgctttgccctaggtcaggtattaaatgtcaaaggcattaaaatagcaatgtactgtcacttgaatttgcaagatctagtgaatatatcttaatatcaagcattgatattgcttgatattaagcagtggtgggcgcttgtagttagctactcgg

SEQ ID NO: 745187 - DNA, 479 bp, Homo sapiens
aaatgtaccatgtgaaaacctccaggtgtcctgaagggccaaatctcatgtatgataattttttaaacaaaaattctatatgatgtggagtttttctcccttttctttcccagtataaatatggcagctcacgtagcctaattaatagtgggtgacatcttctgctggctcagtggcatttttacaaagtgaacaaaaacaattattgagggcacataaggagacaagcatagtgacaatatgtttgctgccatcgacttggtggcagtctaccctttagcttatttaactaatyaatatgctaattaagaaaaccaaagccattgatgaaaacatttttacaaagagtagattaggtctttgggctataaattaatcttcatgagggctaagtcttttttttgttttgttttgggggacggaatctcgctctgtcaccaaggctggagtggagtgcagttgtgtgatcttcccagctc

SEQ ID NO: 745188 - DNA, 455 bp, Homo sapiens
ttacttgagttttaggtcgtagagaaagttttccaataggaattttgttcatattgatctctccttttgccaagttgtcccacagttcaactcaaattcttcttttcagtgctaggacaggaataccatctctgggaagccatgattccctcagaatcaccaaamtaatgtagaaataaagacattagagtgaactgcatctgctttatttattggatttaccacccagtataaacaagaaatcctttgttccctgtttcattgacttcttaacatctcagagctatcctatgtttcagacatcacccgacccacccttgctgaggccccagactatcctaagtccaaccctgcaatcataacatcaacctcacatcgtgatgctaagtgtgtggggagcgaggtggtggctgtttgcaagagtggccacagtaccactgtgtaatgagtggggt

SEQ ID NO: 745189 - DNA, 566 bp, Homo sapiens
gtcactggagcaggcgcgtcttgtaggatctagcaagttctgattggtgagtggcagcagctaggtaactttatcttaaggttagagttaggtcttcgtgatttttctgttgaactgcaaaaatggttcctggaacagggacctgggtgcctttccccatggcctcccractccattttagttgggtatgatatgagtgactccaatttgtagaatgaactttcacacttttgttgttgttacagagacagggtcatgctctatcgcctacgctggagtacagtggccgcaatcatagcttactgcagcttcaacctcatgggctctagccgtcttccttcctcagcctcccaagtagtggggattacaggtgcactcaccacacccagctcacacttttaaaatagaacatttagatagatgattatttaccattttaggaaacttttgttcaggaatgaatttcatccttgcttgattatccttgtagaaggaaacatagcacgatttttgcttcataagcattttattttcagcacgccacagcttagaaatttggttctact

SEQ ID NO: 745190 - DNA, 675 bp, Homo sapiens
agacccctttaagaaacaaatgaagttatggcccctctcccaagaaaaatgtaaacctataaactacacgcatacacccattccatatatgaaatcaagaaacccaactaaaacttatctgtaatccccaagaaggtagacagatcccaatgtaaaaatgcgagggtagcatctctagagacaaatttaatgagagtaggataagcaaagtagttattctgtatccttaaagagtgaattacctggaacgttcctcatcttcatagcccatgatgatatattcctcattaacattaagtggagggcagaggcagccagagctggtatagaggttgacagtgtcccgtggaatgtttaccagagaggactttagaatctccttcacctccactactgcagtcacatcatggcacttagtctttatctctttaactttagcccraatgactgggataaaagacaagaaaagctgataataatatgacacataatagctaccccattcaaaaaaagccaaagtaggcttctctttagttaattcttatccacttgatattcaacgaatggaacagaaaagtcagccagatatttttgccttagactgtagtgtgtgacataaaacaacacacctgacctaatgctcagccctgctctctttccaatttgtggctgtgt

SEQ ID NO: 745191 - DNA, 548 bp, Homo sapiens
tcagttgcaaagttaaagtatgtgactcagaatctagaaagtacagatctgcttcttttctgtatctctcccctttaaaagagtcaagttgttcagattcctgcttctagtaaatgagcttttaaaaagagaagttttaaaacaccaagaaagaagtaaaaatatcagtaaaaagccagtggcatttctcccagtaccctcattgctccagttcactatccatggacattatatagaggaaaacaccgtttatccaaatgagtcaacatttcaaaaacttcttaggcacataattgcaaaccactttaatctgagtactttcccacatattttagagattttggactataaaggattagaagaaagtaatccttgaaaaatataaaacsagctaatcaaccattccccccattaatgttccaatttcgtcacaaaaacttattctaccagtacaacacacatgacagaaattagttactaaggaattctaaaagcttcacatttcagtcttccgagaattagttgcctcaagtatgagaacgtgtagc

SEQ ID NO: 745192 - DNA, 537 bp, Homo sapiens
attcagaaatcaactatattaaactaggaaccatatagaagtcatattggtattatgctcatacaagggtgtacttttacacaattagaaatagaataaaatgatgcgcagaactcaaagtctcaaaaatgccatggtatgccaaagcagccagtcccaagtgtgtacagtatgcttccatttacgtgaagctgaataacgacacccatctatggcaatgaaaatcagaactgtgcttgcctcagggcagaatgggtgataagacaccagacaatttaaagaaatgttctttaggccggggtgcggtggctcacgtctgtaatcccagcactttgggaggccgaggcgggtggatcaygaggtcaggagatcgagaccatcctggctaacacggtgaaacccgtctctactaaaaatacaacaaattagccgggcgtggtggcaggtgcctgtagtcccagctactcgggaggctgaggcaggagaatggtgtgaacccggggggtggagcttgcagtgagctgagatcgcgccact

SEQ ID NO: 745193 - DNA, 527 bp, Homo sapiens
aatagctcaaggagagaaatgcttaggaaagagaactggtcaaaagtatcagttgttgcaaagtaatggggaaaaaaaatcctatagttttaagctactgtaaaatcacaaaaatactatttgtctatccttttttytccaataaggtgtggaagttggctctacagtcagtaaacatttgtaccaaagaaaaaaactgaacttcttcccaaaattggtagtaagccagaagggaggaaagaagtgtaatagaaagaaagagagggaatgggtctatactacccaagctaagcataaatcatgtcagcaaaagtgggagtggctgggcaggcctggcagctgcagtcatcaggaatctccagttgctcagtggccaccaggcagctacccagaggagcttctctggagcacctttggaacagcgccaagaacaggttagtgaaaactctgggagagcatctgacttacactaatgttccctaatttaagataaatcagaagggaactcagatcaatacaatctgatt

SEQ ID NO: 745194 - DNA, 473 bp, Homo sapiens
gaaattggcattgaagttacatcctgataaaaacccggtaggtaaacgtttgtttttaaaaatatttgattatatttttggtacattttgatatttatttaaattgctttaaatgatcaaatgcttaagaataatcatatgtcaaaattrtaattcaacttgtatgctagaaacaaaagcaccaaaatgttctggattatttaggatcccgtgaaggaatgtcagtaccaaaaattcagttccctcttaatttgtagacgattttccaacaattctattaaagacattaaccccaaaacaaacgataatatccgtgaagtagttgaagtagttttcttattaaagtaggttaagatcaagtgttttagaacaggaacaaaaatatttttttaaaactcagagggtatgacttgctaaaaatagaagtaatagctaataatagcatgttttaactttgactgttttcttctgtg

SEQ ID NO: 745195 - DNA, 619 bp, Homo sapiens
tggcagtgactggggattatgctatgtaagatgtcctagtcagggaagtcctccctgaagaaggggcatttagcatccacctggactatgagagcaatgtagctgtgggaatatccagaggagaacaggcagaaaggccctgaggaggggccggacatggcaggaaacagcaaggggcccaagttcctagagctgagctgggggtgaagaagccaggggtggatgaagttagcaggtcttgaaggccagagtcaagattctggattttcatctaaatgtcatgaaagtcatttgaggattttgtgcaggtgagtcaccagcatcttaaaaggatctcttgacgtggttttgagagaagactttaaagaatcatggtaatcacaaggccgatggccaaatatttcytgctctctacctcctgggcacatgctggcttcctgtttatgcttcctgttgtgcagcgtggccatgagactctgaccaatgagttgtgagcacaggtcactgtgtcacttccaggccaggcagctggttgccagaatgcgtgcctctagagctcctttacagccaccaatgatgttcaagctggatgcagctcagaaagcctgggtctttgttt

SEQ ID NO: 745196 - DNA, 628 bp, Homo sapiens
gaaagtgaagggcactaccctgttcctcgacttcaaaaatcgaacgcgggggaaatggtgcacaattcaggcccagttataatagctcctaatacccaatatcttgttttggtccttcgtgaataccaggcatccatcagcgaaccttccatgcctgatttctccgaatattcaaaacaaccctgggaggatgagccccattttggagatgaaggagctgaggcacgaggttttaatgcgggcatgtggtcgccagaatttgaatagcaacttccctaaggaaacgccctatttagactctaggggagaggaggatcccaggaggagtccgccagcagaagctcagagtctggcctgggggyatttagttatgccacgccctttctctactgttccctcccgcgacaggggcctgacagggagtggggcttcgggccagcgtctcggccggacgcagggacttcagaagaggcaaatacaaagctccgcatggcagaggaacagaggggcgcgggggaacgcggtccaaaggtggaccttgtcggcccctgggcactgcaagcctcgaggcgctgcgagcggtgaggctgttgcaagctccgcggcgcgcgcaaactgcgtggaacta

SEQ ID NO: 745197 - DNA, 634 bp, Homo sapiens
gcaaattacaggtatctgtagcatccataattcatccataatttgacaattttcatattactgaaataaagaatcaagtcatgcagatgattacagtatttgcctctcagcacaagagaccttgcttcattacctatgcagtatctcaaatgaaataaatacagcttttcaggtggaggtggaccttaagataaaggaagaaagtattgcagacaacccagcccccagctccatctcctatgcctctaacttctatttccttgtcaatagaagaaagagtttgcacacaacctttagaaacacacgtgctaggtcttcttttgacattgcttcctaaatctagaatcctgaggtaagtttcttaagactctgctaaagttttgaagtttgtcctcccaaatatcatgttgaaattttatcccaaagctggaggtrgagtctaatccgaggtgtttgggtcatggggacaaatccctcctggcaggcttggtaccatccttgttgtaatgaatgagttcttgctctattcattcccacaacagctggctgtaaactacagcctgacacccctctctcttacttcctctcttgccatgggatctctgtctccacacactggatcccctttgtcttc

SEQ ID NO: 745198 - DNA, 634 bp, Homo sapiens
gcaaattacaggtatctgtagcatccataattcatccataatttgacaattttcatattactgaaataaagaatcaagtcatgcagatgattacagtatttgcctctcagcacaagagaccttgcttcattacctatgcagtatctcaaatgaaataaatacagcttttcaggtggaggtggaccttaagataaaggaagaaagtattgcagacaacccagcccccagctccatctcctatgcctctaacttctatttccttgtcaatagaagaaagagtttgcacacaacctttagaaacacacgtgctaggtcttcttttgacattgcttcctaaatctagaatcctgaggtaagtttcttaagactctgctaaagttttgaagtttgtcctcccaaatatcatgttgaaattttatcccaaagctggaggtggagtctaatccgaggtgtttgggtcatggggacaaatccctcctggcrggcttggtaccatccttgttgtaatgaatgagttcttgctctattcattcccacaacagctggctgtaaactacagcctgacacccctctctcttacttcctctcttgccatgggatctctgtctccacacactggatcccctttgtcttc

SEQ ID NO: 745199 - DNA, 648 bp, Homo sapiens
gaaagaagtaatatgcaaatggcaaaggatccaaaaaatgttaaggtcatcacaaagtgaggccttctcatctcagagtacaactctagcatttaatgatgtattctgcacaggtcatggccctctattctagccaatgactrtaccttatattcagctgaataaagactaatgtttcctaaccctgaaaacttgactgggtaagactttttgattgatgagacctcatagccatctccaagctgacacgaaaaatggccacaatgtatctagtatctatgtcatcaagattcaataaagagaaatgtatatcagcttcatgagcaagtcatacaacttacaccttacaagttgaatttgaaaccagcccctacctgcaatgccctttcactataccgtatgctgcacacattcattgcttgcagagttatggataagaaagtagggattctcaaagcttgctgggaagctagctgcctggacccacatcacagagtggggaggcacttctgaatcggaaatgtggctgagaaatttcagcaatatgaatgccagtgtaaaagatttgccaaaatctgaaggccatttcctctcaatctgggactgtcaggcgaataaaaggcaagcagagccattggattgggcctc

SEQ ID NO: 745200 - DNA, 594 bp, Homo sapiens
agtaatatgcaaatggcaaaggatccaaaaaatgttaaggtcatcacaaagtgaggccttctcatctcagagtacaactctagcatttaatgatgtattctgcacaggtcatggccctctattctagccaatgactgtaccttatattcagctgaataaagactaatgtttcctaaccctgaaaacttgactgggtaagactttttgattgatgagacctcatagccatctccaagstgacacgaaaaatggccacaatgtatctagtatctatgtcatcaagattcaataaagagaaatgtatatcagcttcatgagcaagtcatacaacttacaccttacaagttgaatttgaaaccagcccctacctgcaatgccctttcactataccgtatgctgcacacattcattgcttgcagagttatggataagaaagtagggattctcaaagcttgctgggaagctagctgcctggacccacatcacagagtggggaggcacttctgaatcggaaatgtggctgagaaatttcagcaatatgaatgccagtgtaaaagatttgccaaaatctgaaggccatttcctctcaatctg

SEQ ID NO: 745201 - DNA, 602 bp, Homo sapiens
  misc_feature 64: n = A,T,C or G
caattctcaagtgatttagacctcctatagacaaaaaacaggggagtggagggagagatgctgngttaaagagatttaaatagattcttttcttgcaggatttatcagagcctttactggtctaatattcacgggggctcttcatactggattgccattcataataatgatgggtaacatttactgtgagtgtccaacactgttctgagtacccggcttagaatgactcatttggtcctcacaacaaccctgtgagttctgctgtgatcctcattttacagctgtgaatactgagggaagtagctttcccaagatcacatgactagcagggggtggagcaaagacccaaacctgggcccrtgtacttaaccactgtacacccagcctctccatgcctgtattttggacaccagcaaagcagaggcacaaaaatagtttttgaaagaacttgacactttataattcaaaataaaaagccattaaaggagttatgaaacaatgagaattttgtgggcttttgattatttactttatgttaatattgtttgattgtttgtttttgagacagggtcttgctctgtcacccaggctggagtgcagtg

SEQ ID NO: 745202 - DNA, 547 bp, Homo sapiens
acccctgataaactcatcagatctcaagacttattcactatcatgagaatagcacaagaaagactatcccccataattcaattacctccccctgggtccctcccaaagtacatgggaattctgggagatatgattcaagttgagattttggtggggacacagccaaaccatatcacaaggtgatcttccccatcccatgcttcagctgtctcatgcgccaggcactgtcctaaatgcctttcatggatggactcatccattgctcacctgaaccctatgatgctastgctacctgcagccccattttacagatgaagaaactcaagcctattttgacctcccagttctcacaggcagcaagcaacaaaccttatccataaatcaggatggcaaaaattttgcctgcagtttcttataaaactaaacatgcaattgccatttgacccagcaattgtactctttggcatttagagaaatgaaaatgtatgttcacacaaaaacctgtacacaaatgtctacaacatctttatttgtaacagccaaagac

SEQ ID NO: 745203 - DNA, 556 bp, Homo sapiens
attttgtttgagcagaaagggatttgctgtcggtctttaaataaacagttctttgttctctgcctctgtgtgcgactcttctttctctaactctaaagcaaaaggctaggatttattaggatacaactttacgctaaatctgtggaagaataatgcatttgtattcactccatgtttgaattgcagcgaaaaggacaattatagtcagagttgacattttagtgagtgctttgtacctggtattgttagaagcacttacaggtagagtggtctactctttctggtttgctcaggacagtctcagttttaccatgwaagtcctacatcctgggaaactcttaagtagcaggcaaactaggcctcccgttacaagtattatttcatttaattatcaacccctccaattcccaatgaggtaaccttatattcttttgcaactaacagaactgaggcactaagaggttaaacaatttctgaagttttaatacttactgacatttactgcaagtgactgaatgagaactcaaacccagacattacagcttactctgtttct

SEQ ID NO: 745204 - DNA, 621 bp, Homo sapiens
tgggtcctcaacaagggttctaagaggtcactaaaattgcatgcaaaattttgaaagtatgcttgaatatacatttttcagggtcaagtttacatagcctgaaaatgttttaaaaattggtgtaaattttaatgcattctggacgtatagaacctaatacttgtaatcttgctattaatatgttgatacattggagaaaatctacatattcacagagtttacactgaaagctctttgaatccccrctgcttcccttgcttgctaagacagaagcctcagggacaagggcagctgcttccaggatgtgaaatttagctaatctcaaatgtttgactttgaactcatttggaagatatgttttagtatgtagcatttgcttttcagccattttctctggaatgcttttactccacttaggtaaagaaaactgggacttagggcttccacaggaagtagataccactggattggattttagacaaggaagtgttctgtgtctctggtttggcacagcctggtgaaaattgttgaactgcagcatttcagacctggtgccagcctaatggctacatgccaagattactatttggcgacaagcagccagacaagcagctggttatt

SEQ ID NO: 745205 - DNA, 612 bp, Homo sapiens
  misc_feature 501: n = A,T,C or G
tatctgttctattttacacatgttatagtgtaggttaaatttttatcaattacctgagaattagaaatctctggtctttgttacattatcataaattttctctaattagatctcttcttcaagtcgaaattctggatggaaattcttaataccagtagtgttaggaagttgacctatagataaaaatattttctctacttacaaaactatcattatagtaatatagtacatagtaacatggtaatataatgagctgtaattctaggctgcttcactggtttgtaaacttagatcaattatccattattcgccaaagtgttgggttccatatgatgttggctataggkagaaggggagagcgatgcatatgtaagtttgtgtgtaacattaatatataaatctgcttattaaaattcttgaacttcacaagctactattaagaccctttcctgaatttaagcaatacttacccactaccaacatgattttaagaaggcagtntgtatcattactattgtagttcatgctatgctttttgctttggcgatggatgctgtctcaatttagcttcttaccgttggtgtctctgttttcattctgcttaagatgtag

SEQ ID NO: 745206 - DNA, 610 bp, Homo sapiens
aaattccaatgtgctttatatttcccgtggaatttcaccacatgatttcattcagtatatctcaaatatggttatttttcacactacccttaagcccaaggcccagtgtgttttttgacagttgcttccctaaaatcgtttgtttcagctgctgctgtttgaattgtggacgagatctgagaatatgaacagctgtgatatctgcagcttaagcttcctattgtttatcgaaagaaattgtgtttttaaaagtggcatasaaaaagtgttccaaatatgctttatgatacaggtttctgctaattcagggctggtgtccgctgaatgacccaataggtctatctgtatgcctagcagtgaaaataaactgcccttttcttaagagaagtagaaattaaatgaaaactttgtaattttctcttattccacaactcaaggagaaaattatacctgtttctaaaatgatcatattaaagtacttatattgccaatattttatagataagcaggcatctgagctcacttatagtcctttgaagaagcatatcaagtggtacattcacctttcaaactctatttaggtttttgtagcttgttttgttttgttttg

SEQ ID NO: 745207 - DNA, 532 bp, Homo sapiens
gtattttattatttatcttgagacagggtctcactctgttgcccaggctggaatgcaatggtgcaatcttggccccctacaacctccacctctggactcgaagagtcctaccacctcagcttctcgactagctgggactacaggtgcacactaccatgmccggctaagttttgtatttttttgtagagacagggttttgccatgttgcccaagctggtctcgaactcctgggctcaagcaagccccctgccgtggcctcccaaagtgtttggatcacaggcatgagccagcatgcccggccttcaatgtctttttaagccattcttttagccagtgtccctacttctccagggacacctgatgctatagacttcactttctcctttctttagtgtaacaatttaaagtgatttgagcataaattaatgccttaatacaaagaaatgggatctccaattacagacttttaggcaacaatgagtagttttagagagtagagaccttctggctgatcatactatgtaagtaacat

SEQ ID NO: 745208 - DNA, 532 bp, Homo sapiens
gtattttattatttatcttgagacagggtctcactctgttgcccaggctggaatgcaatggtgcaatcttggccccctacaacctccacctctggactcgaagagtcctaccacctcagcttctcgactagctgggactacaggtgcacactaccatgcccggctaagttttgtatttttttgtagagacagggttttgccatgttgcccaagctggtctcgaactcctgggctcaagcaagccccctgccgtggcctcccaaagtgtttggatcacaggcatgagccagcatgcccggccttcaatgtctttttaagccattcttttagccagtgtccctacttctccagggacacctgatgctayagacttcactttctcctttctttagtgtaacaatttaaagtgatttgagcataaattaatgccttaatacaaagaaatgggatctccaattacagacttttaggcaacaatgagtagttttagagagtagagaccttctggctgatcatactatgtaagtaacat

SEQ ID NO: 745209 - DNA, 548 bp, Homo sapiens
gcctttgaaaggtgcctaatgaagtggccagaagtggaacaaaaagagttcagcactcctgtgccttggatgtagttgtgaatactgctctacaggagaactgttaaaaatattttcaaagtgatagtaactccttacttctaagcacatacccgcagcctacaataaataaactgtgtgactgtaataactctggtactgctgtttatgrcatacaaaatacattcacatatattacctgatctgatcctcataatgaatatgtgaggagcagatgtttgacccctattttacaaagaggttgcccaaggtcatacagctattgaaaaataaagcttgggttgaaatggatcctcattctgatgcttagttttctgctactgttattattctgcattgcttcccagcctgaccttgcaataatctctttaagaaatttagagtcatgggagagaactacctgacacaccactctgggtacagttagccaaaggggagaagggagttggctggatgtggaaactcttaagggctacagtgagttacat

SEQ ID NO: 745210 - DNA, 493 bp, Homo sapiens
tctcctccagcaaaaattactcaaattgcttgagaaagaaacacagtatgtttatccctgtttacagatatttagctagtgccccttcagagggtcatgttcctataaacagcatcatgataattatatccactgctgcaaagaacagatgtgtaaattggtggtttcttgggggaaaataataccaagtccattttccagaaatgtacacagtacagtgcagctgtaacattctgtgcagaggtctcattastgtctattactgagtgaggtgatttttaaagaatatggaaattcacggggggcatctagcagggaagtccagagacacctaggaaatgattcagatggtttggtatatttaaaaatttctagtgatactgggcaaatctccacatctaaagaaagtagtaataaatctttgattataaagttttccaggcaagaaatatgtatgagtagagggtaggattaggaaacttctcatgcccca

SEQ ID NO: 745211 - DNA, 493 bp, Homo sapiens
tctcctccagcaaaaattactcaaattgcttgagaaagaaacacagtatgtttatccctgtttacagatatttagctagtgccccttcagagggtcatgttcctataaacagcatcatgataattatatccactgctgcaaagaacagatgtgtaaattggtggtttcttgggggaaaataataccaagtccattttccagaaatgtacacagtacagtgcagctgtaacattctgtgcagaggtctcattactgtctattactgagtgaggtgatttttaaagaatatggaaattcacggggggcatctagcagggargtccagagacacctaggaaatgattcagatggtttggtatatttaaaaatttctagtgatactgggcaaatctccacatctaaagaaagtagtaataaatctttgattataaagttttccaggcaagaaatatgtatgagtagagggtaggattaggaaacttctcatgcccca

SEQ ID NO: 745212 - DNA, 603 bp, Homo sapiens
ttttcccctctagctaccagtttactgaccatgatctgtttgacctttggctaccagcctatatcccttcagcctcaggggttttcatggctattcctggtctaagattttcatctttgagttcagtggcttaccaaagatctaattcagcagactgtctgcctctggctccttaattagctcccgggaggctttccttgaaagtctttctggatcattttgaaaggggcatttcctgtgtctaaagctccctccccatcaggaggtatagcttaaagcttggcttactcaccctagacacagctcaccaaggcccctgattataaaaacatgctatgagaaggatcaaggatgaaacaatttctctcttyatgcctttgtttcctcaaaggatgttacttggccacctattatatttaatacactgaaaggctacagtgatgaatgtattttggttcctgccttagaagatgtacaatggttctttaacttcattgtacataagaatcacctggagagactattaaaaacaagacactcaagctccataactcgaatattatgattccattatctcagtgtagaaggtgtagacggtggcct

SEQ ID NO: 745213 - DNA, 557 bp, Homo sapiens
ttatttgtttgttaaataaaaatgttcagagggttgtaacaagataaatacttctctcagacctaagtgtttccataaagggaactctttaacatatggcatatgaaacagcatgatggaaaatgattttaatcttatcagttttagttacatatttctttgaaatatttgtgttatttcacaacacatctcatttagcttcacccaactcctagacttctccttaaaaacaaaaagaaaatgtgttttcaataatataattgttcaattttggttacaaggaattatgtctgtattaaatgtctaacatgatgcaataaatgtgagaatgttttgtaaaataaaatgctatgcaaatgacttatgatttttttwaaaaaacttttataaaggttcaaactgctgttttaaatgtggaagtaactcttatgtacatattactactttattataacatttcctttatagaaggatacacattttgccaatatgacaaaggctcagaaatctcctctgtgtatatgtagatcaatacttgttcattgttggcaaattta

SEQ ID NO: 745214 - DNA, 593 bp, Homo sapiens
tcttgctctgtgggttcaggtgacagctggttgtttaaagcagcctggcaccttccactctcctttttccttccattctcaccatgtgacatgtctgctgttctccagccttctgctgtgactgtatgcttcctgagacctcatcagaagcacatgccagcatcatgcttcctgggtagcctgcagaaccctgagccaagtaaaccacttttctttataaattatccagtcaggtaatttatagcaatgcaaaacaaactaacacaagttactttccctctctggacattatctttaaaaagatgatgtcaccagagcaccttcagcaatccttcctgcgccataaatatcttctataatcaagcaatctattagagattcactaaaatttgcagcactttcaaattaacttactttccctctttctatgarcaatggcaaataatctgtatggttaagagatatttttcagacgttaagactttttttttcaagagaataagcacctgccaaactattttcaggaacaaattccctcagtcctctgaagttatttggagtttgactgtagctgtcaaaatggatagacttca

SEQ ID NO: 745215 - DNA, 597 bp, Homo sapiens
tagagcaaaatgcacaaggctatctcagaaagttgaaaatagagataattctgcatgtactgagtgtctattatgtgccaggttattctaggtgccttgtgtagaaccttagttcccctaactggtaaagacaacttggtgttcactttatggatcagaaaactgagtttcatgaayagtcaataacctgcctaagattaaaggaccaaaaaatggtcaagtctgagggtagggagaaggggagaatagggagagatttgttaaaggatacaatactgctgctagattggaagaataagctccagcgttgtataccgctgtagggtgactgtagttaacaataagtttcaaatagctaggaggacaatgagtgttcccaacacaaaggaacaataaatcagatgatggataggctaattacattgaaacatcattatgtaccccaggaataagtacaattattatttgtcaatttttttaaagttaaataaagaaaactgaaaaaacatggtgaagtctggatttaagtccaggtttctaatattcaattctgtgctcacgccagccagaggaggttagattagtgtcttttagtgt

SEQ ID NO: 745216 - DNA, 597 bp, Homo sapiens
tagagcaaaatgcacaaggctatctcagaaagttgaaaatagagataattctgcatgtactgagtgtctattatgtgccaggttattctaggtgccttgtgtagaaccttagttcccctaactggtaaagacaacttggtgttcactttatggatcagaaaactgagtttcatgaatagtcaataacctgcctaagattaaaggaccaaaaaatggtcaagtctgagggtagggagaaggggagaatagggagagatttgttaaaggatacaatactgctgctagattggaagaataagctccagcgttgtataccgctgtagggtgactgtagttaacaataagtttcaaatagctaggaggacaatgagtgttcccaacacaaaggaacaataaatcagatgatggataggctaattacaytgaaacatcattatgtaccccaggaataagtacaattattatttgtcaatttttttaaagttaaataaagaaaactgaaaaaacatggtgaagtctggatttaagtccaggtttctaatattcaattctgtgctcacgccagccagaggaggttagattagtgtcttttagtgt

SEQ ID NO: 745217 - DNA, 607 bp, Homo sapiens
ctgactgaagttggtcagggtgaaataataattctacttacccagcatttttgatcagttaacatttcccagggccttttaacatagctggaatcgtacctggcttaggagggggagcttggggaaggcacaggcatgggaagaaaagcaggtgatgcaagctgctttccataccaaaccctagcacccagtcagcccaggacccaccagggctgctacagctttaagtacaccttaattccagccacagtcattaaggaagttttctatttaaccctaaaatcaaagtattcccttcccaaactttaaagggttaaaggctagggaagaaatgatttcattgagggaggaggggtagagaatgctcccctccccctaataaaaattctggcaagagcagacacagtggggaaaagcaagccaggaaacctaatattgccgtcttgacattttataggaaaacctgacgyaacgagatatcacggggcatctgaggtttattttttttcccctaatgtgagcaaagagaagaaatctggttcttaaaatcctcaagatccacgtaaacttaaatccctctagcccccttcttttccacagtgagcac

SEQ ID NO: 745218 - DNA, 577 bp, Homo sapiens
aaaaaaaaaaaaaaaagaatgactgactctgggatgtgtttcctcacatgaaaggttcagatgaccctgggagctcaagatggcacaatctttaatgtatctgcaattatgcagggttgaaagttccaagttttaagtcaaaggcaatgaatttataattttgagatttcaatttgagagcagttaggtttgttctgtgatctygaatcactgatctggccttggatattcagccttcttttcccaaaaggtgatcatttgctttggtggttcaaacacattgcagtggggttatttggctttacaaataatacactacaaaattctagctgggaaggacacacaccaatttaaaagagagtaaacacctgtgaaacgggagcgagaagaagggggaaggggttggagtaacaggaggtcttcagcagaaggtttttatttttagtaaagaaagagatgttacaaatacctgatgtgaatatggaaaatattaacgtttattaaatctggtagaataccacttgcccgtaattcaaatgtttcacgtttttataatacgatgaaaacacacacacat

SEQ ID NO: 745219 - DNA, 577 bp, Homo sapiens
aaaaaaaaaaaaaaaagaatgactgactctgggatgtgtttcctcacatgaaaggttcagatgaccctgggagctcaagatggcacaatctttaatgtatctgcaattatgcagggttgaaagttccaagttttaagtcaaaggcaatgaatttataattttgagatttcaatttgagagcagttaggtttgttctgtgatcttgaatcactgatctggccttggatattcagccttcttttcccaaaaggtgatcatttgctttggtggttcaaacacattgcagtggggttatttggctttacaaataatacactacaaaattctagctgggaaggacacacaccartttaaaagagagtaaacacctgtgaaacgggagcgagaagaagggggaaggggttggagtaacaggaggtcttcagcagaaggtttttatttttagtaaagaaagagatgttacaaatacctgatgtgaatatggaaaatattaacgtttattaaatctggtagaataccacttgcccgtaattcaaatgtttcacgtttttataatacgatgaaaacacacacacat

SEQ ID NO: 745220 - DNA, 610 bp, Homo sapiens
agtgcatggcaagcattccacacaaaaagcatttgcacacacaaagaacttacaatgaaaattatgtcttacaagttaacaagccatgagaatgttctaatcatcaagcattaaaaatacccaaatgcatattcatcccatgcrttcttcgacaagtatttgtgaagtgaccatgctttatcaggcaccgtgctaggtgctagactccagagacacgaagacgaataataactggtcttcgtcaacaagaactcaattgtgagacaaaagccaacttgaggaaaattaagcctatttcaaacatgccttgatctgtgtaacattcataatacataatatcttctttgatctccacagttttctctctacctccagatcagtgcaatctctggttttccacttttttttttctttccaaatgaaaatagagcacaactgtcattttcaatctactaagtcataaaccacaaggcaggctgcaaggaccaaatgctccgttttagaacgagcccagtgcagagaacagagtccacaccacaaggcagggagctgtggtccagatgagtgacatgcccttagtgacctgggtcctggcctccgacccagagac

SEQ ID NO: 745221 - DNA, 360 bp, Homo sapiens
gcaagcaggcttctagtatcatcagagtggggattctcaacctttttgggcaaagcatggtcattttcaattccagtgattttcacagacctctcccatggtggcagttgtacttgaaatcagtcactccacaaatgcgtaatccctgcccatttacagcaataatacaaccgcacagagtctgcagctgccaggttggaaagcttcttaccggagcccccragggcaaggccaagtgagaggagatggaggacgctgtgcagaccccaagggacaaggcgagttatccccgaagcactaggaaccactggacggaagggttctaaccagggaggtgctgaagcaagatctgtcctttag

SEQ ID NO: 745222 - DNA, 645 bp, Homo sapiens
agcccctagaatccaccggggcaatgccaaagaactgacactaaggtatgctggagttggctaaggcctctaacttagtttcatgaaaaaagtgtgggcatttgtaagggcctgtttaatccattccagctccacccccctgcaccaccccccactttgtactgtgagtttctgascagaaataaccaactacagatggtttcactacttcaaagatgttgagaaaccactgacccagagataggagggaactggaactccaaacctcagggcaactactcaccaccagcacttgtggtgaccaaatcaacacacttccagaacctagagctgttctctgtgtatgtgtgtgtgtgtgtgtgtgtgtgtgtgtgtgcacgctttttttttgaccaaccactatcactttccacccagaacagatgcctgtaacactgaacacagctttacataagcatctatggctgtgattctcaatcccggccacataccggaatcacctaggaaagttaaaaaacatggatttccccaggccggcctgtagaaatttgaaattcactggtctccaggggtggtctgagcatcaaaatttttaaaagcagccatggttgagaaccttccatggtaacaccaacaaccaattgc

SEQ ID NO: 745223 - DNA, 645 bp, Homo sapiens
agcccctagaatccaccggggcaatgccaaagaactgacactaaggtatgctggagttggctaaggcctctaacttagtttcatgaaaaaagtgtgggcatttgtaagggcctgtttaatccattccagctccacccccctgcaccaccccccactttgtactgtgagtttctgagcagaaataaccaactacagatggtttcactacttcaaagatgttgagaaaccactgacccagagataggagggaactggaactccaaacctcagggcaactactcaccaccagcacttgtggtgaccaaatcaacacacttccagaacctagagctgttctctgtgtrtgtgtgtgtgtgtgtgtgtgtgtgtgtgtgtgcacgctttttttttgaccaaccactatcactttccacccagaacagatgcctgtaacactgaacacagctttacataagcatctatggctgtgattctcaatcccggccacataccggaatcacctaggaaagttaaaaaacatggatttccccaggccggcctgtagaaatttgaaattcactggtctccaggggtggtctgagcatcaaaatttttaaaagcagccatggttgagaaccttccatggtaacaccaacaaccaattgc

SEQ ID NO: 745224 - DNA, 645 bp, Homo sapiens
agcccctagaatccaccggggcaatgccaaagaactgacactaaggtatgctggagttggctaaggcctctaacttagtttcatgaaaaaagtgtgggcatttgtaagggcctgtttaatccattccagctccacccccctgcaccaccccccactttgtactgtgagtttctgagcagaaataaccaactacagatggtttcactacttcaaagatgttgagaaaccactgacccagagataggagggaactggaactccaaacctcagggcaactactcaccaccagcacttgtggtgaccaaatcaacacacttccagaacctagagctgttctctgtgtatgtgtgtgtgtgtgtgtgtgtgtgtgtgtgygcacgctttttttttgaccaaccactatcactttccacccagaacagatgcctgtaacactgaacacagctttacataagcatctatggctgtgattctcaatcccggccacataccggaatcacctaggaaagttaaaaaacatggatttccccaggccggcctgtagaaatttgaaattcactggtctccaggggtggtctgagcatcaaaatttttaaaagcagccatggttgagaaccttccatggtaacaccaacaaccaattgc

SEQ ID NO: 745225 - DNA, 506 bp, Homo sapiens
tgaagatgcctggaactgggttgggcctctgccctgggccgccgtccacactcagggctggtggtcttcgggccgccctgccaccacacctgtgctcacacatgggcacaggggctcatgaagcagaggggaagccgggcctgtcagcgtggagtctcacccagaatcctaaccctgactcacggggcaacttgcccccgattcacaccttcccagcagaggtgcaactaggccagtgcaaagtggcaccctsgggggagggtcctccctttggaagaaataacctaagaattctcaactctcaggcaaggtgcctgaggaagcgtcagtagggagggagaactatgtcaacaggagatgctgccttgggtccaagctcaagaaacatcccatcatcctagtctacacaatctagagggcaattcacagcaaacgaccacctttcagtctgaagcactgcatccggcatcagccacctccaagctgccctatccctctcactccaa

SEQ ID NO: 745226 - DNA, 525 bp, Homo sapiens
taaggagccactgattgtaaaacatgccattattttatgttgcactaagaaggtggggtcgaggagttgccaataaacttgggacagactattgatggccaagcccatctgaatttaagatgctaaagtatgaaaaaaatacatcttagaatcaatgaaataccatattttgattccattcctcaagataattttagagttataaaaccagtcctcaattttgggtcttcacagagaatctttcccttgctagaccccagaattttaaatgcatccgtcttacactttcacaaatatttgggttttcctttttcactcacaaacagcagggaggtcatgtactttttgtacaacacctgtgcmctatgagaaaatggtaccttttagttattgacaagttaaaatagcactctcagtttttcagtattacagagagcaaatagtttcctctcctgctctgtgcagtagcttttccagaactatggacaaattgatcagaagaagattgattatttcctcatcttt

SEQ ID NO: 745227 - DNA, 555 bp, Homo sapiens
agtaatttggaagtaacatcatttctttttatattcacgttatctttataattttgcaaaatgcatctctttaaatgatgccataagggctttctggctttcccactattccctaagtgacccaagcttgtgattttctgcagtgtatcaacagcagttgataaaaaccaacctacttgatagtccttagaattacctttgccccatatctttcaagtgttagtaatgttgcatgagctcttccacctgtttcacccaaattcaccacgagtgaggcctcagtaactgtgattctgcagcatagttttttttttttttttttttttttkgtctgcctgtgcctctttaatcatgacatcacatcaagactgaaccacaagggtttggcattctaatggcttgcattacatatgaacataattgaaatgcaatgtggtaatagaggcatttacaaagacctgtgaggttcaagggagaaataattatttctcatgaatgggtgaaagagaatgaagcatttcaatattggtaactggtatcacaggggtttgttgt

SEQ ID NO: 745228 - DNA, 584 bp, Homo sapiens
tgcacctgtcatcccagctactcaggaggctgaagcaggagaatcacttgaacccaggaggcagaggttgcagtgagccgagatcatgccattgcactctagcttaggcaataagagcaaaactctgtgtcaaaaaaaaaaaaaaaaaaaaaggaaaagaaaaaagaaaaggaaagaaaagaaaaayaacccatgacaaacatcatcagatatggccttttccatcaggtctgaaagcagcctcaggatgatcctcaatctagtgctccaggttgccccaaaatcagagtgaactgaaaagatgaaatccttttgccataaaacctaacacttaaatattttgctcaattttactgtatatgccattcacagcacctcaactgaatgataagttccttgggaagacccatgttattagatccaaggggctctcacagaacatctcatacaatccaaattttatggctaacgaaactggaacctagaaaggtctagggccttgaataatatcagcactggccagtgaggaagccaggattagaaggccacccaggtgtctaaactcccatcccgatactctattt

SEQ ID NO: 745229 - DNA, 606 bp, Homo sapiens
atgaagcttacattttagttagtggagaaacaggaaataagctagataaataaacatactgcatactggatggtgacaaaggctgaggagaaaaatagaacaaagaaaggacacaaggaatgtacatgtaggttgtgcatgttgggaatgagagttggtagactagggtataacatagtaagtgtatatagggaagcagtagttaaaaagcaagggggaaacactgggggatagtagtcaaaaaggaagatgcaaatgagcacttttggagtggagtagtttttgataacaaggcccatagtgtgactctaagaggagggtctgaggtggctgaagagtatagaagatcactggagaagaggaggtctaggaactaaaagtccagcatttaaacaggtcagtgttgctaatgcagggcttggaatggaaagaaaacytgtttcagctgtcgctgtcattaaaaaatgtgaggggcgaagggaaatgactgggaggctgggggatgaatatggtaattataatattgcttttatctcattacattaaatgaaataatgtataaaaagtgcttaatttttggcttagcgtatattaaacactcaatac

SEQ ID NO: 745230 - DNA, 507 bp, Homo sapiens
tatacattattgtgcagtttggttgtattcgtttaacattgtgaatatcattccattttggggaaaacagatctcccttattctttttatttttggagacggagtctccctctgtcgcccaggctggagtgcagtggccccatctcggctcactgcaagctccgcctcccgggttcacgccattctcttgactcagtctcccaagtagctgggactacaggaccacgcctggctagtgttttttttttttttttctatagttttagtagagacggggtttcaccgtgttatccaagatggtctcaatttcctgacctgttgatccgcctgcctcggcctcccaaagtgctgggattacaggcgtgagccaycgcgcccggcccagatctcccttattctttttaccaattgcacgaaggacgaaaatatttagtgtttcttgttcataccttataaccaaatggtacccatttaagggggaacactactttaaatagaggttttcca

SEQ ID NO: 745231 - DNA, 621 bp, Homo sapiens
cagttgaggaaactaaagcttacctggttaggagtcttatcatgatcacacagttaaggaataatgttagaagctttttaacttgatgtgatctttgtaaaaccagaatatttcttaccacctgggagaatatgctacagcttaccttaaccttacttggaaatcttcattactttacaaaggacacagctattttgggaaccgtgaatcctgaggaraagcagcatagaacactactgtactaccagatttaactttaatacagatgcaatgctatcacttcataggaaaaaccacgcttactctgataatagcttcacttgctatccaaaacaaataccagagtaagtaacacataaaggtagcttatattttattaactaaccacacacttattgattgcatgtaacattgttttaactattatattcttctcatttctttaaaataggagcaacttctattttaaagactgtactaatctttcatataaagacggatgctttgtttacaacagggtcaaagaattgagaggataagggagggcagtagtactgatttgagcgatgaattagcgtaattatgtgcttaagggccttgaatttagaaggagcagatata

SEQ ID NO: 745232 - DNA, 619 bp, Homo sapiens
ccaaatcattattatagacaattaggatatatccaacataaccatgatactcttaacactcctaaaaaattaatgatatttctgccatatcatctaatacccagtccatcttcaagttccctccatggtttcattataattacacatgatttgtaaaagccaagacataatcgaggaccatgcagtgcacttgtttgttatgcctttttaatctcttttaatctaaaagagtcctgcttcttttttagtttttaatgacattgaccattgaagagatcaagctaaacatcctttagaatatcttactttctggacttgtctgaatgctttcctgtggtattatttaacttgttcttttatatccctcatttcctataaattggattacytttagattttctttagctctgaagtcttgattagattttggttaaattcatttggcaagaatacttcaaaggtggtgctgtgtattttatattgcatcacaccagggataaaaatttttccacaattttggaggaaaaaataactctttgctgttcttctggcacctatgatcagcaacagtgcttctcacattgaatcaagtattagtttgcatgtatgttcacttaca

SEQ ID NO: 745233 - DNA, 544 bp, Homo sapiens
taattttattcacatctacacagtctcttttgctatggaacataacaaaattaggggtatggtatctcatcatattaggacagaagactttgggggaccatttcagaattctgtctaccataatgccaaactaaatattattktttatgctttaaaccatatgtttaaaatgcatgcgtgtgcacacacatggacacacacacacctataattgaaagacaccccacatttctgttaaaagttaatggaaatgaagataaaatttttctatctaaattttggggctctagattaagtaactttgctttaggaggtgagaaaatgaaaggaatttgaaacagaggtgcaggagaatgaactagagtggatcaagaatgcaagaatgcagaaggaagatcagtttaatattcttccaacatgagatggtgggaatatgaacagagcacaagccagcaggaatagaaagaaaagattcaaagagaagataatgacagaaattactgatagaggtgaggaatagggcagaatcaaagctaatttctag

SEQ ID NO: 745234 - DNA, 544 bp, Homo sapiens
taattttattcacatctacacagtctcttttgctatggaacataacaaaattaggggtatggtatctcatcatattaggacagaagactttgggggaccatttcagaattctgtctaccataatgccaaactaaatattattttttatgctttaaaccatatgtttaaaatgcatgcgtgtgcacacacatggacacacacacacctataattgaaagacaccccacatttctgttaaaagttaatggaaatgaagataaaatttttctatctaaattttggggctctagattaagtaactttgctttaggaggkgagaaaatgaaaggaatttgaaacagaggtgcaggagaatgaactagagtggatcaagaatgcaagaatgcagaaggaagatcagtttaatattcttccaacatgagatggtgggaatatgaacagagcacaagccagcaggaatagaaagaaaagattcaaagagaagataatgacagaaattactgatagaggtgaggaatagggcagaatcaaagctaatttctag

SEQ ID NO: 745235 - DNA, 618 bp, Homo sapiens
atctgatgtctgttagggataaaatgatgaacataaatgacaggcccctgtgctcatagagtttgaagtttaggttaaaaacaacaacaacaacaacaatattaaataagcccaaaaacaaatgcaaaattaccatcatgatacgtgctatggtaacacacaacagggaartttgactgataaggaaaaacaggaaagtttcccctgatgagtataattgagctgatatctgaaggaagaagagcagagcacaagggaagtgggggttaggtgtgttataggcagagggaacagtattgcaaatgctctgtggcgcgaaggagcctggcaaatgcaagggcctaaaaaaggaggtggatgtagagaggagtgtaagaggggcaaatagtgtgtgatgagtctggaaggtaaggaaagacaagtccatgtagagcctcataggtcttgtttagaagtttttgtttgtatcttaagactaaaggtaagccactgaagtgtttcagagagagatctgacatgattagcctttttttggaaatggttctggctcttatttgactaacgcatgagaggagcataagagtaaaaatgaggaaattagcaagacagctagtgtag

SEQ ID NO: 745236 - DNA, 531 bp, Homo sapiens
tgaattagctgacactcaaagaggccggggcccagagacataatgtgtgtgcgaattcatattttaagagtccatttgcttattatctatctcgttctataattcaatattttcaaaggattgccagcaaggagccctgggctctctcccactgagattatgcttgtggcacagtgggaacaggcacggtgcacccggccctgcygcccatcactgcctcccatctttcattcttccctccgtcctccgtctgcaccactccttgtctcccctcatgctgaaggtcttacctctgtttccttgtattcatacctgggtctcaggtgtccgcgagttgttcggtcccttcgtggatctacagctcgggcagatgcccccaggactgcagcctcggcacccgtggagtctctgtctctgtggaggggcagccgatgactcccagcccagcgttcaaagtcaccctctgtgaagacagggccccacctgagcatggcgctgtcactgcaggacggcccagatcccatccgagac

SEQ ID NO: 745237 - DNA, 618 bp, Homo sapiens
agaagagtctaaacagaggcaggaaaatgtggaggcatgttctggaatgacatggtccctgtcagggaagttcaggcagggaagagggtgtttaaagggtgtctgggaaaagtgagtggaaaataaggctggaaggggaaactggccagagaatggaaagttgggaatgtcattgcgtgggcgaatgtgtgctggtggtaacagaaagtcgtctgtagctttggaacaatggtgygacgtgtccacacgtctttaaaaagcaaacacttaaaggcaaagggaggaaggaatagcagctgaggagggaagctcagaaaggaaatccaagttgaaatatccatgcggtagtagcatgagaaggattctaaggaagtggagtgaggacggggatgcggagccaaaggttagaaacttcttagagggagggcgaccttgggagacagactgggtttgaagtccgggtctgacacttactgcctatggaacaaagacaagtcacaaatctccatttcttctataaaatagacacagtgttgagtattgtttagggaccctgtcatgactagacagggcataagatgttcaggcatcgctgagtattgtatagggaccctgttt

SEQ ID NO: 745238 - DNA, 619 bp, Homo sapiens
ctcccaccataaggggaatttttactgagctagaacagctttggtgaaaatgataacttaaataattccttataacaaccacagatgtgtaaccctttggattatcctcctagtctttcctccttaatgctttcttatttatttattttcatgttggcttgttacttttattacctgaccaygctgtgtggcctgttgtataaagcagttgaaagactctaattttaaaatgaatggctaggagaatgggttctgtgttcccttacttttaagtaaggtctgattattcagactgactgcaccaccaacatccttgtgaatggagctcttttgtataacttttatgatacctcctgccagggaaggtcaggttttagtgtaatgcgataccctatgttaaaaggcccaaattaacaaattcctgaaagcaaagcaaggaatacattttaaaatggtttttttgggcacgaagaggcggtacataagtcagcaaaggataggcgtgtgtgttccaaacctcactgcaaatttaccaccaatgtcttcagaaatgctgggcagtgaaggcaaaacctactgcagatattttataggtatcgacgactctctgcacattcat

SEQ ID NO: 745239 - DNA, 601 bp, Homo sapiens
acgtgtatacgatgtactattctttgtctaagaaaaaggccacgtgttgataaatgtttacgttaataaaacaacaaatggaagaatgagccacaaaataagaataggaatcattatttaaaaggtgtgtaagagaacagtggctatacagctggtatttttgtcttcactttgaaactttgtgaacatttcctaygattatagaatgaactttgatttaaaactcaaatctcaaactacttaaaaaaaaatcaaataacaccaagactagaagtgctgacctgacagctgacccaccacactcggcaggtgtctaccttgaccaaactgtgctgcctacgaggaagaggaatgcactcagaaagagggaaaatacagaaatttcttcagcagagaactagaaactgcaaaaagggaaccaatagagattttaaaactgaaaaataaatacttgaaataaaaactcactccaaagcagctccagcgcagcccgtcgatgatggggaggctgtgcctgtgtggaggggggtgcgtgggagccctctgtgtcttctgctcagattggctatgaaactaaaactattctaaaaataaagtccat

SEQ ID NO: 745240 - DNA, 626 bp, Homo sapiens
ataacttttatccgaaagacaggtaataacaaatgctggcgatgatatagagaaaagggaaccctcatacactgttggtgagaatgtaaattagtacaaccattatggagagcatatggaagttgctcaaaaaactaaaactagagctaccgtgcgatctggcaatcccattgctgagtaggtccccaaaagaaaggaagagagatctgctctccatgttccctgcagcacaatttacagtagccaagactgagaatcaacytaagcatccatcagcagatgaatggataaagacaatgtggtacatgtacacaatggagtactattcagccatcagaaaagaatgggattctgtcattggcaataacatggatggaacgggaggtcattctgttaatgaaatgagccaggcacagaaagacaaatttcacatgttctcactcatttttgggagctaaagactaaaacaattgaactcatggagatggaggtagaaggatggttaccagaggctgggaagcgtagttgagggggagtgtgcatggttaatggatacaaaaaaaaatagagtgaataagatatagtatttgactacaatcaacaataatttattgaacagtttaaaa

SEQ ID NO: 745241 - DNA, 644 bp, Homo sapiens
cagtagtgtcagtgggtgccccagtggaagctgggactaccacagctccccaggcagggatggggctgggtggtggctggacttcccttccacctggcacaagtttggagttagcgtctccaggtatccactaagcaatgtcaggagaagccgaccacaactaacgttttgagttaggcccagagtctcagaagcagcatggtgtccgagcttcagacccacgctgctcattagaccaagagccccaagatctcaagctgaatgaacagagacaacccacagaatccacccagggggacacgtgggactgtctccagggtctgatgaactgcagtgcacccaagcagagagcaccacttagcaatgaaaggcacaaacccaacatgctggccaccaggatggactcaaacgaaacaggctgcrtggaggaagccatgtctgcaaaactgccttgagggagccacgcccacccgacggagccacacccaccgtgagggagccacgcccaccaccaaggagccacgcccactatcagggagccacactcaccccagggagccacgcccccgcgggggagccatgtccgcaaggcctcggtgtacacagccctcctgagggtgatggaactacaggggtggaggaca

SEQ ID NO: 745242 - DNA, 644 bp, Homo sapiens
cagtagtgtcagtgggtgccccagtggaagctgggactaccacagctccccaggcagggatggggctgggtggtggctggacttcccttccacctggcacaagtttggagttagcgtctccaggtatccactaagcaatgtcaggagaagccgaccacaactaacgttttgagttaggcccagagtctcagaagcagcatggtgtccgagcttcagacccacgctgctcattagaccaagagccccaagatctcaagctgaatgaacagagacaacccacagaatccacccagggggacacgtgggactgtctccagggtctgatgaactgcagtgcacccaagcagagagcaccacttagcaatgaaaggcacaaacccaacatgctggccaccaggatggactcaaacgaaacaggctgcgtggaggaagccatgtctgcaaaactgccttgagggagccacrcccacccgacggagccacacccaccgtgagggagccacgcccaccaccaaggagccacgcccactatcagggagccacactcaccccagggagccacgcccccgcgggggagccatgtccgcaaggcctcggtgtacacagccctcctgagggtgatggaactacaggggtggaggaca

SEQ ID NO: 745243 - DNA, 644 bp, Homo sapiens
cagtagtgtcagtgggtgccccagtggaagctgggactaccacagctccccaggcagggatggggctgggtggtggctggacttcccttccacctggcacaagtttggagttagcgtctccaggtatccactaagcaatgtcaggagaagccgaccacaactaacgttttgagttaggcccagagtctcagaagcagcatggtgtccgagcttcagacccacgctgctcattagaccaagagccccaagatctcaagctgaatgaacagagacaacccacagaatccacccagggggacacgtgggactgtctccagggtctgatgaactgcagtgcacccaagcagagagcaccacttagcaatgaaaggcacaaacccaacatgctggccaccaggatggactcaaacgaaacaggctgcgtggaggaagccatgtctgcaaaactgccttgagggagccacgcccacccgacggagccacacccacygtgagggagccacgcccaccaccaaggagccacgcccactatcagggagccacactcaccccagggagccacgcccccgcgggggagccatgtccgcaaggcctcggtgtacacagccctcctgagggtgatggaactacaggggtggaggaca

SEQ ID NO: 745244 - DNA, 657 bp, Homo sapiens
ctcatttttcttggcaatccctttcctatcccacctcccagatagtcattgatctttttttgtcactatacattagtttgcattttctagagttttttttaagtaaataaaagtatacattgagcattccttttaactgccttcttttgttcagtataaatattttcagatttattgatgtgttatcaatagtttttttttttttttttttgagacagagtctcgctctgatgcccaggctggagtacaggggcgtgatcttggctcactgcgagctctgccttccaggttgacgccattctcctgccttagcctcccgagtagctgggactacaagcacccgccaccgcgcccagcttattttttatatttttagtagagayggggtttcaccatgttagccgtgatggtctcaatctcctgactttgtgatccaccctcctcggcctcccaaagtgctgggattacaggcgtgagccaccatgcccagccatcagtagttcatttttatagctgcataattttacattgcatggctatcctacaacttgtctatccattgatctattactattaatttaggttgcttcaaattttgagtatgacagattatttgcatatttgtatatgtgtttttatatggatgtgtatttttta

SEQ ID NO: 745245 - DNA, 637 bp, Homo sapiens
gatgtaacatcagccaccaactgcagtgacccactgtgtatacagaatgactgtcctgtgacaacaagagccatgtgccatccacataaatacggcatacatctcattcctactgtaaaccattgtgaaacatccagaggaggggactgtttccagcagaaatcacttctgacgtcactccccgagtctgacaactgaaactttccagtgagacaacagcagctaacttgggccttttgaagctgctgagatgccagcagcttcaaaagaaaggggtaaaaagaaagaaacactcacacttgacaaggagcaccatctaggggatttataaggcaaaatttttcttcaagcaaatcctagagctgggagcgttcaatagtgaggactacatgctacctctgccttgggccaggmtggcaggaacctagatcggagacatttagccacatctgacccccaagcccagctctgggcatccatctgacaatttggagcgctgctaagtgcagaaaactgcctttctggcactggagaagggattcctgtttagagagttggggagaaaggaaaatgtctctaagcgtacttctgtgattctggcaaagcaaaaacgtcaagatccatgtttccaagtctc

SEQ ID NO: 745246 - DNA, 617 bp, Homo sapiens
aagaaacactcacacttgacaaggagcaccatctaggggatttataaggcaaaatttttcttcaagcaaatcctagagctgggagcgttcaatagtgaggactacatgctacctctgccttgggccaggctggcaggaacctagatcggagacatttagccacatctgacccccaagcccagctctgggcatccatctgacaatttggagcgctgctragtgcagaaaactgcctttctggcactggagaagggattcctgtttagagagttggggagaaaggaaaatgtctctaagcgtacttctgtgattctggcaaagcaaaaacgtcaagatccatgtttccaagtctccctaaatgaagatatttaattagggtgattaagagttccacattcaagcaattgaatttagtgttttctcttgaattctaacctttcagttttaaaaggatgccactgttggcattatctgactttattttgagattctaatccccacctgtacgaggcagggttccttcattgggactgcgggaattatgcctgccggcagtgagcaggaagacgccttgcacagtgagacccccactcctcagccactctcagcagcagggt

SEQ ID NO: 745247 - DNA, 529 bp, Homo sapiens
gttattccgttactaggaatttattcttttttaatttttaatttttgtcggtacttactaggtgcatatatgtatggggtacatgaggtactttgatacaggcatgaaatgcataataatcatagcaaatgaggtatccatcctctcaactgtgttacaaacaacccagttatattattttagttattttaaaatctacaattaaactattattgactatagttacccagttgtgctatcagatactaggtcttaytcatcctttcaaactaatttttgaacctattaaccatcccaacttcctcctaatcccccaataccctccccagcctctggtaaccatccttctactctctctgtccatttacttgtttttattttttattttaattttaattaatattaaaattgtttgttttatttttttggttcccaaaaataagtgagaacttacaatgtttgtctttctgtgtctggcttatttcacttaacataatgatctccagttccatgtatgttgttgcaaaag

SEQ ID NO: 745248 - DNA, 529 bp, Homo sapiens
gttattccgttactaggaatttattcttttttaatttttaatttttgtcggtacttactaggtgcatatatgtatggggtacatgaggtactttgatacaggcatgaaatgcataataatcatagcaaatgaggtatccatcctctcaactgtgttacaaacaacccagttatattattttagttattttaaaatctacaattaaactattattgactatagttacccagttgtgctatcagatactaggtcttattcatcctttcaaactaatttttgwacctattaaccatcccaacttcctcctaatcccccaataccctccccagcctctggtaaccatccttctactctctctgtccatttacttgtttttattttttattttaattttaattaatattaaaattgtttgttttatttttttggttcccaaaaataagtgagaacttacaatgtttgtctttctgtgtctggcttatttcacttaacataatgatctccagttccatgtatgttgttgcaaaag

SEQ ID NO: 745249 - DNA, 530 bp, Homo sapiens
tgattaccccaaccctccaatggggttcagaagtttatataccatcttgaggttacagaaagaataagggcttggatcttggcgaaacaggttatgggagggagagaagaggtagcaaaggtggtcttgttgtgtagatgaaacctcacaggtagcagctctcagagagaatagatggtgaatatttccttyagacctttgaaagtgtcagactctcaattaatcttccctagatccagacaagggaaggcttcgaagaaagcctggcttcatcaatgaagatttttctctacagatgcaaatctccccaacaaaagacagtttttcagctattcttgtatttccagcttttctgaatagccatcttgaaatatgtcaaaggagtatattttggggtgaaacattttggtttccttctccctcttgggtttcccaaaatactgaactatccccattggaatatgttgaaaatgtagcacttagaaaatctctcccaaagtttaaaatcaactgaacatttccaggaaatt

SEQ ID NO: 745250 - DNA, 614 bp, Homo sapiens
atgactctttggggaacattttttgaggagtttttgggggtcatttagaaagtagcaaaaaatattatttccccaagatcacacaccaaactggccctcacaactcagctctcagcgaagagaaaactacctttcttttctcatttgtactataaggatacwctattggatataactcaaagttcagtgatagaaaagagaaattaatgttgttttccttcattccatttcaatataattttcccacaaagataggtaagtcattatacattttcctctttgccctagtgtggggaaaaaaaacactttttttccacactaaattctcctccctcagtttctgccatacacagccatattctgaaccactggtgattttcattgtctaaattaaattattgtaataaatacctgctgtattcctaccattctgtacctaaggctttgggagcaacagatttgcacaatacttattttctaagaacccctccaatgctggttgtcccagagccacttggatttaagataagagttttatttaaagtaacatatctgtgtccctttgtgatgtttctgtgacatggcattcattttccaggaagatctaaaaatct

SEQ ID NO: 745251 - DNA, 603 bp, Homo sapiens
tgcattaaacatgtagcttaatctgggcagaagtgaaatcttaacattattgagccttccagtctatccctccatttattaatgtcttatttgatttctttcattaatgtttcatgattttcacatattttgttaggttaatccctaagtacttcatgattttggtgcaattttaaaggtacttgtattttattttaacttccaattgtttattaccagtaatacaggggtamaattgaattttgtacattgaccttgcatcctgcaaccttgctaaacttccttattcgtattagtagcttttggtagactctttgagatagtctatatcgtcatttgtctgcacatagagacagttttgtgtcttccttcccagtttgtatgtttttcttttctttttactttttgccttgttgcataactagggctcccgtcacaaatccttgccttgtttttcatcttagagggaaaacattatccttccactattcagtttgacgttagtggtagatcttccttagatgtcctttgtcagtttgcggaagtcccctttaattcttagttgagttacacacggttttttgtattgttttgtttttaatc

SEQ ID NO: 745252 - DNA, 585 bp, Homo sapiens
ctaataagcttcttcgtaatttcatgaactgcaaatctacagagaatgaattcttctcagcttttgtttgcttgttaaaaatctttattccacttagctttcaataattgtttctgtttggtataaagttctttgaatcagaagtttaaatgtgattcatctagttttcaatttcagctttttcttgtttttgctatttattagtcttatggtttgctgaacttcttggatttatagtttcataatgtccatttttatttcctttgttcattacgtcttcaaatattctatcttctacgtattctctccttgcccttttcagacttcagttatacataagttaaaccatttgatattctctcctggctctggaaaaaggcgttccatgttttcagttgctttctcrttttgttacaggtctattgatctaatttcactaattcttggctgtatcacatctatgcaggagttcatcaaagtaatttttcattatgccagctttcattttttctaatattttaatttgactttcttatatttttatatcgctgatgaaattctccttctgttcattcacgttgctct

SEQ ID NO: 745253 - DNA, 558 bp, Homo sapiens
cttgaaagaataattcctctgccaaggccagccccgaatacacacaaaatgcatttttatgacaagggcaggtacatttttcaaacgacggggagggggagactcaccataactatgttctatttggcactacccaccataggggcttctctgacttaaagcatagcagacattttctaaggaacttgcatttttaatgactatttctttgtttttgcttttaaataaattaaaacttttaaaataatcaatcctatacttacaatgaagcaactgatacaaagagaccctttgttggggaaatactcaactgaaggttcttgtctgagatttaccttttcccatttctattgagctacctatcaaatgggycagcctttgtcaactagaatcagaatttctggtccatccaccagaacttgtatttgcagatctgacctggggcttctctcgtatttcagtggcccctcaccctctgtaggatataatctaatcccagttcttcctcccaaatatctcagttttcaggaattctctactacctaagaccgctcccag

SEQ ID NO: 745254 - DNA, 591 bp, Homo sapiens
acacaacatgcgcccaaaatatatgcatgctgcatgcatactacatgaaacatgcacactacgtgtatacatcatgcattcatgctacatgcatgctacatgtgcacatgctttcaacatacatgctacatgagcaccacattcacactacatccgtacaagtgtgcagcatgcacacaacatacatgctatatgcgtaaagcatgattgctgcatgcatacaacatgcaactacatgtgcataacataaataatgcatgcacacaacatgcgtacagagagcatgcatactacatgaacacaacatgcaaaacatgcgcacaacatgcctaatgcatgcatgccacatgcgcacaacatgcatgctacacrtgtacaacatatgtgcaacattcatgctacatgcgcacaacatacattcaacatgcacacaacatgcgcacaacttgtatgcatgaatattgcatgcaggctacatgtatactacacacgatacatgtgtgttaccaggatacatcatgcatgcaactatatgaatgctgcatgcatatagcatccatagtacatgcatgcaaaatgtgtcaaacataa

SEQ ID NO: 745255 - DNA, 608 bp, Homo sapiens
tatgaagatctgtgctttttttttttttttttgagatggagtctccctctgccacccaggctggagtgcagtggtgcaatctcagctcactgcaacctccgccttccagggtcaagcgattctcttgcctcagcctcctgagtagctgggttataggagctcgccaccacaccaaactaatttttgtatttttagtagagacggggtttcaccatgttggccaggctggtcttgaactcctgacctcaggtgatccacccacctcagcctcccaaaggattacaggcatgagctaccgcgcccagctgatctgtgcatttttaagagcaatatttatattcaagattgaattttcattttacccttataattagtgaatggatctarcaatgcaaattctcaaggcaactgtagggaagacaaagaaatttcagtcattaatcataatgtgaaactagacatagcacagaaaaagaattgaaataaaactcactgaaccaaaaataatccatattggaaaataaagatttgcctagtcagatgtgagatggaagtgatatttgtttttctgagctgtatcctgacctaaaatagaaagtagtactgaa

SEQ ID NO: 745256 - DNA, 658 bp, Homo sapiens
tgtggtggctatgagaagagactctttctacttgaaaaaggggaagggaaaagtgaaggggactttgtcttgttccttaggtactagctcagccacatgagagtagagcaccaagtgggctcttgggggctatggttccaggccttggttcttagacagcatttctggacctgccctgagttagaggtaagcccactgccttgaagggtgtcataggcctggaagcattcatcacaagctaactaaagagatcttgggccttacacgtacactgatggtagcctggctgtactccccatgggcctgtggtgatggtgaccaaggggagaggctcctctgcctgtggaaaggggagggaagagtgggaaggactgcgtctcaygatttgagtgccagctcagcctcagtaaaagaaaacaccaggtaggcatctaagggtttttaactccagtccctggctcctggacagcacttctggagcctcctgggccctagggaaacttaatgtcatgaaggggagaacacaaccctggctggcttcatcacctgctgattgtagagccctggggccttgagtgaacattggcagtgtccaagtgatagttacagtgggcactgggaagacccagtgctgtgctggctttaggtctgacccagc

SEQ ID NO: 745257 - DNA, 658 bp, Homo sapiens
tgtggtggctatgagaagagactctttctacttgaaaaaggggaagggaaaagtgaaggggactttgtcttgttccttaggtactagctcagccacatgagagtagagcaccaagtgggctcttgggggctatggttccaggccttggttcttagacagcatttctggacctgccctgagttagaggtaagcccactgccttgaagggtgtcataggcctggaagcattcatcacaagctaactaaagagatcttgggccttacacgtacactgatggtagcctggctgtactccccatgggcctgtggtgatggtgaccaaggggagaggctcctctgcctgtggaaaggggagggaagagtgggaaggactgcgtctcacgatttgagtgycagctcagcctcagtaaaagaaaacaccaggtaggcatctaagggtttttaactccagtccctggctcctggacagcacttctggagcctcctgggccctagggaaacttaatgtcatgaaggggagaacacaaccctggctggcttcatcacctgctgattgtagagccctggggccttgagtgaacattggcagtgtccaagtgatagttacagtgggcactgggaagacccagtgctgtgctggctttaggtctgacccagc

SEQ ID NO: 745258 - DNA, 658 bp, Homo sapiens
tgtggtggctatgagaagagactctttctacttgaaaaaggggaagggaaaagtgaaggggactttgtcttgttccttaggtactagctcagccacatgagagtagagcaccaagtgggctcttgggggctatggttccaggccttggttcttagacagcatttctggacctgccctgagttagaggtaagcccactgccttgaagggtgtcataggcctggaagcattcatcacaagctaactaaagagatcttgggccttacacgtacactgatggtagcctggctgtactccccatgggcctgtggtgatggtgaccaaggggagaggctcctctgcctgtggaaaggggagggaagagtgggaaggactgcgtctcacgatttgagtgccagctcagyctcagtaaaagaaaacaccaggtaggcatctaagggtttttaactccagtccctggctcctggacagcacttctggagcctcctgggccctagggaaacttaatgtcatgaaggggagaacacaaccctggctggcttcatcacctgctgattgtagagccctggggccttgagtgaacattggcagtgtccaagtgatagttacagtgggcactgggaagacccagtgctgtgctggctttaggtctgacccagc

SEQ ID NO: 745259 - DNA, 365 bp, Homo sapiens
aatggaatattattaggcaagaaaaaggaatgaagtactggtacatgctctaagggtgaaccttgaaaacactctgtgaagtcaaagaagccagtcacagaggaccacatattgtataattccatttatgtgagctatccagagtagccaaattstcagagacacaaagaagattattgtttgttaggggatgttggggttaggcatgaatgaggagtgatggtttatggatttagaggtcacatgctagggtgattgctaaaagtgattttggtaatggttgcacaattctattaatatactaaaagccactgaattgcacactttacataggtgaattatatatgaattatttctcaataaag

SEQ ID NO: 745260 - DNA, 588 bp, Homo sapiens
aaggacagggataacaaatatttcccacataagccacattctccatcatgtgtcacggcagatgctgttatttattttattttattttatttattttatttttgagacatagtttcactctgtcacttaggctgaagtacagtcgtgcaattttggctcactgcaacctccgcctcctgggttcragcaattctcgtgcctcaacctctcgagtagctgggattacaggcacacgccaccatgcccagctaatttttgtatttttagtagagatggggtttcgccacgttgggtcccaggctggtttcgaactcctgacctcaaatgatccacccaccttggccccccaaagggcggggattacaggcgttagccatcgcacttggcctattttcttattgagatcattcataacctctgaatgcttcccaaagtgctccaggcatccacccccaattgttcagagctagcaatcaaaataaacctttatgccagttttgcttgaggttattagtactccatcgctaaccagggcaggaagccacagttctaaggaatgctgtaacaaaaggtatgcatcactctagc

SEQ ID NO: 745261 - DNA, 634 bp, Homo sapiens
acataaatggaaacatacaatatgtggtctttgtgactggcttctttcatttagcataatgttttcaagtttcatccatattttagcatgtatcaatactttatccctttttatggctgaataatattctgctgtatggatatactacattacttttatccactcatcagttgatggacattggggaggtttctactttttaactgttatgaacaatgctggagccaggtgcggtggctcacacttataatcccagcacttygggaggccgagacaggcagatcacctgaggtcaggagttcgagaccagcctagacaacatagggaaaccccatctctactaaaaatacaaaaattagcgaggcatggtggtgtgcacctgtaatcccagctactcgggaggctaaggcaggagaatcacttgaatcggggaggcagaggctgcaatgacctgaaattgcaccactgcactccagcttgggcagcagagcaagacctgtctcaaacaaaacaaaacaaaacaaaacaaacaaacaaacaaaaaacaatgctggtataaacacttatgtacaagtttgtgtgtagacatatgttttcaattcttttggagatggaatttctgggtcatatagtc

SEQ ID NO: 745262 - DNA, 574 bp, Homo sapiens
acatttatatttttgtaaacctcttttgaaagagtaatatattagttgctaaaagtagtattttgttagatgtgtggcctacctacaggaaagtgcacagattattagtatgtagattaatgaatgtcccaaggaaatacacacccaaatatctatcacagataaaacttatgagataccaccrctactctagaaacccccttccaactcatttatattcatttcctcctgcaatcccactgaacataatcacctgaacatgagcaagactgtaacttctctgcccaccatctccctcctccactgctactttcttgacaatattggggatgtcggaagacaattgcttgatctagtgatcttttcttttgtttctggttcttcaagattagaatatgcctagacaactcaccgtgttttcaagacctgactgatttcttttcaatttcagagtctctttgtctatgtcagacttacttatacacagatcgggcatctgccctcagctttggaaggtgcaacaactcccgccacacctactcatctatgaacgactcagttctctgtggaattc

SEQ ID NO: 745263 - DNA, 545 bp, Homo sapiens
ttcctatttgaatgccttttatatctttctcttgcctgattgcactggttagggcttccagtactaggaagtggagagaggcatctttgtgccagttttcaaagggaacacttccagctttttcccatttattatgatgttggttgtgggtttgtcatagatagctcttactattttgaggtatgttccttcaataactaatttattgagagtttctaatatgaagaggtgttgacttttattgaaaggattttctgcatctattgagaagatkatgtggtttttgtttttagttctacttatgcgttggatcatgtttattgatttgcatatgttgaaacaacttggcatcccagggataaagcctacttgattatgatgaatagtgtgtttgatgtgttgttagattcagttcactagtattttgttgaggatttttgcatcaacgttcatcaaggatattagcttcaagttgttttttgttgttgttttattgtgtctctctgccagattttgatttcagaatgatgctggctcatggaatg

SEQ ID NO: 745264 - DNA, 545 bp, Homo sapiens
ttcctatttgaatgccttttatatctttctcttgcctgattgcactggttagggcttccagtactaggaagtggagagaggcatctttgtgccagttttcaaagggaacacttccagctttttcccatttattatgatgttggttgtgggtttgtcatagatagctcttactattttgaggtatgttccttcaataactaatttattgagagtttctaatatgaagaggtgttgacttttattgaaaggattttctgcatctattgagaagattatgtggtttttgtttttagttctacttatgcgttggatcatgtttattsatttgcatatgttgaaacaacttggcatcccagggataaagcctacttgattatgatgaatagtgtgtttgatgtgttgttagattcagttcactagtattttgttgaggatttttgcatcaacgttcatcaaggatattagcttcaagttgttttttgttgttgttttattgtgtctctctgccagattttgatttcagaatgatgctggctcatggaatg

SEQ ID NO: 745265 - DNA, 632 bp, Homo sapiens
ggatctttctaactttttgatgtggatatttagtaccattaattttccttttaacactgccttagctgtgttccagagattctggtatgttgtatcttttttctcatttgtttcaaagaatttcttgatttctgccttcattttattatttacccaaaagttattcaggagctggttatttactttccatgtaattatataattttgaataaactatttagttttaatttctaattttactgctgtggtttgagagagtggttcttaagatttcagttcttttgcatttgctaaagagtgttttgcatctaattatgtggtcaattttagaatatgtgccacgtagtgatgagaagaatgtttgttgtttttgtttagaaagttctatagatgtctgttaggtccatttgatccagtgctgagtaaaggtgctgaatatctttgttatttttctgcctcaatgatctgtctcatattgtcactggggygttgaaatctctcactattattgtgtgagagtgtaagtctctttaaaagtctctaagacctttattaatttgggtgctactgtgttgggtgcatgtatatcttggataattcagtcttctcaatgaattgaactgtttgtcatt

SEQ ID NO: 745266 - DNA, 455 bp, Homo sapiens
aatatcaacgtgtgacattgaattaatagcaaagaacctagcaactaataaaaaagccctggaccagatgtattcagagccaaattttacaagatatacagagaagaacggataccaatcctttgaaactcttttagaaaataaaggaagaggggctcctctctaagtcattctatgaagctggcatcagtctgataccaaaatcagactgattttgtgtttattggcagaaacacaataaaaamtgtgaatctaagaccaataacattaataaatatagatgcaaaaatcctcatcaagacattaccaaaccaaattcagcaacacatcaaaatttaatttaccacaatggagtaggctttctttctttgatataaggttggttgaacatatgcaaatgaataaatgtgattcaccacataaacagaattaaatcaaaaccatatgatcatctc

SEQ ID NO: 745267 - DNA, 606 bp, Homo sapiens
gagcatgaagaaggtataaagtgtccttctcagtgatagaattatgtttgtaagaaatgtcaatgaaatctatgaaaactccatgagaattaataaataaattaagcaaggtatatgaatgtaagatcaatacacaataattagtgtgcttctatataccagcaatgaacgattacaaaatctactrtgaaagtcccatagttataaaaattataattttcaaaatttaggaataaatataaatatatgcaagttcactagatagggtcacaagatatcattaaaagaaaatttttaaaggcaaatgaaaagagctataacatgtttgaagtttagggcgactgatcatttttatattaggaaatatccttaaattgatatattagatgcaatgcaattttaatcatcatccaagtagggtttcatttatggtgtgtgtgtgtgtgtgtgtattgcaaactgacaaagaaaattaaaaataaagttgaagatgagaacaaggttagaggacttatatttgccaatctctaaaacttataatattgctacagtaattaaaattatatagtattggtagaaatatatctaaatggacccatggaaaag

SEQ ID NO: 745268 - DNA, 629 bp, Homo sapiens
attttgttattataattacttttcattgaaatttaaacagaagcaaagatattttctctttgctactattttccaggatacacagatccactctttaaaggttatctgaaaatcactgggtaagatatttagatcaggccagagcagcattattaataactgccrgaatgaacaaaacttaaatgttagatggttgaactttgggccatataactttttttggtcagcttatctctaggacaaaagaataaaatctccctgccaaaagtttattgatagaataaaggaaaagcaactgtcgttgatccttcatttatctgctcagaggctctcgcttgagtccaacacattctcctgagccacattattatcttattttcatgcctgaatggcagacttcagttgagagccatagggacaattcatgcctaggctagtcagaggcatgggcaaacacataggaggatcttattcctaaagaagccaagaaaagctatggcctttcccaagccaaaagtatcggtctagtgagaagctctgagcaagcctcagtaacaatcactgaagtgaatggaaaaacaaaagtggaaaattaagtaaatgtaaatacactttataaaatagtcctc

SEQ ID NO: 745269 - DNA, 612 bp, Homo sapiens
atgtcccagggtctccaaggaggagtaaaggcctgaatctgcccacctgcaggtttcacatcttactcaaatacagcacagaaattaagctgcagaagaggaagagatgaccagatccacaatttagcatcctagtagattttatgggactggaagtgggaagaaacttctatttcctcaacatttgagcaagaacatttctcgatccagagaaacccggtaggttcccggacrttggagacagcactaggaggtgggtgtcagtgtggaggctctgagactgcaaggggacagatggaggatggagagaattatgcaaatcacagtcatcctgttcctgaactgagaaatacattaccatcctgagttctccagtaagttccgcaaaatcgtctgtggcactgagcagttataatagcccatgccaatatacgatctccagatctggtttttgcttgaaatggcatgcagagttgcaaggatttcattttcacctaattgtgggaaaaagagaaatgttacagacagatgtctcagaaaagagctctaattacagtttaaatccctcattttgtttgagtatttatgacagaataactatatggaaaatgt

SEQ ID NO: 745270 - DNA, 491 bp, Homo sapiens
gagtgacagagtgagacccccatctcaaacaaaaacaaaagcaaaaaaacacacccttatgcagtttctaccagcattctcatgaaggcactttggttattaagaagtataaatgtacttggatgcaggtgggaccctttctcgggtcattcatataatcacaaaataataatagcatttgacatttattgaacattattccaccaggaattgtaccatatgcttttcgcacagcctagggtactgaggattgaagacggtcacttggctgaggtcacacgactttaaattaaaggattactaatccaatctcacacttyaactcactggactaagttgagagctgctacatggacagctcttatactgaagggtccttttttgtttttttgagagggagtcttgctctgtcacccaggctggagtgcagtggctcgatcttggctcactgcaacctccacctcccaggttcaagcgattcttctgcctca

SEQ ID NO: 745271 - DNA, 636 bp, Homo sapiens
ctcacacttacaaccccagcatgttggcagaccaaaatgagagaatcatttaagcccagaagcttgagaccagcctgggcaacatattgagacccccatgtctacaaaaaaatttaaaaaattagccaggtgctgtggtcctccttgtggtctaagctacttggaaggctgaggtgacaggactgcctgagccggagaggtcgaggttgcacagagctgtgatcattccactgtagtcgagcctgggtgacatagcaagatactgtctcaaataaaataaataaaataaaataaaaataaaatgttttaaaataaaaatgataataatgaacagatgttatactacagttgtctaaacccctagaatgtgcaacaccaagactgaatcctaacgtaaacaatcttcactttgggtgaggccaggcgcagtggctcacctataatcccagcattatgggaggccaaggtgggtagatcatctgaggtcaggagttcaagaccagcctggctaacatggtgaaamccccgtctctactaaagatacaaaaattagccaggcgtggtagttcatgcctgtagtctcgcctactcaggaagctgaggcaggagaatcgcttgaacccaggaggcggaggt

SEQ ID NO: 745272 - DNA, 689 bp, Homo sapiens
gcatgttggcagaccaaaatgagagaatcatttaagcccagaagcttgagaccagcctgggcaacatattgagacccccatgtctacaaaaaaatttaaaaaattagccaggtgctgtggtcctccttgtggtctaagctacttggaaggctgaggtgacaggactgcctgagccggagaggtcgaggttgcacagagctgtgatcattccactgtagtcgagcctgggtgacatagcaagatactgtctcaaataaaataaataaaataaaataaaaataaaatgttttaaaataaaaatgataataatgaacagatgttatactacagttgtctaaacccctagaatgtgcaacaccaagactgaatcctaacgtaaacaatcttcactttgggtgaggccaggcgcagtggctcacctataatcccagcattatgggaggccaaggtgggtagatcatctgaggtcaggagttcaagaccagcctggctaacatggtgaaaaccccgtctctactaaagatacaaaaattagccaggcgtgrtagttcatgcctgtagtctcgcctactcaggaagctgaggcaggagaatcgcttgaacccaggaggcggaggttgcagtgatctgagatcgtgccactgtactccagcctgggtgagatagtgagactccgtctcaaaaaaaaa

SEQ ID NO: 745273 - DNA, 516 bp, Homo sapiens
ttaatacagaagcacatgtttaacctttataaataaataacatatatggtccatgtgcaagcactacaactatggggtgagtgataaaaaatacatagagcctcaagttcagaacaatttcactggggttttagaaggtcagctaactggtccacccaagtccatttattctcttcttcaaaaattgtttwctagtttcctacagtgtgccaggtaatgttgagagagagggcagtcaggcaagaggagagtaaaatgtcagctttctttctgataaaagctcactggaaaatgtgtctttagatcagggccagcatggtttgccaatacttcgcccctgcagtaaggagacccagttacaggcagagtgggacattacatccccttctctacctctgtcctccccaaccaggggcagggcctgcacccaaagcttattgcatggccaagagcaggtggaaagttaccctctttgccggcaggcagaaggatcctatcggagtggggagaggaagg

SEQ ID NO: 745274 - DNA, 692 bp, Homo sapiens
cagggtattaggacatttatacataagtcttttaggatattgaaaccttcttaacccaaaggtgtgaatgcagggccagatgtggtggctcatgcctgtaatcccagcacttcgggaggccaaggcaggaagatcttcgagcccgggagttcaagaccagcctgggcaacacaaccagaccctgtttctacaaaaaataaaaaaataaaaaaatagctaggcatggtggcacatgcctgtaatmccagctactcaggagatggaggcaagaggattgcttgatcctgggaagttgaggctgcaagtgagctgtgatggagccactgcactgtagcctggacaacagagacagaccttgtcttgaaaaaaaagagttgtgaatgctagagtgcaggaaatttctggattaaatattagttttgttaccaatttggctgctgagataaagacaacactggcttagaaacacaaaagtctgtttctccctcatgtcacagtctaggcatacaggctgatgagggagctgcacagtcttctggcaggttgtcctgtcatccttacattgtggcttccatttcaaattcttgtcacacttcagctggcaagaaggggacaaaagaaagtgggaagcacaccctttccttttaaaggtacaactcagaagttttgcatattacttccattcacattcc

SEQ ID NO: 745275 - DNA, 626 bp, Homo sapiens
acatgtagaacataaagagaggagtctccctctactcctgccatttccttcattttatcgtcttattttctctgttcctcagttgattttcctctgctttctgttgagttactttctgcttgccttggggtctctcttcccagacagtgtcttgtgggcctatttcccatgctatgcctctctgtgtttgaaatttcagaagcaggtgtggagtgcaggcatctgaaacacatcatctgccaactagctacagtggtgaatactgattgaaggccagggatgaagctgggaagggrcttgaagccagggctgaactgactcatgctgctaagctgtgtaatagaagtcaaagagccaagaaaaggagccggatataaacttttcatcatatagaggttttaattctgggaacaagagtgatttatttttaaataccggagtcatcatttgctagtgatgttaaaacttcagagaaagttttatttctgctgttttcatctagggctgataaaacctgtttttaatgaatacatacacccaacaagctcgggtcttcctgaggttcacacctttgtgtaataatctccttttgattgtggacaggaggtgtaacttgcttctaatac

SEQ ID NO: 745276 - DNA, 584 bp, Homo sapiens
cagggcactaggagttctgaaacaaatttggtaggtgcctactctggtggaacccaggagcaatgcccacctgcgacccctctgacatttcttacttacctctggagcgccctcttgtgcccagatacttatggtactgtcccatatcakagatacatgctttcgtgtcagatgacaattgcaagcattgccattaaaggatgcaagcattgtttatacaggaaccatgtgccaaaacaaaaaaactctcaagaggttacagaccagtgccatgcttccctccaatgtgcttacactaagctttaaattgtaattatgtgtgtatatatgcattttttactacagtgactgtcagtatcttgggaagagccgttattgtagctccttcagtctctaaagtgactgactaccccctcctcttcttcctttgttacaaacctcatgatgtggcatatattgcaaaaaatcacatctcataaatgtttccaatgaactcttggcccaaaggaaaacccctctttatgtcacaagaataaaaaaggaaagactataaatgtgatctctagaaaggcattcctcttcac

SEQ ID NO: 745277 - DNA, 603 bp, Homo sapiens
gttgatgtggcatggctcccagcactaagaaagcaagagtgcatggtgaagcttggaaatagaaagtgatgtcctcataaaaacatggctctaggctgctgtgccactagaaattcttctgtcagtttagaatatttcgctttaagggatttcgactttcaaatgtatctttggatgcaaaatagactgcacaagaggagatagcatagaagaagggaaagaagcgtttgctcccaattatgatcagcttacgtgaaactgaaaatttcttttcttccagatrgaatatttgattagaaagggggcaagtagattagatgagctaccttgctgacatcaagtgatcctctggcctccataactagaaaatgttgctgataactgatagagctaaacaatgttaaaagcttcagcactactggttatcaggggaacctttcagcctaattggaaagctcaaagcttcaggcgtctgaaattttttggtttggggctcttctacagcattccaatgcagtatatctaatcaataatgtgatgctatgcacaataccatcacgaggcttattaactcccctgagttttgtatttgacttgttaaac

SEQ ID NO: 745278 - DNA, 603 bp, Homo sapiens
gttgatgtggcatggctcccagcactaagaaagcaagagtgcatggtgaagcttggaaatagaaagtgatgtcctcataaaaacatggctctaggctgctgtgccactagaaattcttctgtcagtttagaatatttcgctttaagggatttcgactttcaaatgtatctttggatgcaaaatagactgcacaagaggagatagcatagaagaagggaaagaagcgtttgctcccaattatgatcagcttacgtgaaactgaaaatttcttttcttccagatggaatatttgattagaaagggggcaagtagattagatgagctaccttgctgacatcaagtgatcctctggcctccataactagaaaatgttgctgataactgatagagctaaacaatrttaaaagcttcagcactactggttatcaggggaacctttcagcctaattggaaagctcaaagcttcaggcgtctgaaattttttggtttggggctcttctacagcattccaatgcagtatatctaatcaataatgtgatgctatgcacaataccatcacgaggcttattaactcccctgagttttgtatttgacttgttaaac

SEQ ID NO: 745279 - DNA, 415 bp, Homo sapiens
ggatatcccatttgccctggcatgattgttacttattgtgtgcctatttcaaaatatcttatgtactccataaatacatacacctactatgtacccacaaaaattaaaaaatttttaaaactctaaaaaaaaaccacacaagtattcagtcttagtacaacaaaagacttaagttaataatttttactttgattacatgttgaaattatatttttatatattgggctaaataaaatatattttaattactacaacraaaggcttaaattaataatttttactttgattacatgttcaaatgatttttatatattgggctaaataaaaaaatatattttaattagcttctcctatctccttttcctttctttaatgtggctatgagaaaattgaatatctttggcttgaatttgta

SEQ ID NO: 745280 - DNA, 600 bp, Homo sapiens
ctttactaaaatattaaacactggttatctctattctttcatttgtgccagatatttgagctaagccagaagagaattttttatggtgatggttgtttatattatcattactatcgttattagaatgactgtaccatctctttcctcaactcattcataatctaggagaaaggttaaaaaaaaaaarggaataaacaccaagtacgtggaactgcactatttagtgtttttgtaagtcttccaggcattgtgtagtaagcgtgtagaaataattgtagtttctcctccagttattttcccagttggaggagaaagattccaataactgtaaataaatacggctgagccatatttttaagaaataaaaacgcatacgcttacacacacacatatatattacgtatatatacactccacccgccccatttaccaaaatgaagagcagtacagcttagtagctaagagcacgggctctggagtttactttcttcctgtcctgcagcgattgtggggaagtcaggtcacctgtctgcctcgccgtttcctcatctgtcaaatggagttctgggtccctataaagattcagtgacgcgatatgtg

SEQ ID NO: 745281 - DNA, 608 bp, Homo sapiens
cctctacacaaataaactagaaaatcaagaagaaatggagacattcctggacacacacgccctcccaagactaaaccagaaagaagttgaatctctgaacagagcaataacagcctctgaaattaaagcaataattaatagcttaccaaccaaaaaaagtccaggatcagatggattcacagccgaattctagcaaagggacaaagaggagctgttaccattccttctaaaactactccaatcaataaaaaaagaaggaatcctccctaactcattttatgaggtcagcatcatcctgataccaaagcctggcagagacacgacaaaaaaagagaattttagaccaatatmcctgatgaacatcaatgcaaaaatcctcaataaaatactggcaaaccgaatccagcagcacaccgaaaagcttatccaccaagatcaagttggctttatccctgggatgcaaagctggttcaacatatgcaaatcaataaacgtaatccatcacgtaaacagaaccaacgacaaaaaccacatgattatctcaacagatgcagaaaaggcctttgacaaaattcaacagcccttcatactaaaaactctcaataaac

SEQ ID NO: 745282 - DNA, 608 bp, Homo sapiens
cctctacacaaataaactagaaaatcaagaagaaatggagacattcctggacacacacgccctcccaagactaaaccagaaagaagttgaatctctgaacagagcaataacagcctctgaaattaaagcaataattaatagcttaccaaccaaaaaaagtccaggatcagatggattcacagccgaattctagcaaagggacaaagaggagctgttaccattccttctaaaactactccaatcaataaaaaaagaaggaatcctccctaactcattttatgaggtcagcatcatcctgataccaaagcctggcagagacacgacaaaaaaagagaattttagaccaatatacctgatgaacatcaatgcaaaaatcctcaataaaatactggcaaaccgaatccagcagcacaccraaaagcttatccaccaagatcaagttggctttatccctgggatgcaaagctggttcaacatatgcaaatcaataaacgtaatccatcacgtaaacagaaccaacgacaaaaaccacatgattatctcaacagatgcagaaaaggcctttgacaaaattcaacagcccttcatactaaaaactctcaataaac

SEQ ID NO: 745283 - DNA, 573 bp, Homo sapiens
ttccatgcatgcatgtataccataggcacctacaaagactgcttccctggggtgagctccggcaccccagcctgagcttcccctcaccctggcagctcctggtccctcaccccacacccatggccacgtcttactcctctcacacctatcctcagccctgcacagccaggccttgcccctctcacccctgtcttcagccctgcacagccaggcctttctcctttcacacctgtccttagccctgtgccccatgcccagcgtgtgcctgattgtcctggctctggccttaccaacayaaggggctaatgtccccacctgtaaccagaaagaaggaaagagcccaaggccccaagagggttgcaaaggctgccaaccccatgtgagtgcccggcagcctctattgccaaatcaccagggaacacagacaaatgccacccccgccccttgagttggtgagagctatttcccaccacatcctgtcctcccacccacaatctgcaaaccagcatgtgtgcctccatttcactaattgcaggctgactgatggggctgtaacagcattctggcttctgg

SEQ ID NO: 745284 - DNA, 573 bp, Homo sapiens
ttccatgcatgcatgtataccataggcacctacaaagactgcttccctggggtgagctccggcaccccagcctgagcttcccctcaccctggcagctcctggtccctcaccccacacccatggccacgtcttactcctctcacacctatcctcagccctgcacagccaggccttgcccctctcacccctgtcttcagccctgcacagccaggcctttctcctttcacacctgtccttagccctgtgccccatgcccagcgtgtgcctgattgtcctggctctggccttaccaacacaaggggctaaygtccccacctgtaaccagaaagaaggaaagagcccaaggccccaagagggttgcaaaggctgccaaccccatgtgagtgcccggcagcctctattgccaaatcaccagggaacacagacaaatgccacccccgccccttgagttggtgagagctatttcccaccacatcctgtcctcccacccacaatctgcaaaccagcatgtgtgcctccatttcactaattgcaggctgactgatggggctgtaacagcattctggcttctgg

SEQ ID NO: 745285 - DNA, 596 bp, Homo sapiens
gcaatcaaaattcttataagccaaacccaggaatatataaaaaggatgaaacatcaaaaccaaattggggttgtcccaggaatattatcttggtttaaaatttgaaaatcaatcactgtaaactgtacccacagacttaaaaaaagaactatcatcatttcagtaaatgcagtaaaagcatttgacaaaatttaacacccacacatgatagaaactccaagtaaactaaaaataaaaggaaatttccttaaatttagaaaayggatgtacaaaaaaactagagttaacaccatactaatagacaaccgactacttccccttaagatagggaagaagacacagatttctacttttaccttgtattcaacattgcacagaagaacctagccagaacaacaagtgagaaagttactaagatcagtcaaataatacaaggtcaatatacaaaaaaccattgtatttctatatgctaacaaaaacattggaaatgaaatttataaaacaatacaatttacagtaacatcagagaaatatttactctttaaagataaatggaataaaatatgtgcaggatcagtacactgagagctataaaa

SEQ ID NO: 745286 - DNA, 536 bp, Homo sapiens
ctagctgtgcccaatggaaaaatgtattcaaacataaaattcagccataagggtttgacttgcagaaacctcacctgaggatacaaaaatacaaaactagaaacagaagttttttagctgagaagtgaatgaactgaaagaatcaaggaattgctcccacccttrtacacagacacacacacacacacacacacacacaccttcaggggaagtatagttgtctccactctcttcccactgctttatgccctagccactttgccatggtagtctttctaaaattatctttaaaaactgtaaaattactccctaaccaccccctagcatgaggctcctctttgcctctgcattttggggagggagtttttttcctcttcttgccacctatcaaaactccatcagaaactttttctccccctatgactccctctctcatactcccatacacacagtttctgctgttctttatgagaaagctgtcgttgctttgtaggagagatttgaggaggtctcagtgggaaggccgccactattca

SEQ ID NO: 745287 - DNA, 632 bp, Homo sapiens
taaaaatgtaaaacaatggtcatcttcccactatttttttttattttagaaaatttagttattttcacaaaaaaaaatgttacgtgtgttaacatgtgttatgtgttgaatcatgtgctcccaaaagatgttgaagtactaagcaccagtacctatgaagatgatcttatttgaaagtaggttctttacaaaygattaagtgaagatgaagtcattagcatgggtcctgattcaatgtgattcctgtctttgtaaaaaggagaaatttggacacagacacagacatgggggaatgccatctacaagccaagaaacacctaagactgccagaagctgagagagagaactggaacagattctccctcatgggcctcaggaaggtcctccctcaggccctcttgccggcactttgaattcaaacctgtcgccttcagaactgggagacaataaatgtcttgtttaagccagacagtgtgtgatactttgttacagcaaccccagaaaacaaataaaacgtgtaattcgtttattatttttaatcaatgtattaaaatatatttaatttatccactttaatttctaatatgacaaatactaacagatttaaggcacataaagaaaagctctttggg

SEQ ID NO: 745288 - DNA, 632 bp, Homo sapiens
taaaaatgtaaaacaatggtcatcttcccactatttttttttattttagaaaatttagttattttcacaaaaaaaaatgttacgtgtgttaacatgtgttatgtgttgaatcatgtgctcccaaaagatgttgaagtactaagcaccagtacctatgaagatgatcttatttgaaagtaggttctttacaaatgattaagtgaagatgaagtcattagcatgggtcctgattcaatgtgattcctgtctttgtaaaaaggagaaatttggacacagacacagacaygggggaatgccatctacaagccaagaaacacctaagactgccagaagctgagagagagaactggaacagattctccctcatgggcctcaggaaggtcctccctcaggccctcttgccggcactttgaattcaaacctgtcgccttcagaactgggagacaataaatgtcttgtttaagccagacagtgtgtgatactttgttacagcaaccccagaaaacaaataaaacgtgtaattcgtttattatttttaatcaatgtattaaaatatatttaatttatccactttaatttctaatatgacaaatactaacagatttaaggcacataaagaaaagctctttggg

SEQ ID NO: 745289 - DNA, 612 bp, Homo sapiens
gttgaatgaatgccaagtgtggggcaaatttcagatttgctccaacactgatttatttgccactgttttacatctttattcttaaaatggaaattctcctcttatgacatctcccaacatctattcagatgggctttggaagtctgtgaggcctgaacaatcatgttgaatgtttagcaggtatttatatacctgcattgtttggaagaatgattaccaattttttcagaggattgtgggcttttttaaagatgaaaactagcatagctagtaatgaaaagcctcagaatttgggacagtacacctgtcaaacaggaatgcaggtatcctaaggtgagttcagggaggacagaaacttccagtggaggagaagggcaaaagctcccttgatcctgactttgagtataaatataggccatgaaagcagggcctggtgattctttaaaagaaaaaaaaagtctcagaatttaakagttcaataggacagccgttaccaccaaaaataaaactctctttaacaagcttacaaatcactactcttacttctagactgtttattcaaaagcaatggaaaggttgcatctaactgggaaaaccaccatatagcataat

SEQ ID NO: 745290 - DNA, 612 bp, Homo sapiens
gttgaatgaatgccaagtgtggggcaaatttcagatttgctccaacactgatttatttgccactgttttacatctttattcttaaaatggaaattctcctcttatgacatctcccaacatctattcagatgggctttggaagtctgtgaggcctgaacaatcatgttgaatgtttagcaggtatttatatacctgcattgtttggaagaatgattaccaattttttcagaggattgtgggcttttttaaagatgaaaactagcatagctagtaatgaaaagcctcagaatttgggacagtacacctgtcaaacaggaatgcaggtatcctaaggtgagttcagggaggacagaaacttccagtggaggagaagggcaaaagctcccttgatcctgactttgagtataaatataggccatgaaagcagggcctggtgattctttaaaagaaaaaaaaagtctcagaatttaagwgttcaataggacagccgttaccaccaaaaataaaactctctttaacaagcttacaaatcactactcttacttctagactgtttattcaaaagcaatggaaaggttgcatctaactgggaaaaccaccatatagcataat

SEQ ID NO: 745291 - DNA, 537 bp, Homo sapiens
gttcactaatattgataatgttgttatcatcttattacccctcaggagtgccactaaaacatttgatattcaaaacaagcacaaagggtgtctaaattggtctacaatctcaaaaatattgagattagtctgttttggctgttacaacaaaaccatagttatggctgtcataacaaaataccatgggtggcttacaaacaacaaayatttatttctcaaagttcaggagtctgggaagtccaagatcaaggcattggtagattctgtgtctggtgaggactcactacctggatcttagacagccatcttcttgtgtcattgagagggatctctctgaggtatcttttcccattcatgagagctctgcccttatggcctaaacacctcctaaaggccccacttactaataccatcactttagggatttagatttcaatgtattaatttagaggggacataaacagtcagtccattgcaatcattgaccaaaaaagttagacaatccgacatattgtaaataaattcacattaaatata

SEQ ID NO: 745292 - DNA, 658 bp, Homo sapiens
agaaacacttctgttgtaagatttacaaatgtttccaaatcatagaaagaaaaaaatgttagccttcaattcatagttttcctgtcaaaggatataaaacagcacggtaattatattctgcagatgttatgttaataatttttccattgcatataaattcagtctggggggagataaagtagggaattgatatatttttccatattcagtgggattaatacacaaagaagtttaaaacgtgttctgctatactgcagatactctcagagctaattcccaaagaaagtaaaaactgatggcctttgtagcctgataatatcataagtgacaaattcctgtgaacgatttacattcttgattttaactgcttttcttcttttcctscctataacttaaaagagcacaatcaaaaaaaaatccattactgatgctgcaggataaattagttgcatgttaatactaactcagtcttctccaacttataaaataaaggaagagaagttattataagtcatgctggtccttatgaggtctcttgcaaataaatcagttttctagaaagttcatcttttttcttttgcttcagacatcacctacgtttaggcaataattttgccttttcaagctgtacatagctgaataaggtgtcttcatatcc

SEQ ID NO: 745293 - DNA, 605 bp, Homo sapiens
gatttgaacacaggtctatctgcaccttacctaagtttactaacctatttcacatgtagcctgtttctccaggtgttaacatagcatctgcatttcacaggctttgtttccagctctagagggacatcctcagttccctgcaatgcccatctcaccctggtgttatttctcaaggtccccagagagtgtcttggaaatactgcaggataccctgtcacgtatctcatgacctacgtcctttttctcctccctccccccacctgccgcagtgtcaccttttccagscaccaccgtgaggtgacccacatgccagcttctcataggggccatgggaaggccaggaacctccaggtccagccctctgtacagccaagctgaccagcagggctcaagcaaaaagaaggcctacctcatcccatcaacctcacactttgcaatcagggcaacagagcagagctccttctgtccatcatggcggtaatgatgtcagttttctgcttgaggacaatccaagtgacacacaccatattatatcctgagtagctcttccctcaggctctgttagttaactaaacctttgtccctaattaactttctcttctcat

SEQ ID NO: 745294 - DNA, 583 bp, Homo sapiens
tgtatttctctggatccttttagatactacagattagagctgctggaataaataagagaatccacagtagcagcattaatgaaggatttatccaaaggtaaagcagagaggaggaaaggacaagttgtgaccagccagctatctgtcagaataaggaatgtctagaagtaaagaaaatcaaaccaaagcgcttgtattctcgtgttttttttttctctctctgtcttaccctccccacccaccctcccgcccaacacacactctgttccaggttttaattttttctagaacagaatgctagcccttccttcacataaactgcctaaaataacttgtctcagaagaatgtaaatcattcaaatatgagtaayagtctttggacaacaagagcttaaagcaggcacacaaagaaaacaaagacaaaatgacatggcaggggaaggacattaaaaaaaaagctgccattgtttggagatgccattgaagagaaaaattaaatggcacaaaaataagggtcactttgagatattaaaaaaaagaggagactgagtaaaattgaacaaataaatgccagaatggacga

SEQ ID NO: 745295 - DNA, 634 bp, Homo sapiens
tcatagtacaacagtgtgactattgtcaataataatttaattgtacattttaaaataaccaaaagagtgtaactggattatttttaaaacaaagtataaatgcttgaggagatggataccatattcttcatgatgtgatcatttcacattgcatrcttgtatcaaaacatctcatgcaccccacaaatatataaacctaatatgtacccacaacgatttttaaaaaattaaaaaatataggctgggtgcggtggctcatgcctgtaatcccagcactttcagaggccgaggcgggtggagcacgaggtcaggagttccagaccagcctggccaatatggtgaaaccccatctctactaaaaatacaaaaattagctgggcatggtggcgtgcacctgtagtcccagctactcaggaggctgaggcagaagaatcgtttgaatccaggaggcagaggttgcagtgagctgagatggtgccactgcactccaccctgggcaacagagcgagactccgcctcaaaaaaaaaataaaataaaataaaaaataaaaaaacacagtaaaataaattcctaaaacagtcattaaaaacaacaaagaggtaaagctaaatgaagataaaatattaaaataca

SEQ ID NO: 745296 - DNA, 634 bp, Homo sapiens
tcatagtacaacagtgtgactattgtcaataataatttaattgtacattttaaaataaccaaaagagtgtaactggattatttttaaaacaaagtataaatgcttgaggagatggataccatattcttcatgatgtgatcatttcacattgcatgcttgtatcaaaacatctcatgcaccccacaaatatataaacctaatatgtacccacaacgatttttaaaaaattaaaaaatataggcygggtgcggtggctcatgcctgtaatcccagcactttcagaggccgaggcgggtggagcacgaggtcaggagttccagaccagcctggccaatatggtgaaaccccatctctactaaaaatacaaaaattagctgggcatggtggcgtgcacctgtagtcccagctactcaggaggctgaggcagaagaatcgtttgaatccaggaggcagaggttgcagtgagctgagatggtgccactgcactccaccctgggcaacagagcgagactccgcctcaaaaaaaaaataaaataaaataaaaaataaaaaaacacagtaaaataaattcctaaaacagtcattaaaaacaacaaagaggtaaagctaaatgaagataaaatattaaaataca

SEQ ID NO: 745297 - DNA, 598 bp, Homo sapiens
ttaaatttacatatagagagtgacagattacttccaaaagttattttttaacaaagtggttaacaaccctaaaggaaactggactcggttatttatctgaattataacaatactttatatttatttgggcttgtgtttttcttttgggacttgataaaattctcaagataaaatgcatacgtcaattcctgagttcctattcacatataaaaactggaaattcrtttggggaagtgttttcatcacattcaaaaggagacgaaactcctcaagccagcatgagaataataaatctgctcagaatattttccatttactgtctcctgttagcagttttggaaaagctttccactgtcttctccatttgattttggcacaagaagccaaaaccaaaacaaaaccaaccaaccaaacaacaacaacaacaaacaatctactgcttagggagaaatcatagcaacaaattcagaaacttctattaacctcataagggaaataaacagaaacacacacaaagtaaataagagaagagagccatttcccctagagacaatcatgtatgccagtgtcaggtaaaccccaaaattcacattctcaa

SEQ ID NO: 745298 - DNA, 573 bp, Homo sapiens
aaacctcaccagctctgagttctgtactcaaatgggggtgagaaagggaaagaaacctccagagtggacccatctggtgacagcggagagagtataacacgtctgcaggtggcgctggtgtgtgacgcatgcatcattgttccatctatcatgtactaatccctgggtttttcgctatcctcctgtcccattagacaaatcatcaataatgtcataactacagccagatatagcattgtttcagactgcatgtgaatggcctgatagtagcggccgtgccgcattttgaagaaacggagcactgtctctgatgtcttcacttgggtcatagagctgctcactgataggtwgtttttctaggttttgaaaacttagctccatgttttctccccttcttaaatgaacctgttttctttacccatcccagatgaagcatttccttccattttgcatacagtctcccacatactcctttaggcaagcctctttattcacccctcctaactctcaccccttttagcaccagtttttcactttcattgaacaaggctgcagacatcctcaccccatggg

SEQ ID NO: 745299 - DNA, 573 bp, Homo sapiens
aaacctcaccagctctgagttctgtactcaaatgggggtgagaaagggaaagaaacctccagagtggacccatctggtgacagcggagagagtataacacgtctgcaggtggcgctggtgtgtgacgcatgcatcattgttccatctatcatgtactaatccctgggtttttcgctatcctcctgtcccattagacaaatcatcaataatgtcataactacagccagatatagcattgtttcagactgcatgtgaatggcctgatagtagcggccgtgccgcattttgaagaaacggagcactgtctctgatgtcttcacttgggtcatagagctgctcactgataggttgtttttctaggttttgaaaacttagctccatgttttctccccttcttaaatgaacctgttttctttacccatcccagwtgaagcatttccttccattttgcatacagtctcccacatactcctttaggcaagcctctttattcacccctcctaactctcaccccttttagcaccagtttttcactttcattgaacaaggctgcagacatcctcaccccatggg

SEQ ID NO: 745300 - DNA, 616 bp, Homo sapiens
tgtttggttatttataattgctacttatttcttatattgagacacacctggtcctatccccttgagtggctctatcctcatctgttagtctgttagtccattttatgttgctatgaaggaatacttgagactggataatttttttttttcttttaagacagagtctggctctgtcacccaggctggagttcagtggtgccatctaggttcactgcaacctccgcctcctgggttcaagcgattctcctgcgtcagyctcccacgtagctgggactacaggtacgtgccaccatgcctggcaattttttttttttgtattttcactagagatgaggcttcaccatgttggccagtccggtctcgaactcctgaccttaggtaatccacccacctcggcctcccaaagtgctagggttacaggcatgagccactgtgcccagccaagactggataatttataaagaaaagaggtttattggctcacggttctgcaggctccacaagcctggcaccagcatctacttggcttctggtgaggcctcggggagcttttactcatagagcaggcgtgttacatggcaagagagggaggaatggagagagaacaagatagagg

SEQ ID NO: 745301 - DNA, 616 bp, Homo sapiens
tgtttggttatttataattgctacttatttcttatattgagacacacctggtcctatccccttgagtggctctatcctcatctgttagtctgttagtccattttatgttgctatgaaggaatacttgagactggataatttttttttttcttttaagacagagtctggctctgtcacccaggctggagttcagtggtgccatctaggttcactgcaacctccgcctcctgggttcaagcgattctcctgcgtcagcctcccacgtagctgggactacaggtacgtgccaccatgcctggcaattttttttttttgtattttcactagagatgaggcttcaccatgttggccagtccggtctcgaactcctgaccttaggtaatccacccacctcggcctcccaaagtgctagggttacaggcatgagccactgtgcccrgccaagactggataatttataaagaaaagaggtttattggctcacggttctgcaggctccacaagcctggcaccagcatctacttggcttctggtgaggcctcggggagcttttactcatagagcaggcgtgttacatggcaagagagggaggaatggagagagaacaagatagagg

SEQ ID NO: 745302 - DNA, 611 bp, Homo sapiens
agaagccactggaggaagaggagtgatgcaatctgagtcaggttttgaaaggatccctccagcttccatattgagacttgacataaggcagataaggacagaagtgtggaggcatttagaaggctattccaataacccgggtgagaaaaagtgatggcgtggagcactagttctatttccactcttttatagcttgtctacagcaatttcagtggcttcctatgttttgccttgcatagtttttgcccctctctcctttctttttctaataaccactctttttatctattcttttggttaccctagccagtcttgatccaagatagaacttttcctcttgtacttcttatctatatattctctgttaattatacggcgcatttgcttacaaaaaccagcctccattcatttccagtaagtatcaatatttggcagaccacatatacatatcattacttcctagagatgagactkcctctaaaagttgaaatatataaatatacagaaattctaatttgatatagggatttatacataaaggtagagatatcaaccttaaatgttagtcctttttaatatcaaaaaaacagttaaagttcttctaagtatga

SEQ ID NO: 745303 - DNA, 622 bp, Homo sapiens
tactgtgaagctcaacaggagacccagaggcagcaggtgtgtgttcaaatggaaggtcagggataaagacccacgtgcacacacgtgtgcacacacactctagtataaaacgaaacaacatcactcacattcttcaatgcctgctaaggagctccgcttatttttgacmgaagaaattattactggtggtaaatccgtatgggtctgcagcaatctcaattcttgtctcctcagaagaaagaatttgactaagcggcataaggcagaagaagagaccaagacaaattttacagaaggagtgaaagtttataaaaagctttagtctggacatggtggctcacgcttgtaatcccagcactttgggaggccaaggtaggtgggcgaattacttgaggtcaggagtcccagaccaacctggccaacatggtgaaactccgcctctactaaaaatacaacaattaagctgagcatggtggcgtgtgcctataattccagctactcaggaggctgaggtgggagaatcgcttgaacttgggaagcagaggttgcagtgagctgagatcatgccacttcactccagcctgggcgataaagggagactcaaaaaaaaaaaaaaaaaagg

SEQ ID NO: 745304 - DNA, 646 bp, Homo sapiens
ctctgcagaggttggtcatccttctcgaggttcagcacacttctggataaaaaaatccattttaactgttttaaacaaaattataaatgagcactcactcattctggctctctaaaatagttcaaaaatatttttcggaagayagttataacctttttcaaagaccctttttttttttttttttttttttgagatggagtttccttctgtctcccaggctggagtgcagtggcataatcttggctcactgcaacctctgcctcccaggttcaagtgattctcctgcctcagcctcccaagtagctgggactacaggtatgtgccaccacacccagctatttttttgcatttttaatagagacagggtttagccatgttagccaggcttgtctcaaactcctgatctcaggtgatccacttgcctgggcctcgaaaatgctgggattacaggcatgagccactgcatctaacctcaaagcctgttttgtaaaggttgcaagtttcctatctgccttctctgaaaatattttaaaatatggttaaatacattatgtttaccaattataccctcaactaattaatgccactttctgaagatacaaagatgaataagatagcttcaagaaatgtagaaagtagcttccta

SEQ ID NO: 745305 - DNA, 569 bp, Homo sapiens
atgtagaatattactaaggacaccaacacatactgtcatatcacagagaaaaagcaaaagggatagaaaaaatattcaaagaaataatatcagaaaatgtatcaaatttattgaaaaactataacctacacattgagaaagctcaacgaaggctaagtagcataaatttgaggagatctcacaacatcatagcaaaagtgctgaaagtagaacacaaagagaaaatttaaaacactgagagagagacaaccagtcgttyacaagggaacctcaagcaggaacaacagtctggcagacagtgggataacatatttaagagattcaaagaaaaaactgtcaaccaagaatcctatatccaacaaaattatctttcaaaaatgatggcaaaaaactttcctcaattaaaaacaaaaaaaggccagagagaatttgttactagcagacttgtcttagaagaaatactcaggcaaggttttcaagttgaaagcaagtgaccatagatggtaatttgaatctatatttaaaaaaaaacagatacacttgcaaaagtaattgtgtaattgtaaaaa

SEQ ID NO: 745306 - DNA, 569 bp, Homo sapiens
atgtagaatattactaaggacaccaacacatactgtcatatcacagagaaaaagcaaaagggatagaaaaaatattcaaagaaataatatcagaaaatgtatcaaatttattgaaaaactataacctacacattgagaaagctcaacgaaggctaagtagcataaatttgaggagatctcacaacatcatagcaaaagtgctgaaagtagaacacaaagagaaaatttaaaacactgagagagagacaaccagtcgtttacaagggaacctcaagcaggaacaacagtctggcagacagtgggataacatatttaagagattcaaagaaaaaactgtcaaccaagaatcctatatccaacaaaattatctttcaaaaatgatggcaaaaaactttcctcaattaaaaacaaaaaaaggccagagakaatttgttactagcagacttgtcttagaagaaatactcaggcaaggttttcaagttgaaagcaagtgaccatagatggtaatttgaatctatatttaaaaaaaaacagatacacttgcaaaagtaattgtgtaattgtaaaaa

SEQ ID NO: 745307 - DNA, 569 bp, Homo sapiens
atgtagaatattactaaggacaccaacacatactgtcatatcacagagaaaaagcaaaagggatagaaaaaatattcaaagaaataatatcagaaaatgtatcaaatttattgaaaaactataacctacacattgagaaagctcaacgaaggctaagtagcataaatttgaggagatctcacaacatcatagcaaaagtgctgaaagtagaacacaaagagaaaatttaaaacactgagagagagacaaccagtcgtttacaagggaacctcaagcaggaacaacagtctggcagacagtgggataacatatttaagagattcaaagaaaaaactgtcaaccaagaatcctatatccaacaaaattatctttcaaaaatgatggcaaaaaactttcctcaattaaaaacaaaaaaaggccagagagaakttgttactagcagacttgtcttagaagaaatactcaggcaaggttttcaagttgaaagcaagtgaccatagatggtaatttgaatctatatttaaaaaaaaacagatacacttgcaaaagtaattgtgtaattgtaaaaa

SEQ ID NO: 745308 - DNA, 552 bp, Homo sapiens
gctttggtatcaagtttagggtaaatgtacaaaagtactttccccattttattatcactgaaataatttcaataagattggaattacttattgcctatgttatttgagaaaatttacctataactctgggcctgttgctttccttgtagtattactgtaaattactgcctcactttttttttttttttttgagacagagtcttactctgtctgctctgtcaccagagctagagtgcagtgacgcgatcccagctcaccgcaacctccacctcctgggtacaagagattcgcctgcctcagcctcccaagtagctggttttacgggcgtgccccaccatgctggctaatttttgtatttttagtagagacggggtttcaccatgttggccaggctggtctcraactgctaacctcaggtgatcagcccacctcggcctcccaaagtgctgagattacaggtgtgagccaccacgcccggcctgcttcacttcttttagatatttttccaaaaaaaccttttagtccgtttaggttgtatatatttttcttcaa

SEQ ID NO: 745309 - DNA, 590 bp, Homo sapiens
atatatatgtgcaaatatatatttatttatgcaaagtagtttaatttttcctttgaaggttttgttgtttgtcttcttggagctagaaataagttttctgaacctctgggctctttgaagtctggtcatgcttggggataactgacagtgtcatcgaagccactcttttaagaagattgaaggtacaagatgtgagttatattgagttatttggacgagtttttcaaatattgatcatccagcaaactcataccycgtctcctactctctgtgccattttctccctcccacttttggtctcttttctttcctcatctttcctcatatcattgtccagttttagcaaaagtatcagaggatgtactagctttgtaagtaaatttagctgtttcacattttccaaataaactttagagattttttcctgtattgtcataaagcgattccctttaaaagtaaactgtgtttacttgcacaacacccctatctttagcaaatgactttgtgtcttccctgctgttactgaattttctcatttttccttgaccacttagccacccctttgtgccccccaaccgccgcaatacaca

SEQ ID NO: 745310 - DNA, 593 bp, Homo sapiens
gaagggaagggaagaagaagaagaagaaggaaggtaggaaggaaggaagggagggagggagagaaggaggaagggaaagagggaggaagaaagaaaggaatggaggaagagggaaggaaggaagggagtgaggaaggaagggagagaggaaagaaggaaggaaggaaagaaaaaaggaagrgaggaagagggaagaaaggaaggaagggagggagggaggaaggaaggaaaagaaggaaggagcggagatctgctttctaaaagggaaacgcaaatctcacaaagaggcttatactggaatgaagtgggaatagcaggaaaattgactaaattctgtaataaagcccctttaacttactataaaaataaaattaatttgccccacatcctgagtttctccatttcagaggaagagggatgtcagaaaagtaaaaagtatctcagattgataggaggaaagagatgcctctgataaacagtttgaattcagcaagttcaaaaccagattctttcccccaagaaaacatgtaattctcatcacatttcccatctcagcaaatgatcattttagtacctccatcacccttctctga

SEQ ID NO: 745311 - DNA, 554 bp, Homo sapiens
aagccaggagagataaggcctaaacatctgaaaagactgccctgagatcatatatcatgggggaagtttttgggccaagcagggctgtgatcagagtggggtggcaatgtcaaaggcgtaagtgagaaggactgaaggtcagaattataatgctatgtagacataaaaatgggagaagagctgggatctatagcacttgatyactattgagagcaaaggaaaagtagccaagttattttgcatctatggcctcagagccaggaagaggaaaagttgctttggatgggtgtctgagattttgagcttctgtaacttggtgaatcttgttttcattacagaaagaggagaatctgaggcagaggctggtttggacttcagcaatgatgtgtattgttttagacattaattttgcaatgctggtgagatactcaggtgggaatgttcaagaggcacttggaaatacaggcaaagattgctggatagagatcaagaatagagacataaatttgggataaatgtttatgtagattacggctgaagccaagagagtggag

SEQ ID NO: 745312 - DNA, 616 bp, Homo sapiens
ggactgagcatagtggttcatgcctgtaatcccagtgctttgggaggacaaagtgggaggatcacttgagtccaggagttcaagaccagactggccaaaatagtaagacccccttctctaaaacaaatttcaaaaaaattagccaracgtggtgatgcacaactctagtcccaccttccgaggaggctgaggccagaggattgcttcagctcaggagttctgaggctgcggtgagctatgatggtgccactgcattccagcctgggcaacagagctagacactgtctctgaagaaaaaaaaaagtagaaagaagtttaagattgtggatagctgggttatagtgataagtaaaaagaacctgaattttactaggtactcaagactcttcttataaatgcaggccactccctttgtcctgtctcccctgagatatctccagaaagcagggatacacccttcccagaaagcacttaagtggaaatggaaattccaggtcagcctactgcagggagaggcttggggagggaagctggtgctccaagtctgcctggcaccatgaagtccaccgcagggcttaactggtttttatatttttactcaagaaacccagaaggc

SEQ ID NO: 745313 - DNA, 447 bp, Homo sapiens
cctcttcaataaggacactaatcccatttgtgaaaggtctacctcatgacctgatcacctctcaaagtccccaccttctaatccatcaccttagtgattaggatttaacatacacgtttttggagggatgtgaacattcagatcataggaggaaatgcagatagggaagaagctctcacagaaagccatttactccctccctcctttctggggactgtccttactcagctgaaacyattttccacttagtaatattgtagtcctttaaaaaaggagaacaccagaagatactagatgaagtcactgaagtcacagagctgtttagttgcaaaactaagagtagaaccctattcctggactcttttcttttctcatatcttgctgcttggttagtgcttaagagttttcaggtacatattccagagccccaattcttcaagtgagttg

SEQ ID NO: 745314 - DNA, 620 bp, Homo sapiens
aaaccacaaggaaggaggaatttttagtaataatgcaatataaatggcattacttatgttctctatttcaatacggtaggaactaggcgtgggtcaggccagcctcgtccttggatccctcaaatatcttgaactgctgctcaaatgtgttgggtttggcacaacctgcaagaccctgggccaggcactgtttcctctttgatttttaagcccctgtgtatttcaagggaaacttaatccatatgtttctgattcatttacacttaactcatcaaaatgttgtyttgaaggagctatttgatatccaacaaatctttggagcccttttctcgaggactttgaaaatctttattttgatccccatagaaaagaaaaagttactcttttagtgtgtgtgagcacatgtgtgtgtttcagtgagcaaattcagtcaccctaaggcatgagttcaatctaaaactaacaaataagatgtcagcccagatttttaacttgctctaatgtcctatgtactaattagagcctcgtggggggagggggtggaggattctcactctgatctaaactagtcccaagcccatgaaaatgttcaccatctgttagcaatataggacctagat

SEQ ID NO: 745315 - DNA, 573 bp, Homo sapiens
tatgttgaaattctaaccccctaaggtgacggcattaggagtaggaatctttgggaggtggttaaatcatgagggtagcggactcatgactgggattagtgtctttatgaaagacacaacagagaactagctagtctcttctaccatgtgaggacacagcaaggtacagagaaagctggcccttaccaggatttktctgttgtttataagccacctagtttatggtattttattatagcagccaaagacactcgggctgtatgtgtgtgtgtgtgtgtgtgtgtgcacgcgcacacgtgtatctatgtagtgaccattgaatgaatttcctaagactattactattatctacctagtgatggcttctccccaaatccatctttaccagggcaaaatcaatcccccaaatccagttctattataaaaccgaatgtgtctaaaaaaaaaaaacaataaacaaaaatcgatgatgtgttttagttttaaatttagttttagtagtttaggctttttttccttttaggggaaaaaagttttttcaagacacaaatttttcaaatggaacatagtcat

SEQ ID NO: 745316 - DNA, 582 bp, Homo sapiens
tgtctgtgttccttcaaaattcatatgttgaaattctaaccccctaaggtgacggcattaggagtaggaatctttgggaggtggttaaatcatgagggtagcggactcatgactgggattagtgtctttatgaaagacacaacagagaactagctagtctcttctaccatgtgaggacacagcaaggtacagagaaagctggcccttaccaggatttgtctgttgtttataagccacctagtttatggtattttattatagcagccaaagacactcgggctgtatgtgtgtrtgtgtgtgtgtgtgtgcacgcgcacacgtgtatctatgtagtgaccattgaatgaatttcctaagactattactattatctacctagtgatggcttctccccaaatccatctttaccagggcaaaatcaatcccccaaatccagttctattataaaaccgaatgtgtctaaaaaaaaaaaacaataaacaaaaatcgatgatgtgttttagttttaaatttagttttagtagtttaggctttttttccttttaggggaaaaaagttttttcaagacacaaatttttcaaa

SEQ ID NO: 745317 - DNA, 599 bp, Homo sapiens
gctcatcttttccttacacgctgtctacttgatttactagagctcttaccacattaatcatgatagctgttttaaattcccagttcgataattccaacatccctgttgtatctgagtctggttctaatgctttttctgtctcttcaaattgtgatttttgccttttaatatgtcttgtaattttcttgatagctggacatactggatagaaggaactgctgtaaataggccgttagtgtgtggtggcaaggcatgagaggagagtaaacattctatagtcctctggagcaggtctcaatctcttagtgaacctgtgcccctgggctgtgaacctcacaagtgcatctcagtccccacaccctgccctwgggtgggacagaatgactctgggggctggagtttggtatatttccctttccccagtttagctaggttctggtaaaactccaacattttaggctcttttagaacagtttctcttgaggggagacagagtactctggtgtatttcagaatggttcttttcgctctttacctgctaggaatacaaggggactttcctctgatactcactgtaagaacctggtggagctcctgca

SEQ ID NO: 745318 - DNA, 545 bp, Homo sapiens
atattaattcaatccagtgcatttttcattacacgtattatatttttcatcattagaagttcaatttgagtccttttaaatttttcatatctctactcaacatggtcttttacttcttgaatgtatagattataactgtctcattgtccttatctgttaactgtatcatctgtatgatttctggatctccttctattgatcaatttctcttcttyattagtgttacttttctgttattttttgtttgtttgtttttttgtttttttttatggctggtaattttttacttaatggcagacatcaagaatttgacctcactgggcactagctaattttgtattcctagaaataattttaatctttgtcctaaagttatgttacttggaaacagtttgacccctttggggcattattttgagcttcattaggtaaaaccaggaagtctttactttaggggtatttttctccattactgatgcaacacttttgtgagtactctacccattgctccatgaactatgaagttttctgctctggtgggaatg

SEQ ID NO: 745319 - DNA, 583 bp, Homo sapiens
agtggagtgggctagtactgatgagtaggcaaccaagaggtcctgccacatccaaataaatggatgggacgactcaatatcattaggttgtcagctgtccttcaattttaatatattaatcaagtgcaattacaatcaaaatcaaaatactttttttatggaactggaaatgctcatattaaaattaatgtaacagaacaaaggttcaaaaacaattttggaggaaaagaagtggaggcagctgtccgactagagagcaaaacattttataaagccatrataattagatggcatgactgtggcacagaagccacaaactaacagaagacgaaagagagtccagacacaagcccatacatatatggaaatctgagatatgagagatggcatgttttcacttttgagattgtggttccacaaacaacaacaaaattcatggcttctttgatgaaaatgaaagtctcacgcaccctcaaaataatgtgctctcctaaaagtgtcgagaattatagtattgcctatatatagctctggtaagcaaaacaaacgtattcatgaacaaattgctttgatttttcttttc

SEQ ID NO: 745320 - DNA, 572 bp, Homo sapiens
agcacagaatagtcctgctccctcttgtccactgaagttcatgtctacgtgtgcatgcatagatgcgtgtctgtgcaggccaggatgtgtgtggttgtgtataagctagcctgcacacgtctgagtgggctgggtgttgaggtgtgcagaaagcatgtgcatttcggaaataagactctgtctagactatgtgtgtgtggtggggtgtgaggaagcaattaggccgaacagttttactacctggagtgggggtcttagtgtctcagtttggaaggtggatgggtagcaaaaaagggggcacccatgaagactccagaagagaataaaaggctaacctatagcagaaacttcatcactgcctctggagctgtctgcagggtggcccctgaacccccaaaccatgccaacagatgactttagcttkcaggaaaatctgccattcaggtttaccctgaacccaatgacagaacaacaaaatggaattatatgagtgttcattagatgcttttcagttttaagctcaaaaggatccgttgaccatttccatttcacaagtaagaaaactaaggcta

SEQ ID NO: 745321 - DNA, 658 bp, Homo sapiens
cttcctttttatggctgagtaatattgcattgtatgaacagactacatttgatttatcagttgatccattcatggacacttcgattgttccctcattttagttattccaaagaatgctgttatgagcatgggtgaacaaatatctgagtccttgctttcaattttttgggtatctacccagtagtggaattgctggatcgtggaataattctgtttgatttttttgagggaccactatatgcttttccacagcagccgcaccattttacagtyctactagaatgcaagagtgttctaatttccccacgttctggccaatacctattttctgttttttggtgatagccatcctaattggtgtgaactggcatttccctgtgatttacatttctctaataactagtggtgctgagcatttttcgcatgcttattggccatttgtgtatcttcttttcagaaatgtcaagtcaagtcctttgcccatctttgaactgggttgtctttttgttgttgagttgtaggagttctcgacatattctggatattaatctttatcatatatgtaatttgaagatatttcttctcattccatgggttgtctttgtactctgttgatagtatcttttgatgcattaaagtttttaactttgatgaagtc

SEQ ID NO: 745322 - DNA, 623 bp, Homo sapiens
ctcatctgtaaatggatccagtcgcagtggtgagagtaaaggaaacttttgcacacggagcccctagcatcgaaattgctcgctaaacgagagctgtcttggttatgacaggttacccgggggctgtagtgaagcccactgtagacgttcccagggccagggaagctgatgtctccactcagctcagaatttccttcccctgaggtcatggggcagactcaggcctctgagagggcagagaagtgcctagaaacagccctgggtcccagtgccaggtctcgcttaattttattgctactccctgagtgcaggagtggcccaggccacatactcttcaccacactgaccccattttgtagataaggaaactgaggctctggaagctctaaatactgtggtggtgaggctgagtcttggtcctggaagttattcatggcctagcccccaggcagggcaccygcagtcgtataccaccttctacctggggctgcctccgcctcccagcaggagttgtttctggagctgattcatctctgagctcagcaaggagcccgacaaacagcctggtccacaccaaatacttagctaatactggttttattgatttgcattctatgccctct

SEQ ID NO: 745323 - DNA, 611 bp, Homo sapiens
ctaaaattggagaggaggatccctttacgtatgccagtcttacccaccagtgttctggggattaaaggtggctactttgactgatatcaaatgatattgtttatatactatgagtcatgctggaattaatgaaatattcatagataacttgttaatagtgcagagtctatctggacacaatgtttattcaagtgataaggaaattgatctgatcaacataagagttgtaagatattcacagttatactctttttttttttttttttttttttgagacggagtctcgctttgtcgcccaggctggagtgcagtggcgcgatctctgctyactgcaagctccgccttccaggttcacgccattctcctgcctcagcctctagagtagctgggactacaggcgcccgccactacgcccggctaattttttgtattttttagtagagacggggtttcactgtgttagccaggatggtctcgatctcctgacctcgtgatccgcccgcctcggcctcccagagtgctgtgattacaggcgtgaaccaccgtgcccaacccacagagttgtactcttattagaacacaaatctattcatctgatcagcttagagaat

SEQ ID NO: 745324 - DNA, 535 bp, Homo sapiens
gattgaccttagtctaaaatccaaagtgtagaacctaaaaacaatatatattaccatgactatggtcaaaaacagaaaaaaaaaaaacaaaaaaaactagacacgaaaagaattctagaaatattgcttagtataagagaaaaaaataggtaatagaattagacctggaaatgacaaagawgatagaatgggtggtcaagggcattaacaaatggtcttatcaatatactcatgttggagactatagagaaaaccatgaaaagcagagaaagagaaggttaaaaacacacacataataaactataattgaaacatataatatctgagattaaaaaatacaatagacatattaacagaatattagacattgtagacaaatacataaatttgaaaacacagaaattaaattattctaaatgaaacatatataaataaaagactaaaaaaattaagcacagcattaataagctctagaaaaacaccaagttgcttactatttacctgatttgagcctcaaaaggagagaaaccatttg

SEQ ID NO: 745325 - DNA, 633 bp, Homo sapiens
cttaaataaactaaaatttttttttgcatggcaaggaaataatcaacaaagtgatcagacaacctgaagaatgaaagcacgtatatgcaaatagcgcatctgacaaaagactaatatccagactctacaaggaattyagccactgagctagcaaaacacaaataactaatttaaaaaagggggcaaatagcatgaacagacatttttccaaagaagacatacaaatcaccacaagtatattttaaaaattctcaacatcactacttatcacagaaatgcaaattaaaatcactaaaaatgactaatatgaaaaaattaaaaaaataacagatgttggtaaggatgcaggaaaaaagcaatactgcttcctgtagcgattttactaatttccattcccagtaaattactaaaattgctacaggaaacagtatagagctttctccaagaactaaaaatggaagcgacatttgatccagcaaacccactactgagtatctacccaatgggaaagaaataaacataccaaaaatgtaacctgcactcatgtgtttaatgcagcactgttcacaatagcaaagatgtggactcaatgtaaatgtctatcagtggatgattgaccagaaaatgtggtat

SEQ ID NO: 745326 - DNA, 633 bp, Homo sapiens
cttaaataaactaaaatttttttttgcatggcaaggaaataatcaacaaagtgatcagacaacctgaagaatgaaagcacgtatatgcaaatagcgcatctgacaaaagactaatatccagactctacaaggaattcagccactgagctagcaaaacacaaataactaatttaaaaaagggggcaaatagcatgaacagacatttttccaaagaagacatacaaatcaccacaagtatattttaaaaattctcaacatcactacttatcacagaaatgcaaattaaaatcactaaaaatgactaatatgaaaaaattaaaaaaataacagatgttggtaaggatgcaggaaaaaagcaatactgcttcctgtagcgattttactaatttccattcccagtaaattactaaaatygctacaggaaacagtatagagctttctccaagaactaaaaatggaagcgacatttgatccagcaaacccactactgagtatctacccaatgggaaagaaataaacataccaaaaatgtaacctgcactcatgtgtttaatgcagcactgttcacaatagcaaagatgtggactcaatgtaaatgtctatcagtggatgattgaccagaaaatgtggtat

SEQ ID NO: 745327 - DNA, 401 bp, Homo sapiens
taagacaatgtgatacatataccctaaggaatactacacagaatgatgtattggtccattttaaaacacttctatgaagaaatatccaagactgaataatttataaataaaaagagatttaatggactcacagttccacatggctggggaggcctgacaatcatggcagaaggtgaggtaggagcaaaggcacatcttacatggcgktaggcaggacagcatgttcaggggaactgctttataaaaccatcagctctcttaagacttgttcacaatcatgagaacagcacaggaaagacctgccttcatgattctgttacctaccactaggtccctcccacgacctgggaattatggaagctacaattcaagatgggaatagggtgaggacacagccaaac

SEQ ID NO: 745328 - DNA, 647 bp, Homo sapiens
ttcataatttttactttaaaacaccaagtcatacattttaaacagaaaaagcagcagcagtactatactaagtaatttaaatatgtctcagtatagaagtgtaactaattaatttgctgacactaacttttaaaaaacttataaatattcaaaacagaaggaaagagtttcagacagccaagattataaaagcaattgctttaaacatggagcttccatgataaaaagggagaggtacttatctattcattatattttatttagtagtcacattaaaaaygcacacattcacacttttcccaaatatttttctaattttaatggagatccatccacttgaaaacaaatcctaatttaatttatttttttttgttttttattatttctttttaaattttttaaaaaacttttagggatggcagtacatgtgcaggtttcttatacaggtaaacttgtgttatggggtttgttgtacagattatttcatcatccaggtactacacctaatagtgaagagttattttttctgctgctctccctcctttcacccttcaccctcaaataagctccagtgtctgatgtttccttctttgtattcatgagttctcatcatttagctcccactaacaagtgagaacatgtggtat

SEQ ID NO: 745329 - DNA, 635 bp, Homo sapiens
attttaatccactttaaaaaaagaaaaaacaacatctactaaccaacaagagcactcctggtcatttttccaggtgaaattaaaatttatatatacagaaagaccttcataatatttgtgtcataattttgttgataatagtcacagaacttaaagcaacccaatgtctaaacaaatggggtatattcatagaatttaataatatattaattaaaaattaattgattagaaaaattacttttgctctcaacaacatgaatgaatctcaaaacatgttgagtaaaataaggcagaagataaaaatgtgcattcaatatgattcaattctatgaaattcacagttgggcaaattttatcatggtagaaattcagcaagttgtatttggggtcgaagagagaagatagattggaagcaggaacaaagacattttcttagatgacagaaatgttttatacctggattacactgtggkttagataggggaatatgcttgtcaaaatttattaaactgtaaaattaactgtattgaagatactcatcaaccaataagaaataaaaaattagagaaattatgattctatatagcaattaaatggaatattaaaattttgaaataaaaagactaaaatatttg

SEQ ID NO: 745330 - DNA, 604 bp, Homo sapiens
tgcagctgttactaccatccatctctagaactttgtcatcaccccaaatgcaaactttgtacctgttgaacagtaattcccgttcctcttgctcctggcaaccactgttctgttttctgtctctacaagtttgactactctattaggtgcyttatgtacgtagaatcatataatttttgtccttttctgtctgccttacttcattcagcatagtatcttcaaggctcattcatgttgtagcatgtatcagaatttctttcctttttaaggctacatgatattcccctgtatgtattgaaagtagtgacaaaaaccacaattacttttgcaccaacctaatacataccacagcttatttatccattcatcctttgatggacatttgggtggtttctacgttttggccactgtgaataatgctgctgtgaatatgagtgtgcagatatctgtccaggtcccttctttccatctccagaaatggaactgctggatcacataataattctatgtttaatttttttttaatcactgtcatttaggtgtatttttttggcagagtaaaacatttaaatattttacatagacataaatatgagcatgataa

SEQ ID NO: 745331 - DNA, 604 bp, Homo sapiens
tgcagctgttactaccatccatctctagaactttgtcatcaccccaaatgcaaactttgtacctgttgaacagtaattcccgttcctcttgctcctggcaaccactgttctgttttctgtctctacaagtttgactactctattaggtgccttatgtacgtagaatcatataatttttgtcyttttctgtctgccttacttcattcagcatagtatcttcaaggctcattcatgttgtagcatgtatcagaatttctttcctttttaaggctacatgatattcccctgtatgtattgaaagtagtgacaaaaaccacaattacttttgcaccaacctaatacataccacagcttatttatccattcatcctttgatggacatttgggtggtttctacgttttggccactgtgaataatgctgctgtgaatatgagtgtgcagatatctgtccaggtcccttctttccatctccagaaatggaactgctggatcacataataattctatgtttaatttttttttaatcactgtcatttaggtgtatttttttggcagagtaaaacatttaaatattttacatagacataaatatgagcatgataa

SEQ ID NO: 745332 - DNA, 602 bp, Homo sapiens
taaagctttgataaaatataaaatgtctttaacccctttgctgttcttgcaaacgcctgcaattcaagaattttattattctggggctaacatattttaaacctcaataactgaatgtttcctttgggataccttcaggcaaactatatattgattttctcagaatgcactgtatttttcattagcatcaaggtttggtggatatccagtcatttgttcaccaaattcctctgaaaattaaaatggactactccattttggctgtggagsctttggagcatgggcattcattttttcctattaaacactctgccaaggtacactattttgacattcatcttgtccaggacatatgataccaaatcaccttttaacttggtctgccataccattccctatttgccactcgggtttgatgacacatttgtcatagctaacatcagaatgtttctctgatttatctttttaagctatagagctatagatttgcctatataatacaaatgaaatagtcttctctgatcatactttcatttgaattagtcaggaaatttagttattttaaaatgcaagtcatattgactttgctcaatattcattgt

SEQ ID NO: 745333 - DNA, 617 bp, Homo sapiens
tgactttgctcaatattcattgtttcatttggtggtagaaacttagtccatgatgtagataatgtggttttcacatttggaagtagaattactcaagtaactttgttgtgccttccactctcatcttttatgaaccacgtctactttcctgagtgaagacagactcagcttttcttcaagggtacactgctcaccaagctgggtgtacattaagagatcatgtattaaaggaagcttatmacttattttgtcatacttcattgtttttgttgttgttgtttttaaatgagggtcttgctctatcatccaggctgtagtgcagtgacatgatcatagttcattgtaacaccaaactcctgggctcatgcgatctccctgcttcagtctcccaagtcgttgggattacaagggcatgccaccatgcctggttaatttcttaatttttaatttttggtagagataatgtctgtcgatgtttcctaggctggtcttgaacttctggcctcaagtcatcctcctaccttagcttcccaaagtgctgggattacaggtgcgaaccactgtgactagcctgtcttacactttttgataaccagcacattttttattctaccagc

SEQ ID NO: 745334 - DNA, 656 bp, Homo sapiens
gtgaccttacccccaaccctgtgctatctgaaacatgtgctgtatccactcagggttgaatggattaagggcggtgcaagatgtgctttgttaaacagatgcttgaaggcagcatgctccttaagagtcatcaccactccctaatctcaagtacccagggacacaaacactgcggaaggccgcagggtcctctgcctaggaaaaccagagacctttgttcacttgtttatctgctgaccttccctccactattgtcctgtgaccctgccaaatccccctctgcgagaaacacccaagaatgatcaataaaaaataataataataataataaattatatatatatataaaaaagaaaagaaaattaaagacagtataaatttctgtttagcttaatacagacacagattggatatacatagaaatactcatagatatgtgtatttatagggattacatacmcacatatatttccttgatttttcaggtgagagggcttagaagcaatgacatcgcagcagtgataagcatacctagtgtccaaattttggtttttaataccattttccaataaaagggaccaaagctccttggggggaatggctgatcctagaactcaggcaggaaataaataagatgagcctggagcatcttgcag

SEQ ID NO: 745335 - DNA, 569 bp, Homo sapiens
attaaaaatatgacaggtaagagcttggtgtaaccagccttcaggtaaaatttaaaactgaggcagtatttttaatgtaggaaaccaactggagatgttcgtgcataatttgtaaccatgaaattggttccagaaaggggtcatgaaaagcatagctctgctaaggctgcaaagcttctttagggaaaagtcactcaaccccttcactaaaccaccttctcttcagagtctttaacaatgaatgcttgttgcaggagcttagtcacaacgtttgccctgaacacttgtgaaggatcaggcacaatacattcctcagccatgtgaggatgttggggctacctaggactttctcttagagatacttacctaggcctgctctccacagraaatatctgttgtgttaggctgttcttgcattgctataaagaaatacctgagactggtaatttataaagaaaagaagtttaattggctcaaggttctgcagggtgtacaagaagcatggtgctggcatctgcttggcttctaggaaggcctcaggaaacttacaatcatgggaaaaggcaaag

SEQ ID NO: 745336 - DNA, 533 bp, Homo sapiens
ttattcaaataagtacataatctcacagctgaatactttccatgaatattctgacacatttatttaaatttttgaaattttactttatgcatgttataatggaaaatagaggatgaatctctttataattttatctcatttatgttaaatacaaagatattctagatcagaactaacaagatgaaagtaatttattaaaagtatgaaatttcattaaagtagtatttaattttttttatgttggcatgattggtctattaccaacaaccttcaaggagctaactcttttataatctttattcctggtgcttgattttcctctttatatcaatccactatgtgttccacaattctaatctcagatttaaaaaataaayggtcaaagggagtggcaaaatatttgaattgctttcagaggtttgatggtaggacccagaagacatagagattgccagaattaacataacagaggattcaatgtgctcctgtgagaagcattgattggggtgggaatacaagtctgtttcaagctt

SEQ ID NO: 745337 - DNA, 634 bp, Homo sapiens
agctcagacttaaggatggcaaacttttgagtttttttagttcatgctgaatttagttaaaaggtcaaaccccctaacttttcctttttgtatgtctcttctgcttctctgacataattcttaaaagaaggcattttagatagtcttagtgcattttctgttgcttataacagaatattgaaactyggttatttctaaagaaaaggagtttatttcttacactttgggggattgagaagccccaggtcaaagggccatatctggtgagagccttcttgctggtggagactctgaagagtcccaaggtggtatggagaatcacagagtaaggggactgagcgtgataatgtaatagcttgagtctgtctttctcttcttataaagccaccagtttccctttcatgataatcccttaatccatgaatgggttaatccattaatgaggacagagtcctcatgatccaatcacctcttaaaggcactccctctcaataccatcacattggggattaagtttaaacatgagttttggaggggacattctaactatatcttaaagtggtgaaaatgtgtgtcttcggatttggttaaaacgtaacaaatgttcagaaatctgtttcatgggttgaaattt

SEQ ID NO: 745338 - DNA, 594 bp, Homo sapiens
tatacttcctggaccttgtggttgttagttttctttttgttgtcagtggttttggtttggttttccatgtgcaggattctcatttgacctgctttctaaatcctctcttcggtgtttctctcctacccagtcccattctcttaggttttcctcttcctttttttcttctccctattaaaaattctcaaggcaaagggatgagaatcaaggatatcaagggttaaggtgaaagacagtggaaggaagaagtttgctccctttttctctgttttatcctctggctgaaagaagtagaaataaataacrtagatggtgttgaaacttgggctccctggagggcacctaagtagaaccagcaaagcccaatcctggcaccagctgtggttgataaaatagcctaagggttacatcttcaacaaagtacagaagctacagattaaaaataaaaataaaaaaggcacatggagtgaagggtgatggggtaacctgtcaggtgagccaactccaggtctctttaaatacagtgaccagcctgggcaatatggtgaaactccatctctacaaaaaatacaaaaattcgtcaggcatggtggt

SEQ ID NO: 745339 - DNA, 606 bp, Homo sapiens
ttatctacaagcccctgactggggctctgccttttttcagagatgccctgcccagagaggaggaatctagagaggcagtctggctacagtggctttgttgaacttcagagggctctgcccagttggaacttcccagcagctttgtttacactgtgagggtaaaaccgcctactcaagccttagtaatggtggacgcccctccccacaacaagctccagtggcccaggtcaacttcagacttctgtgttggcagcaagaatttcaatccagtggatcttagcttgctgggctccatggyggtgggatctgctgagctagaccacttgggtccctggcttcagactcctttccaggggagtgaacggttctgtcttgctggcattccaggcaccactggggtatgaaaaaacaaacaaacaaacaaacaaacaaactcctgcagctagcttggtttctgcccaaacggccacccagttttgtgcttgaaatccagggccctagtgacgtaggcaccagagggaatctcctggtctgcagttgtgaagactgtgggaaaagcgtagtatctgggccggagttcaccgttcctcatagcacagcccctca

SEQ ID NO: 745340 - DNA, 635 bp, Homo sapiens
gaagccatgatgcacagtaacatgctgtgtatttctcccagtgctcctcactcaccctgcctcctggggattctagaaaacctacaagtttagaacctaaagcagctcctgggagaatgatagtaaatgcctgtcttaactcctaaaagttgaacatgagatcctgagccatataacatgataagttcttatccttcatctcttgcacattttaaaagaggccttctctgtgtccctcactcartgatatggtttggctgtgtcccaacccaaatctgttcttgaattgtagtttcccataatctccacatgccatgggagggacccagtgggaggtaattgaatcatcagggcagtcccccatgcagttctcttgatagtgagttaggtttcatgagatctgatagttttataaggggtttttctcactttactcggcacttctccttcctgccaccatgtgaagaaggaggtgtttgcttccccttctgccatgatggtaagtttcctgaggcctccctagccatgcagaactgtgagtcaattaaacctctttcccttctaaattacccagtctcagatatgtccctatagcagcatgagtatgaaataatacagtaaattcataccacagt

SEQ ID NO: 745341 - DNA, 598 bp, Homo sapiens
aatttcctcaacatcaaagtggggtgatcataactgccctccctacctccacaggcctgttgtgagactcaaggctgatgatgctgttgagaagcaggagcaccctgtatactgaaattttataaatcagtaaattgtgattaatataaatgtgccatcctcttacctcccacttccaatcaaacaatggaactcatttagaatkcagaagagactgaatagcacctcattcagaaaagcaaagcattaggtggacaatcggcttgcagaaaactcagtgtgatcaaggaatcagaaaatcatcagcagatgccacaggctacactaataggagtatgtggttggctttgttctattcaatagagtttaaaaattattttttactatttctgacctatttgcaatatctgagaccctaccctggtgctgtttgtttgcggcatttcctctgcataatctgttctccaactgctacctcctggtagctgtgtgacattgggcaagtgacttctctgtgtctgtttccacatctgcaaaatttggataataataatacttattcctcacagggctgttgtgaggatccagtgaggtgtta

SEQ ID NO: 745342 - DNA, 534 bp, Homo sapiens
cccccagccctcagcctctggcaaccaccattccattctcccccttttattttaaattaataaagattaattttatattttcatatttaaaaaagagattgttccttgaaaactcatcagtctccacatttcttagcttggaatttaggtccttctatatcaaactgtctttccagtctcatctcctaccagtttttcagacattctgtgctgctgccagacaggtctagaaaggcttcctgagcatatctgatgtgcctggcatttgtttttcaggtcctgctatgattggaatgtytgtccctccaaaactgatgttgaaatttaatccctaatgtggcagtattgagaggtgcagcctttaagaggtgattgggtcatgagggctctatcttcatgaatatggattaatccgttcatggataaaggcattaatgagttaatgcattaatgggttatcatgggagtggaactggtggctttataaaaagaggaagagagacctgagctaacatgttcagccccctcaccctg

SEQ ID NO: 745343 - DNA, 582 bp, Homo sapiens
tatatatcatatatatatataacttataaaataaatttatacctaatatcaaatccagggtataaaaaggattatacatcattaccaagtgggatttatcccaggaatgtaagattggtttaacatatgaaaatcaattaccgtaataaacaataggaaaaagggcaaaaccctcagtagttgcagaaaaagcattttgtcaaaaaggggttttatagtcacaagtgttagtaagaatatgaattatgggaactcacacactgttgtttccaaggaaagctggtcaacaattttgggaaagagtatggtgatatctagaaaggagagtgaagtacagtgcctagagtacacgctagaggaacactttcacaggtgcacaggaagacatatccaagaatgattccagttgcacagcttggaatatctccaaatgggmattaacccaaatgctggctgtcaacagcagaatggatacatcgtggcatagttatacaaggggatatccaggaatgaaaagaacaaggtatgactataccccatatgaactagtcttacaaatcagatactgagtgtaagaaataa

SEQ ID NO: 745344 - DNA, 517 bp, Homo sapiens
catgactgaggccacgggactgctctctgcacagagcaggaagaagacatacataactgagtataactttgtcacaacggagtactcggtggtgcacaagactgggtgtgcacgtgccaggacaagtccctcggtgcacacagcgcacgtgagctggagcccagcatrgagctgaggaacagcgctggggtcccggcggttcaccagcttaccaccaggtgtcgctgtgtgcacgagggcaaagggcacccgcagaccagcagggccgagccgggctctgcagaatcggactgggctccctgtggggagaccacattctgtctgacgccagcagaagaagtgcctgtccccaagatttcaggggacacctcagacccgagtcatgcagcagctccgaggcaggtggtgcccctgaactttctagccgttcaaagtcagtgcacatccaagcgtttgctgagtgattctgctgcgcgggtaaccacccagacccgtgaacagtgcaggaggccagttc

SEQ ID NO: 745345 - DNA, 496 bp, Homo sapiens
ataggggaggggatccggcaggtgggggctctgcgtggggagctcatgcagtggacagaacaccactgctggccaggagcccgccaggcctgcagtgggggagtccgtgcctgggggtgggactgaggtgggctggagggtccckgatggggccagagccacagcgtggagtgaggaggtgggagccgcagaggcgtgcccagttgagtggtagaggcagcatttgggcctccttcatgctcaggtgctcagctccttcccctgaggggcaggaagtcagggaggagggagtgagaggtgggaggtggcaggcgggcggaggggaagatgtcctgtcccaagagccaggggtgccccaccccacggtgacatgttcctgaacgggttgtgagtggagggctcagttcctgggaactgcctcacctggactgtgggcgggaggcagctcctggccccgtgcccgccccctcgggcctgttcccctgccaggatctgg

SEQ ID NO: 745346 - DNA, 450 bp, Homo sapiens
ttttgcataaagaacaggtggagagaaaatgaggccaagggctagccccggctctgccaaagacggtgcagcccagggaccctgagtgggatggagggcctgggtaaagccttaccccagttctgggggcctcaagggagggcccaggttccgggggccatgggtgggaaggggraggacccgggtaaggccttaccccggttccggcgcagccgtccccagtggtaataacactcctcgtcccggatgcagcggcctgaagaggacacgaggtactcggtgccacagcggcagcaggtcctgcaggaagctgtgggtggggacccaggtggaagctgaggctcacgctggggcccgcatgcccggccttgcccacatcccgcacctgcccacctaggccgtcgcaggccagcgactcacagtccttgggcctcttctcctcagctgtga

SEQ ID NO: 745347 - DNA, 570 bp, Homo sapiens
ctgccccacaagactgcggtactctcacgccagtgcacagatcagaatccagataaggtcccaggtttcctgggatggtgactcctctcccttcagggcccctcgatctgcaggcctctcccctcctgcacctgcgcctggcgccaggccctccagggtggctgggatctgtggtttgtgcacccctcggatgtgccgctgaagctggtctgtcacctgccaccccaagagcctgagtgacgttgccccagggatctgagttagagtcatagtgagcgtgtgcctgggactcccagctctgccagcctttggggtgcttccccctcctgcagaggctgtggctgcaggtcaaggcactgctcgtcatcctccgagtcctcctgagctcccagctgccrgctcggctcccactggcccttccctgggctccagtgcctcctgtgagccgcctccccggtgcgtccccagctctcccaggctgagctgggtggacaggcctgtgcccgtgttgggtggtcctgagatcccggcatgaggtgagtgcccacatgtgaccctcagagacctccc

SEQ ID NO: 745348 - DNA, 601 bp, Homo sapiens
agtgtctggatttactgtgcctgctgtgccttcggacttccttgtgtgtctaggggcttcctgtctgatttgaacctgtctagttcctctgaagaggatgagggagcagcgcctcattgcctgggctctgggcaggtctgggagccaggccgtttgcaggatggcccgcgatggtgcagcactttgtgcagacagattttgtggaattgccgatttgggtttcttcttttcttctcctcctttttaataatacagtaattactctgggctacaaaggaagtaggcgagggtttttttaattgaaagttcctgttgctcatcccaagcttaggggaagccagtatgccagccattaatttggggattggggtagtcctgttggtgtgccaggcacggttgggagggggggcactgtgtcttttggaactggtgggggttaccgcgcgcccgagtggmagactctagcgccccagcagatgcgtccgcagagccactgggacggacggaagctgagcttagggacagccggagttgcttgccctggggcatctggagagggggatcctgttgagcgtttgatgttgcctcctttctgcacccc

SEQ ID NO: 745349 - DNA, 575 bp, Homo sapiens
cgctatttaaaaggcagagaaaatcttagaggtttttttattgtcaccagcggtgtttcgttgatgcgtaattgcctttggaggcttgaaaaaagttgtgcttaaaggtaatccctcaattatctggaaacttccaccctccagagtgaggcaccccaagtcctggtctggattcgtggacagagtccctgcctgtgaggcctgatggccagtcctctcgccttggccgtggtgcttcaggccctgttgcaggtgggacccgccctccttagggaccttgtttcccaggtgatgctcatgtaatctgcggtgacctctgccccttcccatctgacctctgtccccaggaaagatggcaggcgtgcgagggctcatcctgtccscggcagttgtgcccctcgggcttctgctccagtggtcctggggcagggcagctggcgctgatgcccaggctctgcctggggacagttcccaggacgggagcctgagggcagcgcacgggaccagcgtgaggacacggactggcccgtgtctgcctctgacttgctgggtgtgcctttgagttcctctgaggg

SEQ ID NO: 745350 - DNA, 656 bp, Homo sapiens
gggattacaggcgtgagccaccgtgcccggccctatcgctatttaaaaggcagagaaaatcttagaggtttttttattgtcaccagcggtgtttcgttgatgcgtaattgcctttggaggcttgaaaaaagttgtgcttaaaggtaatccctcaattatctggaaacttccaccctccagagtgaggcaccccaagtcctggtctggattcgtggacagagtccctgcctgtgaggcctgatggccagtcctctcgccttggccgtggtgcttcaggccctgttgcaggtgggacccgccctccttagggaccttgtttcccaggtgatgctcatgtaatctgcggtgacctctgccccttcccatctgacctctgtccccaggaaagatggcaggcgtgcgagggctcatcctgtccgcggcagttgtgcccctcgggcttctgctccagtggtcctggggcagggcagctggcgctgatgcccrggctctgcctggggacagttcccaggacgggagcctgagggcagcgcacgggaccagcgtgaggacacggactggcccgtgtctgcctctgacttgctgggtgtgcctttgagttcctctgagggtgggtgcgccgagggggatccagctgggccctggccacgtgcagg

SEQ ID NO: 745351 - DNA, 432 bp, Homo sapiens
gaccagcgtgaggacacggactggcccgtgtctgcctctgacttgctgggtgtgcctttgagttcctctgagggtgggtgcgccgagggggatccagctgggccctggccacgtgcaggccagccagagccctggagcctgcaggtgggctgggacagggcttgcgaccgcaggggtggtgtgcgtttgcgctggcgtctgcacaggtgtgtgcgtgcygtgccatcacgctggtcaggcctgtacgccgtggagaggggcgctgtgtggggctcgctgcctgagccctgggtggaccgtggctgccccatgagttgtcggggacctccgctgccccttggacctcgcccgcggccctgggcaatgggtgtggtgacgtcctggggcccccatgagtcagctcgtcctcgtgcccgggcactggcctctcct

SEQ ID NO: 745352 - DNA, 531 bp, Homo sapiens
tgtcccaagcacacttatcagggaaatcagaaaaaaatgctaccttttctggcaaaacaggaaaataaacctattcttaaatcctagagaagatgtttctcttttgcaggaaaaggttctgagctgagactgtttcatggttaaagtaaaaacagtgcttgaaactcacgcccaatgaggaaatctgggacgaaggaagtcaggggctgggkgaagcagagagccactatcaagggacagaggtaacaggggagtctgaatgacatcacactcgataaccctccctccacgactttccttgcgatgtccctctttttctccaatccaaatcccacatctcctccaagaaacgctgccatgacgatgaaaaccaccatgacgctgtgaggtggagtccaccaacgtcctctgcccgaccaaaagcatggaattcctcggagcccactcgagtaagctttgacttcctccctgccagtcatgctggacacagggctcgacaaacacaagagacgatcctcggaccatcctaac

SEQ ID NO: 745353 - DNA, 567 bp, Homo sapiens
gggtgtcaccactggggactgggtggaggctgcttagcaccctgcagtgcccaggacagacccaccccaaagaatgatcaggcccaacatccacagcgtcgaggttgatgtcagcttttcaacatattctcaaagaggtccaggccctacyggtgctgccccgctggtgctggggacttggagggccctgcagtttaggtggcatcatgcagctgggtcctgagagcccagtggacagcagcaggcccctggagaccccggagacgaaggggcacaccgaggtggccagggccccactatccaggccagaaacaaagatgttatccttgacacctccttccacccactggatctgagccggtccatcaccagcccggtggctctgcctgtctcccatcagccaccgcccggtccctgcctccatcacctttcaccagagccacagcaacagcctccctccttgctgatcacctgctccaggacattctcccccagcagccaaacaatctttcacgacacaaatgcaatggagccgcttccctcttggggtgtcctgggggcctccca

SEQ ID NO: 745354 - DNA, 642 bp, Homo sapiens
attttttgctttctccctccctcgatcctaacccccctccatccccccctcactccctccctccctctttccatccttcctccctcccttccctctttccttccttcctgccttcttcccttccccttcccctcttccttctgtccttccttcctgtgtgtaaaagaaaaattggtgaatagaagaataattgaataactgcctgagtcacttatacatttctcatctcactctggggacacagaagaccgtgttgtactcatctcctcgattttaaaaacagtcattctaaaatcaaggattctagatgtatcacttctaggcgaaatcttgaaagaraatgtgtaagagtttcatgtgctcttcatctctatgatcacaattgaagaaggcaggaggttgagatgctgcatcgccaagatcgtggtgattccattatcattacccttgtaacttgtgagcatccttactgccagcaatcattattagatatggaatctgatataggagttcatatttactgtatgaatatcttggtgtgggagtgttggctcatgcctgtaatcccagtgctttgggaggcagaggcaggaggctcgcttgaacccaggagttcgagacaagccggaagagcatggcgag

SEQ ID NO: 745355 - DNA, 540 bp, Homo sapiens
catgttagtgaattaataaatacagcagtaaagaatagagttgtggttgggaatggtgtctcacgcctgtaatcccagcacaatggcatgccgaggcgggtcaatcacctgtagtcgggaggtggagatcaccctgaccaacatggagaaatcccgactctactaaaaatacaaatcagcctgtcatagaggcacatgcctttaatcccagctactcgggaggctgaggcaggagaatcasttgaacctaggaggcagaggttgcggtgagccgagatcgcgccattgcactccagcctgggcaacaaaagctaaattctatatcaaaaaattaaaaaaaaaaaaaaagaaggctgtttgttgaccatttgagtggccagtcttggtgcttcctggtgggcgaggagagccctgccccattcctacccattccagtagtcatggcataagagtgattctcactttctgctatagcctccttatccattggctgaaatgattgttttttaatgtgtcttataaatgcgtccatagcaaaaa

SEQ ID NO: 745356 - DNA, 525 bp, Homo sapiens
ctgtttgttgaccatttgagtggccagtcttggtgcttcctggtgggcgaggagagccctgccccattcctacccattccagtagtcatggcataagagtgattctcactttctgctatagcctccttatccattggctgaaatgattsttttttaatgtgtcttataaatgcgtccatagcaaaaaaaattgaattgacttttgtagggactctttcggggattgttacccatcattccataatttgtttgtactcctagaaaagggaagtatgccgagcacagtggatatttcgtctcaaataataaataaataaccaaatagaaaagaaagaaaaggaagtaaagggaaatatacaaatatacaaggtgttaggagagagttgctaatcgtgattcccccttaattgtccaaacagaccacctctggggatctattcgtaaaagactcgttagaagtgcagactcatgcatttgagaatcactcagggaaatctgaagatgacctgtggtgggggtgtaaat

SEQ ID NO: 745357 - DNA, 525 bp, Homo sapiens
ctgtttgttgaccatttgagtggccagtcttggtgcttcctggtgggcgaggagagccctgccccattcctacccattccagtagtcatggcataagagtgattctcactttctgctatagcctccttatccattggctgaaatgattgttttttaatrtgtcttataaatgcgtccatagcaaaaaaaattgaattgacttttgtagggactctttcggggattgttacccatcattccataatttgtttgtactcctagaaaagggaagtatgccgagcacagtggatatttcgtctcaaataataaataaataaccaaatagaaaagaaagaaaaggaagtaaagggaaatatacaaatatacaaggtgttaggagagagttgctaatcgtgattcccccttaattgtccaaacagaccacctctggggatctattcgtaaaagactcgttagaagtgcagactcatgcatttgagaatcactcagggaaatctgaagatgacctgtggtgggggtgtaaat

SEQ ID NO: 745358 - DNA, 816 bp, Homo sapiens
gaggcacatgcctttaatcccagctactcgggaggctgaggcaggagaatcacttgaacctaggaggcagaggttgcggtgagccgagatcgcgccattgcactccagcctgggcaacaaaagctaaattctatatcaaaaaattaaaaaaaaaaaaaaagaaggctgtttgttgaccatttgagtggccagtcttggtgcttcctggtgggcgaggagagccctgccccattcctacccattccagtagtcatggcataagagtgattctcactttctgctatagcctccttatccattggctgaaatgattgttttttaatgtgtcttataaatgcgtccatagcaaaaaaawttgaattgacttttgtagggactctttcggggattgttacccatcattccataatttgtttgtactcctagaaaagggaagtatgccgagcacagtggatatttcgtctcaaataataaataaataaccaaatagaaaagaaagaaaaggaagtaaagggaaatatacaaatatacaaggtgttaggagagagttgctaatcgtgattcccccttaattgtccaaacagaccacctctggggatctattcgtaaaagactcgttagaagtgcagactcatgcatttgagaatcactcagggaaatctgaagatgacctgtggtgggggtgtaaatggatacttaaatgtgtcttgtgattgtgtgagagtgtgactgtgtgtttgtgtgtgtgctgtcatctgtggagtgggggatcctcttttgccttgagaaagctcatctctgtccacttactctggg

SEQ ID NO: 745359 - DNA, 525 bp, Homo sapiens
ctgtttgttgaccatttgagtggccagtcttggtgcttcctggtgggcgaggagagccctgccccattcctacccattccagtagtcatggcataagagtgattctcactttctgctatagcctccttatccattggctgaaatgattgttttttaatgtgtcttataaatgcgtccatagcaaaaaaaattgaattgacttttrtagggactctttcggggattgttacccatcattccataatttgtttgtactcctagaaaagggaagtatgccgagcacagtggatatttcgtctcaaataataaataaataaccaaatagaaaagaaagaaaaggaagtaaagggaaatatacaaatatacaaggtgttaggagagagttgctaatcgtgattcccccttaattgtccaaacagaccacctctggggatctattcgtaaaagactcgttagaagtgcagactcatgcatttgagaatcactcagggaaatctgaagatgacctgtggtgggggtgtaaat

SEQ ID NO: 745360 - DNA, 613 bp, Homo sapiens
tgtcccattggagttttgacaactctgtgtattctgagtatgagcagtccttgcacgtatatgagatttgcaaatattttgtgccccaatctcaaggttgctctttgatacaaatcaagagcatctgaggcagagcaaaggttcaggtgagaggacggagcatttctccacctctccagcatgcgcagcatctctctcctccgagatgccgagacatgtgtgcagggagacaccatgaaaaagcaggtgtgcttcattctgaatagagcgtctctgattcccgtctggtgcctgagggtscatggcccatgagccttagaagagacgtcttcgggccttgcacgttggcctccatagaaacttgtggcaaattctgggctccggactgggtgatggagttagaggtctgagggcagaggtgggcaggggctccaggccgtggagatccaagtggaattcttcaggcagagcctgtctccagggactaggcttgggcatttgggatgagccctgggggacggccgctctgtagtcaggtttgaggtagaggacacgccaggaagaagggctgactccatgcacaaggtttgctgggggtcccatcaggggcagg

SEQ ID NO: 745361 - DNA, 589 bp, Homo sapiens
agcaatgttaatgttcccaatcactttgagtccattctttccttaactatgtcttaatgcatagttgtgttggatggcctagtttgtaatgttagaatatgcatgttagcgaattaataaatacagcagtaaagaatagagttgtggttgggaatggtgtctcacgcctgtaatcccagcacaatggcatgccgaggcgggtcaatcacctgtagtcsggaggtggagatcaccctgaccaacatggagaaatcccgactctactaaaaatacaaatcagcctgtcatagaggcacatgcctttaatcccagctactcgggaggctgaggcaggagaatcacttgaacctaggaggcagaggttgcggtgagccgagatcgcgccattgcactccagcctgggcaacaaaagctaaattctatatcaaaaaattaaaaaaaaaaaaaaaagaaggctgtttgttgaccatttgagtggccagtcttggtgcttcctggtgggcgaggagagccctaccccattcctacccattccagtagtcatggcataagagtgattctcactttctgctatagcctccttatccat

SEQ ID NO: 745362 - DNA, 573 bp, Homo sapiens
cagaatcatttgtttgtcccattggagttttgacaactctgtgtattctgagtatgagcagtccttgcacgtatatgagatttgcaaatattttgtgccccaatctcaaggttgctctttgatacaaatcaagagcatctgaggcagagcaaaggttcaggtgagaggacggagcatttctccacctctccagcatgcgcagcatctctctcctccgagatgccgagacatgtgtgcagggagacaccatgaaaaagcaggtgtgcttcattctgaatagagcgtctctgattcccgtctggtgcctgagggtscatggcccatgagccttagaagagacgtcttcgggccttgcacgttggcctccatagaaacttgtggcaaattctgggctccggactgggtgatggaggtagaggtctgagagcagaggtgggcaggggctccaggccgtggagatccaagtggaattcttcaggcagagcctgtctccagggactaggcttgggcatttgggatgagccctgggggacggccgctctgtagtcaggtttgaggtagaggacacgccag

SEQ ID NO: 745363 - DNA, 509 bp, Homo sapiens
accctcggcctcccaaagtgctggattacaggtgtgagccactgggcctggcccaaatttctacttttcaccagcaagtctgtggtattttatagtagccctaccaaactaatataatctaccatctagattccatcagtgatactttattatacttgcctgaccacattgatctctgtatcattcatcaacccatctttatttttattttttttttgcattttgaagtagkttgcagacagcaatagatttctcccctaaacatttttaacatacatatcattaattagagttcaaaatttggggctggaagatctctttccaaggtggctcatcttctgcctagcaatgtggtgctggaaagttggtcctttgccacggcgctgcttgagtgtcctcatggcatggtggatggctttctccagggagggagcaattgaagaaaccgaggaagcttcagtgtgtcttatgacctggcctgagatgccacacatggtcacttcagcagc

SEQ ID NO: 745364 - DNA, 509 bp, Homo sapiens
attttaagagacagggtcttgtctgtcgcccaggctggagtgcagtggtgcaatcatagctcactgcagcctcaaactcctgggctcaagtgatcctcccacctcagcctcctgagtagctgggacctcatgtttgcaccaccacacctgggtgatttttttttttttttttttaagatatgggggtctagccatgttgcccaggctggtcttcaactcctggccataagctaatcctcctgcctaggcctcccaaagtgctgggattacaggcatgagccacagttcctggctcctrcattactttttctgatcatgttgtccccagcctcagctgtgattggctccaaaccccagctcccagccaacacctcatcttttggttacagtgattggctcaggagtgagtgtgtaacacacccagagccaatgagaggcaaggacatttgctggggattctgggaaagtacacctccctttttctttcttgggagcaattgaaagagacc

SEQ ID NO: 745365 - DNA, 622 bp, Homo sapiens
tgtcccattggagttttgacaactctgtgtattctgagtatgagcagtccttgcacgtatatgagatttgcaaatattttgtgccccaatctcaaggttgctctttgatacaaatcaagaacatctgaggcagagcaaaggttcaggtgagaggacggagcatttctccacctctccagcatgcgcagcatctctctcctccgagatgccgagacatgtgtgcagggagacaccatgaaaaagcaggtgtgcttcattctgaatagagcgtctctgattcccgtctggtgcctgagggtscatggcccatgagccttagaagagacgtcttcgggccttgcacgttggcctccatagaaacttgtggcaaattctgggctccggactgggtgatggagttagaggtctgagggcagaggtgggcaggggctccaggccgtggagatccaagtggaattcttcaggcagagcctgtctccagggactaggcttgggcatttgggatgagccctgggggacggccgctctgtagtcaggtttgaggtagaggacacgccaggaagaagggctgactccatgcacaaggtttgctgggggtcccatcaggggcaggaagccttgg

SEQ ID NO: 745366 - DNA, 437 bp, Homo sapiens
aagaaattcttttgggctgggtgtggtggctcacgcctgtaatcccagcactttgggaggccgaggctggcagaccacctgaggtcaggagatcgagaccaccctggccaacatggaggaaccccgtctctataaaaaatacaaaaattaaccaggcatggtgacctgtgcctgtaatcccagctactcaggagggtgaggcaggagaatagcttgaacctggaaggcagaggttgcagtaagcccagactgtgccacttgcactccagcctggccgacagagtgagactccrtctcaaaaaaaaaagaaaaaaaaaaaaagaaattcttttgagcgctctcctattgatacaccacacagtcacgtatggtttactatcatatttatgatgacttttttttataccttctttgacaggagctatggtcctgataat

SEQ ID NO: 745367 - DNA, 569 bp, Homo sapiens
tgacaatagaaaaaaatgctctccctcttcccccttttattagcaaatccctgaaaataagtacctctcccctccgcacacacacataaaccacaaatatctaatatcaaagctggaaaaaagaggtagtgccattaaatgctcatcatgtgcaacattttgactctgagaaatagaaagatattggcaggttaaagcagcaaatcacagtttcaaaatataaaagcatactacttcagaacatgggaaagcacttagagctagtgtttgagacaagagtagactttgaagcaaacatttgggtgactcgttggtcttttacatccaggttcttctatcattctatccaccaaatactgctaagctgtggaaccagtaagtataagaacacaggctaraaaactaaggctgttccctgggattctggtgaaagctaataagaataggctctcaaaaagagacaactggctcttagcggcacactagctagcaatatttctcattcttatcccaaaataataagaaccaagatttattacagaaactaaatattctaaacaaactaaaaa

SEQ ID NO: 745368 - DNA, 630 bp, Homo sapiens
ctcagggtgtcaccttcagtatctgaagttaaccctcccccatcaccatctgctgagctggtgtctcctatcccagagcttctctaattcagtatatccagagactaaacatctagtttgtggtgggagataagaaggcatttgtaggagagtctacctactctgagtatagatttttcagagtttccctctgtttccagcagtcttgtcttgctccttaytttaactgtttaccagagtcctgaaacaattctatttgcttctcttggtattcccttctgcaggcatttaggttgcagcttactttgctctactaatttaattattgctcctctgtgttccatcatcttccaaatatttgtttaaattctttgcctgaagctgggcatggtggcacacacctgcagtcccagcctactcaggagggtgaggtgagaggaccacatgaacccaggaattcaaggctgcagtgagctaggatggcaccactgcactttagcctgggtgacagagcacgaccctgtctctaaaaaataaacaaacaaataaataaattccttgtctgctattgtcccctctaccactgtctccaaatctgccattttagtcagaatttcctgaggctataaa

SEQ ID NO: 745369 - DNA, 630 bp, Homo sapiens
ctcagggtgtcaccttcagtatctgaagttaaccctcccccatcaccatctgctgagctggtgtctcctatcccagagcttctctaattcagtatatccagagactaaacatctagtttgtggtgggagataagaaggcatttgtaggagagtctacctactctgagtatagatttttcagagtttccctctgtttccagcagtcttgtcttgctccttactttaactgtttaccagagtcctgaaacaattctatttgcttctcttggtattcccttctgcaggcatttaggttgcagcttactttgctctactaatttaattattgctcctctgtgttccatcatcttccaaatatttgtttaaattctttgcctgaagctgggcatggtggcacacacctgcagtcccagcctactcaggagggtgaggtgagaggaycacatgaacccaggaattcaaggctgcagtgagctaggatggcaccactgcactttagcctgggtgacagagcacgaccctgtctctaaaaaataaacaaacaaataaataaattccttgtctgctattgtcccctctaccactgtctccaaatctgccattttagtcagaatttcctgaggctataaa

SEQ ID NO: 745370 - DNA, 681 bp, Homo sapiens
tttggaaggtcacagcaggaggatcccttgaggccaggagttgaagaccaacctggacaacatagtgagacctcatctctacaaaaaataaaaattaaaaaaattagctgggcatggtggcgtgcacctatagtcctagctactccagaagctgagatgagaggatgactggagcccaggtttgaggttacattgagctatgaaagcaccactgcactccagcctgggkgacagagcgagaacctgtctcttaaaaaaaaaagaaacaagaaaaaaacttcagtgcatcaaaggacatcaacagagtaaaaaagcaatccaaaaaatggaagaaaatatttgcaaatcatatatcttataaggatttgctatggtttggatgtttgtctccttcaaacctcatgtcaaaatttgatccccattgttagaggtagggcctaatgggatgcattcgggtcatgggggcagatccctcatgaatagattaacagcctcccttagagataagtgaattctcactgcattagttcccgtgagagcttgttgttaaaaaaacaaaaacaaaacaaaaagaaagaaagaaaagcccagcccctccccgctctctcttgcttcctcttttcccctgtaatgtctgtacactggctccatttcccctcccaccatgagtggaagcagcct

SEQ ID NO: 745371 - DNA, 509 bp, Homo sapiens
tccactaactgtcttgattagacctcctcagtctctcacattttctaaagtacctgctcacaaatgtttaatggcatccaatgtatggctttttactagattaaagccagccagaacatggagtccaagactggagcgttttaagtgaactctactgactgggccatgcaaaatgacttgttattaaacactatcttgctggggcttctgtaaccatttgaacacataccaaagctcaagagcartaagatttttaaatacctagcaaggttgaagacacacaaactctgtgatccagcaaatcaattttttgtacacatccttgagaaacacagacgtacacaggaaatcacgtgtaagaatgaacactaaagcatttacaaagcaaaaattgcaagcaactcctatgcctttcaattagagaaccattaaacactgcaatttacaggaatgaactaaatctaatgtgccaatgtaaaagaatcttgaaacaaaatgctgagggggaa

SEQ ID NO: 745372 - DNA, 588 bp, Homo sapiens
ggggatacaaccaaaccatatcatgacccaaggagagtaatccaggttggtgggcagctctactccgagtggtcactccaggagccaggttcctccaaccttgttgcactatgactcttaccatcttgtcctcatctgcattgttatagttggttgctgtcactgtgtaattctggcctgggggaagagggaagagaggagaccyagaacaaggatttctttttttaaagcaagtcaggtaaagcagaaataggacacatcacttttgctattatttcactggtgcggtatcagtctcatggccaaatgtggcttccaagaaggctggtaaatctagttctgagttgagtgaccatgtgtccaagaaaaagaaggtagactaaatctgatctgggagataagaagcaggcagccacagcatcttctctgatgggaatgtacatttcaggagatgtaccatgcactatgcataatgttctgagttttcgcaagccttgtctcgtttacttctacactgcactccacaaggtgtgtatatatatatatatatatataccacaaggtgtatatccacaaggtatatataac

SEQ ID NO: 745373 - DNA, 588 bp, Homo sapiens
ggggatacaaccaaaccatatcatgacccaaggagagtaatccaggttggtgggcagctctactccgagtggtcactccaggagccaggttcctccaaccttgttgcactatgactcttaccatcttgtcctcatctgcattgttatagttggttgctgtcactgtgtaattctggcctgggggaagagggaagagaggagacccagaacaaggatttctttttttaaagcaagtcaggtaaagcagaaataggacacatcacttttgctattatttcactggtgcgrtatcagtctcatggccaaatgtggcttccaagaaggctggtaaatctagttctgagttgagtgaccatgtgtccaagaaaaagaaggtagactaaatctgatctgggagataagaagcaggcagccacagcatcttctctgatgggaatgtacatttcaggagatgtaccatgcactatgcataatgttctgagttttcgcaagccttgtctcgtttacttctacactgcactccacaaggtgtgtatatatatatatatatatataccacaaggtgtatatccacaaggtatatataac

SEQ ID NO: 745374 - DNA, 588 bp, Homo sapiens
ggggatacaaccaaaccatatcatgacccaaggagagtaatccaggttggtgggcagctctactccgagtggtcactccaggagccaggttcctccaaccttgttgcactatgactcttaccatcttgtcctcatctgcattgttatagttggttgctgtcactgtgtaattctggcctgggggaagagggaagagaggagacccagaacaaggatttctttttttaaagcaagtcaggtaaagcagaaataggacacatcacttttgctattatttcactggtgcggtatcagtctcatggccaaatgtggcttccargaaggctggtaaatctagttctgagttgagtgaccatgtgtccaagaaaaagaaggtagactaaatctgatctgggagataagaagcaggcagccacagcatcttctctgatgggaatgtacatttcaggagatgtaccatgcactatgcataatgttctgagttttcgcaagccttgtctcgtttacttctacactgcactccacaaggtgtgtatatatatatatatatatataccacaaggtgtatatccacaaggtatatataac

SEQ ID NO: 745375 - DNA, 729 bp, Homo sapiens
gttctccctttccacggaagccaggctccatcccgccccgcacctgtacaagtgtctgctgctaattaagagagagacagatggaggaaggtatagtttaattttacagccccagtttcttcaaggcaattaggctcattagaaggaaagcaccttttcctttcttcttcttcttttgtaaatgaagaaaagtcaaataggagagggccagtgttgttgaaaggctcacacatctgtttcctggtcagtttgtcrgccatctgcccatgaggtaccggggctgattaggttaatgcatttattaatggggcttacaagactgttcaatgaatctgttattcttttgcaagtagctttttaatatactaagacagggactacactgcacaaagccaagagtggctagataagcatttctttcccctcacctggctccaaaccagaggggaacagaaacattatgaaaacaggttttcatgaaaactgcacttccaggtaatggaaatgattcatccatctaacctctaaccacctccttgttgttgaaatagtcttgaaaatatctctttggaggatagtttcatgcaccaggcaccagttcagtgcctacactgtgcttctctaagagaccacctgagtcctagggtgggagaatggttagttaaatgaataggcatgaatgatataatcttgcctataggacattagatggcctgaggatcccttgcc

SEQ ID NO: 745376 - DNA, 729 bp, Homo sapiens
gttctccctttccacggaagccaggctccatcccgccccgcacctgtacaagtgtctgctgctaattaagagagagacagatggaggaaggtatagtttaattttacagccccagtttcttcaaggcaattaggctcattagaaggaaagcaccttttcctttcttcttcttcttttgtaaatgaagaaaagtcaaataggagagggccagtgttgttgaaaggctcacacatctgtttcctggtcagtttgtcggccatctgcccaygaggtaccggggctgattaggttaatgcatttattaatggggcttacaagactgttcaatgaatctgttattcttttgcaagtagctttttaatatactaagacagggactacactgcacaaagccaagagtggctagataagcatttctttcccctcacctggctccaaaccagaggggaacagaaacattatgaaaacaggttttcatgaaaactgcacttccaggtaatggaaatgattcatccatctaacctctaaccacctccttgttgttgaaatagtcttgaaaatatctctttggaggatagtttcatgcaccaggcaccagttcagtgcctacactgtgcttctctaagagaccacctgagtcctagggtgggagaatggttagttaaatgaataggcatgaatgatataatcttgcctataggacattagatggcctgaggatcccttgcc

SEQ ID NO: 745377 - DNA, 729 bp, Homo sapiens
gttctccctttccacggaagccaggctccatcccgccccgcacctgtacaagtgtctgctgctaattaagagagagacagatggaggaaggtatagtttaattttacagccccagtttcttcaaggcaattaggctcattagaaggaaagcaccttttcctttcttcttcttcttttgtaaatgaagaaaagtcaaataggagagggccagtgttgttgaaaggctcacacatctgtttcctggtcagtttgtcggccatctgcccatgaggtaccggggctgattaggttaatgcatttattaatggggcttacaagactgttcaatgaatctgttattcttttgcaagtagctttttaatatactaagacagggactacactgcacaaagccaagagtggctagataagcatttctttcccctcacctggctccaaaccagaggggaacagaaacattatgaaaacaggttttcatgaaaactgcacttccaggtaatggaaatgattcatccatctaacctctaaccacctccttgttgttgaaatartcttgaaaatatctctttggaggatagtttcatgcaccaggcaccagttcagtgcctacactgtgcttctctaagagaccacctgagtcctagggtgggagaatggttagttaaatgaataggcatgaatgatataatcttgcctataggacattagatggcctgaggatcccttgcc

SEQ ID NO: 745378 - DNA, 615 bp, Homo sapiens
gcataggtggccctggtccctttgagttgttattttctacaaaatcatgatgctgaatgcagactgtgaggttctacactgggttaggtgggatgcatctaagttgggtcacgttttgtcaatgcagtcaaatcaggaagtgcaaacctaagtatggtgcgtgagaaccaaaatctgatgagaaaattttattatgcgctctttggggcaggttgggaccattttaacaccccccaggggcttagtttaaaggcacagccctctggacctcccatttcacaacctccttgtcaaatgcttgcatagatgtgtcagaatacttctgctagaaacatgcccacaggagagaagcggtgatgttgccctggagcctcctaattctgctgcgtctggctgagacagggtaggcaagaaatcaacactttccttttcaggctggatggcttcaaggaaacaagtaaattcttagcctcagggtagatattggtatgaaatgaccctaatttttcttcctagccccattccccatggcagragaagttaggttggcatttgaaccaaagctttataaataatttgcaggaaaaggcacaccctggttagaaccaaagactt

SEQ ID NO: 745379 - DNA, 625 bp, Homo sapiens
aactggacaggcaggaaaaagtaggagatgctccagagattgtgcaaatgcttccttattttcaggcatgcttgatacttataaacaccgtagacagacagacagataggtaagtaggtaggtaggtaggtaggtagatgtgaacaaatgtgaacctggaagggccagtcttccaatatagatccttagtggctcactgggtccagatttgaaatagagccaagtggccatttgccractaggggtcatacaggtatgctgagatcccccccaaacctgcacctttttatctttgggacttttagagctcacctgaaccaaccaaccagtactcagccgtatcagccaatcagaactaagcaaatttcattttttttaatttgaataaacagacctgattgggaacctgggtgggaacttttgctctaaaacccaagtcttcctttgttctttggaacataccttcattttatattggaggctgtgtctccctggtttgcaaactgttcactggaataaagtctctttcctccaaattcctttttcagagaacttttgttgacagatagatggatgattgatagatagaatgacactctacatatatatgtatagtatgtgtgtg

SEQ ID NO: 745380 - DNA, 634 bp, Homo sapiens
aaaaggatgtattagctgagaacaaactggctaagatgaaaatcgttgtgtatttctggtaagggtcatgagagggtttattctaatctgtagagccagagagagtttgcatgttcacacagaaaaaggaggcaaactcaagcggaatatggatgcgctttctcatgtgggaattttcagagctgcaaaggccaggtatgactctgttggcctcccgttggggattctgcaagacccaaacaaagctcatgtagggtacaggaacttagaggccttcatggcgtactccttggagagtgggcagtccacaggcagatggtgctagaggcagatctgaagcccatgtgtcctgaatccttatccarggctgttgtcctaaaatgtgttgcttgcctgagtcttctgcaggaaaacaaagggcatgactgtacgactcaagtcctgaaaatacttgaaatactggctgaaggcaaacagaacagtctttggatcaagatttgacatttagccctgtcacagttcctcatcaaaatgagaggagcagattctgatactgaatattcttgcccactgcagcagaagctgccccccagtgagagatgggagggaggaggggggctgcctaggaatcctt

SEQ ID NO: 745381 - DNA, 485 bp, Homo sapiens
aacatggtgaaaccccatctctactaaaagtagaaaaattagctgggcatggtggcgggcgcctgtaatcccagctattcaggaggccgaggcaggagaatggcttgaacccgggaggcagaagttgtagtgagccaagattgagccaaagcactccagccttggcgacaaagcgagcgagactccatctcaaaaaaaaaaaaaaaaaaaaaaaagattcccattatccttctctgctgtcctccgctatagggcgggaattctctgcaccagcacaatgaataggagcsgttctttaaatatgttgcagtccagagtaggcaatatttttcagtggtgacggaggctctctacaacaaaactaactggcactgggaaagaaaaatgtctaactgatgccagagaacttaagaggcatggggttttagaaaatcattccactgtgatggaaaatggttttgggggaatttgtgttgcattggttt

SEQ ID NO: 745382 - DNA, 659 bp, Homo sapiens
gaaacagtagtgttatctaatctacagactcttcagacttggcccattttcccactactgccacaaatttcagtccaggattataccttcatttagtgatatatctttagtcgcctttaatctagaacagttatccagctttttaaaatctttcatgaccttgacatgtttgaagagtataggtcatttattttgtaggattttcctcagttcaatttttctgatgtgccttcatgattggattcaggtcctgctttcagggcaggggctgcacagaagcgaggtcttgtccttcttgatgcattggatcaggaggtacacgacactccccatctcatggccggtgatgccagctttgattgttcagttaagatggcatctgccaagtttctccactatcaatttactattttaccctttgtaattcatacrtatctcatgggggaatactttgcaactctatgagtattgtgtttctcatcaaacttttgcctgctactttcagcattcactgatgatgcttgcctgaaacagtaactactgcagatatactgtatttgtttcccagggctgccttaacaaaatgccacaacctgggtggctttaaataacacatttgtcatctcagttctggaggccagaatgctgaaagcaaggtg

SEQ ID NO: 745383 - DNA, 608 bp, Homo sapiens
atatatgaatagatgtgtgtctagatatatataaacacataatgatagaaaagagttgaaaacacaaatatcataaattaaccactgttttctaagatgagtgatattcattttcctcttcatctttttagttattttccacattttctactgtttgttactctatgttattctttcagtcaaaaaatatagtttattttttcgatgtaaaaatgcrtgaaaatctgcattctcttttctgtacctttatatctatgttctatagactttgggatttttcctatttctcagaccattttgaaaacaatagaaacaaaggaccaggctggtcgtggaggctcacgcctgtaatcccagcactttgagaggccgaggagggcagatcacttgaggtcaggagttcaagaccagcctggccaacatggtgtaaacctgtctctactagtaatacaaaattagccaggtgtggtggcacatgcctgtagttccagatactcacaaggctgaggcaggagggtcgcttgaacccgggaggtggaggttgcaatgagcagagattgcgccactgtactccagtcaggtgacagagtgagactccatctcaaaaa

SEQ ID NO: 745384 - DNA, 580 bp, Homo sapiens
aagaatgccattctaaaggagggagaggaattataaacaagaaaacatagtgggctgcacagaagataagcaggtgatttgatagaaggttctagaggttgggaagagggaaagtgctaattttataaagaagagtaatcaggagtaatcacctctctgagaaggcgcaggtgacatttaggctgagatctgagatttagtaataattttgatgtagttattttaatcctaatttgttttgtaagtacggtgtttagatattaagagttaagccttcctatattaaaaagtaaaaaaataagagatgytggtaaggttgtggagaaaagaaaatgcttatattgtgggagtgtaaattagttcaaccactgtggaaagcagtacggcaattcctcaaacagctaaaaacagaactaccatttgatccagcaatcccattactgggtatacacccaaaagaatatatatcattctaccacaaaggcacatgcacacatatgttcactgcagcactattatcaatagcaaagtcacggaatcaatctaaatgcccatcaatgacaggttaaagaaaatgtgg

SEQ ID NO: 745385 - DNA, 511 bp, Homo sapiens
caattatccagtaccaagggggtggaaggaaccagggcacaaataaaagcacaatatatagcaaaaaaaaattaatattaacataaatattcttttgcaaagaaaaattgaagttttatagaggaaatattaaaggaataaaaatcacacaacaatatttggctcagttggattatacagtatagctacaaagagaaaaatatagaaatgcaaataacagaatctctatatacataacatcttctcttcrtataccattgtaagaatataattcataagcatgaaatacatatggatttaaatgatatatatagatataaaatctgtgagtgttgtaaatttcaaactcatctttcctttgggatattgaaaataatgaataatatttgttataaattaaagatttagctaagatttttgtaatgctcaagatatctaacatagtttatatgttaatattactattttttttttacatgctagttaacatcaacgtaattctgaataatac

SEQ ID NO: 745386 - DNA, 511 bp, Homo sapiens
caattatccagtaccaagggggtggaaggaaccagggcacaaataaaagcacaatatatagcaaaaaaaaattaatattaacataaatattcttttgcaaagaaaaattgaagttttatagaggaaatattaaaggaataaaaatcacacaacaatatttggctcagttggattatacagtatagctacaaagagaaaaatatagaaatgcaaataacagaatctctatatacataacatcttctcttcatataccattgtaagaatataattcataagcatgaaatacatatggatttaaatgatatatatagatataaaatctgtgagtgttgtaaatttcaaactcatctttcckttgggatattgaaaataatgaataatatttgttataaattaaagatttagctaagatttttgtaatgctcaagatatctaacatagtttatatgttaatattactattttttttttacatgctagttaacatcaacgtaattctgaataatac

SEQ ID NO: 745387 - DNA, 629 bp, Homo sapiens
accctacagatggtgcctgaccagctttctgctggtaaacctaaggagcatgatgaagctgactgtgacctgggagtgcttaaagatgttggaggctggaaccatctgtcagtgccagagctgagtgttttcactgagtcaaatagccatagtagctgccaccaagcragctaaattacccaacagaaaatacatatttgagcacatttttaatgattttcaattagtttgttgtcaagaacccattttctctcctacttactgtctgtttcttagtgggagaaacatggttcccccaaagaaaaaaacactgtgagtcaaaccaccatgtagttagacttcaatcgttatttcacctcctttgtttttcatccattgtgtgcaaacaaaactgtaatctaactgtatgactcttggcgtttctgccagggttggccttctatagacatactattagagatcaagaaggcatataaacagatgtatttccactcatataatgatgtgtatgttaatttattttagtgcatagtattagtatatattagtccattttcaccctgctaaaaagacattatctgagactgattaatttataaacaaaagagatttaattgactcacagttct

SEQ ID NO: 745388 - DNA, 616 bp, Homo sapiens
agatcagcattaaagcattaaattgaagaaggaaaaaaaaacttttgaagttttgcacatatctgtcatcttatttactatcagtcattgctaggtctatgcttctgagtataagaaaatgtttctcttcattaagaggaggttgtcctttaatgagtactaatgattccactttgaaactaataggaaatcctgaatatataaacttattgacattaaaaatcagcaatactaatactaacatcaaagtaatgatattgtttaatatattaattaagcaaaatgtaaacaaattggcattccagttattacctcatcaaggtaattttttaaagtaagaaagcaacttaatttcatgtgtatttaataactttaggtgaggtaacttttacatataagtgatttttgcaatgatttgaatatatctagatctatctacatttatatatttatagagagatayagatatatacatcagtttttcaattaaagaggatatttaaatggttaaatgtagaaaacaattgctcacaataaagatttatgcatttactgattactacattttaattaaactgagcataatttatttagcactaggcattgcaacatagct

SEQ ID NO: 745389 - DNA, 495 bp, Homo sapiens
attgttttttgacactgatgctattttttctcaaaaactagattatagaattagatgcaaacttttatcaaaatattgtattttttcaacgaccttgtttcaaataatacaaatgaagcctattaaaatcctggaacccattatttttctttctctatcaccagacacaaacaaacaaccatttatccttgtgtcccacttctgaaagtaaacttaacaggtgtcaatattgggtaacatagtcaacatttcttccctggagaaatagaacctagagaaaatactatcttgggattccccatgttamaagagctccgaaatgagattttagagtttctactcaaacatatgaaccaaatctatttaaacagttgaagaaaaatttcaacactgagcatggttaaaattatatgcaaatgaaaagaagctctaaagaaataagaatggtaaaagatgcagaagaacactttttaaaaagtataatttgaatagtta

SEQ ID NO: 745390 - DNA, 623 bp, Homo sapiens
taatgaattctacaatgggcaattgcgtaaaattaatacataaggtaagaataaataagtgactggcagaaaggtcttctcatgattatggtgaatataaattaaaacaaaaaaaaagcaagagtaaaaaagtagagagctataataactataaattcaattagacctgtattagtctgttcttatgctgctgataaagacatagcagagcctgggcaatttacaaaagaaagaggtttaattggacttacttccacatagctggggaagcctcacaatcatggcagaaggcaaagaggagctagtcccatcttacatggatggcagaatgaggaagacgcaaaagtggaaacccctgataaaaccatcagatctcgtgagacttattcattactatgaggacartatggcggaaaccgcccaaatgattcaattatctcccaccgtgtccctcccacaatatgtgggaattatgggagtacagttaaagatgagatttgagtaaggacacagagccaaaaaatatcattctgcccctggcccctgccatatctcatgtcctcacatttcaaaaccattgtgccttcccaacagtcccccaaagtcttaactcatttcagcat

SEQ ID NO: 745391 - DNA, 652 bp, Homo sapiens
tccccatctttgttctgctttccctgctcacttccaaaatgaaggaaagccaggacctgtgtaatatctttcttgagctattttcagttgtattttttatctattcctgggttggaaaattgaggccttcggctgtttttcctgttttctgtggtcaggcttcagtatttttctacctctttttaaatcctcttgatgaacttatacttaaaaaacaaaagttgcatgttgcaggaatattccagttggtttcagagagggagcaagacaagttggatatcacgtgcccatatctctcatgtatgtgctaactggatttctacattccctcaaattacttcatgttttgcaaaattgttgtgttagaatcagcaaacaattagaaaatgtactttatttcagtgtggcaattttatattctcttctctattactgaaacaaattatttcccacatattttgataacattatagtggtgctagtcacrttgttgtaaggtggcgtcagcgttcccatgataaactttgtcaagctcttgtaacttggctacaaaactctacctcgagtttgagacttgctttaatcccagagccatctaggaaagaaaataaatttatcttaaattggacaaaatgttagcgataaaataatt

SEQ ID NO: 745392 - DNA, 652 bp, Homo sapiens
tccccatctttgttctgctttccctgctcacttccaaaatgaaggaaagccaggacctgtgtaatatctttcttgagctattttcagttgtattttttatctattcctgggttggaaaattgaggccttcggctgtttttcctgttttctgtggtcaggcttcagtatttttctacctctttttaaatcctcttgatgaacttatacttaaaaaacaaaagttgcatgttgcaggaatattccagttggtttcagagagggagcaagacaagttggatatcacgtgcccatatctctcatgtatgtgctaactggatttctacattccctcaaattacttcatgttttgcaaaattgttgtgttagaatcagcaaacaattagaaaatgtactttatttcagtgtggcaattttatattctcttctctattactgaaacaaattatttcccacatattttgataacattatagtggtgctagtcacattgttgtaaggtggcgtcagcrttcccatgataaactttgtcaagctcttgtaacttggctacaaaactctacctcgagtttgagacttgctttaatcccagagccatctaggaaagaaaataaatttatcttaaattggacaaaatgttagcgataaaataatt

SEQ ID NO: 745393 - DNA, 574 bp, Homo sapiens
ttagacagacttgccttcccacctaaaagctaaaagcttccgtaagggatttgcaacgacccaggagtattagctgagtgtggtggtgcatgcctgtagtcccagctactcaggaaactgaggcaggagaatcgctagaagtcgggaggcggaggttgcggtgagccgagatcgcgccactgcactccagcctgggcaacaagagcgaaactctgtctcaaaaataaataaataagtaaaaataaaaataaaaaaagacccaggagtaaacactaggaaatttgatataaaycttaataactccaactggtgagtgatatagaagagcattcagagtagtttgtcacagaacatactttccagatgaatcttggaatttagcttggtaatacggataatttgctttttctgatgtttgactatacttgttccacccatattttagcttaaagggggattcctcttctctccaaatatatttactagctttcccaccttttccccctcccttaaaagcaagaatagtactattaagatgcactacttacttgaacttctcttttttaagtgaaaa

SEQ ID NO: 745394 - DNA, 642 bp, Homo sapiens
aactatacaggggggggatacaccaacagaaagtctagaaaatttcatccagccaactgtgaaaaaaagtatgaagagaaagttcatcacacagactttgggcactggtggtttaggtgccatccttctttgactgtggagattacgtccacatattaaggtttctaatttctgggatatattaactaataaatttcaccatctactctcccatcactgaaaagtgatgacgactcaactgcttctgttgccaagtcttggccctctataaaccacatgtagtgcgtatttaaaacaaaacaacagatgaaaacaataaaaaataaaacaacaaaacctctacaggacaaactgatagtttatacaataaaagctattaattcgactttctttaaggcaaccattcttattaaggcagtcacttttgatgaaacagaagttttttgatatttccrtttgaatattttggtatctgattggtgatgatttcagctaacatctcggggaattcaatactcatggtcttatccaaaaatgtttggaagcaatagttaaggagattttcaaccacctgcaagagaagatatggtaatgatcaggcttccaaattggtcagtgggaacatctcatgtttgttgtcct

SEQ ID NO: 745395 - DNA, 649 bp, Homo sapiens
acaaaactgaagttcataagttgaactcaagctatcaccaacatccacaaactgggggcgggggtgggggcgctgctggtatataattatattcactaatcaaaacatactttgtcccagaaaactcttatatttggctttatgtttgacacttacttcatgcatagaatccaagagttttgtcagttgataaaaccgctgccagttctggctggagtttccttccctcttgacaatggcttttcctagctctttgatgtaggtcattctaatttcatcaaatagctcttggctcttcagaccrtccttaggaactaaaaggttaagatgaagtcagttaaaggattttctttttcttttcttttcttttttttttttttttgagatagatagggtctcactgtgtcatccaggctggagtgcagtggcataatcatagctcactggagccttgacctccttggctcaagtgatcctcccacctcagcctcctgagtagctaggactgtaggcacaagccaccatgtctgagtggcataatcatagctcactggagccttgacctccttggctcaagtgatcctcccacctcagcctcctgagtagctaggacacaagccactgtgtctggctaaatttttttgtagag

SEQ ID NO: 745396 - DNA, 606 bp, Homo sapiens
tttgagtgtttttttttttttttaatccataactttctgtaagaaccacactgtggatcataacatctgagctataaggattaagagtgtaactggggcccgttgggtgggggggcgggacagcattaggaaaaatagctaacgcatgccgggcttaatacctgatgagttgataggtacagcaaaccaccatgrccacatgtttacctatgtaacctgcaaatcctgcacatgtaccctggaacttaaaataaaaattataattaaaaaaagaattgagtagctgcaccactagaaagatggcagagcaagacagaagaaaggaaaagggctcaggtttaagcgactggaatcattcctacatgattcctggcggcagaaacgtgacaaggtgcgtctcagacgactagaagtgaaacctcatgccttggaattgccagataaacattccttggcctttgttgtacgcatcgaaaggattgatggcgtgagtttacgggtgcagagaaccactgcaagacttcgcctaaagaaaatttttagtggtatctttgtaaaagttaccccctagaatctaaaaatgctgcatatagtggaaccttatgt

SEQ ID NO: 745397 - DNA, 606 bp, Homo sapiens
tttgagtgtttttttttttttttaatccataactttctgtaagaaccacactgtggatcataacatctgagctataaggattaagagtgtaactggggcccgttgggtgggggggcgggacagcattaggaaaaatagctaacgcatgccgggcttaatacctgatgagttgataggtacagcaaaccaccatggccacatgtttacctatgtaacctgcamatcctgcacatgtaccctggaacttaaaataaaaattataattaaaaaaagaattgagtagctgcaccactagaaagatggcagagcaagacagaagaaaggaaaagggctcaggtttaagcgactggaatcattcctacatgattcctggcggcagaaacgtgacaaggtgcgtctcagacgactagaagtgaaacctcatgccttggaattgccagataaacattccttggcctttgttgtacgcatcgaaaggattgatggcgtgagtttacgggtgcagagaaccactgcaagacttcgcctaaagaaaatttttagtggtatctttgtaaaagttaccccctagaatctaaaaatgctgcatatagtggaaccttatgt

SEQ ID NO: 745398 - DNA, 544 bp, Homo sapiens
tgagtttgttcatttggtgtctttttggtttgaggactacaccctcaaaatacaggcagcttgacagagtaaacctgcctatgattcttcagtattcatctcagctctctgggcctccaaggtttcttgagcattctagcccacagttgtgatggtggattacctgttgattttgtctcacagcatcagctygtgtttccggtagcatactttggagcttcaattacaaaatttgaaatgtgacttcagataaaactactgaaaatgcccaatgaaactataaactacaacactcagtgaatggggcaggttataaggtgttacaatagtactttaaaaaactgatttaatgatcagactaacatagttgattctaactacttgtagattccacatctgcaagtttacacatttgctacattttatttgtaacccccaaatccacacttgctttcctatcgattcgtggataagcacagaatagcaaaaaatttgagtcgactgatatgcatgttcccagctgaagtcaaacgaagtgacacgc

SEQ ID NO: 745399 - DNA, 591 bp, Homo sapiens
cctcctacatttgcccatttctgccattaaaaacaaaactaaaaactttccctcaaaagctgaccatctgcttgtcactacgctttcttccaaattgaagaggtggtagcaggatgtttgcaagcccagtatttatctctggcrtaggcacaatcccagcatctactgattacatttcccatttactgttaggtttgcgatttgggatttgaacttcctctgcatttttttttgtttccttccttttatttcttagaatccaggtctaattgtccccttaagggttagactggtttcaatagatttattaagtgatgactttacagtgtgggtgttatgtccatctcaaaatctgtgcaggcaaccatcacatacatgcttgtcccctattgccagctaaaactgaggcagcattttcaagaatgccaagcctttactaagtgcaggcatttgtttgttatttcaagtctttgtgtgctgacaaattctgtacatgcatgcgtgtgtttagagcacagttgggtgacatgtgccaggtatctggtggcaactgtcctctgagcatggttgataaccaaataaaatccagga

SEQ ID NO: 745400 - DNA, 584 bp, Homo sapiens
tactataatgaaaatttccaccataaaagagactcgggtgtctgattttcatcgttatgcaattttcagctcataatctcagaatccgtaaatgcctttaggatctaatttgcaaagagaattacgtattgcaaggagccatgtaaagtatataactagttctgtggaaagcaaagctgtgagtgacatctaattaggctacaatatcaatgtgctttggctctggcactcatctgtcattactttgaayaagccatttgacctttatattatatgtagggaccatacctcttcatttgcctgttagttctgttgccctggtataaatttaattgcgcctttctgcttcaatgtgctggtttgggtgataagttatatgatcactcactatatacaatctagaataaatgataacacttcatcatattagtttcccaagtgtctttttcactaagttgatcatctgtggaccaaggaccatctagttggcctctcagaatagtgtttggcttttgtttgctacatagtgcttgtcaaatgaaggaatcagcttctcaggctgcatcacgagcctgtaggatttg

SEQ ID NO: 745401 - DNA, 507 bp, Homo sapiens
tggatggtagataaacaacaaaaattttttcatatatgtatgtcccatgcaatatttgggacataacgtatactaaagaaatatttattgtttattctgccatccaaatctaactaggtgtcctgtattttatctggcaaccctacccattcctattccttgggcaacaggaatggccccctttaaaagcacctcttctgtcatttctcccatttttgtgcctatcctaargcagtagagggagatctcaagggaaaagccctcccatagactgtcagttgcctatcaacttgagaaaaaaacaaggccctttcttggcttgcttatttatttatttacctacttacttttttttttttttgagccagggtctcacttgactagagtgcagtggtgcaatctcagctcactgcggctcccacctcctgggctcaagcaatcctcctgcctcagcctcccaagtaacctggactccacacgtgtcccatcatgcctggctaatttttt

SEQ ID NO: 745402 - DNA, 585 bp, Homo sapiens
ttggcgctgagatccaggctggatccattgcttttgtttacaataggcactctctctaccccacctctcagtacttgagacttaaagtgctacaggcagctggatctgtttgcatgcaggatgaagagggttaaaacactgtttatataagatccaatctctcaccatctctaaagcagccgttggcctgtcatcagtgagatacaatccagtcttytcatgcacgggaacacacacaccctgcgtttctccctcccaggctaggaacctctctgccaccaagggctgccatccatcgcctagtaaccacggcaacccaacctactctaaaaccaaaccaaaaaaataaaataacacatcctctttgcatgacacattttttttctcccctttttggtacactttttttgaatggttttctaacaacttgaagcacaggatcaaggaattagggtggtctacttgaggcagatgggatagtagctgggaactgttccctttctgattaatttcagcagcatcggaatatatttggagcacaccctagtaacctcttgagattaaattacatagtcttaatatttc

SEQ ID NO: 745403 - DNA, 583 bp, Homo sapiens
tgacctaaaagacgcacgcatgccaaacgcctgcagattctgccagagtcaaccttcttctcctgtcttagtggccagagaacagtccctggaattcaaaggataaacaaggcctgcgtccagacagagttgtttctctgaaacattgctggcttcttctgagtttgattcagctgttctctgatgaaattcagggaaaacttgccttcagagatatctctcaaattttactaatcttcagctttagttggtcaacattcattccacaaatrtcaattgaactcctactgtgggcctggtggtggtctgagtgctgaagatacagtgatttaaaaatattaaaaaaaaaaaaaaaaagagtttctgctttcatggattttatattctagtggagacaggagataaatcagtgtttaacacagtatgtcacacagtatattgagaagtcccagggagaaaactaatggagaaccaaggagatagggatttggaggagaaggaggcaagtgactttagctctctgtacctcagttttctcatctgtaaaatagtgtgatcataacctcctcaaataggtggcatg

SEQ ID NO: 745404 - DNA, 536 bp, Homo sapiens
tgtaatcccagcactttgggaggccgaagcaggcagatcatctgaggtcgcgagtttgagatcagcctgaccaacatggagaaaccctgtctctactaaaaatacaaaaattagctgggtctggtggcgcatgcctrtaatcccagctaattgggaggctgaggcaggagaatcacttgaacccgggaggcggaggttgcagtgagccaagatcgcgccattgcactccaacctgggcaacaagagcaaaactccgtctcaaaaaaaaaaaaaaaagactccataaatattattattaatgtttgaggcccctcattttttccacttattattgtgtctataattttattttttaagctctaccatctctcttaatctatatttctctttagcttgcaagctacagaaccactactctgaactatttgacatgtcctatccttaggctaaggagtttcactgacactctctggtcattacagcaaacactttgggtttccttcacttcacagcaccaagttgttctgagacaatca

SEQ ID NO: 745405 - DNA, 613 bp, Homo sapiens
ttatcactaaattttttcattttgaaaaatagttgattttaataaaagtatgttaataagtgaaaaaacattatctatacacagacacatacacacatatgtataggcatatgagataaagtagtgactctaagagcactgttcatagtactttgcttcttagagacagggtctctgtcatccaggctggagtgtcgtggtacagtcgtagctcactatagcctcaaactcccagactcaagggatctttgcatctcagcctctacatgcgccactacatccagcttagatttttgtattttttgtagacacggggtctgtgttttgtatattttgtagagacggggtctgtgttgccctgactggtcttgaacgcctggcctcaaagaatactcttccytcggcctcctaaagtacaaggattacaggcaggagcagctgcacttggcctcattgtacttttcattcaacttttttgtaggctcaaaatttccacaaatttttaaattttgtgggaaagtgtaaaaacaaaccagaaaatcacatgaattcccctagaggtgttctcctctactccacagccaaaatcgggagaggcaaatttcttgttctc

SEQ ID NO: 745406 - DNA, 612 bp, Homo sapiens
cctcctgccttggcctcccaaagatagtatttgattttagacttgtgattttaagtcagaaggtaggagaatttggttgaatatgaaaatattgagatgattaagataatttctcatccattatatacattttttaaatttacaagttatataagcacatagrtaggtttcatcaaatgacaaaaaaatgcataaatgaaatttaaatatattgtttttaatgttacaaattagcatagtatgtcataaattaatatattacatttataaatgggatttagagtgtttaaggaaatttaattaagtttgcaaatgggactaaacattaatcaaaagcctaaaagtgattatatattttgctatagagtaataagtagatttgcatatttatagaatatagtaaagtaatacgatttttaagttgaattttttaacttaaggttttgtaatttgtaactttaatcagatactaattttaaaaccaaagtcaccataaattgtgttttctgtaaaagacaacctttccttcaggaataaggaatgcctcctacaagctccacattttaccacctcgcccaaatcgttggttaataacctcagacaattgacatg

SEQ ID NO: 745407 - DNA, 533 bp, Homo sapiens
ccttctgggttccaagaaggagcatttcaagcggtgaaaggaaggcttctaaaacagttcctaaggcccagtctggaatttacagtattacagaatctagttacagaactagattctgttcgtcaggattggtttaggctcagcccaaattcaaggaaaaaggaaagagaccccatctcttcttaggacagtgacaagatcacattgcaaaagactatgtgaggtgtgagatatttctgctgccatctttggaaacacaatttaccacaccctcaaaatggcttcccgtttcctttgaagtaaaagccaaagactytacagtggtctacaaaaccctgcatgacccattccctatccctgcctcaactaccctctttgcccactctgttccagcattactggcttccttgctggtgttcaaatccaggaggtatgctcctccttccccctctcccccgcaggctctctgcacacactctttcccatactggaatgcttctcccttggatagcacttggcccattctgtcactg

SEQ ID NO: 745408 - DNA, 496 bp, Homo sapiens
atgcaggcattttggactcaggccggagattggagcacctgctctggagctgggcaggggtctccatagccagaactgtggaaagcacctcagcagtaggtgctggaattgtgctctccccatcataaccctgggacaggaagaaaactgccctacttacagctcatgggtgctgaggcttgaagccagggccagccaggcaatttggaactgacatgcatatgacatcgctgggtgctccagcctgcttccctgaagtcatggcacaccagggcmttctctgcttcacttctaggcagaaatccaggcatttggagcacctgcttgcctgagccagcagcaagaaccactccacccttcatggacacagattatactataacggggctttctctgctccatgctcaggcagatcgccagggatctccaggtgacacctactccactggattaggagtttaggccaccccctatctccatgcagaatatgaggctg

SEQ ID NO: 745409 - DNA, 641 bp, Homo sapiens
tagctatattagtttctagttttatacttggtaatatttcaattggctattacaaatagtgctgcaataaacatggaagtacaggtatctctttgatgtactggtttcctttctttgggatatactcagcagtaagactgcttgtaagcaagctcggtaaaatttcaaccttcttgaattcattaagacttgttttgtgatgtaacatatgatctatcctagagaatgttcatgtgtacttgagaagaatttgtattctgcagttgttggatagcatgttctgtatatgtctgttaggtgcatttggtttacagtgtgtttcaagtttgatgttttctcatggattttctgtctggatgatctattcatatatgttgggtacatatatatttactattgtatattattttgctgaatttgccactttattattatatgatgactttgtttcttttgcagttttcaatttaatatctattttatcttacataagcgtagctactgtctctctcttttggttacaatttacatagaatrtcttttataatcctttcactttcaatctgtgtgtgttcttgtccttaaaagttgaagtgagtcgcttgtagatattacagagttgaatattttttcattccatt

SEQ ID NO: 745410 - DNA, 600 bp, Homo sapiens
tcagtaccctttcactgtttttgatcattgacaatttgattataatgtgtctttaggtagccttattagagacctttggccttactgtacttggataattatatttttctccgtgttgggaaatttttctgctattatgtttttaaactttctggtcctttgtttttcttgatgactttgacttaaatatttgaattcttgatggtactataagtttcataagtttttacattcctttttattatttttcttatcaaactgtatagattcaaataacctgtcttgaagttcacagatcttttcttctacctgatcaattctgccactgatgttctctattgcatttttcattttgttcattttatgtttatgctctgagatttctgtttaattttattattattttaatctctattaaattatttttctggtaatatattgttctctatttattaagytgtttttctatattttcttgaatttcactgagctttcttttaaaaattattttgaatttcttttcaaacagttcataaatccctatgtcttaggtttatcgactggcatctgcatttttctgtttggtaatcatgtttctgt

SEQ ID NO: 745411 - DNA, 507 bp, Homo sapiens
agcctactgacagtcttcagtgatatctgcacacagaaatagcatgtggtgttgctaggtatcattaaatgaacagacctagaaataatatttatcttgagtaaaaatcaacactttcacttttccttctttaactttttaatgcatgactccagtctgactttgataacaggtcttgataatgtataaacaactttaacacttttaagattcagtatgtatattgttattaaattgtcaccttaatacaaaatgtattattcacatccctttttgtrttagcaaaagtataagcctttaattaattttcagaagtacatatgtctttaaaataagactaaagaggccattgttattgaaaagaaaatttaggataaattatttttgtttgcagtaagtacaaaattctgagctctgcttttgttggtagggtaaaattcctcaaaataaatataaacaagaagaaaacccacctgatttctagagaaaaaaacaagagaataaaaa

SEQ ID NO: 745412 - DNA, 630 bp, Homo sapiens
aataagaagaaaattctaacaatattttcagattttataactatatgattttttattatatattctgatatccagatataagtgttatttcatgtaaaaattactattaaataaacccataacattttattaaaattcatttgtgcmatatgaggtaaattataagcaagccaataagacaaaaaaaaaccagatataatttgattaaaatactggggagaaagttaccttgagaaattgactcaaacatcacttgagagttatttataacttgaatgtttaaatttggccactcaaaggagctttttgtccaagagcttaaaaaaggaaagttttttctgaaagtaatcttctaatgattgtgttattgaccttcttctataacatgagatttacttttactcctttcatgtttacttgacctctaaaatatctttatttttccaatcatatcagtgttgatttttcctccaaaaatcagtgtgtgggaacattggtgtatttaactgaagtttgcaaaaataattctattaatcatttgattcatttgaatacttatgcactattttagattttctatacagaatatatgggaccactgtttcccagaaggagtctatatagacagaa

SEQ ID NO: 745413 - DNA, 612 bp, Homo sapiens
gcgtcatttccaggccccacctcttcagtatgccatagaaaactacttgggcagtagaggtgtgggaagaaaacaaaaaagaaagctgggcataagtggcacacgcctgtaatcccagcacttttggaggccgaggcgggtrgatcacctgaggtcgggagttcaagaccagcctgaacaacatggagaaaccctgtctctattaaaaatacaagattagccgggcgtggtagcacatacctgtaatcccagctacttgggaggctgagacaagagaatcgcttgaacccaggaggcggaggttgtggtgagccgagatcgtgccattgcactccagcctgggcaacaagagtgaaactctgtctcaaaaacagacaaacaaacaaacaataaaaaaaccccaaaaattagctgggcatggtggcgtgtgcctgtaatcccagctactagggaggctgaggcaggagaatcgcttgaacccgggagggggaagttgtagtgagccaagatcatgctactgcactccagcctgggcaacagagccaagactctgtctcaaaacaaacaaacaaacaaacaaaaaaacgcaggaaaagagtgtgtgatggctga

SEQ ID NO: 745414 - DNA, 587 bp, Homo sapiens
cctcagcctcccaatatgctgagatatagacatgagccacaccacgcctggcgtttggatgttttttgtctttactctcttagtagatcatccagctatgctgcttttgtgatttttgtgattagaagcaatcttagctgggcacggtgactcaggcctctaatccaagcactttggaaggccgaggcaggcggatcacgaggtcagggatttgagaccagcctggccaatatggtgaaaccctgtctctactaaaaatatgaaaaataaccaggcatggtggtgggcacctgtagtcccagctactcgggaggctgagacaggagaattgcttgaacctaggagatggaggttgcagtgagccgagatcgcaccactgcactccagcctgggtgacacagygagactctgtctcaaaaaaaaaaaaaaaaaaaatctagaattcttaaattatataaaattgatctgtaagcagcattgaatatttgacatcttaccatttgtgccagtgtatttgttgcctgttttaaattgctagagggtagggatcttctcttatgaataattttgtgtaacacctaacaatc

SEQ ID NO: 745415 - DNA, 639 bp, Homo sapiens
ctccctttgctgactcctttttggactcagcccgcctgcacccaggtgaaataaatagctttattactcacacaaagcctgtttggtggtctcttcgcacggacgcgcctaacactttgctttagtgtagatgaccactcccctctataaggtagggaggaagaatgttcggttagttcctctcctctggccgatattttttttcttctcctggatgagacaaagacaaaaaaacaaaaaataaactgacagagcgacaaaaaaggtctcatataaaagtccttctgtattatttttcagctctagcaaatccagggccaacaaagagcatacccaaaaacattcatttgtctaatggtgtgtccgttggaacttaactaatgtgccagttttaaacaggscacaccaattcagaaacctagtaacaggaactttcctagaatcttacctgagagaccggatgagggtaaggttacaacaatccaaattaccaaaagagacaacccgttcggttaaaggagaacagaataccaaatgcctcagtgttgacactgtgcaaccccaccactttacacaaactacgttctaataacatttccctatcattctgtctctataaaaacaatattgtacactgaa

SEQ ID NO: 745416 - DNA, 631 bp, Homo sapiens
aactacaactgccttcttaaggtgaaggcgaggccgggcgcagtggcttacgcctgtaatcttagcactttgggaggccaaggcaggtggatcacaaggtcaggagatcaaaaccatcctggctaacacagtgaaaccccgtctctactaaaaatacaaaaaattagctgggtgtggtggcgggcacctgtagtcccagctactcggttggctgaggcatgagaatggcatgaacccgggaggcggaggttgcagtgagccgagattgcaccattgcactycagcctggacgacagagcgagactccatctcaaaataaaaaaaaaaaaaaaaaaaaaaagaaggtgaaggccaggcatggtggcacacatctgtagtcccagcactttgggagactgaggcaggcagatggtttgagttcaggagttcgagaccagtcatggggaacatggcgagacctcctctctacaaaaaatacaaaagttagccaggcagtgacacgtgcctgtagtcccagctactcaggaggctgaggtgggaggctacagtgagccgtgatggtgccactgcaatcaagcctgggcaatagagtcagaccctgtctcaaaaacaaaaaccaaaaaaagaaggt

SEQ ID NO: 745417 - DNA, 564 bp, Homo sapiens
aaaagaggacacaaacaaatggaagaacattccatcctcatgaataggaagaatcaatattgtgaaaatggctatactacccaaggtaatttatagattcaatgctatccccatcaggctaccaatgactttcttcataaaattggaaaaaaactactttaaagttcatacggaaccaaaaaagagcccacattgccaagataatcctaagcaaaaagaaccaagctgaaggcatcacrctacctgacttcaaactatactacaaggctacagtaactaaaacagcatggtactggtaccaaaacagagatatagaccaatggaaaagaacagagtcctcagaaataacaccacacatctgcaactatctgatctttgacaaacctgacaaaaacatgaaatggggaaaggagtccctatttaataagtgctgctgggaaaactggctagccatatgtagaaagctgaaactggatcccttccttacaccttatacaaaaattaattcacaatggattaaagacttaaattttagacctaaaaccataaaaactctagaagaaa

SEQ ID NO: 745418 - DNA, 564 bp, Homo sapiens
aaaagaggacacaaacaaatggaagaacattccatcctcatgaataggaagaatcaatattgtgaaaatggctatactacccaaggtaatttatagattcaatgctatccccatcaggctaccaatgactttcttcataaaattggaaaaaaactactttaaagttcatacggaaccaaaaaagagcccacattgccaagataatcctaagcaaaaagaaccaagctgaaggcatcacgctacctgacttcaaactatactacaaggctacagtaactaaaacagcatggtactggtaccaaaacagagatatagaccaatggaamagaacagagtcctcagaaataacaccacacatctgcaactatctgatctttgacaaacctgacaaaaacatgaaatggggaaaggagtccctatttaataagtgctgctgggaaaactggctagccatatgtagaaagctgaaactggatcccttccttacaccttatacaaaaattaattcacaatggattaaagacttaaattttagacctaaaaccataaaaactctagaagaaa

SEQ ID NO: 745419 - DNA, 591 bp, Homo sapiens
tcattattctacctagactaatgttatgagcagggccttcttgtgttaaatgctagcaagaagaactgaggcaaacttttgaaatgacatgcttagggaagatttataaacagggagttaagatgattacaaagtcctggataggatgtttgttaactagaattttgggtacagtggaagattccctcaatcattctatggacaagagaatgaatgaaggaacatcataaggaacataaagtasagaagttttctctgccttcaggagggatgaatacaacaaaaaatgtcaatctaaattcatttccttcaacttgaaacaaaggttagtatttgttatatattagattcacagaaattaaagacagttcatttttcaaaataagatgataaggaaaattctggagattaggaaactcaatatggctctacctgggtctgagtgaggagaaaatcaagagacttacttcaggttattcatttatgaacgaatatttttttcattcaggcaatccttcaatgcatactgcctccacatatctggagacattatggaacaagtagagagacataatttagcaatcactaaat

SEQ ID NO: 745420 - DNA, 459 bp, Homo sapiens
ggctttaaaacaaaagtacaaatgatatcttacatggaaagtgggctggtcccatgatgccaagttaagaacatctagaatgcaagctgtgggggaaattgatacaatgctgggaagggggaatgaggcagtactgcattgctatggagtttccatttagttgtaaaatcaagggtttcaaagcagggattaatattgccttttttagaamcagctctaatgctagaaggaggaaagaggtgggagaaataaggacctgctgggaggcagaagtgttaggagtcatttgttttctctttttcccatgttgccattcattcagcgaagcattgtcatatattattttgtcatctcaaagtcattagaggcttattttattgcagaacaaagcagaattgtcttatttaaagcccaagcctggcatggaagaatgagttgtcttctctaacattccaaacg

SEQ ID NO: 745421 - DNA, 602 bp, Homo sapiens
tgtataaaatgtcatgactaaagggtgccagtcataaatgaccgaagggcgtaaaatgttgtagatgattaaagggtccccttccctcttaaatgttgatcttctttaaagattaacttctctctttcctctctcacaccaagatttcatgactatcacattgtttaggatgaaatgttaaatccctctttaaattagaaagaaaattaaaataagctgtacagaaaagaaaacaaactgtagctaattaacttgttgtaagtcaaaaactagtcttgtatagaaaatgttataatccttctaaatttctttgtgttctgcctawataagcaaggtcttaactttttttttttttttttttttttttttgagacagagtcttgctctgttgaccaagctggaatgcaggggttcaatcttggctcactgcaacctccgcctcctgggttcaggcgattctcctgcctcagcctcccgagtagctgggactacaggcatgcaccaccacacccagctaattttttttttttttttgtattttaagtaaagatggggtttcaccatgttggtcaggctggtttcaaactcctgacctgaaatga

SEQ ID NO: 745422 - DNA, 697 bp, Homo sapiens
aagtcagtaagaaacatggacttcagttctacagatgtgaggaactaaattgttcctgcaacaacaagaacctggacaaggaccttggactccaggtgagactgcagctctagctaacactttgtcaacccttggcagaagacccagctatgccatacttagacttctgacctacagaaactgtaaaataataaatggatgttgtttaagtcactaagtttgtggtactttgttatacagcatcaaaaaactagtacatttcctcatgtccctttccaattcatctccttatgctagaggctgctstgatttcaatcgccgtatcttagttttgcctatcctagaatttgatacaaattgcaacatatatgtaaataaaatctttggtgtctggcatttttattcaagttgtgtacatcagtagtttgttctttttcttgctaagtattctatcatatgaatatattgcaattttattataatcacctggttatggcattgggttgtttccattttagggcaattatgaatgaagctgctattttgaaccttgtagcccccatatcttttctggacatatgttttgtttcttttgggaaagtacctggagtagaattcctgagtcatcgggaaggtgaatgtgtataagatatggccagattattttctaaaaaattatattatttttcattcccac

SEQ ID NO: 745423 - DNA, 592 bp, Homo sapiens
aacttgctttatgaatctggatgctcctgtgttggctgcatatatatttaggaaaactcttcttgctgaattgaaccctttaccattatgtaatgcccttgtcttttttaatctctgttgatttaaagactgtttttttagaaactaggattacaacccctgctttttgatctctaccaattgcttgttagatttttctccattcctatatttttagcctatgtgtgtcattacacatgagatgagtctcttgaagacagcataccaatagatcttgcttctttatccagcttgccactctgtgtcttttaattggagcatttagcccatttgcatttaaggttagcattggaatgtgtggatttgattctgtcatcatgatgttagctggttattttgcagacttgtttatgtggttgctttatagtgtcactggtctttgtacttcmgtgtgtttttgtagtggctggtaaccgtctttcctttccatacttagagcttccttcaggagcacttgtaaggcaggtctggtggtagtgaattccctaagcatttgtctgtctgaaaaggatcctatttctccctcacttat

SEQ ID NO: 745424 - DNA, 625 bp, Homo sapiens
ttaccttgaaaactggttgtgtgcaatctagagtagttgtttataatgtacagcaaatttgtggttagatcccataaaagcctatttaaatacatgattaatacaagacagtgactctattgatccactgtgagaaaggactcaataattacaggtgtgaacacattgtgttgtgatcaatggtctgaatttctctgggactgaggggattttccaagaatacaaaggttttaatrttaaaaccaggatcttcccagtcaacttaggaaaagttgatcaccctgatacattgcttctaatggctgcgctccggctctgaaattcagcttaagatacactaaacaatttctgccatctcacctaggcacatcattgcaatgcaaggcaggaaatacaccacagaaatatcttagggaatgcaccacggtagcaaagataggagattagattttattgtaagtgtaaagagaagccactggagagtatggagagtattaagctatgtgtaacaggatctgactcatgttaatagaatccctctgcctgtaggaagaggatggattatattagggcaagagtggaaatgagaagaccatttaaaagaaattgtggaagttcagcaaaa

SEQ ID NO: 745425 - DNA, 625 bp, Homo sapiens
ttaccttgaaaactggttgtgtgcaatctagagtagttgtttataatgtacagcaaatttgtggttagatcccataaaagcctatttaaatacatgattaatacaagacagtgactctattgatccactgtgagaaaggactcaataattacaggtgtgaacacattgtgttgtgatcaatggtctgaatttctctgggactgaggggattttccaagaatacaaaggttttaatattaaaaccaggatcttcccagtcaacttaggaaaagttgatcaccctgatacattgcttctaatggctgcgctccggctctgaaattcagcttaagrtacactaaacaatttctgccatctcacctaggcacatcattgcaatgcaaggcaggaaatacaccacagaaatatcttagggaatgcaccacggtagcaaagataggagattagattttattgtaagtgtaaagagaagccactggagagtatggagagtattaagctatgtgtaacaggatctgactcatgttaatagaatccctctgcctgtaggaagaggatggattatattagggcaagagtggaaatgagaagaccatttaaaagaaattgtggaagttcagcaaaa

SEQ ID NO: 745426 - DNA, 610 bp, Homo sapiens
gctaagcacttcctggcattatcctacctaattctctcaatagccggataaggcaggcactgtgtgtgcctccattttataactcaggaaactgaggcttagaggtgttaaatatgttgtaaaactgagacttatacccaggatggcctgacttccgagcccttacataaactgtgtgtgacagctcatgtgcccccagacctttgttccaaggtgacaaggcggtagctcttgtctctgtatccctggtgtgggcagagcccagcatgtcayaggcacaaagaacatgggcacaattgaactgaatgacatcgaactgcgcttgcagcctgtttctggccaggacacaaagtgagatcacatggagcgagaacccaggccttcacagaagtccttgctgctggcacggtgctgacccagcctgggttctcaagctgggtgtacctgcagggagtcttacacatgcttttcattttaggtttgcatttcaatgattatctaaaattatttttaccaacgatcaaaactcaatttcttttctgcagtggtaatttaagatagatattttcatagactaaagccctctctttttcttaagttagcatttctc

SEQ ID NO: 745427 - DNA, 611 bp, Homo sapiens
aattaaggtgctgatggattacttggagatcacgagtcacacaccagaggcaaatatcgagaaggaaaagtcacacagaactataaaaatggccagagaaacagaaatgttaaggagatcttacttattttaaataacatattttggacaagggactaatctcaaagaggcacacaaagacaaagacacacacacacatacacacacacacacacagagcaaaagaaggaccatcacccaaatgcccatcactacattcactggttaggacaccctatctctgttaaaaaaagaatggaatagtgttgatacagaactactctaaagaacagtaagagcaaaaaatgtttgtataggatgttaacatctctataaaggtagacatgtcacatccatccaycacatgcttctgtcagattaaacatagcattggtgacaaaggttctctgggaagcaactgagtgacagcttaggacacactctcttgtaacgttgaatgctttacaaaacacgtatagacatgcttttcaatttaaaaattaggtttcgctttgcttcaagaagcccagagaggcacactggaaactggacagattttctgcagatggttg

SEQ ID NO: 745428 - DNA, 602 bp, Homo sapiens
aatgtcatggtgattttggggaaacttaacaaattatgcagagttttgctgagaaaaataaacaggtgagaagaggtaaaataattataagaaaagaaatgaagaaaggctagtctgccaggtgttaaaactgtctgtaaaaatgcaatagttaaatcaytgaagcacaatgtacaattcaaaaacagatcctagagtggaagatggaataacttcttaggaaaataatttgttaatatatatcaagagtcttaaatagattcatatcttttccacttcaaggaaataatatgaagtgagaacaagatttatgcacagaattgtccatggtggattgtttatgggagtgaaatgttagacacactaagtcatggcacacatggacaattaatgcagttttttttttgagacggagtcttgctctgtcaccaggtgggagcgtagtggtgcgatcttggctcactgctacctctagctcccgggttcaagcaactctcctgcctcagcctcctgagtatgtgacttcacaggcacatgccaccatgcccagctaatttttgtatttttaatagagatggggtttcaccatgttggccaagatg

SEQ ID NO: 745429 - DNA, 611 bp, Homo sapiens
ttgggcttcaggtcttcagtggggacaatttttccctagagggttaggttatgaggttaatgaatacaacatcaaattgttcaccattggaaaccagcctttaagaagttctttaatatactgatcagaggaaatgattatataacatactttaagttggaaacagttaagtccctctctaagctgactcattaatttcattctagagaagataatttctaattattagtatttttaattttacctttttattgagaaataactcatagagtaaaagatactaatcttaagtgtacatctgaacgagttttcacatrtgcatatacccctgtaaccaccacccagatcaagatatagaacacttcccaaactccagaaagttccttcttgtctattcccactcaagaccccactcccacaaaggcaaccattattccaacttctattgccagaaattcattttgctggttttggaacttcatataaatagaaacatatagtatagactctttcaggtcttattacatatgtttttgagcttcatccatgctgttacctgtattggtagtttattgatttgtattgctaagtggaattccattgtatggata

SEQ ID NO: 745430 - DNA, 592 bp, Homo sapiens
gtgtggatcccatgcttgccaagggcaagccagccatggagcagcgagagctgtgtgagcaagcaagcatggggtctggccactgcacacagccaggcatgccagctgtggcagtgcaggcagctccaggtgccagcacgggcacagctgtggctggaccaggygtaccacaggcaacttccaccgctggcactggggaatgcggtggcacctggaagcttggagacaccaggaaccgcagagccccaaagagggtatcataaccctggattggggcgctcctaggtctgggctccccaaagggctgcagcttttctctccttctctcttttctccttctctcttctctccttctcgttgcccacaacgtggcaagcaaggggtgtgtttcagtcctgtttgtgttacagatcttttagtgccgccatttgcccagtgggtcccaagttcttgtcctgtgtccacaaagaatgaagtatgcagacaactggagggtgagcaaggcagaaaggagcctcattgagtggcagaactgttctcagtgggtatctcctttcctcaggcaggttgtcccgatgagtgtccagctctc

SEQ ID NO: 745431 - DNA, 588 bp, Homo sapiens
gcaaccaactaggaaataaaccatcccctccaccatgcagattcttttttttttttttttttttttttttttttttgagactgagttttgctcatgttgctcattgcaggctggagtgcaatggtgtgatctcagctcaccrcaatctccactccttgggttcaagtgattctcctgcctcagcctcctgagtagctgggactacaggcatgcaccaccatgcctggctaattttgtatttttagtagagagggggcttttccatgttggtcagactggtcttgaactcccgacttcaggcgatctgcccgccttggcctctcaaagtgctaggattacaggcatgagccaccgtgcctggcctcaccatgcagattctaaatatgtccactcagaggcgttgccactcatgggcagatttcctttccagtctttttttctttgaatttctttatatagttgagatgcacaatttttaaatcttgctttttacttttcacattataacataagggttttcttttaagattaaaagtattttttcatattatacatatttctagaaaaatttaatatagaaatatgtga

SEQ ID NO: 745432 - DNA, 606 bp, Homo sapiens
acatggtgaaaccccgtccctactcaaaacacaaaaattagctgggcatggtggtgcatgcctatactcccagctactggggaggttgaggcaggagaatcgcttgaacctgggaggcagaggttgcagtgagctgagattgagccaccgcactccagactggcaacatagcaagactccatctccaaaaaaaaaaaaaaawaaggagtgcctggccaatggtagttactcactagatattttttgaatgattgagtatatttcaaagtctaacttcacagcaactttattccaaacatcctcactatgcatgtttctactttcaaggagctctgttgagctagtgtcaaaaagttgattgtccactaattacattagataatcagatccagaagcagctaccagtgatacgagttcttgtgtcaacattgaactctgagctttcagtggacttgacagagatgagtgtccaagtgccgtgggaagagcctgtactaagcaggtgtcagcatgtaggcttccaaatgccctctattcctggatgactgggagacctgatttgggctctgccagctgctctcctactttatgtggctcctcctcagt

SEQ ID NO: 745433 - DNA, 606 bp, Homo sapiens
acatggtgaaaccccgtccctactcaaaacacaaaaattagctgggcatggtggtgcatgcctatactcccagctactggggaggttgaggcaggagaatcgcttgaacctgggaggcagaggttgcagtgagctgagattgagccaccgcactccagactggcaacatagcaagactccatctccaaaaaaaaaaaaaaaaaaggagtgcctggccaatggtagttactcactagatattttttgaatgattgagtatatttcaaagtctaacttcacagcaactttattccaaacatcctcactatgcatgtttctactttcaaggagctctgttgagctagtgtcaaaaagttgattgtccactaattacattagataatcagatccagaagcagctaccagtgataygagttcttgtgtcaacattgaactctgagctttcagtggacttgacagagatgagtgtccaagtgccgtgggaagagcctgtactaagcaggtgtcagcatgtaggcttccaaatgccctctattcctggatgactgggagacctgatttgggctctgccagctgctctcctactttatgtggctcctcctcagt

SEQ ID NO: 745434 - DNA, 605 bp, Homo sapiens
attgaactctgagctttcagtggacttgacagagatgagtgtccaagtgccgtgggaagagcctgtactaagcaggtgtcagcatgtaggcttccaaatgccctctattcctggatgactgggagacctgatttgggctctgccagctgctctcctactttatgtggctcctcctcagtgctcactttctactgctttaattactatgattgttctcctccccagttacacccaattagcactttatttcttttctcacctcctaycctatgcaccacttcatgtgttcaattgagtctatcagttatcctgtgacctggccagtgcgctccctatgtaatagtgaagagactaagactagtttttaattatatagatatgcagtggccgagttgagctttgagctccaatgtcagtgcccattttatggtttctggagggtgcagacccttcctacatatcattgtcacctgtcatgctcagggcatgtggtaaatacttctcattaggtaaaagtcagtaaagaaattcagatgttcgaaacaagagagaatggtctttctactttatgttaatccatttaatgtggtttcttaaagactgtg

SEQ ID NO: 745435 - DNA, 639 bp, Homo sapiens
gagctccaaagataagatacacacaattgtggaactgcctgaaaatctgatgctatgactagatttaatctggaaggatggcaaatatatggtaagatgcctcaattcctccctcccatgtttatggaagacatctataatccatcacaccattctttccaatgtcagctctttggggggcaagtattgattgattggttaactgattttgctcttgtgtgtgttgctatattcccaggacctagaatagtaccttgaatatcacatygtaggcactcaataaataattgttgaataaatggaataaatgactcaaaagttgtttcagaattctttgcaacacaacactctaggcaagcaagatacagtgtattttccctccttggataagccagcctcattgtgaggagacagagcaagaaggcagccaattgtttcctcacaaagcaggctcaatatattttctagctctgatctaccccatgtaatggctttaggtctgacttgctctgaggaaaatattaatactaaggttggtacctctaatgtaagaaggtatgatacaattctaaacaatgtaggcatgatcactattttagattccaaatctaattaccaagtgggtctgacttagaacaa

SEQ ID NO: 745436 - DNA, 461 bp, Homo sapiens
tggaatcctatgttagggacagatattcagacccttgtggcagtgttctggaatcctatgtgaggaagaaatattcagaccacagcagcagtgttgtggagtcctatgtgagggacaaacactcagaacccagcagcggtgttccggaatcgtatgtgagggacaaacattcagaccacagcaggagtgttgttgaatcctatgtgagggacaaacattcagaccctcgttgaagtgttctggaatcctatrtgaaggacagacacttggaacccagcagcagtgttctggaattctatgtaagggtcaaagattcagaacacactagcagtgttctgtaatcctaagtgagggaaaaacattcggaccacagcaggagtggtctggaagcctatgtgagggacaaacattcagaccctcgccatggtgttctggaatcctatgcgggggacaaaccattc

SEQ ID NO: 745437 - DNA, 643 bp, Homo sapiens
ggaaaacagccatatctgtgacattaaagtgcaaagtgtgctgtaaaaatgggaacaacaaagcctgcatgataggacttctgttacagcatggttaagaccttcttgttggtaggccaggaggtaatggtcaccatttgtgtccatattctcctagactgagcatggagaaatctgtaatagtagccagagaggtgtaggttgtgtgttcaagggaaaaaagagtgattttgagggaacacatagcctgcctcagctacktcagatttctctcctatatgggtttgttgatgcctgctgaggtgtgacttctggcaaaaggttttcccacattccttacattcataaggtttttctcctgtgtgtgttctctgatgtatactgaggcctgacttctgggagaaagttttcctacattcattacatctaaagggtttttcccctgtgtgagttctgtgatgtacaaagagttttgacttctgggagaaggttttcctacattctttacattcaaatggcttctcacctgtgtgagttctctgatgtatggtgagaactgtcttatcgtaaaaagttttcctacattcatcacattcatagggtttctctcctgagtgagtcccctgatgcgtactgaggtttg

SEQ ID NO: 745438 - DNA, 643 bp, Homo sapiens
ggaaaacagccatatctgtgacattaaagtgcaaagtgtgctgtaaaaatgggaacaacaaagcctgcatgataggacttctgttacagcatggttaagaccttcttgttggtaggccaggaggtaatggtcaccatttgtgtccatattctcctagactgagcatggagaaatctgtaatagtagccagagaggtgtaggttgtgtgttcaagggaaaaaagagtgattttgagggaacacatagcctgcctcagctacgtcagatttctctcctatatgggtttgttgatgcctgctgaggtgtgacttctggcaaaaggttttcccacattccttacattcataaggtttttctcctgtgtgtgttctctgatgtatactgaggcctgacttctgggagaaagttttyctacattcattacatctaaagggtttttcccctgtgtgagttctgtgatgtacaaagagttttgacttctgggagaaggttttcctacattctttacattcaaatggcttctcacctgtgtgagttctctgatgtatggtgagaactgtcttatcgtaaaaagttttcctacattcatcacattcatagggtttctctcctgagtgagtcccctgatgcgtactgaggtttg

SEQ ID NO: 745439 - DNA, 556 bp, Homo sapiens
tgctgccagctgaggacagctggttcacctgcttggacctgaaagacgctttctttcctatcagattagcccctgagaggcagaagctgtttgcctttcagtgggaagatccagagtcaggtgtcactactcagtacacttggaccgggcttccccaagggttcaagaactctcccaccatctttggggaggcgttggctcgagacctccagaagtttcccaccagagacctaggctgcrtgttgcttcagtaggttgatgaccttctgctgggacaccccacggcagtcaggtgtgccaagggaacagatgccctacactggcacctggagggctgtgggtagaaggtgtccaagaagaaagctcagatctgccgacagcaggtacgttacttgcgatttactatccaacaggggtcggaacggagcccgggatcagaaagaaagcaggtaatttgcaatctagcggagcctaagagtagaaggcaggttagagaattcttaggagctgtggggttttgtagactgtggatcccaaactttgcagtattagccaa

SEQ ID NO: 745440 - DNA, 556 bp, Homo sapiens
tgctgccagctgaggacagctggttcacctgcttggacctgaaagacgctttctttcctatcagattagcccctgagaggcagaagctgtttgcctttcagtgggaagatccagagtcaggtgtcactactcagtacacttggaccgggcttccccaagggttcaagaactctcccaccatctttggggaggcgttggctcgagacctccagaagtttcccaccagagacctaggctgcatgttgcttcagtaggttgatgaccttctgctgggacaccccacggcagtcaggtgtgccaagggaacagatgccctacactggcacctggagggctgtgggtagaaggtgtccaagaagaaagctcagatctgcygacagcaggtacgttacttgcgatttactatccaacaggggtcggaacggagcccgggatcagaaagaaagcaggtaatttgcaatctagcggagcctaagagtagaaggcaggttagagaattcttaggagctgtggggttttgtagactgtggatcccaaactttgcagtattagccaa

SEQ ID NO: 745441 - DNA, 535 bp, Homo sapiens
tcacctgcttggacctgaaagacgctttctttcctatcagattagcccctgagaggcagaagctgtttgcctttcagtgggaagatccagagtcaggtgtcactactcagtacacttggaccgggcttccccaagggttcaagaactctcccaccatctttggggaggcgttggctcgagacctccagaagtttcccaccagagacctaggctgcatgttgcttcagtaggttgatgaccttctgctgggacaccccacggcagtcaggtgtgccaagggaacagatgccctacactggcacctggagggctgtgggtagaaggtgtccaagaagaaagctcagatctgccgacagcaggtacgttacttgcgatttactatccracaggggtcggaacggagcccgggatcagaaagaaagcaggtaatttgcaatctagcggagcctaagagtagaaggcaggttagagaattcttaggagctgtggggttttgtagactgtggatcccaaactttgcagtattagccaagcc

SEQ ID NO: 745442 - DNA, 551 bp, Homo sapiens
gttgaaagtaagttcagtttagctgtatgagtttgtttctaaggtctctatttcattccatctgtctttatgtctgtttttatgctagtgtcatgctgttttaattaccataacttagtggtataatttaaaaccaggtaatggaattcctccagttttgttttatatactcarcatagctttgactattacggtgttttgcgatggttccatatacagttcagaatttttttttctatttctgtgaggaatgtcttttttttttttttcgatggtgtctcactctgtcacctagactggagtgcagtgatgtgatcttggctcactgcaacctctgcctcctgggttcaagcaattctctgcctcagcctcctgagtagctgggattacaggcacccgccaccacacccggctaatttttttgtatttttagtagagatggggtttcaccaagttggccaggctggtcttgaactcctgacctcataattcacccatctcggcctcccaaagtgctgggattacaggcatgagccactgcccctggcctg

SEQ ID NO: 745443 - DNA, 569 bp, Homo sapiens
acgactgtcatcagacatccaaaaggtatcaaatgtctaacatgaaatataaaatttgtctatagccttagcggtctgcaaaattcagggctcaccattctgagtataccgctcaagtttctttcctatgacttcttcaggttctgtcatttattaacacagtgcatctaaaattgtcactgctggtcgtctggaagaatctgagaagaagcaggtccttgttctcattcccagagctgcatctctgctgaatagggtcagggtgctcccagcttagcctcatctgatccactgacaggctcagttatctcctgcccagggaagggatgggcttctctatccagggctgawtccccaggaccaggcagtgtggctgggacaagccagctctcagcagggaagacataagctgcctgagtggccatggaatacaaggtctgcacctgggcacacagaggcccccggagccgagtgagcagtgtcagctgctcacaggtcagtggagaatggatctgctgtgcccacacctgggctaggtcttgataaacagcctccgacatagctcgcac

SEQ ID NO: 745444 - DNA, 609 bp, Homo sapiens
cacaaccattctgtgtgaagtgattattccagggtaattgtgccctgactgtgctgcatctcagtctgacttgtctttttgaaaatcactggattactctcattaataggggtatttctgtttctatttgaaaatggccaactgtcctctgcaggtgtcctgatttkgtttgctagtttagaccctgaaggtagcagtgagaaaatgttttggccacatcagaatacctattctcagctggagtagatatagaaatttcttaataatatctaaccgttttctctataaccattatatttaacagtgataactggagggcagagagggacacagatgacacaatctttgaagtttaatttggttataaggttttttgttcttgttttgttttgctttgtttttggatacaaggtcttgctctggtgcccaggctggagggcagtggcacaatcataactcataatttggttgtaactgttctttaaaaaatatttttggctgagtttggtagctcacacctgtaatgtaaacaatttgggaggccaaggtgggatgatcgctggatcctatgagttcaagaccagtttgggcaatataagtaggctcagc

SEQ ID NO: 745445 - DNA, 609 bp, Homo sapiens
cacaaccattctgtgtgaagtgattattccagggtaattgtgccctgactgtgctgcatctcagtctgacttgtctttttgaaaatcactggattactctcattaataggggtatttctgtttctatttgaaaatggccaactgtcctctgcaggtgtcctgatttggtttgctagtttagaccctgaaggtagcagtgagaaaatgttttggccacatcagaatacctattctcagctggagtagatatagaaatttcttaataatatctaaccgttttctctataaccattatatttaacagtgataactggagggcagagagggacacagatgacacaatctttgaagtttaatttggttataaggttttttgttcttgttttgttttgctttgtttttggatacaaggtcttgctctggtgcccaggctggagggcagtggcacaatcataactcataatttggttgtarctgttctttaaaaaatatttttggctgagtttggtagctcacacctgtaatgtaaacaatttgggaggccaaggtgggatgatcgctggatcctatgagttcaagaccagtttgggcaatataagtaggctcagc

SEQ ID NO: 745446 - DNA, 656 bp, Homo sapiens
tgtgcaaagcgggaaatatttactttatagctgcatttattttctataattacaaaacatgtgagtcgagagaacgacaaatgcattcagaggaattacaagagtgggtcataatttttttcagtaaaaagtatataggatgtcagtaaataggaaatattccattttagtatcaattatgggtagaagaaatcttttactaaagctcacctctaaacatctggtgytgttgggtgctgctttattctttcttcctcttttcttggcttactacaaagcccacaatcttttatccaaaacccttggaattagatgtgcttgggaattcattattcattagattttagaaaggttcatacacaatgtatcatgtaacatccccagtgggggctggggcagcaatctgtattaaacacaataattttgcagcaagtcacatgacacatgattatttctactaagagattactagattataaacagcctcacatcagtctgttgggttagactgtgctgccaaattatcaaataattttgtattttcagagtgttaggacttcagaattacagataggggatcgtagatctatagtattcctatttgaatggctaaatggatttttcctaaggtcctagcatgtattatgaccaggaaa

SEQ ID NO: 745447 - DNA, 656 bp, Homo sapiens
tgtgcaaagcgggaaatatttactttatagctgcatttattttctataattacaaaacatgtgagtcgagagaacgacaaatgcattcagaggaattacaagagtgggtcataatttttttcagtaaaaagtatataggatgtcagtaaataggaaatattccattttagtatcaattatgggtagaagaaatcttttactaaagctcacctctaaacatctggtgctgttgggtgctgctttattctttcttcctcttttcttggcttactacaaagcccacaatcttttatccaaaacccttggaattagatgtgcttgggaattcattattcattagattttagaaaggttcatacacaatgtatcatgtaacatccccagtgggggctggggcagcaatctgtattaaacacaataattttgcagcaagtcacatgacacatgattatttctactaagagattactagattataaacagcctcacatcagtytgttgggttagactgtgctgccaaattatcaaataattttgtattttcagagtgttaggacttcagaattacagataggggatcgtagatctatagtattcctatttgaatggctaaatggatttttcctaaggtcctagcatgtattatgaccaggaaa

SEQ ID NO: 745448 - DNA, 519 bp, Homo sapiens
aattatgacttttagccttcctaaattttaatacttagtgtaaaaatgtattaaagattctagtcaaattaatggttaaagggaataagattctggcagtcagggctcctcaaggatgtttgcaattctgagacttaacaattgttgaaacataaaagcgaaggacttccttgaaatcacttctttctggatgggtatgagtttcacacgtgtctgaataagygggaaaattcaagagtaacagaaagacaaaaacaaaaaaggagaagtgagtaaagtgaagtataaaccaaataaccatttatgtcacacaaggagagaacaacagttgttttagtttttctcactgatttttagatcaatgaggttttcgtgcttggtagagatggaaaaaacagaattaatgactacactaattgtattttgatgcgactcataaacacacaaaataagggaggtgggaactagtgagctttagtccagtttgcattgttctatattagctatcaaaacccagag

SEQ ID NO: 745449 - DNA, 593 bp, Homo sapiens
actaattattcatttctaattacatttcaatagatattatactaatgggtaaaaaggcatttcattgtgttattatttgtaatagtaaaaaactgtaaacgattattaataaatgcctctcagttggctaaatgcatgtgttagcttctacacagataaatgtttgaagaatatacaaccgtgaatagyagggacctttggaaagccgaattaggaggtgggagtgggagtcccacctcctaactctgtattattgtacatttccgtatcatttgaaggttttacaatcatcttgttccactttttaaatttttgtaaagatattttttccctctctccctctctcccctccctcctgccttccttactatattctttttttttttttttttctttttttttgagactgggtctgtcacccaggctgcagtgcactggcaggatcttggctcactgcaaccttcacctcctaggctcaagccatcctcccacttcagccttccaagtagctgtgactataggcacacaccaccataccccgctaatttttgtatttttggtaaagatggtgttttgccatgttgtccaggcct

SEQ ID NO: 745450 - DNA, 593 bp, Homo sapiens
actaattattcatttctaattacatttcaatagatattatactaatgggtaaaaaggcatttcattgtgttattatttgtaatagtaaaaaactgtaaacgattattaataaatgcctctcagttggctaaatgcatgtgttagcttctacacagataaatgtttgaagaatatacaaccgtgaatagcagggacctttggaaagccgaattaggagrtgggagtgggagtcccacctcctaactctgtattattgtacatttccgtatcatttgaaggttttacaatcatcttgttccactttttaaatttttgtaaagatattttttccctctctccctctctcccctccctcctgccttccttactatattctttttttttttttttttctttttttttgagactgggtctgtcacccaggctgcagtgcactggcaggatcttggctcactgcaaccttcacctcctaggctcaagccatcctcccacttcagccttccaagtagctgtgactataggcacacaccaccataccccgctaatttttgtatttttggtaaagatggtgttttgccatgttgtccaggcct

SEQ ID NO: 745451 - DNA, 622 bp, Homo sapiens
tttatttgatccttacaaccaccctatgatgtagtgtagcagagatgctagctcttccattctccccgtgatgtaggctaaaaaccatccagaacccccttccatgaaggatatgttgctggtagtgctgttggccagaaggcctctgtctgtcaggctcttcagggatcacctcaacttccaacggctccctcacccacagtcacccttcttcccataatggcctgtacctaatgactgatcaatgtargaacataaaggcctgaccatcctgtggagcctgcatagtatcctgacttctctctctgccctcccttccatcactactgatccaataaacattttgcaagctgaacttcgtctcagagctgcttcctaggaaactcaacctatgataatcactcctcttcttttacagaaataaatgccaagaataaagacatttcctagcttcccttggagtctgctgggtgtggccattcaaccatgctctggcccctgggatgaaaatggaagtcatgtgtgcaacttccaggaagtgttcttagcagtgcccctctttctcctcctgctggctggaatgcagacatgaaggctggagtgggagcagccacttcttgag

SEQ ID NO: 745452 - DNA, 622 bp, Homo sapiens
tttatttgatccttacaaccaccctatgatgtagtgtagcagagatgctagctcttccattctccccgtgatgtaggctaaaaaccatccagaacccccttccatgaaggatatgttgctggtagtgctgttggccagaaggcctctgtctgtcaggctcttcagggatcacctcaacttccaacggctccctcacccacagtcacccttcttcccataatggcctgtacctaatgactgatcaatgtaggaacataaaggcctgaccatcctgtggagcctgcatagtatcctgacttctctctctgccctcccttccatcactacygatccaataaacattttgcaagctgaacttcgtctcagagctgcttcctaggaaactcaacctatgataatcactcctcttcttttacagaaataaatgccaagaataaagacatttcctagcttcccttggagtctgctgggtgtggccattcaaccatgctctggcccctgggatgaaaatggaagtcatgtgtgcaacttccaggaagtgttcttagcagtgcccctctttctcctcctgctggctggaatgcagacatgaaggctggagtgggagcagccacttcttgag

SEQ ID NO: 745453 - DNA, 631 bp, Homo sapiens
gtataattgttacttatatagaagccaaaatcccatttattttctaaaaaaaaaactttgagtagaaaatttatatatatttaactattaaacagaaaagttttagaactttaagatgtaaagcttcagagatgttgtaatctgtcttcttcacagatgagaaaaccaactcagaggagataatggcttgcccaagatcacacagaaagaggataacagatcttgggctacaatccgggcctcacgactctctgcatctctaccaygttgcttgtcaccaaccaaaaacattttcgtggacattccacagagagagatttacgcaaattaactataaaatgattaaatataatccattgaatgtaaataaactgtttacaagtgttcttgtcactgtgttgcctgccaccctgaaaactttacaaaagagccaattcagaattcctcatatcatattgggaagaaaagtagtagtggggaccaactaggaaaagtccttgcatgtcatccttgagataccatatctatcagtagttctagcaataagatgccaaaacattgcaaagtcagtttgattctctgacagttgctgaatccttttaactaaaaagtaagtacataaaggaatggc

SEQ ID NO: 745454 - DNA, 607 bp, Homo sapiens
ctatcaaagccacaactgataaaaaaacttggttacttctgtggcatacaaaattttatgtaataattgtaattatcagtgataagcacactaagttatattaggattattggagtttcccataattctggaacacataccaataacatatttatacaaatatagcccaaagaaagccaattttatatgtgacaatgtttcctttaygatttttgtactaaataaaccaaacttcacctttacattagcatactgttaatgttaaacccaagtcctaataaaacctaataaaaatatctacccaattttaatatttgacaaggggtaagattctcataaacctcttataacccttcaaaattttttgttaaagagcagatcagcgctctaagaaaaagtatgcttgtattccaatgtttaatttacagaaaaactgaatactcctttaactttggccaatatgttcacacatagataatttttttaacaagattaatttttcacaaaccttccacaacttgttcaaacattcagctttatccaaacttaaaacaatcattaaccctttaatctaggcagaaacatccacattcccatgccctcttat

SEQ ID NO: 745455 - DNA, 607 bp, Homo sapiens
ctatcaaagccacaactgataaaaaaacttggttacttctgtggcatacaaaattttatgtaataattgtaattatcagtgataagcacactaagttatattaggattattggagtttcccataattctggaacacataccaataacatatttatacaaatatagcccaaagaaagccaattttatatgtgacaatgtttcctttacgatttttgtactaaataaaccaaacttcacctttacattagcatactgttaatgttaaacccaagtcctaataaaacctaataaaaatatctacccaattttaatatttgacaaggggtaagattctcataaacctcttataacccttcaaaattttttgttaaagagcagatcagygctctaagaaaaagtatgcttgtattccaatgtttaatttacagaaaaactgaatactcctttaactttggccaatatgttcacacatagataatttttttaacaagattaatttttcacaaaccttccacaacttgttcaaacattcagctttatccaaacttaaaacaatcattaaccctttaatctaggcagaaacatccacattcccatgccctcttat

SEQ ID NO: 745456 - DNA, 587 bp, Homo sapiens
ttttgtaaaccttgaccctaaacataaattaatgttagtcatttacagagcaaatatgatattacagccgttccaccaatattgacggagccattcctatgtcagaaattttcgtagttgcatgataatacaataatcaataggacagaaaaggttttcwttggttctcaggaattttaaggttgtagggtagaaagacaaaaagaatactttttattaaagtgtacttgttgcaggtatcatatggtaggaacagatattgtctgttcttcttatattccttctacatcccagtcttccaaacctggaatatttctagcacttttccatattcagtcccaaagaattggatttgcctttccaaatccatttgaaacagcattatttgtgattattggtaggtaatgaagtacccccacttttctaagagaagccccatttttctctttcttcttttctctttcctgcttaggcccactttctacttagcccttcagaaaagcaaatatagccttttacgtcctcttcaccagacactccttactgggcaagttcatctaattatgtgcatctagctacctgctcca

SEQ ID NO: 745457 - DNA, 625 bp, Homo sapiens
gaagcacaataaaacaaggtatgcttgtatcaaatcatataactaaattatgcaaccacactacatcaggctgggcagggcaggtagggaggctgataaaggacaggagaaggggaggagaagagaacccacctccaaggcagacaatgtcctgggctccttgtgagaaccccagagaaaagatacggaggctgagttctggcagaacagcaggatacctgctgaccgacctccccagtgagccacaattaaacattttgcgcaatgagccttgaggcacttagggacttattttatgtggttttcaagagtggctacctaaaattctacawgttaaaatgttccactccctaagagtctatcctttaaattgctgtccccaccaaaagcaaaaacagaagtcattggaatccgaagcaatttcaaatatagtggcacaactttccttttttccataaggcagatgccagaggcttcagttgtccatcgctgagtacactcaccctggcctatgctggccttcaaatgaacttgtgccttgggtcaggcttgggattctggagcaccatctgcccccagtgagtctattagtggattcaacgtgtctgcagatgttattgcaggg

SEQ ID NO: 745458 - DNA, 650 bp, Homo sapiens
tttgagcaataaatatcctctttaaaatttaatatagcacaaagtcatcataagtataaaacattgtgtacaatctttcttacaaatggccaaatgcagtgaccaacttcatccatctcaattgttgtctcttgcattatagtctattctggtgtctacattcggcccactataatctgtactcctgaagcctccccaaagaaatgctcctagattagtgaatatttgaataaatattagaatttggattcasaagacatgaacattaaactggttttgcctctggtagcttaaagttgatagactcaaatactacatatatattatatatatgtagtattatatattatattatataatatataaatatattttatatattttatatatattatatatatatatatatatatatatatatataaaacattgtaaaaacagggtgaaaggatcagtgacagtgagaaatctaacagctccaatgtcttaaagtcacaaggacagtctcccaaataaacagccatcttatttagcagaattctgcttcattataaattttcgctaaaagaacagttttcctatgacacggaagaaagctgttatgggtgtttttctgggtttcttggacttgggaagtttttgagagctgt

SEQ ID NO: 745459 - DNA, 615 bp, Homo sapiens
tccttcagagccacggacctctccttcccctggcctctgcttctcagtgtttggttctgaatctcatcccaaatggctgagatctaaagactgaatgaaacctatttaagtttgtgcaaaagtaattgcatttttttttttaccatggaaagtaattgcaaaaattgcaattacttttgcaccaacctaatacatatttcactgaaaatccgagaacttccgtaagtttgctgtaaattgggtttattaaaaataatgaaatgaattgttctgtgctgggaggtgctataggtttttaattcaaaattgtggaaaacccaagcccattaatgcaaacccttcctctcaygtctttgtgtttctaatggaaagactttttattgtgtgaaggaaggaaaaaaggaacttgtcttctagtaattggttatttgcagactctgtaagtatatgtactgaacattaagggtttatagccctggggtttgttcctaaatgggctacaaggagttttacacaaaacttttgcttaatgcttttttttgtgtggagaggacccataatccttataatactctcaaagatggctcaggatcccccaaaatgctaaaaatcacg

SEQ ID NO: 745460 - DNA, 615 bp, Homo sapiens
tccttcagagccacggacctctccttcccctggcctctgcttctcagtgtttggttctgaatctcatcccaaatggctgagatctaaagactgaatgaaacctatttaagtttgtgcaaaagtaattgcatttttttttttaccatggaaagtaattgcaaaaattgcaattacttttgcaccaacctaatacatatttcactgaaaatccgagaacttccgtaagtttgctgtaaattgggtttattaaaaataatgaaatgaattgttctgtgctgggaggtgctataggtttttaattcaaaattgtggaaaacccaagcccattaatgcaaacccttcctctcatgtctttgtgtttctaatggaaagactttttattgtgygaaggaaggaaaaaaggaacttgtcttctagtaattggttatttgcagactctgtaagtatatgtactgaacattaagggtttatagccctggggtttgttcctaaatgggctacaaggagttttacacaaaacttttgcttaatgcttttttttgtgtggagaggacccataatccttataatactctcaaagatggctcaggatcccccaaaatgctaaaaatcacg

SEQ ID NO: 745461 - DNA, 615 bp, Homo sapiens
tccttcagagccacggacctctccttcccctggcctctgcttctcagtgtttggttctgaatctcatcccaaatggctgagatctaaagactgaatgaaacctatttaagtttgtgcaaaagtaattgcatttttttttttaccatggaaagtaattgcaaaaattgcaattacttttgcaccaacctaatacatatttcactgaaaatccgagaacttccgtaagtttgctgtaaattgggtttattaaaaataatgaaatgaattgttctgtgctgggaggtgctataggtttttaattcaaaattgtggaaaacccaagcccattaatgcaaacccttcctctcatgtctttgtgtttctaatggaaagactttttattgtgtgaagraaggaaaaaaggaacttgtcttctagtaattggttatttgcagactctgtaagtatatgtactgaacattaagggtttatagccctggggtttgttcctaaatgggctacaaggagttttacacaaaacttttgcttaatgcttttttttgtgtggagaggacccataatccttataatactctcaaagatggctcaggatcccccaaaatgctaaaaatcacg

SEQ ID NO: 745462 - DNA, 565 bp, Homo sapiens
aatagctgggactacaggtgcacaccaccatgcctggcttgctgaaatctcattgagagcccttctatgtaattagtcacttctctcttgctgcttttaagattctctccttgtcttttgattataatgtgcatcactgtgcatctctttgagtctaccctacttcttagtttatcaagcttcttggatttgtaaattgatgtctttcatcaaatttggagcattatcaggcattaattcttcaaatattatttctgccctttcctctcttttctccttctgagattaccacaatatgtaagttgttctgtttgatgatgccccacgggwtctgtggggctatgttcacttttccttgttttttttctttctgttcatcactcagtaatctcaatggttgtatcttcaagtttgctggttctttcttcagcttgatcaaacctgcttttgaacccctctaatgtatttttttttcatttcagtgattatatttttcagctccagaatttctttttggccctcttttatactttctacctcttcattgatattctcattttatcta

SEQ ID NO: 745463 - DNA, 607 bp, Homo sapiens
actgcttttttaagtatcctggaatctgttcaatttttggtgtccaaaacaacaggcactgtttttttaagtctcctggaagctgttcagttaatggggtttaaaacaatgacaaacagcccccatgcctgccccatcagtgatcagaaacagcaatccatagtcagaacacagaaccctaatatttggaggacaaggtccttattgmccactctagctccagtgagccatacaagaaacattggttgctgtccctacagctgcctgctgccagctggggatttgagatgggtagtcataactgtactgatggctgaaataaataaaaagtagataaaatttgccagccaaactgttccctggaagatgcaaacattaaaataaactccagagttccaaaatagtcacttcagactgtttctaacagtataattgttgtctaggtagagagacagattcttgctgcttcttactccaccattttccctgtcatcactcctgacatatattaaaaggatccctctggctgctatattggatatggactgtatagtagcaaggacagaagtatgtgtaccaattagaaagttactgaattaatccaggt

SEQ ID NO: 745464 - DNA, 617 bp, Homo sapiens
ctcctggctgattttgtatttttagtagagatggggtttctctatgttggtcaggctggtctcgaacacccaacctcaggtgatctgccaacctcggcctcccaaagtgctggcattacaggcgtgagccactgtgcccagccgagaaactgttatgtcttaaaggaaaatgtagagattayttcctggaggagagagtgagcaaccctaagaaatgcttctgacaagtaaaatgaaaacttgactttgaccataggatgtcaccatgcagagttcattggtcatattaacatgagtagtttggttgagtgacggaaatgaaaactccactggagttgatctaaaagagcatgggaggggagaaattgaagacagtgggtatagacgattcttttgagaaagtttacttgaatagagagcaataaattaggtagtaagttgtaggaaagtgtgtcaagagtaggagttttagaatgtgagaaatagtatcaatgttcagcagttggaaatacttcagtagagactagaatcaatattgtagaggagattgaaggaagaattgctactgagaaaaagttcatgaatagaagagaggggatggaagtagtgcacaggtt

SEQ ID NO: 745465 - DNA, 614 bp, Homo sapiens
cagctcaatgactagggttcccaaggaaaagcacaaggagccatctcctttataaggtccttcactataaaaaacaatatcaaaaaagagactttcccttaggttgaagaaattcaagaccagcctctgcgtaagcattataacctcccgaaagtgacacacgaacactctycaaaggcctcaagtttgatttcctaaccaagacaccaacaagaaacggtcatctttcagctcagaggccagttctgaatctctccccagggacatagtatccttggcttttataaacggcctttattaggggcaaactcacttcattttaaaaaagggaattctggtggtgtcagatcctagtctttctctgacctacaccctgtcaaactaagagattaggcaggtggtacactttataggaagaccagccactagcctgctcaccaccaaaatctggcctgggaaaggtgaaggaaagcagtttaaacaaccacattgctgtttctttgacttcagccaactcctacttcagtcatttttactgaaactggtctacatgtatagactatgcctaaaagaatcccagaaagagtcctagaattccaagaatgtaagcttca

SEQ ID NO: 745466 - DNA, 578 bp, Homo sapiens
caggtaaggaagtactatctgaaaactagagctgtctcaatcacactagtaatcagaaaagtgaaatttaaacaacccagacagaaacaattttttgcccctcacattggcaaaatatttaaaaaatctgatagtgttaagtttggtgagagtaggtaaaagtaagaactctcacttaatgttggtgaagtctgagtggtatgatcattggtaagagcccattggcgatcttttttttttaactgactcatatgctttgaagacaaattggcaagaatatacactgttaacctttttttttttttgtaattgcaaaacaagcaaaccaagccctgcataatggatcaatacaaagtggcaccttgatataataggtcccrtatagctgtgaatgtacttgctctcaaaatgtatatatagaccttaaaaccataacattgagtaaaaacagaaaattgcagagtgataggtattgtacgatataatttatatatattttaaaagccaacacttgaagaatatattgatacatgttcggttgaaccacataaatttattttgtgtgtgtgacagggtct

SEQ ID NO: 745467 - DNA, 659 bp, Homo sapiens
acataatgccatatgtctacaaccatctgatctttgacaaatctgacaaaaacaagaaagggcgaaaggattccctatttaacaaatggtgttgggaaaactggctggccatatgcggaaaactgaaactggatcccttccttacaccttatacaaaaattaactcawagcgtattaaagacttaaatgtaagacctaaaaccataagaacccttgaagaaaacctaggcaataccattcaggacataggcatgggcaaagacttcatgactaaaacaccaaaagcaatggtaacaaaagccaaaattgacaaatggatctaattaaactaaagagcttctgcatagcaaaagaaactatcatcagagtgaacaggcaacctacagaatgggagaaagttttgcaatctatccatctgacaaaaggctaatatccagaatctataaggaacttaaacaactttacaaggaaaaaatgaacaaccccatcaaaaagtgggtgaaggatatgaaaagatacttctcgaaagaagacatttatgtggccaacaaacatatgaaaaaaagctcatcatcactggtcattagagaaatgcaaatcaaaaccgcaatgagataccatctcatactggttagaaaggtgatcattaaaaagtcagg

SEQ ID NO: 745468 - DNA, 659 bp, Homo sapiens
acataatgccatatgtctacaaccatctgatctttgacaaatctgacaaaaacaagaaagggcgaaaggattccctatttaacaaatggtgttgggaaaactggctggccatatgcggaaaactgaaactggatcccttccttacaccttatacaaaaattaactcaaagcgtattaaagacttaaatgtaagacctaaaaccataagaacccttgaagaaaacctaggcaataccattcaggacataggcatgggcaaagacttcatgactaaaacaccaaaagcaatggtaacaaaagccaaaattgacaaatggatctaattaaactaaagagcttctgcatagcaaaagaaactatcatcagagtgaacaggcaacctacagaatgggagaaagttttgcaatctatccatctgacaaaaggctaatatccagaatctataaggaacttaaacaactttacaaggaaaaaatgaacaaycccatcaaaaagtgggtgaaggatatgaaaagatacttctcgaaagaagacatttatgtggccaacaaacatatgaaaaaaagctcatcatcactggtcattagagaaatgcaaatcaaaaccgcaatgagataccatctcatactggttagaaaggtgatcattaaaaagtcagg

SEQ ID NO: 745469 - DNA, 598 bp, Homo sapiens
tctcctactgatctgccttttgccagttgattttcagtgaaccttcagagagtggaagagaagttttcctttggcccctatgctaggcatatttaaaaaattgcagcgaattcaactagtcattatcccagagcactaaactcagctaacctggagggcatggagtggtaaataaagaacttgaaagaggaagaagaaatcacactaacatatctggtgttcattaatttaaggaaccattgaacagtgtgaactgcatcattyttatcatcacctcttttgtaggtgtcataggcaactctgtaggtaagtttctctaatcacataaaaaggaaattgaactatatttgtgttttatgcattaaccttttgtaaggtttatatatgagccaacccattttttttttaaacaagagttaactcacctcacaaataaacttttttcttgtgcctaagatttccttaaaagtacataagatattgaatattgagtggttagaacagtaatgccattgtgctgagaaagagaagaatggcagagggtggggcagtgctaaaggagaatttactgattttttaatatttagagcttttaaac

SEQ ID NO: 745470 - DNA, 645 bp, Homo sapiens
tcccagtactatgcctctcattcacagccggtgcctcgggcctggctcactctgccagccaactgactctcttctctgtaccgaggtctcagttcaagccccacctctaaaaggccagctctgattttccaatccaaagtagctctttctgcccgttttcagtctttgtcttacttaagttttctccacagaatttatgaamcactgaaattactatctttatttgttcatttccctaaggagtgagagacttcactttccagctcactgttatatttcaatgcctaaaactgaaccaggttcttatggtgaatgaatgaatgaatgaatgaatgaatgaaaaaaatgtaggtcaagaatacaggttctgtgggaaggaccaaacaaatacttttcagttcagaaaataaaatttaaaaacaaaacaaagaaaatgaatagctgaaattcataataagtcagaaaaggtaattcaaataactttataatgcagtactctgacaatatattctcagtaagatatagtctaaaaataaaacaaatgtaaagaaatcttgacctgagtaggtttttattggtaatgatattggtgttgtttaacaaactattttgtgtataataaagcaattaatatatagatttaca

SEQ ID NO: 745471 - DNA, 671 bp, Homo sapiens
ctgtcaaggatcctattgttttcctaactcacttgactataacagtttcataacagtttcttgggtttgttctcagaattttctcccagagtttctgatttaagaattaggtccatgaatctgtatttttaacagactcacctgagagattctaatcatgaggcaaatatgagaaacattctaaaagggtatgttcaattgaacaaatttccatcattttactccccaacamtagggaaactgtaaagagtaaaagatttcaaacagggaaatttatggcccaacaggtaaacttaaaatagggagttaccacctgcttgctttgtctgatgggcatgcctgaatcacaaacctttgaaccaactcatcttccagtataattcacttccaaactatcaagtaaccttctcaaaaaatctctgttcattcattcatccattcattcatttgacatttattgaacatctgctatgtgccaggcactgttcttggcacaaagaatagagtggtgaacacatatccaggccctacccttagggggctgaattttagtcttttttcaaatcatagtcctcatgtattaccaatcaaaatatcatatgttcttttggataataccctgcaaagcataatgtgaaatcacaaaggtacaaaagtcacctctctcagac

SEQ ID NO: 745472 - DNA, 591 bp, Homo sapiens
atggcagttctgactccttccacactccctcatctccctttcttagccatcatagatgtttgagaaggcagcagagattctccataaagaaggaacagatgaaggtggaaaaacaaggttttgctttgataatatatatcagtggcagctacattctacagaataaagaycaaagaagaaaatgtaaaatttttctatgtacactcctgatcatttcacttttagaaaatttggaagcatttggttaaaatgtagtcatttttgttgtgtatctcgtaagcacaacctgggtatcacatggtaggaaaattgggctcctggcaggggaagggcctctttacttcttgtgcctatgcaaggaccctgagacccatttctccttggaaccagaagggccctgagagctcaccctagccaacctatttaactccacaggtaaggaagctgaaggccctggaggagaagcttgccggagatcataaatgtgtaacacaatgaagactgcaatttggactcacaactcctactccagtgcttttctcaccacatcatattgcctcttgatctgtgatgttctggtctggatggctc

SEQ ID NO: 745473 - DNA, 612 bp, Homo sapiens
tgactgaacagagatttccttaaaggtattaaatcaataagtctctctgtctttgccaagtggctttgcatgtatgttagggcatagcattgatgttctggtggtttacaattatgccttagcctacacctcctgattacgtagagccagaagtgaggattttggatcttttcaagactttcatgagcatgctcatgaccctgggcatgtacacagctttgcacatgtttgtgaccttctagatttccaggaatctgtcagagcttttcatagcccctggtaaatacctaatccctagcttttctttttagtttcttggccagcctcttgtttgccccaayggttatcactgcctcaggcagcagcaatgttgaacaattgcctttgactgttgtagacaaatacccctgaagaaagagcatgttctgagataggtaaaataaagacaagtcttgcgagaggtggtttctaatgagctaccaaactggtcaactgacaacaattctttggaaatgggactttttggggagctccaaatctattctctcaactcagtggtcactactttaaaggttttcccagtaggatgtaagacacttggttttcaaggtt

SEQ ID NO: 745474 - DNA, 611 bp, Homo sapiens
acaaaaaaaattaaaaaaccaatgcctcttcccctgcctctccaaaaaagaaagaagaaaaaaatattttgtgactagcaaaacatttttgaccagactagtatgaatcctttcactatgttgctcagtttttataccayataatttgctcctttccttaagttagcattgttacttaaaaaaaaaaaaaaaatccttctcctgtcttcattcatttgcccaatgaatggcttttatcaattgcattattgcagtagtcatcagcaaaattctacataggactaaactgccctgaatatgctatgcagattgcttgtgcctgtggtgacacctagaatgaataaagtgtatctttaattggacggttctgcatcttggtcccacctaccgtcagtagtatgctgcagttggcttgatccatttgccagagctaatgtaatttcttcccaaacctgaaaccagcaacgtcatggtggtagcttgaaatcatccatgacaggagtatttacaccacggaaattggcaaaagctaaaaatcaccccctcccccacaagagagccagttgttagtcattttccaacatacttcacactgttgttctctgaccagt

SEQ ID NO: 745475 - DNA, 627 bp, Homo sapiens
tggactcaatttttaactttatatttcagaattccaccatgtgtttttccttctcataaaggatcaaaaccacatcatgacagaacaatctgtgagaatcataggcttttaacaaggaagaaacggattaaaaaatacttcaygccttattaaagaaatccctatgttcctcaaaagcactttttagcatcttattagtggcatttgatctgactgacatattgaccagtaattggagcagaagatggatctattccacttagatcacaaagggaataaaaattttggctgtaaattcaagacggacaacttccaaataatttctttagaataactccctataaaacagccttctaagttgttctagatacatcgtcagattctttaataaatcactggccaataggtgaaccttattgtttttatttggatttggaaataaaccaaaataggattgatctgaaagtgaaagtgactttaaatgcccaccctctactcatatcaatagaaaaatctatattggtagctaaaacattattggataatattttgttgttgttcggcttgtgttttttctttttctttttttttgttatctcaccactcacacattaactttcattggtt

SEQ ID NO: 745476 - DNA, 670 bp, Homo sapiens
tttaatttccttttccagtttcccaaagatagaggagataagggaaattaccatcacgttctctacactattatgcatgtgaagctataaattttcctaaatcacaatgtccccgataacttagctttgctgaagaggagataccaatttaactttttgctttccatagccagaactaataaaagctgaagtttatatataacaactgtaaattttacaagctaatcattactctggaaacttttttagagaacttcatttcaccagattatttctgctttctatgaaaakactgtagtcttttagttagaacacaaactttggagaaagagaaatccacacacttaaacagaaaactcaagttttgtagaaagactttaaatggttccaagacacactgacataaatatgcaaatatctcaaggcacacacttatgtccagggctgcccatgatgagtgaccgtcaggaggagaacccggtgcttctggggccttaggctgagtttcctggggagctgttcatagtagtcctttcctccatgcagggaattgtgctggcattctacatggcactggacatttattctctgaagtatttccaccaggctcttccatgtcattccaagagatgctaaaaggtaagagacctgttccagtccttcctctgat

SEQ ID NO: 745477 - DNA, 670 bp, Homo sapiens
tttaatttccttttccagtttcccaaagatagaggagataagggaaattaccatcacgttctctacactattatgcatgtgaagctataaattttcctaaatcacaatgtccccgataacttagctttgctgaagaggagataccaatttaactttttgctttccatagccagaactaataaaagctgaagtttatatataacaactgtaaattttacaagctaatcattactctggaaacttttttagagaacttcatttcaccagattatttctgctttctatgaaaagactgtagtcttttagttagaacacaaactttggagaaagagaaatccacacacttaaacagaaaactcaagttttgtagaaagactttaaatggttccaagacacactgacataaatatgcaaatatctcaaggcacacacttatgtccagggctgcccatgatgagtgaccgtcaggaggagaacccggtgcttctggggccttrggctgagtttcctggggagctgttcatagtagtcctttcctccatgcagggaattgtgctggcattctacatggcactggacatttattctctgaagtatttccaccaggctcttccatgtcattccaagagatgctaaaaggtaagagacctgttccagtccttcctctgat

SEQ ID NO: 745478 - DNA, 549 bp, Homo sapiens
tctgtatgattcaccattgtaaacccagtattcagcatatggagcatacttcataaatgtctgtaagtgatgaatatgtatgtggcagattgcatttcccaaagatggctgcaacaatgtgtcccatcccatgtgttctacatccatgttccccacctgccgtctcaccccttgaatctggttgggattgtgacagttgggaaggtagcactatgtgacttctgtgctgagacttaaaaggtaacacaactttggaygggtctcttgagatgctcacccttggaacccagccaccattttggaaggaagccaagtgccacctggagaagacacatgtatgtgttctggccccggccccagctcaggtcccagctggcaaccagcatggtagtgattgggacttcagatgacaccagccctaagcatttgagctgtcccagctgatgccaagtagatcagacacaagctgtccctgctgaggcctgcccaaattgcagagctcacgagcaagataaatattgttgtattaagccactacattttggaagt

SEQ ID NO: 745479 - DNA, 586 bp, Homo sapiens
ataacagccggtgagaaaaaagacatttttgtagggacaggagtggtagctgaggctgtaaaagtgggaggttgggttaggagtttaggaaggcctaaaagttgtaagaagccagggtctttctggttggcagtgggactccgtcaactcattcagggtctatggggggcatacagagacacagagacaatatcttgcattgtacagcagttaaatcagcatctgattcatttttttaaagcctgttgaggtttyttggccatctctccaagggtaggcagtgatccgtgcataaatcaagcagtgtgagaagtcggatcattaagagaaggagctctgtttatccacaaacaccttgacaacttgcagtgatggaaaaggagacacaggtaaactgtcaggtggaacaggcaacagtcacatcacaatgcttctcttaactctctcaactttgtctgttcttttccttgtgtttctgcagctctggaactgctgagttttctgtgtgaatgacacagatgcagagatcatttcaaggtatcactttgggcagatgtttgggtgctaccaaatataacccaggcca

SEQ ID NO: 745480 - DNA, 532 bp, Homo sapiens
agctttgaagacagatattggcttctcctctctagctatgaaagtcctaggtggtgtcttcttccaatagaaggctgtttgtctacactgaaaacctgttatttagcgtagtcaccttcatcagtgatcttagctagattttttgctaacttgcttcagcttctacatcagcacttgctacttcaccttgcatttttatgttatggagacggcttctttctttaaacctcattaatcaacctctagcagtttctcacttttctgccacagcttcctcacctccctcagccttcayagaattggacagcattagggccttgctctggattaggctttggcttaagggaatgttgtggctggtttgatcatttatccagaccactcaaactctctccctatcagcaataaggctgtttcgctttcttataattaatgtgttcattgaagtagcacttttaatttccttcaagaactatttctttgcatccacaacttggctagctttcagtctgtctcagctttaggtatgcct

SEQ ID NO: 745481 - DNA, 643 bp, Homo sapiens
aatacatattcttctataacagttaacaaaaaatacctgatagttgctaaattactcctcaaaattcatcctactatgtccatctcaaggatttactcaaacttagtaaaaactgtaacttagaattgaaattgaaagcacaaacataatactgttaaaatgyttttatttatttattttttttgagatgaagtatcactttgtcacccaggctgaagtgcagtggcacaatctctgcaacccccgcctcctgggttcaagcaattctctgtcctcggcctcctgagtacctgggactagaggcatgagccaccacacccagctaatttttgtatttttagtagagatggggcttcaccatgttggccaggctggtcttgaactcctgacctcaagtgatccacctgcctcggcctcccaaagtgctgggattgcaggtgtgagccactgcatctgaccgaaaatatttttgacaaagttagccaaaacaagattgtaactcattccaactcaataagtgctaatattaataaaataaagttattgagctttcatttatacaaataagagacttttctcctaaaagtccttcagtgtaaatatagtggaaaacttgacttaatgctacctacacttttcattt

SEQ ID NO: 745482 - DNA, 547 bp, Homo sapiens
atggaaaggtattgaattgaggaactcaaactcaggcataggtgaaaggcaggaagctctgcagaaagtaggggaaataagtggaaattgatatatctcaaagtaagactctaaagcctccttccttaccgtggcttagaatgttggcatctataacacccaccaaagtatgaaactggaaggagaatttctcctgaggaaaatggccatgcctagaaaaaagacttacagatgctgacacatttctggggaggttttccctagggaatagctggggccctacygaatcattcttcaataagactataattcaatacattgtacttctccacaaaggttttgtttttaggtttcagtgcctcacttttagatataaatgaataggtaagaatcatcagacacttgaggaaagtttccagcataaagaaatagagataaaacaaacaggaaagaatgtggaggaaactgagacaataaaggaatcagaaaagttaggacctacgatttatggtctcagagagataaaagaagctattgcattcatgaa

SEQ ID NO: 745483 - DNA, 566 bp, Homo sapiens
atttgttagataagaataaacattagagctaagatcttgaatgacaagaaaaggtcagctaggtaaagagctgggttaaaagcctcctaagcagaggacacggtaagtgcaatggccctgaggagggaatagccttgacttatggggagagcagcaagaaggtccagtgtagagatgaggagtgtaatggaagagaagtgtattygttatctattgttatgtaacaatattaccacaaatgtagcagcctggcacggtttagctgggtcctctgcaaagctgcaatcagggtattggccaaagtagggttctcatgggaggctcatctgtgaatctgcttccaagctcaagtagttgttggcagaattcaattttttgcaggctcttggctgtagggcctcaacctcttgctggctgttggctagaagctgccttcagttccttgctgtgggggccttcccattatggctgcttgcttcctcaacatcagcaagggagagagagtttcccagcaagagaggttacagtcttgtgtaaggttataacagaggtgatgacccgtcatc

SEQ ID NO: 745484 - DNA, 523 bp, Homo sapiens
aaatgtgattaaagtctaatgaactatagtaatatcagaataatttttttatcaatatttcagttacagtcatgcatcgcttaacatggatatattttgagaaaatgtgtcgttaggcaatttcatccttgcttgaacatcattgaatgtacttaggcaaatctagatggcatagcctattgctccaaggccacaaacctatacagtttgctaatgtagtgaatacttaggcaatcatgacacaakggaattatttgtatctaaacatacaaaaggtacagtaaaaatacggtattataatcttaggagtgcaccatcgtatatgcaatctgtcattgactgaaatgttgttaagcagcacatgactgtacaaataaaactgaactccatattttggagtttatttagattactcaaggtttctaaaccaaattaacataaaactgcccggtcttaccaagtgttgggtcatatcaacagcaattgaggctacctcttgactgtattcacatatcatcttctg

SEQ ID NO: 745485 - DNA, 523 bp, Homo sapiens
aaatgtgattaaagtctaatgaactatagtaatatcagaataatttttttatcaatatttcagttacagtcatgcatcgcttaacatggatatattttgagaaaatgtgtcgttaggcaatttcatccttgcttgaacatcattgaatgtacttaggcaaatctagatggcatagcctattgctccaaggccacaaacctatacagtttgctaatgtagtgaatacttaggcaatcatgacacaagggaattatttgtatctaaacatacaaaaggtacagtaaaaatacggtattataatcttaggagtgcaccatcgtatatgcaatctgtcattgactgaaatgttgttawgcagcacatgactgtacaaataaaactgaactccatattttggagtttatttagattactcaaggtttctaaaccaaattaacataaaactgcccggtcttaccaagtgttgggtcatatcaacagcaattgaggctacctcttgactgtattcacatatcatcttctg

SEQ ID NO: 745486 - DNA, 639 bp, Homo sapiens
tattttctttaaaacacatttattcattgaaattgacaaaacatacgaatgttcatactgaaatgatctagaatcatgttttcttaccatcctctagagtattctgtgtcacatggtcagacatctggctggctcccattggcatatatgctacaatgtagaaagtataattgctggcaggctctaagtcatcaataatataatgagttgtgtcatttccgatgactacttgatactcttcattatttaaacctaaattaaagaatccatgttttaaaatgacagayattcaaaataaaattaacaagaccattttcctgcactgtgaaacactggtccttgggtctaatctcaatctcttatcttctgtgcccctttacaaaatgtgaacaggaaggtctttattttctaaaagtaaccatatttcactacaaattattagaggacatttttcctgaataaatcaaactgaaaagaattcatcttctctaaacttcatttaccatctagtcaaaacccacagcagagacaatgtacagtagtaacataacagagcttaacacaacagaatattgtaattcataacagtgtaaactttacttgcttcaactcatggggttttttttcttttaaacataa

SEQ ID NO: 745487 - DNA, 598 bp, Homo sapiens
atggtttgtttagattgggatccaaatatgttccatagattacaactggtttgacatgtcttttaattgatatacttccctccatcctgttttttccttgcaaagtattaactgaaccaggctgattattgttccaattattaagctaccatcttttagctccaacccctcttagtgacactggaactgggactttgcaaactacatttttcttttgctagggtcttccaacgggagctctagagggatacttgaaggccaggggaagtgataggaaatttctgcccctcctgtctgcttactcttcttatctctatcatcccaacaggccttctctctggcactggtagtccatcccactccccaaaccagcttcaacatgttttctcagaggttrttaataccagctgggcagcacctcaatctccaagtctgagtccaagctctatggcatctctcttccaatcctctaggttctcataaccccaacttcttttctttgttcactaagtcccagatgtggaagttccttcctgcagtcactgtccatgctacctcactttttgcttttttggtttttcaacacctgtttaattcc

SEQ ID NO: 745488 - DNA, 542 bp, Homo sapiens
tgaactcctgacgctgtgatctgccctcctcggcctcccagagcgctgggattacaggcatgagccaccgcgcccagtcagaacccgtatcttttttttttgagacaaagtctcactctgtcacccaggctggagtacagtggcactatctcagctcactgcaacctccgcctcccgggttcaagcaattctcctgcctcagcctcccgagtagctgggattacaggcgcctgccaccattcccggctaatttttgtatttttagtagagacagggtttcatcgtgttggccaggctggtcttgaactcctgacctcaggygatccgcccgcctcagcctcccagagtgctgggattacaggcgtgagccattgtgcctggcccagaacccatactcttcatcactatgctggtcatttaagtatttgctgaatgtattaaaggaactcttgctcacctcccaacacccttgttcatctcagtcctccccattccgtagcccaaactctctccaactattacttgcaatttacaatagcttg

SEQ ID NO: 745489 - DNA, 542 bp, Homo sapiens
tgaactcctgacgctgtgatctgccctcctcggcctcccagagcgctgggattacaggcatgagccaccgcgcccagtcagaacccgtatcttttttttttgagacaaagtctcactctgtcacccaggctggagtacagtggcactatctcagctcactgcaacctccgcctcccgggttcaagcaattctcctgcctcagcctcccgagtagctgggattacaggcgcctgccaccattcccggctaatttttgtatttttagtagagacagggtttcatcgtgttggccaggctggtcttgaactcctgacctcaggtgatmcgcccgcctcagcctcccagagtgctgggattacaggcgtgagccattgtgcctggcccagaacccatactcttcatcactatgctggtcatttaagtatttgctgaatgtattaaaggaactcttgctcacctcccaacacccttgttcatctcagtcctccccattccgtagcccaaactctctccaactattacttgcaatttacaatagcttg

SEQ ID NO: 745490 - DNA, 619 bp, Homo sapiens
acctgccataatggcaagtctcttctgggcagcttaggcatcttgccgatgtagtccaactcttgaggtagatattagtagcctcattttgtagataaggaaactaaggcaaagtttgcacaactggaagacagcagacctggccaggggcactgacttcctggtttggaagtcccttctatcacgccctcttgtccctcttttcycccccaccttcctatgctgtaaagaaggaagtaccgccaggaatatggtcacatgatttataggctgagattggcatctggggagttgggttgtctaacaggagaccttagttcttgttgcgactctacacatccctctgggcctcaggtctgtcatctgtcaaatgggagggttgctctactcatctccaaggtccttccaggagtgacaacatgacatccaaggcctatggaaggtgcaaggacaaagcagcttgcttgacccattcctccttgggactatgaggcctgatttgtggctctgcaccccctatccttgccaaggatgatgccatctccagatgggtgagcctataccataggcaggtgcccttcacaccctggagtgccacgtactatgcctgagcccggga

SEQ ID NO: 745491 - DNA, 619 bp, Homo sapiens
acctgccataatggcaagtctcttctgggcagcttaggcatcttgccgatgtagtccaactcttgaggtagatattagtagcctcattttgtagataaggaaactaaggcaaagtttgcacaactggaagacagcagacctggccaggggcactgacttcctggtttggaagtcccttctatcacgccctcttgtccctcttttcccccccaccttcctatgctgtaaagaaggaagtaccgccaggaatatggtcacatgatttataggctgagattggcatctggggagttgggttgtctaacaggagaccttagttcttgttgcgactctacacatccctctgggcctcaggtctgtcatctgtcaaatgggagggttgctctactcatctccaaggtccttccaggagtgacaacatgacatccaaggcctatggaaggtgcaaggacaaagcagcttgcttgamccattcctccttgggactatgaggcctgatttgtggctctgcaccccctatccttgccaaggatgatgccatctccagatgggtgagcctataccataggcaggtgcccttcacaccctggagtgccacgtactatgcctgagcccggga

SEQ ID NO: 745492 - DNA, 618 bp, Homo sapiens
ctgtggactgataccggtccggtccgtggcctgttaggaaccaggccgcacagcaggaggtgggcagctgtgaacgagcattacagcctgagcctgtcagatcagctgcagcattaaattctcataggagtgtgaaccctattgtgaactgcatgtgcragggatctaggatgcgcgctccttacgagaatctaactaatgcctgatgatctgaggtgaaatagtttcatcctgaaaccatcccctcaactgtccatggaaaaattgtcttccacaaatctggtctgtggtgccaaaagggttggagaccactgatctagactcttgattctgttccgttgatctatatgtctgtccacattatcttggttattgtatctttgttgtaacttttgaaattgggaagtgtgaatcctccaacttttttcttctttttcaagatgactttggccattctgtgtccattgcaatttcgtacagattttaggataggctcattcacttctgataagaaaggcagttggaattttgataaggattcaactgaatctgtagatcactgtggggaatattgccattttaacagtattgtcttctaatccatgagcacaggatgtc

SEQ ID NO: 745493 - DNA, 638 bp, Homo sapiens
ccctcccaactaaatgataagggaaggagcctccatccatatagaaggaagagaagtgccctgctgagttctgggcatttgagtttgtgggatgaccagggtgtggcctgatacctgagctagcagctggttgatctctccagaagtgagctgcctgttgtcagattagaggcatgagatcagggccagccctcacttttgcagggtcttactcaacccctgacaggaatggccttgtatgccagcacctgtagtcctgccctgtgcaaggggcctgcagtttagggaggcttgggagcaacaactcccacacagggctgggctccccacattggttttttttttttkttgttcattggctgtaagttccttttctgagatgaagccttcttcccttttttcaaagagagcttggtaagggaaagctaaagggattggtagccctgttcaacttgcaaccacatggaaccacatgtacatgttcctggaggcctctcccctctgtccctgtgtgtccctggtttctcttctgtctcccatctgggagtctcatggctggctgatctgatcctgggttcaacttttatagatgttgtttctccattggctaaaagaaaggtatgtcgcctggggtgctc

SEQ ID NO: 745494 - DNA, 569 bp, Homo sapiens
tatgaaccatgaagcaggcactaataagacattgaatctgccagcatcttgatcttgaacttcccagcctccagaactgtgagaaataaatttctgttgtttataagctacacagaccatagtctttgttacaacagcctraatagagtaagacattgctacagaaatcatatggcctacaaagcctaaattacttacaatctagctatttacagaaaaattttgccaatccttgctatagaacatttagggacttattaattcactattttgaataatgctgaaatgaaaaatctttgtactcatttctgtatacacatgtataagaatatctctaggacagaaaccaagaaatggaggtatttaaatttttaatacatattgccaaatcttccttcaaagatggtggttgtagggaacagcttctggtaatgaaagaggaatttgtgtcagattaaccctcctgctgataacatttacaaaaatctggacaaaaatgtaaaaagaacaactgtttgaggcactgtagatcaactaaaagtagggagaaattgatgggatatgactac

SEQ ID NO: 745495 - DNA, 620 bp, Homo sapiens
cacatggggaacgaaaaagtcccaccattcaggggttaattgttcatgcctaacagggactttagccagggaaaaatattaccagttactacccatattagagacagaatgatgatatgtcaccgtgaacagcaaactaaggatcagaagtcagatcataaatataaattagattttgatacactaagctgctctgcatatactgcgtgttgtcaggattatattactcagctgaggaagcctgtctagtgtttgtttacttggcctgtgatttgcaggtcattcataggaatggaatgtttcatggccaggtgctatgtgaagctagggattaattaacctgtgatctatgagttttaattattgttctcaagttttacctaatatttgccagtgactcttaaaaagccatgtggcctagcaaaagcatttgggactgaaaatatattggcagagacactcttctgtgttattccattsccctgattaggtttgcagcgagaagaagcttactgagctgagatttgccaagtttccagaccaaaaatttaaactgtggagtttaaatacacatatgcacacacatttgcatactacatatgtgtgcataagctcatacc

SEQ ID NO: 745496 - DNA, 576 bp, Homo sapiens
cttttacatggagtctcaaatgagtagactgataagcaaaggccccacaatctgaccataacctaccacagtccagatttattttatgcttcttcctttcatgctgcttctattcaagtctgcttttattttcatatcagctagctgtttcctaactccaagcagtcctgctcctctattgttaatataaccttctccattctacatttcagcctattcaaaattaacacttccatctcaattctatccagttcattttgagtttccagtcatggtaacaatatattagttttgccttatctacacagtatatgttccaagacccccggtgaatgcctgaaactacagacactaccaaaccccatatttactatgttttttcctatgcatacatagttatgatgcagtttaatstataaattaggaatagtaagaggttaacagtagcaaaatcaatcaatatactgtaataaaagttatgcgaatgtggtctgttagtatgcttctctctctctctccttctctctcaaagtattaggttgatgaaaaagtaattgcaatttttgccatgctttt

SEQ ID NO: 745497 - DNA, 573 bp, Homo sapiens
tgttactacagcaaatacctgaaaatgtagaagaggctttgaaatgtggtaattggaagaagctggtagaatttggaggaataggctagaaaatgtctgtattttcatgaatggagcattaagaataattccggtgaggccatagggaaagtctaaaacttttcagaaattatgtaagcgattgtgattagtaggttggtagaaatatagacagtaaaagcaattctgatgtggtttcagaggaaaatgaaaaatattagaaactgaaggaaggggcatccttgctataaactggcaaagaacttggctgaaatgtctccatgtccaagagatttatggcagaatgtragagcaatgaactaggatatctggcaaaaaaaacagctcagtaaagcaatggtgaggactgtgtagcttctcttaactatatatagtaaaatgtgaaaagaactaattcaaagatggaatttataatcaaaagggaaggagaatctagagatttggaaaattctcaggctggctatgtaaagaataaaaaagcaggttaggagagaaaaccaagggtatggcaaa

SEQ ID NO: 745498 - DNA, 580 bp, Homo sapiens
aacagacttccccagggacacatgtcccaatgtgagaattaaaaatggaagctagatatgaaattcacaaaagaaatcagcaaaacaaaaagctgtctgtttaaacagataaatcactaagtttccagtcaggaaaataagaaaaaaatactaataccagaaatgaaagaggagacatcaataaagatcccatgaacattaaaaagataaaggaatattatgaacaattatatgctcmcaaattggattactaagatgaaatggactaattccttgaatgatgcaatctgttaaaaccacacaagaagaaatagacaatctgatcaggctcatattaaagaaattgaatcaataattaataacctttcaaaacagaaagcaccaggcccagatggattcactggcgaattctaccaagcattaaaataagaaatgtcaaatctatacaatctttctcagaatgtaggagcagaaggaatactttctaactggttctatgaggccagcatcaccctaataccaaaatcagacaaagccattacaagcaaaaaaaaaaaaaaaaaaaaaaaaacctttggac

SEQ ID NO: 745499 - DNA, 572 bp, Homo sapiens
caacgaaattgagtacatggacacaaaagaagtgggtttaggagctgaggtttagtgggcaaaagaaggagaagagagaaaaactcctgtgtgagagagagaggagagaaagacaagagagagagaggtgcctgagtgagatttccggcctacagagaactgcactggattttayagactggcttgaggaggtggtgcctgatttacatatggcccacagattgattggactgggtgtgatgtttacatagtgcttgaggaagctggccaccccatcctaatctttttattatgcaaatgggttttccacttggccagttccatgttgtctgctccttactgtatatgtggttggtgaggaaaagggaagatggagcttccatgttgaacatgcctagccccaggtagccttttcctattggcacagctgctggcattcactcatgcaagcttccagcttgcttgtctatgtctgcagctcgatttttacaggctgctctttgttaggaaggaaaatgatttcagggctgcttttattaaaagggcaaccttaacaagggcttccttaccct

SEQ ID NO: 745500 - DNA, 572 bp, Homo sapiens
caacgaaattgagtacatggacacaaaagaagtgggtttaggagctgaggtttagtgggcaaaagaaggagaagagagaaaaactcctgtgtgagagagagaggagagaaagacaagagagagagaggtgcctgagtgagatttccggcctacagagaactgcactggattttacagactggcttgaggaggtggtgcctgatttacatatggcccacagattgattggactgggtgtgatgtttacatagtgcttgaggaagctggccaccccatcctaatctttttattatgcaaatgggttttccacttggccagttccatgttgtctgctccttactgtatatgtggttgktgaggaaaagggaagatggagcttccatgttgaacatgcctagccccaggtagccttttcctattggcacagctgctggcattcactcatgcaagcttccagcttgcttgtctatgtctgcagctcgatttttacaggctgctctttgttaggaaggaaaatgatttcagggctgcttttattaaaagggcaaccttaacaagggcttccttaccct

SEQ ID NO: 745501 - DNA, 622 bp, Homo sapiens
tgatttatgtggacctccttcaaggagcatccattaataagtagatcaagcttttaaaaatcaaggatttagtaggtttatttttcactttcatgttgcacaaatacccttgtttgaccataaaagaggagacattgtcttactttaggtttattttcaacaaaattttcaagatggatgttgccattggccagcatatcactctccaaaggagagaacccgaatatgatttgaaaaccaaaaatcaatyaatctcagattttaatattttcagagtcccagtacactagatcatgtcctaaccattttacctacttgtattctatgaataagttcgctgaatactcagtttgaataaatccattcaaacaactgggaactatgactatcaccttgcttcataaattattaatagcctcaatcccaaaagttcctaaaaattttgtatcgcttctcaaaattttccatatctaatgggaaaactgtctcatatttttaatctattcagtggtttcccagcccttgatacacgttggaatcacctggggaactttgaggccctagctactctcaggccccaacaccagtgattttgatataactaatttggagtggggcctaa

SEQ ID NO: 745502 - DNA, 604 bp, Homo sapiens
ttgaggccctagctactctcaggccccaacaccagtgattttgatataactaatttggagtggggcctaataattggtattatcttattttttttggcttggagaattctcaaagattttattgacgacatagctcccactccaccatgagagacaggtaatgtcctggcccaagaccgactcagacagggaaacttccatgatttttaaagtctcaataaggtgtcttcytcaatgtcatcccaatctcacatacttagtcacttgacaactcatattctattaagaagacaggccagagggagaagtgtctactgtgtatcatgtcctaatggtgactctgacagctggtgtataactccattctaggttggctttgcccttgaagatctcaggtcacctaccttaaattttttctttcattccaatagcttttaaagcacaagttgttttggttacatggatgtatagtggtgaagtctgggcttttagtgtatccatcccctgagtagtgtacattgtaatttggtattatctgaaaagaactccaggtgctcctaaagtggaacgaattgagaatcactgatgtgaaccaaggaaattc

SEQ ID NO: 745503 - DNA, 616 bp, Homo sapiens
cgtgatgaggatttcaattcttccttggataatgctgaataacagatacttatagagacttcmcctaaaatatggaaacagtttcttattttgctcttcctaacaaaaccccttttatttaggctcaaattaaattttgtcttgctaagacctaatacaatcccattaatgtcctttctaattattttctgtttatcagaattactgaatcatgacattgagtcttaatcgttttgatttctgctgcagattaatcccacctcaaacttatctgcatgtcctcacatttgtctacatctctgtctggggagttgtgtgcttaagtcattaactccaattagagtggagaatccgtggccacctgagcccaggactgtgggccatggaggcatcttcagaagctgttgatttcattttctttggggacctgcacaaggagggtactgttcctgatgtcagatcataattgttaccctgaggtcctggcaccagaaggcccgagttaaaatccatgctttccctttgactctactggtaacttcgagcaagtgcttcacctttttaaagcttcagttgcctcatctgttaaccaagatgcccacagtcgccacctcct

SEQ ID NO: 745504 - DNA, 613 bp, Homo sapiens
agaagaatgaaactggatccctatctctcaccatatacaaaaattaactcaaggagaattaaagacttaaatataagatctgaaaccataaaaattctagaagaaaacctaggaaaaattattctaaacattggcctaggcaaagaatttatgactaagaccccaaaagmaaatgccacaaaaacaaaaatacataaatgggacctaaataaactaaaaagcttctttacagcaaaagaaagagtcatcagagtaaagagataacctacagagtgagaaaaaaatatttgcaaattattcatccaacaaaggactaatatccagaatatacaaggaactcaaacaaatcagcaagaaaaagataaacaaccccattaaaaagtggacaaataacataaatagacatttcttaaaagaagatatacaaatggccaacaaacatgaaaaaatgcttgacatcactaatcatcagggaaatgcaaattaaagccacagtgagataccaactttccctagccagaatagccattattaaaaagtcaataaacaatagatattctcacgaaagcggtaaaaagggaaggcttagacactgtgggcggtaatgttagta

SEQ ID NO: 745505 - DNA, 644 bp, Homo sapiens
ctgggtatattcccagtggaaatgcagggctgcatttaccaaaacctatagaaaaagtgcgtctcagcagcactgtgtgaaagagccccagactgaaaacaaccccaaggtccatcacacaccagtactagagagtactgcaaatgctcaatttccctgtgcaataacctgctggactctcacagcgatgttgagcaaaagaaggcmgacacaaaaccatgtttgctttactaggtgtggattttatttatgcacatttacaaacaggcagagctgatctatggtttagaagtaaaacaaaagagggtgctatgggctgagtagtgtaccctccaaattcatgcgtcaaagtcctcgctcccaaggtggatggtgtttggagatggggctgttgggaggtaaataggtttagataaggccatgaaggtgaggtccttgtgatgggattagcatccttataagaaaagatcagagagtgcccattctctctctctttttttcctgccatgtgtggatgcagagaggagatggccatcttcaagacaggaagaaggccttcaccagaattcactcccctggcaccttgatagtgaccttccagcctccagaactgtgagaaataaacttctgtggtttaacttgct

SEQ ID NO: 745506 - DNA, 640 bp, Homo sapiens
cacgttcaaatataggtcagaaaattattgaggctttatttactctctcttttcagggctgctggctgacatacacccccttctgctgaaaggtgttaaagaaatatgaccagagcatagtaggccctcattgcattctcattgacttgatgtcagagaaaaaaaaaattagcattttcaaaatttgctgttgaaaatttgagacccaaaaaagtgtatatagatcaagttgttgttttacagagcaatggtgaggggagggcagaatgctgtaagcatcaaaccacatgcggtcaattcatctataatgatggttamcaatttttacggacttccttctgcctccacaggcactgcttcatgtgatatgcacaaaactctgtgagttgttcactttcccttcccctcgttcattcatccatccaacaaatatttactgagcatctgctatgtgcccatgcgtgggaacagcacattgatggagacaaactgacccacggccacacggagcattatcttggctcaaagagctgcaggctgtgatcttaggcctcttccagctccctgttggtggttatatgatctgcaagctaagaatggtttttacattttttgatggttgaagaaagatcaaagaaga

SEQ ID NO: 745507 - DNA, 640 bp, Homo sapiens
cacgttcaaatataggtcagaaaattattgaggctttatttactctctcttttcagggctgctggctgacatacacccccttctgctgaaaggtgttaaagaaatatgaccagagcatagtaggccctcattgcattctcattgacttgatgtcagagaaaaaaaaaattagcattttcaaaatttgctgttgaaaatttgagacccaaaaaagtgtatatagatcaagttgttgttttacagagcaatggtgaggggagggcagaatgctgtaagcatcaaaccacatgcggtcaattcatctataatgatggttaacaatttttacggacttccttctgcctccacaggcactgcttcatgtgatatgcacaaaactctgtgagttgttcactttcccttcccctcgttcattcatccatccaacaaatatttactgagcatctgctatgtgcccatgcgtgggaacagcacaytgatggagacaaactgacccacggccacacggagcattatcttggctcaaagagctgcaggctgtgatcttaggcctcttccagctccctgttggtggttatatgatctgcaagctaagaatggtttttacattttttgatggttgaagaaagatcaaagaaga

SEQ ID NO: 745508 - DNA, 593 bp, Homo sapiens
ggaggccgctgagctttgattaagtggaatcaaggctacaggttcactgtgctcctgcaggagaagaagcccagaagcagggggcccagttgggtgggccacgtagtccttcagataacagcatggtggcttggcccctggcgacggtggtggaggtgctggaagtgcccctggttggaagacagagctggcgagacttcctaacagagaagccaagcttggaagaaaagacgcttgaaagttttgatctgagcacccggaagaaaggcaatgctggaagtgctggctggggcaaggctagaagtgccctttagggagaagcctgttatcctctccaacgcagttgccaaagaggtggccagaaatgccccttrggagaccagggaggaggtccctgtaatgaaataggaatccctgacgcagatgaggtcatctagcaggggtacctgggggaggaaagaggcccaaggaccacacctctgcaagctcctgggagatgggagaaaagcaatggcagaatgttccagaaacccagtgagaaaacacttcagggagaaggtgggagctgacccccatccagtgctgcaaggaca

SEQ ID NO: 745509 - DNA, 598 bp, Homo sapiens
tgggccccaggcagagcctcttcatccagtcctcggtggacaactctgtggcttgtctgctctttgttgctaggatgttgctgctctgtgtttctgtgtagggaggtagttgacccctgctcttcctgcaagcccaagtagtgcaggctcacttttaacaggggtgaagctattgacaaaagcacaaaaagtgcattctccaaatacacattcacctgcccccaggagagagaacctctattgctttggcaacagtgargggaggcagtgaggagatgacaattttccatgtctattcctggcatctggtgctgcccttttcagtgaatggcatgattagcactgcatccatattttttttttgtcccaaggggagctttggtgagctgcacacccctctcacttaggggtgacccccattgagggtaagatctccaggtgtcctgtacctcccagtgacctgctggtcccctgtattttgccacagtcagagaaggctgtggggtaggtttgtgagggatctggtggtgcagtgactcaggagaagagattgcctgggcagggcagtggcctaccagtatggtgcctgacttctcct

SEQ ID NO: 745510 - DNA, 575 bp, Homo sapiens
tcctgtctttcctctgtccctcccctctggctcagtcctgtttgtccttaaaagctcagctctgccctcagcttttccaggtgccttccctgaacctttgagctagactcagtgatgtcctctgcccctccgaacctcatgcacactcctgtcgctgggcttgttacattacaacggaatgcctctttgtgtatcttttcccccacctcagctgtaaggatcttcagagaaggaattgggttttgtcagttttgtctccccagcacataacacagttcytaacatgtaataatactaacagctaatttctggtatcatttacaaaataccacataccatattaactactgtgcatggattaactcacaaatcctcacagcagccattgattattattcccatctcacagaggagcagcaggattcagagccttaaggaatttgcccagagttacacagttggtaggggcagagccaggtgacaggcagtctgacccctgtgctgtggactccagtgttatgttgcactcagtatatgtccaagccacatttctctctttttctttctgtcagagc

SEQ ID NO: 745511 - DNA, 527 bp, Homo sapiens
ttagtagaaatgacctgttggatctatttttcttttctcagttttctcacttatgcacttattttctttttaaagttaaggcataatttacatgcagtaaaattcaccttttaaaaaatgttctgttctacaacttttgacagtgtagatagtcatgtaattactacaatcaagatttagaacagttccataaccttaaatcctctcatgaccctttgtagccaacccctgcccctgcatccagcccttggcagccattgatctgttgtctatcccttacagtttttccatttccaggatgtgatataaagagagtcrtgcaatgtatagccatttgagcttggcttgtttacctagcagaatgcatttgaaattcatccatgctgttttgtgtgtcagtagatcattcctttttaaaaaaaaaaaaagacaaaaataattttattaagatataacttaacatgtagtaaaattcattattcttaaagtacagttctgtgaattggacaaacgcatacagtcatgtg

SEQ ID NO: 745512 - DNA, 622 bp, Homo sapiens
ctcaaattccaactgctgggatgggcaatttttcctagccccggctagggctggtccaaatgccccctctatgcatgggcactggttccactctcacaggtcagcactgagttcagtgtaaagtcactgtcactccccaaagcacacagatgctctctgtgcgctgcaaggccactgccaggggactctggaggggtgttagactcaagattgtctctcctgccctcctaatgcctcttttggcaatgcgaagttaaaaccaggtactgtgactgctcacccaatttttatttcttgtgacagtgcttttctgtgtgcagttagttgttaaatttggtgctccagtggatgggagatgaacagtttaggcttctattctgccatcttgctctgtgcctctctccatttatttagatctttgagacagggtctcackctgtcactcaggctggagtgcagtggtgccatcacagctcactgcagcctcaacctccccagcctcaagcgttcctcctacctcagcctcccaagtagctgagactacaggcacgtgtcaccacacccagctaatgttttcgtattttgtagagatagggtttcagcatgttcctcaggctggtct

SEQ ID NO: 745513 - DNA, 505 bp, Homo sapiens
ggctggagtgcagtggcatgatcttggctcactacaacctctgcctcctggcctcaggcgatcctcccacctcagcctcccgagtagctgggattacaggcacatgccaccatgcctggctaatttttgtacttttttggtagagacagggttttaccatgttgcccaggctggcctcaaactcctgggctcaagcaatcagacagcctcagcctctcaaagtgctgacattacaaacatgagccactgtgcccastcagcagtaaagtttaaattaggtcatatgggggaggcagccccggtccaagaggacaccagagagtcacctcccattcccatgcacacgaagagctcatataagcacacagcaagaagggagctgtctgcaacccaaggggagaaccctcaaccaaataccaaccctgctggcaccttgatcttgcacttaagagtctccagaactggaagataaatttctgttgtgtaaagtcacgtagtctatgca

SEQ ID NO: 745514 - DNA, 605 bp, Homo sapiens
acccagtctccaaaaaaaatacaaaaaatagctgggtgaggtagcacacacctatagtcccagctactcgggaggctgaggtgggaggatcacctgaacctgggaagtcaaggctgcagtgagccatgattgcaccactgcactccgacgtggctgacaggagtgagactctgtctcaaaaaaaaaaaaagaagaaaaggtaaaaaaaagaaaatattttttcttttattkattggtcacctactatgtgctatggagtttctcaatattacctctatccctaatgtccctggtaagataggcataaataactcctatttcagatgagacaactgagagagccataaatgatgttttaaaaagccaggatccaaactcagatttttctgttttcaaagcctgtactcttccttaccacagtggttcaaatatatgtcgactgtatatataacatgtatttattttttaaagataacacaaatttcagtatgagggaaaactcaaaacttaatcatgcaaccctataaactggacttttgcgtttaaaagcacctatctttggggagaggaggcagggcaagctggcttaatagaactctccagcc

SEQ ID NO: 745515 - DNA, 625 bp, Homo sapiens
ggggattcacttcaggccctattcatctgcttcactcccacacctggagatgtcattcaagaaggctggagaacagcaaagatgggtgcctgctccttattctggtatcactgaccttgaggtgcaccaacctgatgccagtaggatcgctcctatatagggtgcctgacaacccctgttggagggtctcaccgagttgggtggcatagggaacaggattcgtcatagggaacagcactttgccccttggtggaggggatgtgtttcactggtgggaaacccacttctctgggctgcccasattcctcagaactaccaggaggaaaggctaagtctgctggtccgcatagactgcagccaccacttcccctaggggctcaggccaagggagatccaggttctgtccctgagcctctggctggagttattgaagttccttcagggacgccacacccagtgaggagggatgagtcagggtcaggcctgaagacactctggccacagtctgccactgctggtgtgttgtgctgtgggggacacgtctggagaccaagtcgtacagcctccctggctccagcaggggaaaagcatggcctggagctataaagatgaatgctgcccttcc

SEQ ID NO: 745516 - DNA, 597 bp, Homo sapiens
taaggaaaacatccttctcctaaatttataattacccaattgatatttctagctagatgaagattccttctgttgaaacacttaaatgtaaagaaaataccactcaggaacaagatgaaggaatttggtatcatttttcctgcatagattccttggaatttcacataagggttctgtcctatttaggttagccctcttagaggagtcaggagcctggccttcagtggatgccatgcctaggtctttcattgttagcctagtccccccacaggcttgttgtcaatggcactgtctttgttcctgccttttatctcagaaacactgacctgatattgcttgagctgagataaaataataatatctgtagatattcacagtgctccargtgggaggcttgacatcacagtaactcagaaaaaagataaaaaggtatagctagcaaacagcagagtgcacgagctccaactttaattggagctgctatgttgaacaacaaagaaaacaggttgactcatttggtttctattgtactggagtgatggggttattttagtatgtatcctagctattccttctagagcatcaaatagaaataga

SEQ ID NO: 745517 - DNA, 597 bp, Homo sapiens
gaaatgatctcatttgactccttgtttcacatccaggtcacactgatgcaacaggtgagctcccatggccttgggcagctctgcccctgtggctttgcagggtacagccccccttctgattactttctcagctgatattgagtatctatggctttccaggcccatgatacaaactatgtatggatctaccattctggggtctggaatatgatagccctcttcccacagctcactaggcagtaccccattgaggactctgtgtgggtcctagtagaggttctccattagggctccacctctgcagcagacttctgcctggacctccagccatttccatacatcctctgaaatctaggcraaggttcccaaacctcaattcttggtttctgtgcacccatcagctcaacaccacatggaagctgccaagattccaccctctaaagtaaaggcccaaattgtacgttggtttcttttagccccagctagagctgaagcagctgagatatagggcaccatgtcctgaggctgcacagagcaggggagccctgagccccgcccatgaaaccatttttccctcctaggcctctgcacctgtta

SEQ ID NO: 745518 - DNA, 612 bp, Homo sapiens
gacttgagcttgaaatagctttagatgtgcaatgaggatagcagttgcaattcaattcatttcttcatttgcactttgaattaatctctggttatggtatcataatcatggttacttctcacagcaaagtatggaagtgtctgtgtttgcctttagaatcttttattgtcattttggttaaatcaatatccaaggtcacatttaatcaagcgttgtagatttgcaggamctttttagatagtaccatcaggttttattatctcaatgacacctagtaaggaggatgaatatactggaaacattaattactggcttttttttccctttctctcatctttttattttgctttgctggaagttttcatgaggaataataggttagacttagacttttaaaagcctctcaagactaagaaaccaaggcagcaattggatcccagactgtacctggaacatgtaatgatgtaaagatgaacctctcttctcaaggttcttattatattttaaaattgttgggcctaccagttctttactcatctgtaaggctaagactcctataagccaggaactaggtcattcaagattgcgttgtaagtattggctccataaagt

SEQ ID NO: 745519 - DNA, 591 bp, Homo sapiens
tactggctttgactacacagatgctatttttccaaaattccttttccacagaccttctacaaccttctttcttcttaatattaattctgtttctgtcttactcttttattctttctcattctgaaacaactagtcatcttattttaggacaacattaatttcttktttatttaacaaagatcacatcttttatactttgagtacttttccttaccacaaacacatcttattgttcttgtattctttacatacaaagggttttttttttttacctttactatttctatagtttcatttatatagattgactaaagttttaacaagttttaacccttagtaatcctaatttctggtgagaactacgaagtcagcaattatacactatcacatactaacatttagtagtagtttagaaaacttttgtgcaggtgaaaacaaaaaaaagaaaatttatgaatacacaatttcacaatttctagaggcatgtattctcatacaattttcaaagtgatgaaggcgttgtttattaaaaaacccaaatatctttcaccttcaataaaaatcaagaggccaaaagtaaataaaccttaa

SEQ ID NO: 745520 - DNA, 617 bp, Homo sapiens
agtagctattttttcttctctccctttttccctgtgaatatacttctcctgggggaccacatgggagagaaggaagataggaaaagggctggactgagatataactataaacattggcataatatcatataaataaaactcccatttatataaagcttctacgccacctgagaacttagagagaatgagaaaggaacatgctattattggaaggaaatgtagagattgtttagctatgtctaccttttaggtagataaggactaatttggagctggagaagagatgatattcatttaaattccatagctaatgaatgtcaaggccaggatgtgaattcagatctcttgactcctgaacattgggtgkttaagagcaaaactaaatgtctataaatttgaagaaaagtatgagggagcagaataatttgggggctcaattctcagatcctgaatcatgttactgtagacataaataatagatattcaagaggctcaagattctcaggaaaaatataaaaactttaaaaattaatacataaaaatcaacctgttgacatgtaatgacaactaatgtttattgacttaggaaacaagtacattgagatatatttttatat

SEQ ID NO: 745521 - DNA, 628 bp, Homo sapiens
caatattagcccattagtccatattttccacttagggtattattgcagacctactgataatcataatggctaacaatattaagctcttacaaaatgctttacatgcattcattcatttatgtgactcaacaatcccatgtaataagtactattaccattgtcattttacagatgacaaaactaatgtttagaaaggttaagtaacatgcacagccacacagcatctgggtttatctgctgcttggtmaatctggactaaacaaccaacagggatcaggcttgatattctgttccacctgatggccaaggaagatactgtgcaaatgcctgcacatttgtccttagactacaagctttctttcagtcctgtcagcattgacactgccaatattttaagaaatgtatttaaagtcccttctgatatttcttatatcaccagctaaactgcacacaaaataagttaattggttctaaggtttacctaaatatttctcattgtagcagaattgtggaaggagaagtagataatatcaagagttgactgttccatgttttatagaaagtaagagtcagaaaaaatataacctaaataattccattgaactctcagtatatgtaggagtaatgg

SEQ ID NO: 745522 - DNA, 674 bp, Homo sapiens
aatttccacaagtctttttactcaaagtgtggtggcccaacccagcaatctgggcatcacctggcacttgttataaatgcagaccctcaggccccacctgctgaatctacattgtaccaagatccccagaaaattcttatgtacatgaaagtttgaaaaccatggatccagaagtgtgtgaaaacataactactgccagaatttttagcatattccyttattcatctcttttttatgaaactaaacgtagtggttttgctgatagagatggacgggggaaaagaaattttgttgtgaccaaagttgctgcattttttgcctaggggtggacctaaagtttcatgtcaatcattttgttttgtgagcaaaatcaaagtcatggggaaaaaggagagggtgcagaaagaagaaaattgtgaatacatagaattttatcactggaagacagaaaacaatctcaattatatatatagtatatgtactcaatacagtaatggttaaataaaccatgacacaactatgcaagagcatatataaagacattaaaaataacaaggtcatttttcatgtaccaagatgcagtgatctctaatgtaaacttagcttaaaatatgcaaggggaaaaatgcaagggcagcacagcatatataatgacttattattcatgtaaggaa

SEQ ID NO: 745523 - DNA, 612 bp, Homo sapiens
tttacttctttctcagtctgaatctcctatacttgtaatactgacggagcttcgctagtttctaaatcagaaagatgagcacgtgcagccacaggaagagaaatctgggacctgatgcctataatatttttcagacagagaatattcccccagtgtctctacccaggagatagtaaactactctgacatttcagctgttgcccctccaagcagattcacacacctctcggctaacatcccctttgggcaggcatctactcatgtttacagttattcattatgactggctatacacagacagtgcctctggtgtcaaactgaatggccccttagacccccattccaagacagccagargatacagacatatattaaataagacacaggcaggaaaactgcactgacttccttgagatggggaggctgaagccaaccaaagctgacctgctagagagtcctccagagctccagtgtgggatgactcacagcaaggagcacgggatcaaaatttttgaggtgcttcagggtcagaaagttttccagaacagcttctgcggatgtctgtgaacaaatatgccagcaaggaaaaagaccaactattttgcaggggaa

SEQ ID NO: 745524 - DNA, 611 bp, Homo sapiens
aaacagaaacaactagaagccttggaggcactgtttgtttggtaaattttgattcatggtctcattaatgcctcatcagcctcttgaccgttagtctgttcaggtagctctgtgtggggatcttcattctctggtagccaagataggattgtcctaatgatgactggttttagtgtctccataaccactggtccctgaatataaagcgctatgcatagctaaacaaattcttattgcyttcagcctgtgtgcaatttagcagcaagatatttcatatctcacagcattcactagtcctactcaattaggaactgcttgcaaatcagaacagctgatgatcataatgactcaagtggacatgtttgccctgaaaaggaaaagaaaatattgaaaagacatttcaattgtcattgaataactcagaaagggaccagggtgttgtcaggggaaatatattgtcattggccttcctgactgcggaacttccctataggttatgacaatacagctgggacacaccagaagggccaatgtgagaaataagaacttgaaactggggccgcctgtctttctgggggtggtctcctgtcccatttttagttatacccata

SEQ ID NO: 745525 - DNA, 509 bp, Homo sapiens
ctgcgatatcaacccctaccagctacgatggaggcatgccaaaaacaagcgatgcagaggggagacccttaaacccttttgaatttgcaaagcacttccccatagagaaaataagcctccagaattcatcagccccaagaggtggtactggtagaaaatataatagtctttcataatagcttaggtcagggtgtgaaagacagagctataagggctggtaaaagaacgaaagctttccaatccagagacaaaaggaaaagtgagatccatccatgacrtgtctcttgaggactcttttaggaccaagatggtgaatgctgaacggaccatgcatgcctcagtctgtcaaattgtatgtttctaaggacaaataggctacaaaactttcaccctatttttatatgggaagtctgttgaaaagaatacaatacataaaagatgaattacttattgagtctttaatatgtctctagcacagaaataaacatcttgtgtatattgtttctaat

SEQ ID NO: 745526 - DNA, 623 bp, Homo sapiens
ttaaatggtatctttttaaaatttcattttgtaattctttgttctggtacgtagaaatacaattgatgttttatactgactttgtatctagcatccttgctaaattcatttgttaaatttacataattatatgttctgcaaataaaagaattttattgtttcctttcaaatgctcatatcttttttttctgtctctctacattcaccaggacttccagtacaatgctgaacagcagtggtgagaacagtcacccttttctcagacctaatcttagggcaaggctctcaatgtttcacttaagtatgatatttgctgtagtttttaaaaaatatatagagagtctttattaaggatgtttacttatagtcctagtttgttaaaagttcttatcaggattagatgttgaattttatcatatggcttttctccttttctgttattacrtcatttgatttttgaacattaccttaccactcatatctataataaatacaactttgtcatgacatatattgtttttctatattgttcagtctgctattgctttgtttaggatttttgcattcttgagacctccaaaatctcttccccatctctttagctgctgctttctattggactt

SEQ ID NO: 745527 - DNA, 633 bp, Homo sapiens
aaattatgttttataaattgcacccaacattttctaggcattttgttgcagaaagcccttcaggttgtcttgtctgccctggtgccagaagagaagcctcatgaacatcagcagcatctgactttttacaaaggaatctgagctaggagagtaaaatagtaggatttgctagagctacatacacagtgtaaggatgctcagtctccaaattgttcagtttgtggaaatagcttctaataaacaaaaggatcttactttgtatctgtggtcctttttttgtttctcattgagaatagctttaagtgtttgagcaattttccatcttgcatcggggaaggtaggattctttagggtgagaacttttcagcagtcaggacaagaagcttaccttggttgatcctggttaattgaaagtgacagacaaagcctctcagacttccccccctcatctcargctggatgctggtgagcttattcagcactggttacagcaagtcctgttccattgaccaaccagctctcttgccacatgggccatctgtccattaatatggggtgtgaccatttatggaaatgactacaaaccctcatcctactcacagcctcaacatctattgtatcttggtggccaag

SEQ ID NO: 745528 - DNA, 577 bp, Homo sapiens
acaactgtccccaaagaaagaccatttgcttgtcattgccttgtcttccatgataacacactgaggatgggagcccaggcctgttgggctctggcacatgaaattggctcctttggggcttctgcatttacagtgaagaagttagtggagaatctagggatgggattttcacaccccaacaagtgacttgaaaaacacagaagcaaatgaaggcctgctcactgctgctgtgaaacaaatactctatacttgtccccaccgtgagccggatctcctgaggctttgaggaaggtcttcagcttagacttgggatttcagaatagccattccccttccggacaccctaagcccragcctgaaccctgcctggtgtgtgcttgccagtgtccttgctgtcttcacacaggcactggccccacaggctctgccttacccgggaagggcttgcccaccaccacccccatcccagagctaaaagacagcgtgcgcacagaccttgtccatgagtcaaactcccccaaatctgactttcaaaggagaagataaatgggacccaggcaaggaggttcccttgagc

SEQ ID NO: 745529 - DNA, 613 bp, Homo sapiens
ataaactttcttaaaacattatgagactttggcctggcatggtggctcacacctgtaatcccagcactttgggaggctgaggcgggcagatcacctgaggtcgggagcttgagaccagcctgaccaatatggagaaaccccgtctctactaaaaatacataattagctgggcatggcagcgcatgcctgtaatgccagctactcaggaggctgaggcaggagaatcgcttgaacccgggaggcggagattgcggtgagctgagatcgcgccattgcactccagcytaggcaacgagagtgaaactccatctcaaaaaaaaaaaaaaagaaaaaagaaagaaaaatgagactttttttgcaattttttgtcatctcctcagctattgttagtatattctgtgtgtggcccaggacaattcttcctccagtgtggcccaggaaagccaaaagattgggcacaccggtttacatcattcacctcccctcatctcatcacataggcatcttatcatctcacatcatcacaagaagggtgacacaggacaataaggcattttgagagagagatcacattcacataactttaataaacatatatgattattattgatct

SEQ ID NO: 745530 - DNA, 590 bp, Homo sapiens
aatagaaaggccctgtgtcagcagccaggcccctgggcagccgggctctcggctccattctgttcagtgggattctggttggcaccagctgcagtcaggaacaatgcctggatttctttctttctttctttcttttttccattttaatagaggggggagaaggaccagagccactcattgaacagctcagaattgtggaggcatctgggaccgtgtgtccttgaaaacagcacagtcgcaggggccccacagctggctgcaaggtgcaagaaggcatgatacactgggagctccaggtcccagccctgctgctgtytcatacttgcttgctgtgtgaccttaggcaggtccatgccccactctggcttccccacagccccaccagagcttgccttccaggacccactcaatgccaactcttcttcttccccgaactcttagaatggcattgggtggccgggtgcggtggctcatgcctataatcccagcactttggggggccaaggcgggtggataatgaggtcaggagatgcagaccatcctggttaacatggtgaaaccccatctctactaaaaacacaaaaaattag

SEQ ID NO: 745531 - DNA, 590 bp, Homo sapiens
aatagaaaggccctgtgtcagcagccaggcccctgggcagccgggctctcggctccattctgttcagtgggattctggttggcaccagctgcagtcaggaacaatgcctggatttctttctttctttctttcttttttccattttaatagaggggggagaaggaccagagccactcattgaacagctcagaattgtggaggcatctgggaccgtgtgtccttgaaaacagcacagtcgcaggggccccacagctggctgcaaggtgcaagaaggcatgatacactgggagctccaggtcccagccctgctgctgtctcatacttgcttgctgtgtgaccttaggcaggtccatgccccactctggcttccccacagccccaccagagcttgccttccaggacccactcaatgccaactyttcttcttccccgaactcttagaatggcattgggtggccgggtgcggtggctcatgcctataatcccagcactttggggggccaaggcgggtggataatgaggtcaggagatgcagaccatcctggttaacatggtgaaaccccatctctactaaaaacacaaaaaattag

SEQ ID NO: 745532 - DNA, 590 bp, Homo sapiens
aatagaaaggccctgtgtcagcagccaggcccctgggcagccgggctctcggctccattctgttcagtgggattctggttggcaccagctgcagtcaggaacaatgcctggatttctttctttctttctttcttttttccattttaatagaggggggagaaggaccagagccactcattgaacagctcagaattgtggaggcatctgggaccgtgtgtccttgaaaacagcacagtcgcaggggccccacagctggctgcaaggtgcaagaaggcatgatacactgggagctccaggtcccagccctgctgctgtctcatacttgcttgctgtgtgaccttaggcaggtccatgccccactctggcttccccacagccccaccagagcttgccttccaggacccactcaatgccaactcttcttyttccccgaactcttagaatggcattgggtggccgggtgcggtggctcatgcctataatcccagcactttggggggccaaggcgggtggataatgaggtcaggagatgcagaccatcctggttaacatggtgaaaccccatctctactaaaaacacaaaaaattag

SEQ ID NO: 745533 - DNA, 636 bp, Homo sapiens
tccagcttactatgcaagctcgatgattatgacagcacattacacttttatctttaggtttctacttctcccactggataacagaatccaggaacatagaaacttttctccctttatccccatggccctgtgccatatcattttgatttgtaataggtacacaattaacatttgttgaattaattgattaaatatgcttcaagaagaatattgagacataaatttgaaattgaaactctaatttttaatccagcaagaaaattttacacaatgttgcccaaaatttttacaccaagtactttaccctatctcatgtatcttcctttagtttgtcatgcctattcctgtgttagaagcattagtgcttcaacgycctgaattcactttattccaaataattctcaattgccaagactttcaccatataacacccattacacctattaacttgttgtctctccagcagtgacatcttccaatctgcacaatttccttgtgaataaggatggatcttcataaaaagactccacaattcaggcaacatagagtttaagcaaatgccattgcctaatcttcaaaggcctcttcctgggcccacatctgccccacaaagcctctgcattaggatgctttgag

SEQ ID NO: 745534 - DNA, 538 bp, Homo sapiens
ccaacaggaaccaaaccagagctgtgagatataaagcatacagccgttttcacacaaagcccccttctttttctcttttttccctgtaccagaaattatttatgtaaaatcaacatttaaatgaatcagaaatgatatgtcactactgagatttctattttttttaattactgaattttaaaaatgagagataataaaccttgaaggaataaaagactgagagactgaaacttgagaaatcattttttgagaatttggtataaaaatagatctgcaacatcactcattmaaagaaaaatacttaattaccccttcctttgaaaacatttccccaaatgccacacaaaatcattacttacagttcagacaagtcaaggtgacggaaatgtttcctagacaaactcgtcagtttgtttcgggtaaaattgctgaaaggaatcaaaaacattaaacatgaatttaaaatgttacattttaggaacacagtattcaaatagagatttgtttttcaaaatataattttatttgatcattatat

SEQ ID NO: 745535 - DNA, 641 bp, Homo sapiens
ctggggcggcctcggctactccccaggtgggacgtgccgcgccacctgcccgcgccaccggcacccagcggccgtggcggattctgcagcatcattcgggggccccgtcgcggagccaaagccgccggcagtctccgcattcccctttaaagggtccttcgcccggcctgtaccatggaatcctgtcttggggaccctttccctacctcccctcccttggsctcaggctcgaagagagagtgggcacactggtggctccagcggcgtcagtgccatcgcggggcaagttgattcctgggccggagctgggcactcatccatccacagtctccgggctggggtcggggtggggatgacgcgagcagagagggagagtgccccaattagtggtgttgggggtcctacgctcagtcttacgcgtgtctgtttgtcctcagcctcgaggtgcataccggacccccattcgcatctaacaaggaatctgcgccccagagagtcccgggagcgccgccggtcggtgcccggcgcgccgggccatgcatcgacggccgccgcggagctccgagcagcggtagcgcccccctgtaaagcggttcgctatgccggggccactgtgaaccctgccgcctgccggaacactc

SEQ ID NO: 745536 - DNA, 530 bp, Homo sapiens
caatttgaatttcatcacctctacaatgatttatatgccactcttaatcgatgtttttgttctattttttaatccacaaattagacatctatcatcatcagtgttttatctaatcaatgtgtgtttatattgaatttcatatttaccaatttctatgttttccttccttcctgcatctccgatctttattgggatcattttcrttttccctgaaatacacattcccaaattttctttacggtcatctgtgggtggtaaacaaaatttttatttgtctgaaaatgtcttaactttggaagacagttcattacctataaaatatagtaaattcactatatatattcactagatatagtttcagaacttttaagtattagtttatagtcttttggtttccattagtactattaagaggtcagctataaatctaattgtcattctttgtaggtatttgtcttttctcaccagcttcactgaattttttttatttgtatgcaatgttgggcaatttccctatgttgtttctaggt

SEQ ID NO: 745537 - DNA, 530 bp, Homo sapiens
caatttgaatttcatcacctctacaatgatttatatgccactcttaatcgatgtttttgttctattttttaatccacaaattagacatctatcatcatcagtgttttatctaatcaatgtgtgtttatattgaatttcatatttaccaatttctatgttttccttccttcctgcatctccgatctttattgggatcattttcattttccctgaaatacacattcccaaattttctttacggtcatctgtgggtggtaaacaaaatttttatttgtctgaaaatgtcttaactttggaagacagttcattacctataaaatatagtaaattcacyatatatattcactagatatagtttcagaacttttaagtattagtttatagtcttttggtttccattagtactattaagaggtcagctataaatctaattgtcattctttgtaggtatttgtcttttctcaccagcttcactgaattttttttatttgtatgcaatgttgggcaatttccctatgttgtttctaggt

SEQ ID NO: 745538 - DNA, 620 bp, Homo sapiens
tgataatagtcacttgtctaagtaaggatagtctgcgagtcaaaatgtcttcccccttacgtgatattgcctaacatgagaaaagcagttctccaaacaaatgcatactttccaaattgagcctgagtaacaaaattaatcatgaggatgctgctgatataatgacgatggtggggatgatgatggtgaycacagtgataaacttgggactttcctgtattcaaggtattatgtactatacatacttggtctcatttaattattacaaaaattctaaagagataatcacatcactaatttagacaaaggaactaaggctttgaaaattgaaataacttgtgcaagatttagctgctgataaatgtcaaaggtaagattcacactttaatctcttggctttcaaaagtcatgcttttttattacactatacttagtatgctgtctaaagctggcattagtcacaataaaacccagttgtcactttttcccttaaaacaaagaataagtgaaaggaaggtaagtatttgctgcacaagtactaggactcttccttttgcaccacgaccatctcttcgagtagcagggatcccatattttgtttcaggggtgagtgactatga

SEQ ID NO: 745539 - DNA, 647 bp, Homo sapiens
tgcctaaagactccagtgcatgggatcccctagactatcttcccccactcagtgtccccaatctttcccctcagacagccactgccgcctcagatcccattccaaattccccctctactcacgttatccctcctccttataaccctgactcttgggaattacagtcccatcagtctgttccctccaacctaaagacccctgtctaaaaggactccagtgtgaggcagaataatataaaaaaagtatgcagaatttcccatttccctctgtacctaagaggtcagccccaaccctcttccctttgaaagaggtgccacaaggagagggggtggcattggctttgtaaatgctccttaaccagttcagaagtccagaattttaaaaaggagcttaaactgctactagatgacccttatggagtggcagaccaaattgaccaattcttaggatctsaattatacagttgggtcgagttaatgtccatcttgggcatcctcttctcaggggaagaaaggagtacgactcatagggctgctatggtagtttgggaatgtgagcaccctcctggtgaaaatgttcctgacacagaccagaaatacccccccacttgagatcctcggtgtgacaataacaacacaggtcaccgg

SEQ ID NO: 745540 - DNA, 633 bp, Homo sapiens
tgatatacaacaggaaaaagaggaagggcctatgagattcctagacaggctgagggaacaaatgaggcaacaagcaggcctcaatttggatgatcccctcgggcaaggaatgttgaaactccaatttgtcgctaaaagttggccagatgtttcaaaaaagttacaaaagatagacaaatttggaagatcatcccctaagtgagcttctcagggaagctcaggaagtatacatgaaaagggatgaagaaaaacagaaacaaaagacaaaacttatgttttccaccttccaacagwtggttccaaacccacgtacttctagacagagcttccagggagccagaaactacaaagggtccgaaccctcttttaaaggaccccagcctccatctggaggaccaaggtactgatctaccaggccccctaaagagtataggagagcaggggtaaagaatctcagaactcagaaggaggaagaacaagataggtgctttagatgtggaagaacaggccacttcaagtgaggatgtcctgaactaaaaaaggagaaagaagcccctccactcatgactttcaaggaagaataggggggtcaggggctctgtctcttttatcttgagtcccaccaggagccct

SEQ ID NO: 745541 - DNA, 342 bp, Homo sapiens
taatggttcccttcttttctcctatgagcaaccctctctatttacttcccaccaacaattctgatcctttccctgttctcaaggtgcccaagcctcccacttaaatgtgctattcacctctcagagtacttaaagccctaatttgtcttttctcttctcctgtatcttatgmaatccaagaaaggtacactccctcagggatacattttagtttgtaccaaggtggtaatggatcaataactaatatgtcccctttcaagacaactttgtaatcctagcagtgtctctcagtgagaatttcaaatatatgggagaagaatgaagatctgggatacatactgg

SEQ ID NO: 745542 - DNA, 342 bp, Homo sapiens
taatggttcccttcttttctcctatgagcaaccctctctatttacttcccaccaacaattctgatcctttccctgttctcaaggtgcccaagcctcccacttaaatgtgctattcacctctcagagtacttaaagccctaatttgtcttttctcttctcctgtatcttatgaaatccaagaarggtacactccctcagggatacattttagtttgtaccaaggtggtaatggatcaataactaatatgtcccctttcaagacaactttgtaatcctagcagtgtctctcagtgagaatttcaaatatatgggagaagaatgaagatctgggatacatactgg

SEQ ID NO: 745543 - DNA, 615 bp, Homo sapiens
cccagtgcccactgccttctaaagaagaacaaagtgatcggtggaatcagacatcaactttcaggaaagggactctgccctttgggctgagaaattttaaagctgcattaataaagaaatgccaagccctcctctggagtaagtagaggtcacagtacagtataaggataatataaggttctggcatggcagctcagggattgtggctggaggaacatgagctcctcccattgcataaccagaaagctaggtctatgcctggccattgctgctgtgtactgtggcaacttcrcagtgtgaaggaaaaatatcttgggctccctaaatcactaagctaaagggaaaagtcaagctggaaactgcttagggcaaacctgcctcccattctattcaaagttatccctctgctcactgagataaatgcatatctgattgcctcctttggagaggctaatcagaaactcaaaagaatgcaaccatttgtctcatatctacctatgacctggaaactcgctccctgttttgagttgtcccacctttccagaccaaaccaatgttcatcttacatatgctgattgatgtctcatgtctctctaaaatgcataaaaccaaact

SEQ ID NO: 745544 - DNA, 615 bp, Homo sapiens
cccagtgcccactgccttctaaagaagaacaaagtgatcggtggaatcagacatcaactttcaggaaagggactctgccctttgggctgagaaattttaaagctgcattaataaagaaatgccaagccctcctctggagtaagtagaggtcacagtacagtataaggataatataaggttctggcatggcagctcagggattgtggctggaggaacatgagctcctcccattgcataaccagaaagctaggtctatgcctggccattgctgctgtgtactgtggcaacttcacagtgtgaaggaaaaatatcttgggctccctraatcactaagctaaagggaaaagtcaagctggaaactgcttagggcaaacctgcctcccattctattcaaagttatccctctgctcactgagataaatgcatatctgattgcctcctttggagaggctaatcagaaactcaaaagaatgcaaccatttgtctcatatctacctatgacctggaaactcgctccctgttttgagttgtcccacctttccagaccaaaccaatgttcatcttacatatgctgattgatgtctcatgtctctctaaaatgcataaaaccaaact

SEQ ID NO: 745545 - DNA, 634 bp, Homo sapiens
aagaaaagaggtttaactggctcatggttctgcaggctatataggaagcatagcgccggcatctgcttggcttctggtgatggcctcaggaagtttacaatcatagcagaaggggaaacagagctggcacaccacatggtgagagggggagccaggaggtagtggggtggggacgggaggtgccaggctctttaaataaccwgttctcacatgaactaacagagcgagaagtcacttattaccatggggaaggcacaaaaccattcgtgaggggtccacccccatgatccaaatacctcccaccaggccccacctccaacatttgggattacatttcaacataatatttggagggacaaacgtccaaactataccaacatgtattaagcatttatcattttccaagagctcttctaacagtttggcatgcattaactcatttaaactccataaaatctctgagaggtaggaacaatatataaacacttcaatttagcagataaggatactgagggacagtacaacttaaagcctgatctctcggtgggagctggagcggcttcctcctttgtgattttcctctgcttcagtcgtattcacctcccagagactatcatctgcccctgctagttgt

SEQ ID NO: 745546 - DNA, 593 bp, Homo sapiens
caaggggacagctcagtcaggcaaacaggatccagcaagcaggccaaaggagaaacagggctgcgacgcctaggggtcacagggacgcagatgctgctggtggcccaggtgaggggtcctgcgtcctctgtcgcaaggctgccagcagctgcaggatctgctctcacatgttggacaggcaaggaccttgtggcacttctcaccctggctgtgtgctggaattgtggtggagcattttaaacacctctgggccctcttcacagcacaggggtcattctgatgagcagccaggattgyggccacaggcaagccaggagccagctaagggggttgggggagtgaggacaaggcaggctagagggcttgggcagacaggaggaactctgaccccaggctccctgatgcccagtatgtctgcctggagagagactgatcccagtgagcgtgacctcaggagctacaggtgttggcagctctagaagatgacgtgggcaccaagttcaggaacaggagccaactgttctataacaggaacttttccctggagttcccctggagtactgtcttgcaacgaccagagatcttttgctaag

SEQ ID NO: 745547 - DNA, 597 bp, Homo sapiens
cctactctcaaatagtagacagttgttacaacaatatttactaaatggtctctattttcccataattttactacatttgtgtaaattgaatttccttacgtatctgggtttattactggactctactctgttccactgatgtctccatatttccttcccaataccaatgggaaaagtttggtagcttaaaaaaawtttttttttaaattaaacaatcattttattgcttgagtacatagacaaatttatatgaccaggacagaggctgtagattactcacttccaactgggagggaggatttgcttggtcttacaatattgagccaaagggtgactctacctctctatcagaatcagacagaatttaccatccttatcctttctgttcatctcaagatgcttttgaacaataactacttcttaattaaatggtagagatcttcagggagatcaggagcaagtcccttcttggacttaagaattcttaagatgctattgcctgtcacaaaacgtacttgagcaacaccatgtgagtctctcaagaaccaaacttgaaaagggaatcatgttttaacttccaataccaaacacaaactg

SEQ ID NO: 745548 - DNA, 579 bp, Homo sapiens
gtaacagattagacacactcgagaagattacaataaaatagcacaaacatggagagcattagactcggggcttccaaggtcccattgacttcgaattatgtaagatgctttgaaaagctcaagttcataattataaacattccatccttactattgggatcagagatgaggaacaaaggatcatgtgttcaaagaactgggccttatacttctttacttttcagtttcacttctaccataattttcaccttctaccaaaatggaaattttccactttccactcctggtaagtagccaattttttttttttttttttttttttttctgttgcaaaggatggtttttccatatcaggaatttctggcattttttcaggaagaggaaaagcagtaatctaagccctggggctcacgaggccttgagtttcttytcttgcccaaccccaccccttcctttacgtcatgtaaacactgtaataatggtgaaatgctgcagatcccttcatacagaaggacgctgggatgattcgtaagggaagagaatcccatgctgcctgccctcatttcctacccgccatgc

SEQ ID NO: 745549 - DNA, 617 bp, Homo sapiens; identical to SEQ ID NO: 743691

SEQ ID NO: 745550 - DNA, 539 bp, Homo sapiens
tacaattttgcctgtataagggtaaatttctctcctgaaatttacccctgcctctataaacccttgcttgtaagctgccagggagggtggctcatttttttttttttttttttttgagacggagtttcacttttgttgcccaggcttagattttccacattctctcaagttttwtaaatatctatttatgctttgtgattttgtgattttggctttttaaaattgaaatctgcatttgatctgaaatttgttttgatcaatgtcatttccactttttacatgaagaatgtgtattgcttgtttttagtaagacaaaccctaagttttctttttgaccagaggaataaaaggcacattttaataaaacagtaaaatccacagataatcccacagcttgggccaaatgatctctgctgagatctctgcagcaattagctttaggaggggtttggcctttagagtgggcagctctgaaacagcttcttttttcaggatggtgggctggtacgcggctgcttcagcagggataccttcacatc

SEQ ID NO: 745551 - DNA, 539 bp, Homo sapiens
tacaattttgcctgtataagggtaaatttctctcctgaaatttacccctgcctctataaacccttgcttgtaagctgccagggagggtggctcatttttttttttttttttttttgagacggagtttcacttttgttgcccaggcttagattttccacattctctcaagttttataaatatctatttatgctttgtgattttgtgattttggctttttaaaattraaatctgcatttgatctgaaatttgttttgatcaatgtcatttccactttttacatgaagaatgtgtattgcttgtttttagtaagacaaaccctaagttttctttttgaccagaggaataaaaggcacattttaataaaacagtaaaatccacagataatcccacagcttgggccaaatgatctctgctgagatctctgcagcaattagctttaggaggggtttggcctttagagtgggcagctctgaaacagcttcttttttcaggatggtgggctggtacgcggctgcttcagcagggataccttcacatc

SEQ ID NO: 745552 - DNA, 539 bp, Homo sapiens
tacaattttgcctgtataagggtaaatttctctcctgaaatttacccctgcctctataaacccttgcttgtaagctgccagggagggtggctcatttttttttttttttttttttgagacggagtttcacttttgttgcccaggcttagattttccacattctctcaagttttataaatatctatttatgctttgtgattttgtgattttggctttttaaaattgaaatctgcatttgatctgaaatttgttttgatcaatgtcatttccactttttacmtgaagaatgtgtattgcttgtttttagtaagacaaaccctaagttttctttttgaccagaggaataaaaggcacattttaataaaacagtaaaatccacagataatcccacagcttgggccaaatgatctctgctgagatctctgcagcaattagctttaggaggggtttggcctttagagtgggcagctctgaaacagcttcttttttcaggatggtgggctggtacgcggctgcttcagcagggataccttcacatc

SEQ ID NO: 745553 - DNA, 535 bp, Homo sapiens
tagtaagacaaaccctaagttttctttttgaccagaggaataaaaggcacattttaataaaacagtaaaatccacagataatcccacagcttgggccaaatgatctctgctgagatctctgcagcaattagctttaggaggggtttggcctttagagtgggcagctctgaaacagcttcttttttcaggatggtgggctggtacgcggctgcttcagcagggataccttcacatccctccttggactctgctcatcttttaaataaattttttataattttagagatgagktcttgctctgtagcccaggctggggtaccatggcatgatcatagctcactgcatcctggaacttttgggctcaagcgatcttcccgtctcagcttcctgagtagctgggactacaggctaccatgcctggctaattcttatatttttttagagacggggtttcaccatgttgcccaggctggtctcaaactcctggccccaagtaatcttcctgcctcagcacacactcctcgctcatggtcaa

SEQ ID NO: 745554 - DNA, 504 bp, Homo sapiens
cagaaaagggctaaatgacaggcacactatcaaagtcccaaatgtgagctgtattccattaatgagttctgttttatattgctgcacacagacctgcacgcctcattcagtatcagtcatcactgagcagaacatcctcgacctccattttcctgcctatgagacagtataacctatagmctttcacttgccattcacttactatttttctgagacaaggtttccctgttgcccaggctggagtgcagtggcatgatcacagctcactgcaggcttaacctcctgggctcaagtaatcctccaactcagcctcctgagtagctggaactacagacctgcaccaccatacccggctaatttttgtatagatggggtctcatcatgttgcctaggctagtctcgcatgccagggctcaagcaccctgcctgccttggcctcccaaaggtgtgagcaactgtgcctggcccattcacttatctttatacccatccctctttatccaa

SEQ ID NO: 745555 - DNA, 537 bp, Homo sapiens
gtccctgaccctagtgtcccccctcccccagcacaggatggtaagcacacaggtcccagacaggggctggatggctctgaagctggtagccctgatctacctaatactgcagctgggctgatcgccctcaccaacttctgactggacttcctgctggccgccactatggtgctgccgctgtgctcgccgagcctttgggccctggaccctctgtgctgtcctgctggtgttgacaagcccrgcagccacgctccttggcagcccattcctgtggcgggactgcaggaggcaccactgtcactggccaagggctggcagctcttcctggcagcactggcccagggtgcgctggagcacacacctaaggcgccctgctcttcccactgctgtccctgggcctctgccttgctgactacttttctggaatgtgctcttctggaagtgagatctgcctgtccggggcaccaggctgggacagagactccccaaggaccccattctgcctccttctggggaaataaacaagtgcctgtttca

SEQ ID NO: 745556 - DNA, 634 bp, Homo sapiens
atatacacaaaataattccttttcttaaaaaaaaaagtacaaaacatgttcagggataaatacaagatataaaattcaaaagaaaacacaaaacaaaaccaaaaaatataactctctcagagaactataaacggaagggacagaagagtacctctactgcattttagtaaagcagaactgccgacgttaaatgtacctcttgaaatggctgaactaatcccgtgtggctcagtgcttaaggtaacggccaattgtgacacacagccggctgcattgataagtcggtggttgacgtcgtgcatcccacctctaagcaccagaacgtttggcagtagcacccagaacaggaaacgccaactcttttgacagyaaaggattaagtcagctgattttttttttctatcaagagccagagaaatacttgatattcttagttgtgtttctgtaatagttaataaattacatgacaaaaacctgactatatagatctattggtctaactacgtatttgtaacttttacagtagtccagcccttttgttacttttcctccttgtgctcttaaagccagacttgcagatctacccagaaaacctgtcccattttttttcttctttagaatagccttccccatt

SEQ ID NO: 745557 - DNA, 599 bp, Homo sapiens
taatttccctcgtagaacactaatagactgttttaaagtgatttaacttgcaaaattaattaagtcaatgcagcagattatttttaatctacagattttaaaacaatgttctatacattatagaaaagtgtatattgagaactaagaatgaagccccataacacatcaacttcagggctaaatattcttcaaataaaatccagtatggattttatatcaatgtaccctatgtaaatayattctttactgaggaaccttagaaggaaactgaaatgggaagatggttcctgtgcttgaataggaagattgaattttcttaagatgtgagctttttggctgggcgcggtggctcatgcctgtaatcccagcactttgggaggcgggcggatcacgaggtcaggagatcgagaccatcctggctaacacggtgaaaccctgtctctactaaaaattataaaaaaaattagccgggcacggtggcaggtgcctgtagtcccagctactcaggaggctgaggcaggagaatggcgtgaactcgggaggcggagcttgcagtgagccaagatagtgccaccgcactccagcctgggagacagagc

SEQ ID NO: 745558 - DNA, 599 bp, Homo sapiens
taatttccctcgtagaacactaatagactgttttaaagtgatttaacttgcaaaattaattaagtcaatgcagcagattatttttaatctacagattttaaaacaatgttctatacattatagaaaagtgtatattgagaactaagaatgaagccccataacacatcaacttcagggctaaatattcttcaaataaaatccagtatggattttatatcaatgtaccctatgtaaatacrttctttactgaggaaccttagaaggaaactgaaatgggaagatggttcctgtgcttgaataggaagattgaattttcttaagatgtgagctttttggctgggcgcggtggctcatgcctgtaatcccagcactttgggaggcgggcggatcacgaggtcaggagatcgagaccatcctggctaacacggtgaaaccctgtctctactaaaaattataaaaaaaattagccgggcacggtggcaggtgcctgtagtcccagctactcaggaggctgaggcaggagaatggcgtgaactcgggaggcggagcttgcagtgagccaagatagtgccaccgcactccagcctgggagacagagc

SEQ ID NO: 745559 - DNA, 396 bp, Homo sapiens
agagatatatttactttgttggaacaagatgtgttcttctacctgctggttaattgtcatcataacagtaattttgttagaacaagatgctctgctaccatttgccaaaagattgtcataataaatatacaaattgcccaactctaggctcagcagattataataaaagcagaaaaacgtttcacactaacaaaaatgctagtatgctacctggttgtggacacctaatacattatatwgtccaaactgtatgaggacacctttaatttagccatctatttatcaaagagcttttgtaagttaggttttataagtcgcaggagacaaagatggaatagatgtagttttgatctttaaggtgctcataatagagctgtctccatttcatttctgtgc

SEQ ID NO: 745560 - DNA, 485 bp, Homo sapiens
taaaaatatttcacacttaaatttgatcatatatatagaaatattaccatataactttaagatgtaattatcatatcattaatatatcacagaaatttttgtaaagtttgcttcatttctgtttcaatgaatgaaacagaattttccaaaattcaaaaagggccctccttcattttatgcttttattctcaatcactcttcagaatcttatgtatgtatttaccccatttgactcatgggaacacrcaaataaaaagacaaagatgcaaaatgtgtcttctgtctttaccacctagattttacattaaacagtcagatttagaggatgacacactgtgcggcttcaggaacagaaaggaagtttgcccttttctgcgctaagatattcttctaccccactgcctttgagcattcttttttcatttggttgctgggatatcaaaaacatgatggtgctcactgaaaatgggagccaaagtttgcca

SEQ ID NO: 745561 - DNA, 444 bp, Homo sapiens
gagccatgagaaacaacaatgtccaaaaggagaaagatgaggagcagcaagcaaaacagaccatgataaacggactagaaaggcaggaggaaaagcctgagggagtgaggtcctgaaagccaagtgaagacgccattagggaggagatgccctccattggctcaaatattgctgacagattaaatgagrtgtaagaaaaatgcctagatttagtacagaaaaaatttagtgatattcttgaggaaaaacaactctggaggagtgctgaatttgaagccttcccggctttgagatcaagagtgaatggaaagaaaatttgagttcatgagtgtagacagttctttaaggacaacatacttaacgctcatgactgagaatgatgtaattttcatccacagtcatggaaaagtgatagacaagaaatagtagcttccaaattttaca

SEQ ID NO: 745562 - DNA, 640 bp, Homo sapiens
cagaaaaagctggccaactcctggtttagtagatcaaagattctttgatgtattttaataaaagttttaccaaatatactgaaatgtttatattaaatatagatccccatgtacaatcscttggcaatattcagattgagggtccaatatttcagcactcaggcactgacaacaaaaatttagtaactagcaatcttgttgctaacaaggtacagtgtcaatgtagcatgtagcttccatttgcaacacagcagatattacaagaattttaacaagaactcttaagatgtgtcatcaaactaaacgctttaaatacattttaattgtgaaataatcagtataccctacatctaacctcattttttaaaaatggttgcataatacattattttggggatatggaaattgagctatttcctattgataagcaattagactagttccaaattttttacataataatactataataaatgtccttatacataagtatacatataacatatctatacaaatatcctttacatgtattatatatgcttactctgttatatatgtgtgtgtgaatatgctactcaattaatgttcaaaatgtatttaccaacagtatatgaaatgtctttttcaatgaaaccatttc

SEQ ID NO: 745563 - DNA, 640 bp, Homo sapiens
cagaaaaagctggccaactcctggtttagtagatcaaagattctttgatgtattttaataaaagttttaccaaatatactgaaatgtttatattaaatatagatccccatgtacaatcccttggcaatattcagattgagggtccaatatttcagcactcaggcactgacaacaaaaatttagtaactagcaatcttgttgctaacaaggtacagtgtcaatgtagcatgtagcttccatttgcaacacagcagatattacaagaattttaacaagaactcttaagatgtgtcatcaaactaaacgctttaaatacattttaattgtgaaataatcagtataccctacatctaacctcattttttaaaaatggttgcataatacattattttggggatatggaaattgagctatttcctattgataagcaattagactagytccaaattttttacataataatactataataaatgtccttatacataagtatacatataacatatctatacaaatatcctttacatgtattatatatgcttactctgttatatatgtgtgtgtgaatatgctactcaattaatgttcaaaatgtatttaccaacagtatatgaaatgtctttttcaatgaaaccatttc

SEQ ID NO: 745564 - DNA, 581 bp, Homo sapiens
ttggggcactgcctggaggctctgacccccgactgaaggcaggagttggccggcctgggagcccacctcagcaggtgtctggcagtggcagctgtgcctgtgactttgctgttgtcccctgctctgtggctgctgtggaggccactcctgggggagagggctatgtgragggaatccgaacctattgtgccccaaatggaaagtatgggcacctccacacactgcctttctgcccatcgcatagccaaacagaaggtcaggatgctggatttgatgacacctgagtatctttcactctggagtgggatcccctcactaccacccacaagtgctctgacctggggcatgtgagttgacctccgtgagcctcagtttcatcatctgtaaaatggaagtaggataattttcttgctggtaagttgtgaggagcatgaacattcaacttctaacttagaagaaggactcaaaactggcagctccctttccctggaaaaggcatctcccaggggaagttcccaagagtgcactggaatggttgtcaggggccttgtgtgagtcccggtagcccactgacttttacc

SEQ ID NO: 745565 - DNA, 642 bp, Homo sapiens
aactgtcatcacataccagtattctatagcagattagcaaaatactatacaaatactaacaagtgttttatgaatatactatctgacaatttctagagacatatactgtttctttatagtaaaatttttcaatatgacaaaaagaatgtttactaacagatccaaatgtattttatctacctataccatgtaaaaagaaaaactccaaagtatataaatttaaayttaatcttaatgatatgatttggctctgtgtccccacccaaatctcatctcaaatagtaatccccacgtgtcgagggagggaggtgataggatcatgggggtgatttcccccatgctgttctcatgatactgagtgagttatcatgagatctgatggttttataagtgtttggaagttcctctttccctcttctccctcctgccgccttgtgaagaaggtgcctgcttccttttccaccgtgattttaagtttcttgaagcttccccagccatgtggaactctgagtcaattaaacttctttcctttataaattacctagtctcagggaagttctttatagcagtgtgaaaatggactaatacacttagccatgaatgttttggtagtttattgtacttagaaacaatgtagacatt

SEQ ID NO: 745566 - DNA, 635 bp, Homo sapiens
ttaaaatcctatttctttattcccatcttacaaaacccacccagtgggagctctcatactagtttgtagaatggaggcggctgcaattcatgaatctcaaaaagccaattagatccataactaagttagttgtaattttgccttttgacacccttaacccaaaactgttatcttaaggtgtttataatgtaggtttataagaggaaaaggtaaaggttaacatgttgtagaagactgtttgtattttggagttaactataattgttacagttcataatatttaacccactgactatgacaycattgactgatatgattaacccaaccaatgtataataaaatgtagactttccaggaataagtaaatcatttcttttttgcagaagtttatgtaaattttagaaataaaccgtttaacctgcaatgcaaaatctctttcatgacactaagacacagaaaaggcaataaaaatggcttcttttcattgttagtatttttttttttttttttttttgagacagggtctcgctttgttgtccaggctggagtgcaatggcacaatcatggcttactacagcctcaacctcctgggctcgatgatcctcccacttcagcctcccaaagagctaggacca

SEQ ID NO: 745567 - DNA, 621 bp, Homo sapiens
aagatgtgaaaggataattgacaagcattttccaaaactaatggaaaacatcaacccacttatttaagaaattcagttagtcaaaaggaaataaaaacaaaggagaatattaacgccatctgtaggtgatggaggaaaagacagaggacaaaacatacaaacaaaaccaaaagaaaccatgtttttaaagagtgaggaagaggccaggcacggtggctcacgtctgtaatcctagcattttggtagggctgaggtgggcggatcacttgacgtcaggagttcaagaccagmctggccaacatggtgaaaccccatctctacttaaaatacaaaaattagccaggcctggtggcatgtgcctataatcccagctacttgagaggctgaggcaggagaatcacttgaacacaggaggtggaggttgcagtgagccaagattgtgccactgcactccagcctgggtgacagaacgagactccgtctcaaagaaaaaataaaaaaaaaaaagagagagagaggaagagaaatctgaaaaagcaatcagtagggaaaaaaatcaaattttacaattaacagatgatttgccaaaagaaattatgggagccaggtgacatgaaacaa

SEQ ID NO: 745568 - DNA, 455 bp, Homo sapiens
ccagggtgtggggtctgtggcaacagccctctgcatggaagcctcaccctgggccccctctaggctgctggtgcccagaagggcaggtgctgggcagcgaggggtggtgtgtgtggcccaggcagtgcccctgcctggtggacggtgcccgctactggcctgggcaacgcatcaaggccgactgccagctctgcatctgccaagacggacggccccgacgctgccgactcaacccggactgcgctggtgaggcccttccctyggggtccctagtcctctccctggaccgcccagctgcacatccaccacctccttcaggctctgactgttggccctccctcagtggactgtggctggtcctcctggtcaccctgggccaagtgcctgggcccctgtggaagccagagcatccagtggtccttccggagctccaacaacccccgcccctccggccg

SEQ ID NO: 745569 - DNA, 593 bp, Homo sapiens
tctccattctttatgttcaatgttggtagataactttatccacatacaacttagactggcataggccacacagagggtagggtcaccttctcagtctcattctccacgttgcccccaaacaccagctcctccactatccctccacgcttctcctctctcaaaaccatctccttccaccactctctcctctcaccattcatgtcttctctgacatatgggactccacaaacagtggacacttttagaaccaggctaacaatcttattttcctcaccgccctctccttctgtcctcaggaatgtcaaacaccatggcaatgtgcgtccaatgctaaggcctccmgagatttccatcctgctgcctctacgaatgttcacaaactccactcactgaggctctcaaggggtgtggtgaggcagagtcagcgttttccactagtgtcttttaccctgcttcttgaggcaggagaatcgcttgaacccaggaggcagaggttgcagtaagccgagatcttgccattgcactccagccagggcaacaagagcaaaactccgtcccccaagcaaaaaaaaaaaaaaaaaaaaaaaaccaac

SEQ ID NO: 745570 - DNA, 625 bp, Homo sapiens
acagacaattcatcaaccctgcaagtgttatctcataagctcccagggtagagggaacatctaaatctttctcacagttttcttacagatgatgaatagtacataaatatttactgtttcaatgtatgctttaattataacattaaagtagttacttacatgttttaattgtagcattagtaaagatggtagaaatgacattgactttgctgatctaatgcaaagcggttatctttgtaaatgttccttataccagaggtccatatttctaaaatgcattttaatgtctctttaaagagagatctcttccccaaaggacttaataaattgttcacacagtagacastcccagaagcatgagatagccatcctctcccatctttggaatttcttttcctcttcagtgcttttttgctgcccctcagtatttagagattctcaatgcagctcctggccattcagtatacaatgcacatcttccttccctcagacttatctgtcttgtttccaattccttcccagtctcactttgtattatacaagaaaatgtctagctgtgggttaataaaaagaaattaagaaacatatatggcatgttagaattggcagatccgtagaagttgct

SEQ ID NO: 745571 - DNA, 589 bp, Homo sapiens
ccaagtatgtagttatttttgaattttccaatatttattgcctggctcccaaaagagaaaaaaagaagggaggaaaaagaggtgctggccttttaaatcccctggaagtcactttagccaggagagagatttgcaaaaatgaggagaggtacagcaacatggccacctgtctctgcctgtacttctgtgatcagaatcagtgatcagagtacagatcctcaatatttggggagcaaaatacattttgtctactctagctcctgtaattgtagggtcctgtagattgaattcaggacaccaggcacagcttcctttcaaaggactaaggatggcagatgggtagctgccactaaactaagagctgaaattgatcagaattaaccacattttaccatcgagctttcycctagaagttgcaagccttcaatagactacagagttccaaagtagttaacatcagacagattttgtcagttcatttacagtttaggaggcatacagatttctggtgcttcctactccacagtctttccagaatcctcctcttttaaccatgtttaagtatacagttcattggcattaattacag

SEQ ID NO: 745572 - DNA, 566 bp, Homo sapiens
actatattgcccaggctggtcttgaatgcctggcctcaaacaatgctccagcctcagccttccaaagtgctgagattataggtataagccaacatgccctgcccattgtttatttttaaattttcctctttttttgagccaaacctaagcaggttttccccctgacttttctgccagaactgcttttgtcaaattaaccattgaccatggcatcgctaagtctgcyagtcattttccagtcttcatttttcttgtcataacagcagaacttgacagttggtcattctcttttctttgaaatgcttttgtgtcagtaggcttctgtttgtttgtttatttgtttgttgtgagacagtcttgctctgttgcccaggctggagtatagtggcatgatcgcagctcactacaacctccgcctcttgggttcaagcaattttcatgcctcagccacccaagtagctgcgatgacaggcatgtgccatcacgcccagtcttttgtcagtaggtttctataataccacaatttcctggccttttctccaccttgctggcttttctcagactct

SEQ ID NO: 745573 - DNA, 596 bp, Homo sapiens
actatattgcccaggctggtcttgaatgcctggcctcaaacaatgctccagcctcagccttccaaagtgctgagattataggtataagccaacatgccctgcccattgtttatttttaaattttcctctttttttgagccaaacctaagcaggttttccccctgacttttctgccagaactgcttttgtcaaattaaccattgaccatggcatcgctaagtctgctagtcattttccagtcttcatttttcttgtcataacagcagaacttgacagttggtcattctcttttctttgaaatgcttttgtgtcagtaggcttctgtttgtttgtttatttgtttgttgtgagacagtcttgctctgttgcccaggctggagtatagtggcatgatcgcagctcactacaacctccgcctcytgggttcaagcaattttcatgcctcagccacccaagtagctgcgatgacaggcatgtgccatcacgcccagtcttttgtcagtaggtttctataataccacaatttcctggccttttctccaccttgctggcttttctcagactctttactggatcctcctcttctccccctgcat

SEQ ID NO: 745574 - DNA, 634 bp, Homo sapiens
tgtgtgtatggaaggttagagaacaaaagcccttgaagcagctaggaaatgagccactagagaggttaatgaaaaaccaaaagtcctgtctgctattaaagtagaggggagtggcagattcttatttaaagggaacaagactgaaggtgggacaactaggtaggtaccttacttggtgggacaatcagcatgggaaaaaagcactattctttgcttactgttcaaggtgtctgtcctggggatgtcacctcaccataccaccaaatttatcaaattccttgaggatttggaggaagtcactgcctcaaagtaacagagaaagtaaatagagtaccagttgaaggtgacaattggatttagtaactacggccattgggtggcaatttggatgacctagcaggaatggaagcccarctgcaatagatgagttgaacaagtgggtcaaattagtgtagaaaagtcttcttggcagagaaaaggaggagagagaaggcagagtgcatacaaggatgttcacttaggaaatgctaagggatgtgtgcccttctttcacagtattcatcctatttcatttctattctgtaggttgagtcaatactgtgaaaccacagaatctctgtctctgcttcataaa

SEQ ID NO: 745575 - DNA, 510 bp, Homo sapiens
aatggacctccttccccgtctccagctgggactggcgttttttagtctctggagtatgatggttctcatgggtaggatgagatctttggcagaaaggtcttcggtggtgctctgagcctgcgctgcataggactgagcagacccacctcctccagcttgggtggccctgccactcctggttccaagtctctcctttcctggcaggtcttaagggaagattgtacccctcaccctttacatacccagaatcatcagtatgtcacttcctaatttctatcagtgtatctcattatttcatactgttttactaatcctragtctaaacagatttgctcaaaaggagaccattctattttttaaagtacttagtgatacacgtataagctttgcatggacgaattaaataagcacattgaccttttcttgtacattcagaacctgaacatccatgtgaaaactgggtccatttttgagagatgtgaaactacagtttatttgtaataaataaat

SEQ ID NO: 745576 - DNA, 628 bp, Homo sapiens
aataaatataatctatccgtatatgcatatatctatatgctgtgttaagtggtaatggtacattacagtctgtgagagatggatcgctccctctgtaaggaacaagacgttctcagctgatgtcacggtaggtttagattctgtagagtgttccccaacctgcaccgttctgtacctctcacaccactgcttgcccgggcagtagtggctgaccaataaagacctttacctgttttgtatggcatgggaaggcaatctttggcagtcgtcaccgtgcggcaccaacacatggggagacccgtcatgggcaggttttcygctgtggctgaaggatgacctgggaggggaagcttgtgcctaggggtgctgaacgtggagaccctgaaggactgtggtgcaggccgccctctctgaccactcaggtaggggccacacactcacctggcaccgagggacagctgctccatggccttgctgcagctttggggccctgtctcccctccacgccagtgaagggagtttgttctgtgaggtcatggaaacttggtccagtaccatgctttcaggttgcttccccagcagtactgaggaatacgtcaagggatgttaatatgtaacaacatgaact

SEQ ID NO: 745577 - DNA, 613 bp, Homo sapiens
ggattgtaggaaatacattacttggaaacaccaaaataacagttttttgtcacttcagtcaataagcaatttttttcttgcttcctgtgtgcttattacctgtgatattacaatggagcagatgtattaaggtcaaatagcacatctgaggtttgaatgaaaacacaacaggcggagagagttcatcaccaccaaacagcactctgtaaacttccttgcacttatggtcttgccacacattggcaccttaaccacactgaattgcttttcccctaatctcctgctattctgcctacttaaccgatttccttagcaaggaggcaagagacactgcaagaatgtacrtaagtgccaaggcttaactctgctggagaaaactggccatattttacttatacttcaccttgccttcagaagcccagaatctaatgaggatattccagatgacaaaatatctccatggctgcaactccagctccatcaatgagtatttctacacagagggattgtgggatctaggattaaatttctgaactaatgctaagcagagagaacagatgaggcaccatacgttttcttcacagtataggattgggacgttcctacacattca

SEQ ID NO: 745578 - DNA, 613 bp, Homo sapiens
ggattgtaggaaatacattacttggaaacaccaaaataacagttttttgtcacttcagtcaataagcaatttttttcttgcttcctgtgtgcttattacctgtgatattacaatggagcagatgtattaaggtcaaatagcacatctgaggtttgaatgaaaacacaacaggcggagagagttcatcaccaccaaacagcactctgtaaacttccttgcacttatggtcttgccacacattggcaccttaaccacactgaattgcttttcccctaatctcctgctattctgcctacttaaccgatttccttagcaaggaggcaagagacactgcaagaatgtacataagtgccaaggcttaactctgctggagaaaactggccatattttacttatayttcaccttgccttcagaagcccagaatctaatgaggatattccagatgacaaaatatctccatggctgcaactccagctccatcaatgagtatttctacacagagggattgtgggatctaggattaaatttctgaactaatgctaagcagagagaacagatgaggcaccatacgttttcttcacagtataggattgggacgttcctacacattca

SEQ ID NO: 745579 - DNA, 595 bp, Homo sapiens
ggagtcaggagaggccaggcagtgggagcagacaactcagccttcaggggcaggagggggccttctcgggaccctgagagtgcaaagatgcctggctctgcagctgtggcaaaggcagggctcctgtctgctcccggtccctccaagagcacagggaggcctggtttcgcagccacaacttgggcagctgtagctgacccgggggagctccgccccaccaacttgtaaggggcagggctccacttatccctggctcctactggctctgtggagtgtgcagtcgcagctgtgcctccctgctgcgagcagcatcatggcagtggcctctccagatgagccgctgctgcygtcactaagtttggccgtttgagatgtctttttaggttttcacatttctgatgactgtgactggacctgcaagccagtcctgtggccccacccagcagccgactcagcacaagaggacagcttccattccctatgatttcatctccgacccaaccaatcagcatgcctcctaccttagtcccctgcccactaaactatctttggaaaaccctctaaccttcagggagattgatttgagtaataactt

SEQ ID NO: 745580 - DNA, 626 bp, Homo sapiens
agagagccctggctgcttctgctgttgcctcctctcctaatgacactggctttcccagatgcccacaggagtgaagcctgtgctttcaacttggccttcatcacacctgtggtgcggagagtatggcagctgccactctcgtgttcaacccaaccagacccatggaggctctgcctgaaaatacaggtgttatctgctgagcagcaaacgttaactgatgagagacaggagatggaaagaggtaacagataaagcccttttcctctccttgcagcagacctttctgagatgtggtgctccatagaggttctccagtgccatccagcatggccaaaaacccactgtgcttgcagaagtggcatagcagctggagctgggaatacggttccccaggtttgtgttcctcctcccctccctgttcccacctcactggaaataaagcaagagtcccaaacyttgcctcaggctatgtactctgggaaacctggactaggacaaaacaggtttatgcaaatgtataaccagcatacacaaatactgtttttgtacacttgcatgcacacacgtaaaagtgtgtcatattcaggcactagaccacaactggatcccagtgtaaaacatatttc

SEQ ID NO: 745581 - DNA, 633 bp, Homo sapiens
aatggaatatatatatatatattccattattatatatattagcactggctcctaagttttgcctagaagtgacacatggcacttccactcacacttcattagctaaagcaagtcacatggctacacctaacttcaggaaggcatattagtataattttaccatgtttctcgaaggggaaagaactgtaaatatttagttaacagttctaatgattaccacactgagaatataaacctttggtgagcatacagagcactgggaacactcacccccgattggtagaagtataaatggatacaatcactctggcattatctaacaaagtggcagatactatggtctacagtccagaggccttgagcctcagacttcttttgccagtgctgcagscctgctggtgcttttgtgcttccttctagaggcctgtttcttccttctagaggcctcacctatgacccaggaattgcactgttaagagaaatagatgtttcaagaaaatgtacaaaaatgtacaatagcatccattttcaagaatattcatgacaacatatttcataaaagctccaaactcaaaacaatctaattccatcagtcatagaatggataaattcatataatgaaatcctatgcag

SEQ ID NO: 745582 - DNA, 603 bp, Homo sapiens
ttggcctctgacagagacagatggatgccagctcagcccctgctcaccctgttaggtgggacaatctctctgagcctctgtttcctcatctacaaagtgggggccactacacccacatcaaagtgtgttgtgagtgtgagcagcgaccctgcaaagctccagcccagtgccagacctcgggggacagtagtgtgcacgcacgctccrtgcagcctgagttgatccgcacatgctcagcccagaaggcaggaattaccctgtggcacagcaacagacaagacactgaggccagagatggagagcgaggtgcccaagtggcacaggtagtgcatggcaaggcagggcctcatgcccacattggccagactccagaggagtgtcctgggctgtctgaaggcggaggcttcactactaacaatctctcccctgagagggttgctgcagaggtgtggcgggaagatccttggctgtgggggacacccaaattaggagcttcccaggagatgctaagtaggctggcagtaggagagccgcttccttctcctggggcctctggctccggcagggacaggattagggtctgcaaggggacgatttacatag

SEQ ID NO: 745583 - DNA, 603 bp, Homo sapiens
ttggcctctgacagagacagatggatgccagctcagcccctgctcaccctgttaggtgggacaatctctctgagcctctgtttcctcatctacaaagtgggggccactacacccacatcaaagtgtgttgtgagtgtgagcagcgaccctgcaaagctccagcccagtgccagacctcgggggacagtagtgtgcacgcacgctccatgcagcctgagttgatccgcacatgctcagcccagaaggcaggaattaccctgtggcacagcaacagacaagacactgaggccagagatggagagcgaggtgcmcaagtggcacaggtagtgcatggcaaggcagggcctcatgcccacattggccagactccagaggagtgtcctgggctgtctgaaggcggaggcttcactactaacaatctctcccctgagagggttgctgcagaggtgtggcgggaagatccttggctgtgggggacacccaaattaggagcttcccaggagatgctaagtaggctggcagtaggagagccgcttccttctcctggggcctctggctccggcagggacaggattagggtctgcaaggggacgatttacatag

SEQ ID NO: 745584 - DNA, 629 bp, Homo sapiens
gggcaggcagattacttgagctcagaagtttgagaccaccctgggcaacacggcaaaaccttgtctctacaaaaaataaaaaaattatctgggtgtggtggcgtccacctttagtcctagctacctggtgggctgaggtgggaggattgcttgagctcaggaggtcgaggctgcagtgagctatgattgccccactgtactccagcctgggcagcagagtgagactctgtctctaaagaataaattaataaaatttggccgggtgcagtggctcacrcctgtaatcctagtactttgggaggctgaggcgggtggaccatttgaggttaggagtttgagagcagcctggccagcatggtaaaaccccacctctattaaaaatccaaaaaattagctggacgtggtggtgggtgcccataatcccagctactcaggaggctgaggcaggagaactgctttaaaccaggaagcagagcttgcagtgagctgagatcacgccactgcattccagcctgggcaacagtgcccaggctttatttattgaaaaattaataaaaattggctgggtgccgtggctcacacctgtaatctcagcactttgggaggccaaggcgggtggatcacctgag

SEQ ID NO: 745585 - DNA, 635 bp, Homo sapiens
aagaggtagcgagtggacgtgactgctctatcccgggcaaaagggatagaaccagaggtggggagtctgggcagtcggcgacccgcgaagacttgaggtgccgcagcggcatccggagtagcgccgggctccctccggggtgcagccgccgtcgggggaagggcgccacaggccgggaagacctcctccctttgtgtccagtagtggggtccaccggagggcggcccgtgggccgggcctcaccgsggcgctccgggactgtggggtcaggctgcgttgggtggacgcccacctcgccaaccttcggaggtccctgggggtcttcgtgcgccccggggctgcagagatccaggggaggcgcctgtgaggcccggacctgccccggggcgaagggtatgtggcgagacagagccctgcacccctaattcccggtggaaaactcctgttgccgtttccctccaccggcctggagtctcccagtcttgtcccggcagtgccgccctccccactaagacctaggcgcaaaggcttgggtaagttgacctcctcgcttttctccccgagccaggttctttggaggcttggtagctgatttcagggactgagaatttgaggacatggaatatttgataacc

SEQ ID NO: 745586 - DNA, 635 bp, Homo sapiens
aagaggtagcgagtggacgtgactgctctatcccgggcaaaagggatagaaccagaggtggggagtctgggcagtcggcgacccgcgaagacttgaggtgccgcagcggcatccggagtagcgccgggctccctccggggtgcagccgccgtcgggggaagggcgccacaggccgggaagacctcctccctttgtgtccagtagtggggtccaccggagggcggcccgtgggccgggcctcaccgcggcgctccgggactgtggggtcaggctgcgttgggtggacgcccacctcgccaaccttcggaggtccctgggggtcttcgtgcgccccggggctgcagagatccaggggaggcgcctgtgaggcccggacctgccccgggkcgaagggtatgtggcgagacagagccctgcacccctaattcccggtggaaaactcctgttgccgtttccctccaccggcctggagtctcccagtcttgtcccggcagtgccgccctccccactaagacctaggcgcaaaggcttgggtaagttgacctcctcgcttttctccccgagccaggttctttggaggcttggtagctgatttcagggactgagaatttgaggacatggaatatttgataacc

SEQ ID NO: 745587 - DNA, 554 bp, Homo sapiens
attctgtagcaagcagagccttcagaatggtttcactgacttcagagctgaactgggattcctcttaaaaatacccactgaagagtttcaggacttggtggggaccctggttctggggtcctgctggtttgtatgggagacatggctggccaggaagcccamgtgaaatctccagattctcctctagttatcatctgtctataaaagcctccttctgttggacagcttggtgggcagagagtgagggcaggaagaagctgagatcattacacagaatcagggggtgagcagagagccccgtgtactccgacagcatcagggtcttgctgaaagtcctgctacattagccatgagctggccggccttgaaccctgggtgaagaactccacctctttacccatcatgtccacatgcaaaacatgaggcttgctgtgaaagaatgtctctatcttaatgaaattctccaaatttccaagtcttgccctttccgtgaaataggcatacaggcttctggtgcctctttattccctattcaccctttccctatgtccaca

SEQ ID NO: 745588 - DNA, 618 bp, Homo sapiens
ctccaaagaactacttatctactgggtgcagctgaaccatttccataactgagatcatgtaagtcaggaatgtatacacattacacatgtgtgcagacaaaagttcatgacttcacctaccaggtccaagacgagtctccttaggaatgcctgcatacaagcctggcccttggctggtgtctgggaacttggctggtaaaatcattgcctacactaatataaattttttctaaatgagaaaagtagctcacttctcctaaaacatctgytttccttctaggtatctggaatttcagtgactgctatcagtcacactgacagtctgtgctcatgactaacccctgataaaaaccctaaactcttaagctcagacaagcttccctgatagacaacacttcacacaagtttccataccttgttattcagaaaattaagtgcatcctatgtgactccacaaggagaatattctggggagtttgtatctgatttcccttgttgattttgctttctaccttttcagtctaccatatcttagccatgaatgtgactacctgctgaaccccatgaatccttctatccaatcgttgaacctgggagagctctgacaaaggctagcat

SEQ ID NO: 745589 - DNA, 457 bp, Homo sapiens
ctcccatgccacataaaacatttattatgcttttctcctgttgatctttcttatgttagtttatttctcagacacagctggagcctgtgaggataaaggatggaagtagaagttttccttccttacagtttctggcaatgaggatgggaccctaagaggctggacaccccactcactccagcctatggatgagatgctgaraggcctgacaaaagcctgcaaaaggtggggggattctttccaaagccagctttcccaaatatctatggatagtgcctagctaagagaagaaggtaaaaattttttcttgtcccttcttttctaaatttgaattggcaggagaaaaacatttgtaaggttgttctctgaattgtgactcttgtgaatttggttctaggttctaacagaaatcgctctttttttttgttttttaatctctgtcttctgtgtgatttac

SEQ ID NO: 745590 - DNA, 621 bp, Homo sapiens
tattacaaaaataaccatgtaagaacctttaaaaagtataattctatttacttgctgtcctttgctttcttctggtcatgtattttatttacttataggtaacgacacaaaatgtgttactatttttgctttaaacagtcacaagtttttaaaatatgaatagataggtaggtagatgatgatagatatgtaggtaggtagacagatggtaattttttaaaaggtcttttatacttayccagatatttagtcatttatccactctaataattttcagttctccttgtagattcaggctttcagcaagaattcaccttgaaaactttccttgtctcttatagtatgtatttgctaaaaataaacactctcaacctttctcatcttatttcaccctcatgttgaaagatatatttgttgaacatagaattctagattaagagttgctttccttcaatactttgcagatattgcatcgtcttaaggcagtcaatattttagttgaaaactcagacatcatacctaaggttgttgcctgtgtgaaatgtctttttcctctggctgcttttaagatttaccctttatccttgtttttcaatagtttaatcacaaaatgcctcaacg

SEQ ID NO: 745591 - DNA, 621 bp, Homo sapiens
tattacaaaaataaccatgtaagaacctttaaaaagtataattctatttacttgctgtcctttgctttcttctggtcatgtattttatttacttataggtaacgacacaaaatgtgttactatttttgctttaaacagtcacaagtttttaaaatatgaatagataggtaggtagatgatgatagatatgtaggtaggtagacagatggtaattttttaaaaggtcttttatacttatccagatatttagtcatttatccactctaataatkttcagttctccttgtagattcaggctttcagcaagaattcaccttgaaaactttccttgtctcttatagtatgtatttgctaaaaataaacactctcaacctttctcatcttatttcaccctcatgttgaaagatatatttgttgaacatagaattctagattaagagttgctttccttcaatactttgcagatattgcatcgtcttaaggcagtcaatattttagttgaaaactcagacatcatacctaaggttgttgcctgtgtgaaatgtctttttcctctggctgcttttaagatttaccctttatccttgtttttcaatagtttaatcacaaaatgcctcaacg

SEQ ID NO: 745592 - DNA, 621 bp, Homo sapiens
tattacaaaaataaccatgtaagaacctttaaaaagtataattctatttacttgctgtcctttgctttcttctggtcatgtattttatttacttataggtaacgacacaaaatgtgttactatttttgctttaaacagtcacaagtttttaaaatatgaatagataggtaggtagatgatgatagatatgtaggtaggtagacagatggtaattttttaaaaggtcttttatacttatccagatatttagtcatttatccactctaataattttcagttctccttgtagattcaggctttcagcaagaattcaccttgaaaactttccttgtctcttatagtaygtatttgctaaaaataaacactctcaacctttctcatcttatttcaccctcatgttgaaagatatatttgttgaacatagaattctagattaagagttgctttccttcaatactttgcagatattgcatcgtcttaaggcagtcaatattttagttgaaaactcagacatcatacctaaggttgttgcctgtgtgaaatgtctttttcctctggctgcttttaagatttaccctttatccttgtttttcaatagtttaatcacaaaatgcctcaacg

SEQ ID NO: 745593 - DNA, 542 bp, Homo sapiens
cccttccatgctgactttgaaatggaaaagttggggccttgtgcagtgcctggcacctagtaggtgttcatgaatcttggaaagctcactggctgattcttcaaaagtgttattccacaactgcaactcttcatttgcttatttatccttccaactagagtataaggtctttgagatcaagagcacaactttattgcaccttgctaaacgcccattgcctagcatgtagctggcactcaaaatatgtcctgatacacgggatacacttacgtttaatgaaaattagatgtcctgagccagaaacagggcccagagctaaacagacaactcaatagacacaatatttttaaaagayagttgcagagagtgtgtctccctgtgtttggcagatggagtattacacaactcaatactggttttcctgactagaccttaattagtacagtgagggcagttggtcaaaagaaacttgtttctggcaggaaaagactgatgatagaaatagcaaaaacatattggcacttaactccataccagacact

SEQ ID NO: 745594 - DNA, 496 bp, Homo sapiens
ggatttttttccttgtatttcctcctttttcatttatatgcaaataaagtttggattaacatggagaacaaatttgaaaaaaaaaactacagaggaaaagagacattataaaagtgtcaaaggcagctttatttttttttcatatattcattcattcattcacaaattgactccctcacacaccctatgttaacacacggacagcaggccagtagccagtcagaccatgttctaggcagtacgaggtggtgatagaaagggtcatctarcccttgaggagctcataggctggaggagaagacaggcatgagcacagaactcagcacaatataagtcaagctgaaggaaagagtgtgaggcaggagaactcaggggaggaatttctcctccagcctaggttagagaggtcacacttcttagaggttgttctgtctaaaactccaaaggaattgtgacaggacatcccaaaaagacaagactgcatatacaatgacaa

SEQ ID NO: 745595 - DNA, 650 bp, Homo sapiens
agcttcaattttatatatgactgaattttagccaagtcacaaatggtagtttttgaataactactagataatactgtttctgtcacaatgctattataattaattttatcacttttaaaatttattatgtgttttaatgtccattgtattttattacagacaatttatctactctcctgaagatgctgcaacttataagccatatctataggaattaatttattgataaaattattggtcttttataaatagacaaaccagataatgtaaaatcttgaatgacaagttatctttatgagtatgaattaacttattctaattaataaataacctcaagcctaacaaaaatacatgtctttatttttttcaaagttcatgtaacatatttggcagcatgctgattaaataagaaaatatcctcttaaaataaataaaatattttataagaagtagtcactttttaagaaattatacatagtgtggagtytaattgagagtttaaacagatatcatgtattgaaagctacaaatatatatctcttatgaactaatgggacaattttcttttatataggtaacacatatccaattaaaggagtagagaaacagaaataaattaataagaacaatacacttattttcccataata

SEQ ID NO: 745596 - DNA, 543 bp, Homo sapiens
gcaaaaaagtaaagttgaattcttaccctatgcacatacaaaaattaacccaaaatgaacaaaaggaaagagggggcaaaataagatgaccaaatagaagactccaccaattattcccctgtcaggaacaccaaattaaacaactatctatacgaaagcaccttcataagaattaaaaatcaggtgagccatcacagtacctgattttaacttcatatcactaagataggcactgaagagggtaraaaaaggccatcatgaaatgccaacaccatctctctcccatgctctggcagtggccatgagaagtggagacgaaatctgaaactcaatgttgctctgctgatatggttttgctgtgaccccacccaaatttcatttttaattgtagctgccaaaattcccatgtcatgtgagggatctggtgggaggtaattaaataacggatgtggttctttcccatgctcttcttgtgatagtggataagtctcatgagatctgatggttttataaataagagtttccctcccaagctttttctct

SEQ ID NO: 745597 - DNA, 619 bp, Homo sapiens
tatgtttggggtgggatgctggagattaggatgggtattgagatatgtcatatacagaatactagtgtaagtggtagaaagttttttttgtaagaggtgtatgagttgatcgttgcggaaacagggatatgctgtttgaattcataaaaataggttaagaggaaggtcttggtaatgaaatatgtagtatagagtttggtgaatatatagtgtgtaatgttcctagaaaaaatgtagtagttagggcatttattacrataatattcatatattctgttataaagaagagggcaaatggacctgcagtatattcgatgttgaaacctgagactaactctgattctccttctgttaggtcagaaggggctcagttagtttctgctaatgtggagataaatcatattatggctaggggtcatgatggtaggagcagtcagagggactcttgtgttgtgatgagtgtatataaattgaatgagccgcttctcagtaggactgataacaggatgatggttagggtgacttcatatgaaattgttcgggcgacagcttgtaatgcaccgattagtgcatagtttgaattggatgcccatcctgatcatcaaatagagtagatggc

SEQ ID NO: 745598 - DNA, 624 bp, Homo sapiens
cataggtatacatgtgtcaaggtggtttgctgcacctatcaacctgtcgtcgaggttttaagctctacatgtgttaggtatttgtcctaatgctctccctccccttgcccccaatcccctgacaggtctcagtgtgagatgttcccctccctgtgtccacatgttctcattgttcgactcccacttatgagtgagaacatgcggtgtttggttttctgttcctgtgttagtttgctgagaatgatggtttccagattcatccatatcccagcaaagaacatgaactcattcttttttatggctgcatagtattccatggtgtttatgtgccacattttctttatccagtctatcactgatgggcatttgggttggttccatgcctttgctattgtaaatggtgctgcaataaacatacatgtgcatgtgcctttatagtagaataatttataatcctttgggtatatacccagttaygggattgctgggtcaatatttctggttctatacccttgaggaattgccacactgtcctccacaatggttgaactaatttacactcccaagaacagtgtaaaagtgttcctatttctccacatcctcaccatcatgtttcctgacatt

SEQ ID NO: 745599 - DNA, 651 bp, Homo sapiens
tgcaactcaaagctctggaagaaactcttttcttctacttgtggagagggaagaggagagtaaagaagactttgtcttgcaatttggataccatctaagccacagtagaatatggcaccaggaatggttttaaggcccccattccaagacttaactcctgggtgacagttctaggcacmcccggggacagaagagaacacactgccttgcagggaaggacttagtcctggcaggattcatcacctgctgactaaagagcccttgggccttgaataaatgttagcagtaatcaggtagtacttgctgcaggcttgggtgagacccagagctgtgctggcttcaggtatgacccagtgcaattcaagctgtggcagccatgtggagagactccttgcttgaagaagagagagggaagaggaaaggggactttgtcttgaagcttggttaccaactcagccacagtggagtagagtaacaagagggctcctgaggtccatggtttttggccttggctcctcaatggcatttctggaaccaccctgggccagagaggagcctactgttttgaaggaagagatgcaggcctgtcagaattcaccacaagctgactgaagggcccttgggtcctcagtaaataccagcagaagcctg

SEQ ID NO: 745600 - DNA, 576 bp, Homo sapiens
ctgaaaccactcaaggttaaccctaggaccaaatgagaagggggcgctgtggggaggcagggtcccaggaagagtaaccattcctgaaggctatttttaagtgaagcacatgagggacgtagacaaatttaaaaagaattcacatacgcatatacacagaaacacakgagcatgatagttctattcatataatgcttattgctatatacatctgtgttctgtgtgttataaatttacttttagaaactaaaaactgatttataagtctttgaaaaagacaaaatattttataatattactgtgtttctccccatttttctgtgtttctgtgttctgtgtttctccccatttttcactccacagattggtctacaaatggtttcttttgatctacaaactcagctatgcatttggtgttgtgggttacttggcgatcatgtttacaatgtgtggattcaatctgtttttcaagtaagtatctccaattaagacattaatatctccaagcacttgcttggcgcactcacctggtcatgttctcttaatccagaagcatctggccctacaattttccat

SEQ ID NO: 745601 - DNA, 593 bp, Homo sapiens
atttggataaattagatgaggtgggctaattctttgaaagacacaaactataccaaaactcgcacaaggagaaatagatgaactgaataggcctatatcaatttaaaatttcaatcaataattaataaccttccaaaaaagaaagcaccaagcccaggtwgtttcactggtaaattctaccaaacatttaaagaagaaatgataccagttctctacaatctctcccagaaaatagaaacagagggagtacttgcaaattcattcattgaggccagcattaccctcataaaaaaaccagaaagacaaagttggaggactgacactgcccaatttcaagacttaccatatgaagacattacaagaaaaggaaactgtagaccaaaatctctcaaaaacataaatccaaaaatcttcatcaaaatattagcagagcaaatccaacaatgtataaaatgaattatacaccacaatcaagtgagatttattccagatatgaaaggctgactcaacaattaaaaatcaatttatgtaaataatcacatcaagaggctaaagaagaaagtcctgtgatcatatcaatagatgtagcagaa

SEQ ID NO: 745602 - DNA, 593 bp, Homo sapiens
atttggataaattagatgaggtgggctaattctttgaaagacacaaactataccaaaactcgcacaaggagaaatagatgaactgaataggcctatatcaatttaaaatttcaatcaataattaataaccttccaaaaaagaaagcaccaagcccaggtagtttcactggtaaattctaccaaacatttaaagaagaaatgataccagttctctacaatctctcccagaaaatagaaacagagggagtacttgcaaattcattcattgaggccagcattaccctcataaaaaaaccagaaagacaaagttggaggactgacactgcccaatttcaagacttaccatatgaagacattacaagraaaggaaactgtagaccaaaatctctcaaaaacataaatccaaaaatcttcatcaaaatattagcagagcaaatccaacaatgtataaaatgaattatacaccacaatcaagtgagatttattccagatatgaaaggctgactcaacaattaaaaatcaatttatgtaaataatcacatcaagaggctaaagaagaaagtcctgtgatcatatcaatagatgtagcagaa

SEQ ID NO: 745603 - DNA, 552 bp, Homo sapiens
tagattgtttttaagcaacatttagcttaaaacacaaactcacgtacagctggacaaaaatattttctttttaaatatccttactctataagcttttttcattaaaaaattatttttacttttaatttttttttgttaaaaacmaagacacaaatatacacattagcctgggtctacacagggtcaggatcatcaatatcactgtcttccacctccacatcttatcctgctcgaaggtgttcaggggcaataacacgcacggagctgtcatctcctatgataacagtgccctcttctggagtacctcctcaaggaactgcctgaggctattttagagttaacttaaaaaaaataagtaggagtacactctaacaataaaaagtatgtaaatacataaacccagtaatagtctattatgattaagtgttatgtactatacataaatatatatgctatactattgtaagactggcagtgcagtaggattgtttacgtacagcgtcaccacaaacatgagcaatgcattgtgctacaacgttctgatggctatga

SEQ ID NO: 745604 - DNA, 557 bp, Homo sapiens
tagtgcttagcatgtggtaaatgatgatcagtaaatgatgagaaatggagactggaatctattctattctcatgcagtgtctttgttgagagaccaaattgtagataaagagtaatgaatttttaagtgtgtattaggttggcaatttgtccactcccagcttattcaataaaatcattcaaaactatgtacctttttttttttttttaaatagaaacttaaggaaactgggcacagtctccttcatatcaaatctcatgttcacagtgcttgttttacaagccatagttgtagagctaattggacaattaacttggggggagcatacttcctaaccttagaattaacaacagtggmaaacacattagaaaactccaagggtgagtacagttgcaaaataggcccttgatggttatttcagaaactctgcactgagcacacatagtgacttggaagcacttgtatagctttctgttgcttgaatagtccactcagatttcagaccctgctaggaatcatcaaccagctctgggtaaaggactgaatcagaatggctg

SEQ ID NO: 745605 - DNA, 567 bp, Homo sapiens
gtatatatcatgtcttttttttttttttttttttttggagggggccttgctctattgcccaagctggagtgcaggggcacagtcatagctcactgcagcctccacctcctgggcttaagcaatcctcttacctccatctcccraatagctgggaccacaggtgtgtgccaccatgcctggctaatttttattttttgtagagacagggtctcagaagttatccaggctggtctcagattcctgagttcaagcgatgcacccaccttggcctcccaaagtgctgggattacaggcataaaccaccacatccagcccatgtctgtattaagttgattatatacaaagcagtttaatgggtcaattaagagcccaaccttcgcatcagcctgtctgggtacaaagagcttgttagctataattctggacaagtaaccaatctttcattttccccatacataaactggggaaaaaaattctacccgtctcatttggttattaataaacattaattaacagataagcattaataagaattattaattataaataagtattaataagaattaa

SEQ ID NO: 745606 - DNA, 611 bp, Homo sapiens
gggtggatcccttgagcccaggagtttgagaccagcctggcaacatgatgaaatcctgtctctataagaaatacaaaaaataggcaaagtcgtgtgcacctgtagtcccagcaacttgggaggctgtggtggggaggattgcttgagcttggaaagtcgaggcttcactgagctgtgattgtaccactgcactccagcctaggtgatagagcaagactctttcaactcagagcgagwgagagagagagagagagagagagagactgagatcctcaataagattaacatgaattatcagcagaaaccatggaagccagaaggcaggaggatgacatattcaaagtgctaaaagacagactgtcagccaagaattctatgtatgcagaaatttgtagtatgcaggaatactatgcttttatgcctcgaaaatgaaagagaaagtaagatattctcagatatacaaaaattgagaatttttttcactagcagacctgccctgcaagaaatgctaaagagaatatttcaggctaaaatgaaaggaccatacacatgaactcaaatccacatgaagaaataaagggcactggtaactacataggtatattataaag

SEQ ID NO: 745607 - DNA, 601 bp, Homo sapiens
gggctggctggccaggtctgggagtgaggctgtgcagtcaaacggaggttgtgcagatgcctggggcgttagggcacctcgcgggctgcctatgccataggtgggagggatcccagctggtggcggagctggcgtgagtctgaagaggctgaaggaggccagggctgggggatatgagtcgtctgagagaggggcattgacggcgagacggagagttggctgtgtgagacagagacagagagatagagacatagagacagagagagagagagagacagagaaagacagagagagagagagagagagagagagtgtgagtgtgtgtgtgtgtgtgtgtgcgtgcgcgtctgagtgtgtgtgtgagtgaaggggtgggtggcgtgagacmaaggtgggggagggagggctgagcctgaaggctggtgggaacagtacattttcagccggttggtctgggcaggaacgaagtctgtgtggtcaaaggggacccgcgccggcgagactgggatgctgcttgggctgggcggtcagagtatggagtggggctggggtgaggtggcaagcagcccagggtgggagagacatcgtgacagagcgactg

SEQ ID NO: 745608 - DNA, 593 bp, Homo sapiens
aggcggtgaaatgtgaagagaaggggtggtgcgagtggctgcaagcccgtggtgcctggcggtgttccgtgaagtgaaatgcgtcgggcagaggcggtggcagggcaatgaagagaaacaggaccaggaggctgccaagttctggtgtctggcgcgctctcgtgtctggaggggttgttgtcaccaaggtgtgtgggtgcgkggggtaggctcatccctaagtcagtcgagagaggcacggaagaaagggcagagggccgtcgcgcgtgggagcgcagccggtgccggactcgctcgcgcgccccgagtgtaaggaggcggcagaggcgagcgcagctacgccttggtgctgctgcagcaccaaaatgggagggcgtgctgcatgggccgggaatcgaacccgggcctcccgcgtggcaggcgagaattctaccactgaaccacccatgcaccgatggcaaacgccaacggaagctggcacagcggaactcgccaccagccgccgttcactggtcaccgcctgccgtgggcctccgtcctattgcagcgtccacgagaggctggcccgatggggcgagcagaaggggaggctc

SEQ ID NO: 745609 - DNA, 586 bp, Homo sapiens
gaaatgtgaagagaaggggtggtgcgagtggctgcaagcccgtggtgcctggcggtgttccgtgaagtgaaatgcgtcgggcagaggcggtggcagggcaatgaagagaaacaggaccaggaggctgccaagttctggtgtctggcgcgctctcgtgtctggaggggttgttgtcaccaaggtgtgtgggtgcgkggggtaggctcatccctaagtcagtcgagagaggcacggaagaaagggcagagggccgtcgcgcgtgggagcgcagccggtgccggactcgctcgcgcgccccgagtgtaaggaggcggcagaggcgagcgcagctacgccttggtgctgctgcagcaccaaaatgggagggcgtgctgcatgggccgggaatcgaacccgggcctcccgcgtggcaggcgagaattctaccactgaaccacccatgcaccgatggcaaacgccaacggaagctggcacagcggaactcgccaccagccgccgttcactggtcaccgcctgccgtgggcctccgtcctattgcagcgtccacgagaggctggcccgatggggcgagcagaaggggaggctc

SEQ ID NO: 745610 - DNA, 605 bp, Homo sapiens
gcatgactatgtttttcttcatgcggacatgatatccatgggattcctgtgacgtgtggtaacgcgtgtacatcgcgtagtgatcgatggtcaactgaggggatgtagggcatccatcccgtgggtatctgtcatctctacctgttgggagcatctcaggtgctgtcttccaggagctcttcggaaacaagcactaatacatcgttgttacccctagtcgccctacyccgccgtagaacattattggaacgtattccctccatccaaacgcatgctcggacccatttcaccaacctctcttcaccgcagtcacccacacaccctctccagcctctggtgtctatcgttctactctctacctccacaaggtgaacattttgagctcccaggattggagtaagaacctgccctctctgtctttctgtgcccggctcgtttgatgttccatcgtgacctttagctccgcctctgttgctgcagaccagaggatttcgttcttttctatggccaaagagtattccatggtgtctatatgccacatttttgttaatccatttcccggccgatggacacttaggttgtcttagccacatcttccctacctg

SEQ ID NO: 745611 - DNA, 600 bp, Homo sapiens
gcatgactatgtttttcttcatgcggacatgatatccatgggattcctgtgacgtgtggtaacgcgtgtacatcgcgtagtgatcgatggtcaactgaggggatgtagggcatccatcccgtgggtatctgtcatctctacctgttgggagcatctcaggtgctgtcttccaggagctcttcggaaacaagcactaatacatcgttgttacccctagtcgccctacyccgccgtagaacattattggaacgtattccctccatccaaacgcatgctcggacccatttcaccaacctcttttcaccgcagtcacccacacaccctctccagcctctggtgtctatcgttctactctctacctccacaaggtgaacattttgagctcccaggattggagtaagaacctgccctctctgtctttctgtgcccggctcgtttgatgttccatcgtgacctttagctccgcctctgttgctgcagaccagaggatttcgttcttttctatggccaaagagtattccatggggtctatatgccacatttttgttaatccatttcccggccgatggacacttatgttgtcttatccacatcttccct

SEQ ID NO: 745612 - DNA, 508 bp, Homo sapiens
gattgggctccacgggtgtcagcggctttggtagtaatggcagcggaacttgaggagccgagaccacgggccatagcgctagggaggcagagctgcgacaatcaccctggcagcatgactatgtttttcttcatgcggacatgatatccatgggattcctgtgacgtgtggtaacgcgtgtacatcgcgtagtgatcgatggtcaactgaggggatgtagggcatccatcccgtgggtatctgtcatctctacctgttgggagcatctcaggtgctgtcttccaggagctcttcggaaacaagcactaatacatcgttgttacccctagtcgccctactccgccgtagaacattattggaacgtattccctccatccaaacgcatgctcggacccatttcaccaacctctyttcaccgcagtcacccacacaccctctccagcctctggtgtctatcgttctactctctacctccacaaggtgaacattttgagctcccaggattgga

SEQ ID NO: 745613 - DNA, 613 bp, Homo sapiens
ttccaggagctcttcggaaacaagcactaatacatcgttgttacccctagtcgccctactccgccgtagaacattattggaacgtattccctccatccaaacgcatgctcggacccatttcaccaacctcttttcaccgcagtcacccacacaccctctccagcctctggtgtctatcgttctactctctacctccacaaggtgaacattttgagctcccaggattggagtaagaacctgccctctctgtctttctgtgcccggctcgtttgatgttccatcgtgacctttagctccgcctctgttgctgcagaccagaggatttcgttcttttctatggccaaagagtattccatggggtctatatgccacatttttgttaatccatttcccggccgatggacacttakgttgtcttatccacatcttccctacctgcacgtccttcataggctctctgcaagaagaaaaatatggctctttctgcccgacctcgcaggcagtcagaccttaccgttgtcttcccctgttccctaaaagtcgctgttattctattctttttcaaggagccctgatttcatgctgttcaaacacacacgttttaccatcaatt

SEQ ID NO: 745614 - DNA, 717 bp, Homo sapiens
tcacataacatggaaaatgctatttaaacaatagaaaactcctaaataaaaattttaagaaccttacatttattttcatgtatactctgaaatctaggggctgtaatggttaattttatgtgtcaacttgactgggctataggatgcctgggtgtgtctgtgagggtgyttctgaaagagactggcatttgagttggtagactgagtggagatctgccctcaccaatacaggcgggcctcatccaatccaatgaaagcctaaatagaagaaaaaatggaggcaggggaaatttgctctgtctgcttgagctgggacctctgatttttaccttccctcaggcttcagtattcctggttctcaggtcttgaaactggactgggacttataacactgattgtcctgggtttcaggcctctggtttggactagaactacattgctagctttcccggatctctggctcccagatggcagctcatgggatttatcagcctccataatcacataagccaacccatcaaaataaatctctttctatataactacatgttaatatatcctgctggttctgtttctcttgagaactatgactaatacaggggccacaattatgacaggatttattcttatattaaacaaattatttgtctttttaaatttagatttaatttaaatattgtaaaatatacagctcttaagtatacagtggcatgagtt

SEQ ID NO: 745615 - DNA, 544 bp, Homo sapiens
caagagagcagcattacaggaaagggatcccggtgctagctcccggaaaggctaggctcttgtcattttaaggaagctgaggcgggggaaaagagccacatgtgcatgtttacgtgggttcttctctgtgcctgtgttgtgaggcttcacgccctaaagtgcgtcccatgcacagaaaaaggataamgcctagggtggataaagccccgccttaggtgggctcagtattacaataagattataatgagaagaaagtcagtcctggagttctcgtcgcctgccagccagatctggtcaggtttttatcaggaaaaccagagtcccgattcagcaacctggaagacattactcaaggagattaacggttaggttcttccttttatagttagaaattcggcttggtcagctaagttgggaaggcggctttctgctacgtggcttaggtcagcttaagagaggcaagaaggtagggcagagaatatgcccggacatgtgagacctactgggattctgatcatcatgtctcttgtctgccaggaccgac

SEQ ID NO: 745616 - DNA, 636 bp, Homo sapiens
ttgtgttgaaagtgttatatgtttattttctattctgtggaacagtttattataatttttttctttcatttctatttatcacatccagaaatatactcttctttctttcttttttttctctccaacaaactcatatcaaatatttgagtaagcacccatttctgataactgtatgatgtggtaagtatggttaccatatgatggcagaaatgagattgctggatcatatggtaattctatttttagttttttgaagaaactccatacagttttccgtaatggstatactaatttgtacaatttcaccaatagtgtacaaaggtctccttttccctacattgccaacacctataagactaaaaaacttgagtttaattttttaagtacaatacaacatatagaagagtttaaaacagaagtttgaaacaatcttacttgtttttctagttactgcataataatggattaaagagaacaagaagtagtttgagtgagggatggggaggacttggacttacgtaatagtagcatcacgttgagaagtagtttgattcttaaataaaagtaaagacaaggtaattagatgtggagtgtaaagaaaagagaggaacaaagatgattccaaagatattggct

SEQ ID NO: 745617 - DNA, 533 bp, Homo sapiens
ggggatcaccttatgagaaggcaagcatgatactcagagaacgctctctggggcacactctttcctcaagtcagagtttcaaagtaatcttatgttgtttcatgatatcacacccaagtagacttttctaggctcttattagagaactaatacagttctgtactttgttttatggccactaaaagcaaatattgcagctcggtattttcatagarttccatttctgatcatcttgctaaatatatcaattattgtcggtacaaaaatcttgctttcaaatatttgataacaaagagcttaagcataaactattatttcttagttgtttatagagatttgaactaaaaataagatttgatatctcaaaatggcatactagtaagcaggtaaaatatttaaaggcaaaagcacagctgcaatgtgaataagatattattagacatgtccttgatctttagctttattacaagttggagactgttaatttttaatataattcatttcaaatgacagataagatagattgtttccaa

SEQ ID NO: 745618 - DNA, 589 bp, Homo sapiens
tcaggggaaacgtcaggggtaaggattctggctaaattgaccaaataatattcttactgaagctaggccagagtgacagacatcacctaggggataaggtgaggtgaggaatctgattagatattgaaggtggtcacttaccaataggattcaggattttaactaaactgacttagcaggattcttgytaaaattggtcagtgtagaaatgaacatgggggcccagatgtcaggatctgcttgagaagagacttcagaaaaagactgattcaaatttggtcaaggagcgaatctttgttagtccctccatcttattcaaagaaagaatatatatttttcttttctgtgaagaatataagcccattttttcattcagtcacctccagtttattaagaagtagatgaatcatctgataggaattggtaataaaggtacttgctggatggcatgagcagtcaggcatttaatgaggaaagtttctatgaaaatttaaaaaaaaaaaagattaatacttagaaacgcagtttctgaggccagagggaagccagtctagatttctattgataggtgatgggctggaagcctctt

SEQ ID NO: 745619 - DNA, 631 bp, Homo sapiens
tcatcagctctcctgggtctacagcttgcagattgtgggattagcctttataatcaaatgagccaatacttataaataaataaataaatgtctatttatctgcagaaacctaacacactgtactctaccaaactttaaatttcagctaaactgaactgttttcagtttccccagaatatcttcttctcacacatctctgagcttcaaacattcttttcttgttgttattgcagcctttgaaacattaacacacacatgcacaygcatatatacctctttatttggctaatattcaacttaacatccccacactcccactctcctaaattataagccgcaaatgtgcacgaatctcccccaaagttgtcgttttattttaaatttagcatattttcagactaagctccaggataggtaataaaaaattatgttttattcaacaaatatgataatggtgatgattgtgatgataataaccaatgataatgtctgttatttactgagtgctcactatatggaaggttttctgctaagtattctctctgcatcatttattttaacctgcccaagcatttcaaagaatattattccattatttttagatgtgaaaactaagaattaatatgtttaa

SEQ ID NO: 745620 - DNA, 498 bp, Homo sapiens
acaggacagatttaccactttatacccactcaagtgcctttaatcaaaataccagacaataacaaatgttgacaaggattgtagagcaaaacaaaccctcctacgttgttcatgcaagtgaaatattggtgcaaccactttgaaaactattatgaaagtttctccaatgttaaacaaaatttaccacacaagyccacaattacacttctaggaatctccctagaagaaataagagaaataaaaacatatgtccacacaaatgaggcgtgtgatgttgttactaattgacaagaagtagaaacaattcagatgtccatcaacttgtaaatagataacaaaatgtattacatttttacaatgaaatattgctcaacactgaaaaggaacaaactcctgatacatgctacaaggatatacctcaaaaacatgctaagtgaaacaagccatatgtaagccatcaaatactgtatgattccatttatgtgaaatgttcagaaa

SEQ ID NO: 745621 - DNA, 604 bp, Homo sapiens
gtgagaatgtggagaaaagagaactcatagacacttttggtgggaatataaattagtacaacctctatagaaaactgtatggcaatttctcaaagaactaaaaatagacctaccattcgacccagtaatcccactgatgggtatctacccaaaggaaaagaaatcatcttatcaaaaagacacctgaatccatatgtttagtgcagcactattcataatagcaaagatatagaatcaacctaagtccatcaatagttgaatagataaagaaaatgtgagatatatatatatatatatatatatayacacacacacacacacacacacacaatggaatactcttcagccattaagaaaatgtagtgatgtcttttgcagcaacatggatggaaccagaggccattatcttaagtgaaacaactcagacccagaaagacaaatatcatatgttcttacttataagtggaagctaaataatacatacacaaggacataggctatggaatcatagtcaatgaagacttggaatggtggtgggattacagggggatggatgagaaattaatgggtacagtgtacattattcaggtgatatatggcataa

SEQ ID NO: 745622 - DNA, 435 bp, Homo sapiens
aattctagacacctggatttgctggcttcttttgatattgccaagtcaatgtctgataaaaaataacttcaagaatccttattttcccctaacaccatagcaccatgattacaagtccctttggggtaatagattttatgaaactttaraaataattggaggaagttatagtctagagaaaaaaattccctaaaaactgtaaattgaggtattatatatgatgatccttataatccacattcaaaagacattctacttttttactgcttgtgagattaaaaacatttccctaggtttatttgacttttatatacctatttttgtaaattttctgaaaatttttttccattggtcaatttgtatgtgtttactaaattgtaagaacataaattttgagacataatctttgtcatacatcttgcaaatgttttaagt

SEQ ID NO: 745623 - DNA, 545 bp, Homo sapiens
cacagaatctttattttttaaaagagcttgtatatatatatatatatatatatatatatatatatatatatagccttttgcttatattgagttgtcttcttttattgctgatttctacaatatagaaatatatacatatatgtagaaatctacaataagacaactgaatataaacaaaaccaagcaagatgtttgaatagatactccacaaatgaaaacataaaaatggcaaataaacagatgaatagggaatatgtcatcaaataatgaaatcacagccacagtgagatatattttcacacccaatagagtggctaaaaaaaaaaaaaaaaaaaaaaaaaggatggccaatgtcaaatgctggcaagcwtgtggaacaatgggagctctattaccttgctgccaggagtgtaaagtggttaaaccacactggaggactatttagtagttctgataaaggtaaacatagatctaccttaaccctatgtcttagctagtctactctttggcatttcctcaagatatacaaacacatatgtgcacct

SEQ ID NO: 745624 - DNA, 545 bp, Homo sapiens
cacagaatctttattttttaaaagagcttgtatatatatatatatatatatatatatatatatatatatatagccttttgcttatattgagttgtcttcttttattgctgatttctacaatatagaaatatatacatatatgtagaaatctacaataagacaactgaatataaacaaaaccaagcaagatgtttgaatagatactccacaaatgaaaacataaaaatggcaaataaacagatgaatagggaatatgtcatcaaataatgaaatcacagccacagtgagatatattttcacacccaatagagtggctaaaaaaaaaaaaaaaaaaaaaaaaaggatggccaatgtcaaatgctggcaagcttgtggaacaatkggagctctattaccttgctgccaggagtgtaaagtggttaaaccacactggaggactatttagtagttctgataaaggtaaacatagatctaccttaaccctatgtcttagctagtctactctttggcatttcctcaagatatacaaacacatatgtgcacct

SEQ ID NO: 745625 - DNA, 624 bp, Homo sapiens
atgcatacgtatatgcatatacacacacatatatataagaataagtgaagaaaagaccaaagttaaagaagacacactacaaaacaactgaaataaaagacaaaataatttttaggagaaaataaaaaccacccaatattttggataggaagaaagctgccatgtcacaaaactgtaagttgctcaaaaattaccatgaaataatttcctaaataggttgaattttaacttcatatagaaaaataaatctagagatcaacaaaggcaaactaaaaagaaaaaaaaaatcagcaaattagtaatttcctcaccctaatagagaaaatccacaatcaatatactgcttttacattgatataggagtaggacagacttctcaacttcagcattattaacattttgggctagataactaytggggagagtctgccctgagcatagtaagatatttggctgtaactccccgctgctaactagacaacacaggaacccgcctgtttgaaattatatatatatacacacacacatatatatatatatataaaatacatatatacacacacatatatatatatatgtaagtacatatatatatatatatacacgtgtatgtgtgtatatata

SEQ ID NO: 745626 - DNA, 624 bp, Homo sapiens
atgcatacgtatatgcatatacacacacatatatataagaataagtgaagaaaagaccaaagttaaagaagacacactacaaaacaactgaaataaaagacaaaataatttttaggagaaaataaaaaccacccaatattttggataggaagaaagctgccatgtcacaaaactgtaagttgctcaaaaattaccatgaaataatttcctaaataggttgaattttaacttcatatagaaaaataaatctagagatcaacaaaggcaaactaaaaagaaaaaaaaaatcagcaaattagtaatttcctcaccctaatagagaaaatccacaatcaatatactgcttttacattgatataggagtaggacagacttctcaacttcagcattattaacattttgggctagataactactggggagagtctgccctgagcatwgtaagatatttggctgtaactccccgctgctaactagacaacacaggaacccgcctgtttgaaattatatatatatacacacacacatatatatatatatataaaatacatatatacacacacatatatatatatatgtaagtacatatatatatatatatacacgtgtatgtgtgtatatata

SEQ ID NO: 745627 - DNA, 556 bp, Homo sapiens
tctcagtgactttccaattggtaaatgcaaagaacattttattcaactgagctctgataagtgtaatactcttgatcactccctttttcattggcacctatttttctgttcatgccttaagtgctagtatcccaagggcataatccttgacgcataaatccattcactctgcacttcccagggatctaatccactcctgtgattttaactgctacctacatggttaatgacacttatatctttatagccataacttgtcttctgagcttcatatgtgtatgtacaaattgctggtaaaatctgtaattaaatatatcacaggaactttgaaattacatattttaaactcaacttatcctrcaccccaaatgtgttgtctttttatgttccctgtatcactgaatttcataatttttcacccggtttccccgccaggaagatggtagtcatccttaaatttttcatcttgcttagccccaaaatgatatctaacaagtctcatatattggaactttgtacattcttttggatctattcaattgtaactaataatctc

SEQ ID NO: 745628 - DNA, 556 bp, Homo sapiens
tctcagtgactttccaattggtaaatgcaaagaacattttattcaactgagctctgataagtgtaatactcttgatcactccctttttcattggcacctatttttctgttcatgccttaagtgctagtatcccaagggcataatccttgacgcataaatccattcactctgcacttcccagggatctaatccactcctgtgattttaactgctacctacatggttaatgacacttatatctttatagccataacttgtcttctgagcttcatatgtgtatgtacaaattgctggtaaaatctgtaattaaatatatcacaggaactttgaaattacatattttaaactcaacttatcctayaccccaaatgtgttgtctttttatgttccctgtatcactgaatttcataatttttcacccggtttccccgccaggaagatggtagtcatccttaaatttttcatcttgcttagccccaaaatgatatctaacaagtctcatatattggaactttgtacattcttttggatctattcaattgtaactaataatctc

SEQ ID NO: 745629 - DNA, 631 bp, Homo sapiens
agttaggcaaaaggaatggaagtagtgtgctttaaggttcttacagtgtacatgtagaaatatggtattattttaaattagaaggtgataagtaaaagatgcatattgtaaaccatagaaacttcagtaaaacaaagatgtataattagtaatctagtagtagtgataaagtaaaatcaaaataaactgtgacgataaatcatatagaaaaataagaagttatattttcaatatcactcttcaataaaataactggggctccttgaagatatgactaattctaagactctatgcatcttgtagttccaggaaataaggaagtcctcaaaagttaaaatgacagaagtatataaaaatgacaaataaaactactgaaacaactcccaatagaaaaacctggaagaacttgagcaatgtaatcaatatgtagtattgaattgaaaaaaaaaaacctgcataaattcacactgatataaaggaattytctattaaacctatagacggaaagagacaaattgactatatagaacttttcaaaaaaattatgaaaatattcctgcatcaaaaagatggagaatgattttgtacccataagtatagatgtattagtctattttcacactgctgataa

SEQ ID NO: 745630 - DNA, 587 bp, Homo sapiens
tacactccaaggtttatgaataactcatttgataatattttatttttaaaaatatgactacaaagaaaaacaacttatattaaaacatagttaaccaaaatattagaagaacgaattcatatgatacccttatatatgctttattattaatacattaaatatcaagattaagtggttggtctaataactactaaatatctcaataaggataagcatgaacaatattttgatgcatcctcaactataatgtgatatgaaaatgtctgttatttctatatataaaaaaggcccaggtacagctaagattacaatggattttacctacattcataattgaaagaaatgctaattttcaattaggggctagtaaaaattaagatgtaattattcccmccatgtttgtgaccccttggattccatgcataggtcccttagttcctgaacctcaggttaagaaccacttccagggtgtttgtatctacaggagggaacaatgcatttctttccttttacctctcttcttaattttgagtgtaattgacaaggatcctgcataattccactctctgtaagggtattggctaaca

SEQ ID NO: 745631 - DNA, 602 bp, Homo sapiens
gttgcatcaatccatagcttctttaattttattgatgagtagttttatgttgtataaatatgtcacagtttgtttatccattcacctaccaaaggaaattttgttaatgtctagtttttcataattacgaataacgatgctataaatattcacatacataatttcatgtgaaaccaagttttccattcacttgggtaaatatctgggagtatgatttttgggctatatggtaagtacatgtttaaatttataaaaaaattcaccaaactattttctaaagtagctgtaccatgtcacattctcattarcaataaataaaagttcctgtagctctgcaatcttgccaagatttggtattgcttctttctgtttgtttgtttatcattctaatagatatgtagtgatatttcattgtggtttgagtttgcattttgtaaatgacaaatatacagagtattttttttcttatttcctatccaaatatctttggcagaacatctgttcaaatttttttggtgggttaaaagctttgttgagatataatcatataccataaaactcacctatttaaaatgtacaacttaatgtttttgcatattcag

SEQ ID NO: 745632 - DNA, 609 bp, Homo sapiens
ttgggctatatggtaagtacatgtttaaatttataaaaaaattcaccaaactattttctaaagtagctgtaccatgtcacattctcattaacaataaataaaagttcctgtagctctgcaatcttgccaagatttggtattgcttctttctgtttgtttgtttatcattctaatagatatgtagtgatatttcattgtggtttgagtttgcattttgtaaatgacaaatatacagagtattttttttcttatttcctatccaaatatctttggcagaacatctrttcaaatttttttggtgggttaaaagctttgttgagatataatcatataccataaaactcacctatttaaaatgtacaacttaatgtttttgcatattcagttatgaaattacctacacaatttattatcatactaaaaagaaacctaatatcttttggcagtcacccaccaattctcctgaacttcccagccctacacagccatttatctgctttttgcctctattgatttgcatattataacatgtcatttacatgaaatcacataatatgtgatcttttgtgattgtcttctttcacttagcataacattttaaaagttcat

SEQ ID NO: 745633 - DNA, 318 bp, Homo sapiens
ccaggccaacttcattctggacagccagctccgcagccttggcagtcgcaaactccaccacagcagtgcctaccttcttactggaaagcaccaggttgagaacctcaccatacttttgcaaaagccataggaggacgtctttggagtagccaccttttgactccccccgagccttcttgcrcttccattttagctttagtttgggggttccttggcctttagtattttgtctttcctctcaacctctggtcacgctcctggtgtatctgctcccagatcagcctctgctcttcctccagctgccgggaaccctcttca

SEQ ID NO: 745634 - DNA, 574 bp, Homo sapiens
tatgtttatgtaaccaataccacaattaaaacacagaatgcttccataacaatgacaacatttcttgtgatactttctcatcattttccctctatacacacctggacccagtaaccactgaactgctttctgtcactgtagattagatttgtcttgcctagaattatagataattagaatgtatagtatggactcttgtgggtttggtttttttgctctctatacacttgttcagatttattcttaacgtcttccagattcatatatttaggagtataattgttgaatcatacattaaagccatatcaaacttgagaacaaactcccatagtggtttcccaaagtgaatttaaccttttgcattctggccaggatcttttccccaackatacatcttggccaacacttggtactgccagtcactttagtttacctattataatatgatgtagtttgtagtctgtagtcttatctctttgtagttttaattaacatttgcttgatgactaatgttgttgagcctattttcatgtccttgttggttagctgtatattttataaaacatctattcag

SEQ ID NO: 745635 - DNA, 507 bp, Homo sapiens
gtgtcccaaatatctgcattatagcactttctagtacaagcgactgcaaaacaattgaaattaacttaatctggccaggggtagtcactcacacctgtaatctcagcactttgggagaccaaagtgggtagatcattagatgtcaggagttcaagaccaccccggccaacatcgtgaagccccatctctactaaaaatccaaaaaaaaaaaaaaaaaaaaaaaaatagccgggtatggtggcagttgcttgtaaccccagctaccctggaggctgaggcaggagaattgcttgaaccctggaggcagaggttgcagtgacccragatcacgccattgcactccagcctgggcgacagagcaagacttcgtctcaaaaaataataaaaataaagttaacttaatcaaaacagaggatgtattgactcctgtttagggaggaagagaaaacctctagtaaaggtcagagggagattttgactcagaaatgacttgattcaggggccgga

SEQ ID NO: 745636 - DNA, 528 bp, Homo sapiens
ggtaaaaaacagtaaagcttttagaagaaaatacagaacacctttataagtagatttcttaaggcatataaagtactaaccataatgggagaaaaagataaatcatgttaaaaacttctctttatcaagacaccttttttttttttttttttttttgagacagtctcattctgtcacccatgctggagtgcagtggcatgatcttggctcamtgctgcagcctccgcctcctgggttcaagtgattcttccgcctcagcttcctgagtagttgggattacaggcgtgtgccaccatgcccagctaatttttgtatttttttaatagagtcagagtttcaccatgttggccaggctggtctcaaactcctgatctcaagtgatcctcccatctcagcctcccaaagtgctgggattacaggtgtgagccaccacgccccgcctatcaagacacctttaagagtgtgagaaaatatttgtgatacatacttccaacaaaacactcatattctgaatatataagcatctat

SEQ ID NO: 745637 - DNA, 601 bp, Homo sapiens
atcacccatttaaaacatgtacttcagtggtttttaatatattcacagagttgtgcacaatccattttagaatatttttaccacaataagaagaaatcctgtatcctttagcagtcacttcctgtttctcccaatccctatagtttttaggcagctgctaatctactttatcttacaggtttgcctgttcaggacattatgtaaattgaatcatacagtatgtagtcttttgtcactggcttctttcactaagtatgttttcaagatttcatccatgttgcagcatgtatcactgtttcgttcttttttattggagtaatattctgtcayatgggtataaccgtgtgagcacataactgttcaacatttgatggacatttgggttatttctactttttggctcttatgaacaatgctgctataaacagtcatgggcaagtttttatgtggtcatctgtctttatttctcttaggtgtatactttaggagtggcgttgctggattatatggtgcctctgtttaaccttttgaagaactgccagattgttttccaaagtggctgtactgtttacattcccactagcagtatatgagggtttca

SEQ ID NO: 745638 - DNA, 601 bp, Homo sapiens
atcacccatttaaaacatgtacttcagtggtttttaatatattcacagagttgtgcacaatccattttagaatatttttaccacaataagaagaaatcctgtatcctttagcagtcacttcctgtttctcccaatccctatagtttttaggcagctgctaatctactttatcttacaggtttgcctgttcaggacattatgtaaattgaatcatacagtatgtagtcttttgtcactggcttctttcactaagtatgttttcaagatttcatccatgttgcagcatgtatcactgtttcgttcttttttattggagtaatattctgtcacatgggtataaccgtgtgagcacataactgttcaacatttgatggacatttgggttatttctactttttggctcttatgaacaatgctgctataaacagtcatgggcaagtttttatgtggtcatctgtmtttatttctcttaggtgtatactttaggagtggcgttgctggattatatggtgcctctgtttaaccttttgaagaactgccagattgttttccaaagtggctgtactgtttacattcccactagcagtatatgagggtttca

SEQ ID NO: 745639 - DNA, 640 bp, Homo sapiens
tttttattttttcagatgtgagtctcgctgtcgcccaggctggagtgcagtggcgccatcttggctcactgcaagctccgcctcccgggttcatgccattctcctgcctcagcctcccaagtagctgggactacaggcacccgccaccacgcccggctaattttttgtatttttagtagagatggggtttcaccgtgttagccaggatggtgtagatctcttgaccttgtgatccgcccgccttggcctcccaatgtgctgggattacaagtgtgagccacagcrcccggcctggtactacacataattcttaaccgtcacagtgatactgaattctattaccttactgaaatcctgcattaacttcaggatttattttcttggcgatttctaggtagataaagtgtttactctttttttccccctctttttgatgtgtatttccaattaaccaaatcctggcaaaaaagcaaacttacttttaccagcacttcttgcctactccaagagattttgtaatgctttttaggatatcactgcaacttaaatatactgtctcctgggctaagatcttcgagtaacagtgttaaaaggtacacaggaatttgagtcaagcagaaagccattatgttgacactca

SEQ ID NO: 745640 - DNA, 641 bp, Homo sapiens
taaaaagaatgattcttcaactctctttcctatgcttgtctactctttagttctacttttgacaaaattatgcttctggtaatccttaaacttaattttaaagaaaagtatttattttcaataggtatttcttcttttacatttttctttctcctgggccactttaatcaggtgttgatagccaagagagtagaagtacaagttagttgtttgaaaagtatttagccttccctgccataatacacattatactgttttattaggttcagtgaaatgtttaatcatttgttcaccttttaaattgaagtttatccttccatgaacacatgctccataaaagaagagaccttgtttatctgtttacctctgattcttactatctggatcaatccctaactcaataatgttcattaattggaatattagatgatttatacatctwtgcccattatgaactcaccacatagttactgaacctccattttcttttcaaattacagacatcaaatcaattctgttttgcaattttctttaatatatgtcttcaaatatagaagagttgctaacatgctgagagtgagattcctcaacgtgacatttaatcgcaaccttattttgaagacactaagatataatgaggt

SEQ ID NO: 745641 - DNA, 606 bp, Homo sapiens
gctttgcgttgaaatgtagcaagcatttaagcttcaaccttgattttttcctttgtgaagactgttcttatagaaattttataagtccttacacttttttaatgaatagggtccccatgcgagaagccttttgagaggaaaaagaggtattatttataattactctggaaaaacacctatcaactgagcctgtccctggaaatcagaggtgtaggcacagcacctgtggtgtttccatcagtttgtaatggtgtattcrtgtgtataaatgtggcatatgtaattaaggtcctgtgccatagcaactgtaagcacaggctctggaacctacttcctatcattgtactatgacactcacaataatgctgggaaacattatcgagaaactttcagattgattttattatttgttaaattagataatataaatttctgactcaaagcctatgatttaccagataagtgagtttctacctgttttgagacttcttcaagaaggaccaaaggacccttttctttgtaaatttacttttttttttggtagtgactttttatctgtctcgctaaaatgcctgctttgctttctattggtttaaataggttcct

SEQ ID NO: 745642 - DNA, 647 bp, Homo sapiens
taagcaagggggtttgtctcccttatacatttttttccttaggatatataagcttcctctcttagggaagggagaagacagattttactgtatcttaagaaaaagtaagaatgatcacaaaggtttaaggttccaagtagggaagtttcctgagaaattccataatgctaggcttcccctaatattttctaaaggatgctctagggattaaatagaatgttcttcaaagagtgaggcatctttaagattcctgaaggggtcataaattaagggagctgaattatatgccctgagcagatcatcttgccagtcatgactgaaaacatgtgagcagaggagaaaggatgattctattccctgaacgcccaaccccaccacttattttggcttatttctcctcagatttctctccttattatctctgattcttggtacagcaggaggagaaattctcatttccccttcatwcagttctataaatccactcatcagttctctaacgaatcagttgtctgagaataagtcccagcaaaatttgctgaaatggccattataatctctgatcccttaattataacatttcctcttttcgaatatatgtttctatcgactggtattaatacattattggagttctcctttttcta

SEQ ID NO: 745643 - DNA, 641 bp, Homo sapiens
cattttgggggttactttttaagtttttgattgtttccattgctgtacagaaactttttagtttgatgtagtcctatttgcttatatttgcctttcttacctgtgcttctggtgtcccatcaaaaaaatcattgccaagaccaatgtcatagascattctcctgttttcttggaggagttttgtaaaaacatgtataaacatgaaggacattatgcaaagtgaaggaaggcagacatagaaatacagatactgcataatctaatttatatgtggaatctaaagagtttgaactcataaaatagagagtagaagggtggttacaaggagtctggggtgggagaagagggacatgttgatcaaagggtagcaacttgtgcttatagggtgaattagcgctagagacctaatgtacagcatggtaattatagctaagaataacataatatatcctagaaatgtgtgaaggagtgactttaggcattctcaccaccaagaaaagaaaaagacaactatgtgaggtgatggatatgttaattagcttgattgtggcaattgttttgtaatttatacatatatcaaaacatcacattgtgtaccttgaatgtttacaattcacatttatctattatacatcactaaa

SEQ ID NO: 745644 - DNA, 641 bp, Homo sapiens
cattttgggggttactttttaagtttttgattgtttccattgctgtacagaaactttttagtttgatgtagtcctatttgcttatatttgcctttcttacctgtgcttctggtgtcccatcaaaaaaatcattgccaagaccaatgtcatagaccattctcctgttttcttggaggagttttgtaaaaacatgtataaacatgaaggacattatgcaaagtgaaggaaggcagacatagaaatacagatactgcataatctaatttatatgtggaatctaaagagtttgaactcataaaatagagagtagaagggtggttacaaggagtctggggtgggagaagagggacatgttgatcaaagggtagmaacttgtgcttatagggtgaattagcgctagagacctaatgtacagcatggtaattatagctaagaataacataatatatcctagaaatgtgtgaaggagtgactttaggcattctcaccaccaagaaaagaaaaagacaactatgtgaggtgatggatatgttaattagcttgattgtggcaattgttttgtaatttatacatatatcaaaacatcacattgtgtaccttgaatgtttacaattcacatttatctattatacatcactaaa

SEQ ID NO: 745645 - DNA, 617 bp, Homo sapiens
atattacaagaaaggaaaattagaggtcaattgttcacgaacatagatgaaatgtccctaaatagaatataaagaatgtggttccttttaaatagagggaatatatttatacattggatttattcattctctgctaagtttttatgaatgttaaaatgtaattagagaatttatcatgttaagaaaacaaaaatcagaaacatttcaacatatacagaaagccatgtaataaataggctgtcattttcttcatctgatatagaatttctattragaaaatactacagcaaacatacttgctagtgaatttttaaactgtctatcagagatcgtaaatgagacaaagatactcactagcatcacagctactaaatattaattgagtatatgaaacattacagtttttaaagaattgtaattttaacaggaataaaaggaccatgttagcaggtactataactatgtgaatagaaaattcaaaatatatatccacaaattaaaacaagcagaaatttagtttgttacatttctgcctaaattacatttttaaatacaaacatttattaaatgttattttaaaagatatcattgaaaaggtacttagaaataaatgtaac

SEQ ID NO: 745646 - DNA, 630 bp, Homo sapiens
gctccagtatttcagatttttttaatgtatgattgctttttgttggtattctcatttgtgtgtgtgtgtgtgtgtgtgtgtgtgtatgtatgtatgtatgtatgtattagtatgtattattttcctgatttcactgatttgtctacctctattttactggaactcactgagctttttcaagaattttgaatttggaattatttgtcaggcaagtaatagatctccatttgtttggagtcagttaccagagatttattttggttccttgattgtatcatgtttccctgattttttgtgttgcatgtacctttgctttggtgattgcgtatttgaagaaaagaccaccatcccagccttcatggactggcttaaccgggaagtattttattttggckagaaattctgaatgcctatcaaacagcaatcatcatacacttttcctttgttcttagctccctccccataattgtgccagttctgtcagcattacagatgagatgagacataagctggccctataagcaccaccctgaaaagctgggacttgggacacacattcaacttctactatttcctttctttgggagaagcctgaggttccatattttctcccaatcttgcaaaattatg

SEQ ID NO: 745647 - DNA, 806 bp, Homo sapiens
tttgcatcagtttccagagagccttggaaaccatgctaagaaggtggggcacaatttttgtaagcaaatagatgtcacggaaggatttttctggcaaagaataataatatcagcactggcagcatcataaggaggaaatggatgcagagagtccatttaggagaatataacaatacaggcaatcaacaggaactcggactaggacagtggtgagcagaagggagacaaagaagagatccacgagttactggataagagggttgagagaaagagagtcaaagacaactctgaaaacagtgtaactggctgagtaagtgatgattcaataaatagagaaaaagagagtaagaagaggaaggagagatttggtaagaaaatgactcaatcacttctgtaccaaaagcaaactagctgactggtgactaacaccctaatccaactagttcctgstttgtccgtttatggaggactgagtgacagagtaaaagttgatggaaagacgtaaagggcctctttcccaacaagggtaaaatctgctgctttcctgcttctcacgcaaccgagaatcctgagtagcaagcagccagactggctcaaatggaagcatttctcaatgcttgatacgacgttgatataagaagtaggagaatgtaagctgaagacagggagaaaaacatttggagctggcagagaaagaagcaggacactaatgtgaacaaatgtcactgtccactgggatgtgaccacacattaaatcacatttgtttactattttatgtccacaatgaagattcacatgagagaat

SEQ ID NO: 745648 - DNA, 627 bp, Homo sapiens
taatgcaaaattgatgaaaaacagaaacattccttgttcatatatgaacatctatacatcatacagatgtgaggtctcccccaaatcaattttaaaacttaacataatttcaatgaaaatgccaacaagtatttttttttttttttttttgagacggagtctcgctctgtcacccaggctggagtgcagtggcgcaatcttggctcactgcaagctccgcctcccgggttcacgccattctcctgcctcagcctcccgagtggctgggactacaggcrcctgccaccacgcccggataatttttgtatttttagtagaggtggggtttcaccatgttagccaggatggtctctatctcctgacctcgtgatccacctgcctcagcctcccaaagtgctgagattacaggcgtgagccaccgcgcccagcacaagtattccttttaaatgaaactaaacaaaataatacagaaaatccagtataaatagctaagataacactgaaaacggagaactacagggaactactagtccaatccaatgttaaattacattataaagcttcagaaattaatgcaaaagtatttatggctagtattgttatataaatagacaaatcagtgtgatt

SEQ ID NO: 745649 - DNA, 627 bp, Homo sapiens
taatgcaaaattgatgaaaaacagaaacattccttgttcatatatgaacatctatacatcatacagatgtgaggtctcccccaaatcaattttaaaacttaacataatttcaatgaaaatgccaacaagtatttttttttttttttttttgagacggagtctcgctctgtcacccaggctggagtgcagtggcgcaatcttggctcactgcaagctccgcctcccgggttcacgccattctcctgcctcagcctcccgagtggctgggactacaggcacctgccaccacgcccggataatttttgtatttttagtagaggtggggtttcaccatgttagccaggatggtctckatctcctgacctcgtgatccacctgcctcagcctcccaaagtgctgagattacaggcgtgagccaccgcgcccagcacaagtattccttttaaatgaaactaaacaaaataatacagaaaatccagtataaatagctaagataacactgaaaacggagaactacagggaactactagtccaatccaatgttaaattacattataaagcttcagaaattaatgcaaaagtatttatggctagtattgttatataaatagacaaatcagtgtgatt

SEQ ID NO: 745650 - DNA, 627 bp, Homo sapiens
taatgcaaaattgatgaaaaacagaaacattccttgttcatatatgaacatctatacatcatacagatgtgaggtctcccccaaatcaattttaaaacttaacataatttcaatgaaaatgccaacaagtatttttttttttttttttttgagacggagtctcgctctgtcacccaggctggagtgcagtggcgcaatcttggctcactgcaagctccgcctcccgggttcacgccattctcctgcctcagcctcccgagtggctgggactacaggcacctgccaccacgcccggataatttttgtatttttagtagaggtggggtttcaccatgttagccaggatggtctctatctcctgacctcgtgatccacctgcctcagcctcccaaagtgctgagattacaggcgtgagccaccgygcccagcacaagtattccttttaaatgaaactaaacaaaataatacagaaaatccagtataaatagctaagataacactgaaaacggagaactacagggaactactagtccaatccaatgttaaattacattataaagcttcagaaattaatgcaaaagtatttatggctagtattgttatataaatagacaaatcagtgtgatt

SEQ ID NO: 745651 - DNA, 559 bp, Homo sapiens
ctatctatttctccaaatttactggctttttaatatcagttcaatgctacaagaaatatcaaatccttacatttctaaccttaatgaaagacatatcaccacagtctttctaataatcaccatttctaaaagcaagatgtttagaaaaaaggttggaggctctttctggaggatctgcttggtgaatcagggtgtaacagaatgattttcataaratcattctaatcatgtcagaacattttagaagcttgagaacagataataaaagtaacctctctctttgaccaggtgtacaagcacaaaatgtcttcagctttaaagagtactgttatgatttttgaaagatcttctcattgatgtgaaattttgttgagtataacatggtgatattttaagtataatgatgtatctgctctatacatagcacccagcctgagtaatacactctctccacattagcttcttcttttttttttttttttttttttttttttttgagacggagtctcgctctgttgcccaggctggagtgcagtgacgtgatctcggctcactgcaa

SEQ ID NO: 745652 - DNA, 559 bp, Homo sapiens
ctatctatttctccaaatttactggctttttaatatcagttcaatgctacaagaaatatcaaatccttacatttctaaccttaatgaaagacatatcaccacagtctttctaataatcaccatttctaaaagcaagatgtttagaaaaaaggttggaggctctttctggaggatctgcttggtgaatcagggtgtaacagaatgattttcataagatcattctaatcatgtcagaacattttaraagcttgagaacagataataaaagtaacctctctctttgaccaggtgtacaagcacaaaatgtcttcagctttaaagagtactgttatgatttttgaaagatcttctcattgatgtgaaattttgttgagtataacatggtgatattttaagtataatgatgtatctgctctatacatagcacccagcctgagtaatacactctctccacattagcttcttcttttttttttttttttttttttttttttttgagacggagtctcgctctgttgcccaggctggagtgcagtgacgtgatctcggctcactgcaa

SEQ ID NO: 745653 - DNA, 629 bp, Homo sapiens
gtaaactggataccctacaacttcgcattagtaaagccaacaccactattgaaaaggatttctacaaagacagatacatcagaaaatgatagctcatttggtggagcagagaaacaaggattgcatgtttctgcaaataatgccagcagccacaagctgaaaggtaatctttattgagtgcacagtatggattgaacttgaagttctatatctgagcttccaccctacctacatatacatagcacaatcagcatcagtggtgtcatctgaaaattaagagcaacaatataaagtttgcagtcaacggctcaggttttgacatttacttcccctgagtatagcaggcttcttatctaaggagtctgcatttgtgacagaccatggcccttatgagttcccgcaggcactctagggtgagttgggagccaatttatcaacatcgatgacttacaccrgtttcagtcctctcatcactctttggcagactcatccagctagcgagcaattagctgtgtccgctctgcagcacttcattcagggaaagcagcaaaaactttctaagatgactggaactccacagatatatccatcccattgctcgatcactgctggaaaaggcagtcaagggt

SEQ ID NO: 745654 - DNA, 603 bp, Homo sapiens
gagtagtgcatttcttagtgtcttcggaattcgaggaagctggaggcgggaaagtagaaaggaaagggacagaagagcaactacatccgtttcctagataaactattgctgggtccgtgaacagtaacagtggccattcataaaatgctattgattgttttaattattttattttatcttatatatatttttaaagacagggtctcactctgttgcccaggctggagtgyagtgatgcgatcatagttcactataaccttgaactcctgtgctcaaatgattctccctcttcagtctcctgagtagctgggactacaggtagttgccaccacagccaggtaatttagaaaaaactttttagaaactaggtctctccatattgcccaggctggtcttgaattcctgggctgaagagatactcctgcctcagccttccaaagcactgggattacaggtgtgagccaccgtgcctggccctgttttaattattttatttacaacattttttgttattgatcatgagtaaatacaattagatatgaattctatatttttgaataataattaaaacaataaaatcaggcaaatcagctgttccctcta

SEQ ID NO: 745655 - DNA, 655 bp, Homo sapiens
tcattaaccattaaggaaatgcagattaaaaccataataagatgaactctttccccctaacactattgacctatcagaatggctaaaataaacaacagtgataacacgtaatgcaagtgaggatgaagagaaactggatcattcatacattgctggtgggaatataaaatggtacagccactctgaaaaagagtgtagcagcttcttagaagacgaaacacatgcttaccatacagcccagaaattacactcttgggtatttatccccccaaaaatgaaaacttgtgttcacacaaaaacttgyatattaatgtacatagctgctttgttcagaataacaaaaaatctggaaacaaacccaattttcctttaatgggtaaatgattaaggaaactgtggtatgtgcataccatgaaatatatattcttttgcaatgagaaagaatgcactattgatacattcacatggggaatcaccaaaaaattttgctgagtggaagaaaaaaataccaaaaggttacataccatgattccgttgatataccagtcttgatatgacaaaattatatggagagataacagattagtggctgccagtggtaaggatgaggagatgtttgcagaaagaggaaggaagtaggtgtggctgtaaaagg

SEQ ID NO: 745656 - DNA, 655 bp, Homo sapiens
tcattaaccattaaggaaatgcagattaaaaccataataagatgaactctttccccctaacactattgacctatcagaatggctaaaataaacaacagtgataacacgtaatgcaagtgaggatgaagagaaactggatcattcatacattgctggtgggaatataaaatggtacagccactctgaaaaagagtgtagcagcttcttagaagacgaaacacatgcttaccatacagcccagaaattacactcttgggtatttatccccccaaaaatgaaaacttgtgttcacacaaaaacttgcatattaatgtacrtagctgctttgttcagaataacaaaaaatctggaaacaaacccaattttcctttaatgggtaaatgattaaggaaactgtggtatgtgcataccatgaaatatatattcttttgcaatgagaaagaatgcactattgatacattcacatggggaatcaccaaaaaattttgctgagtggaagaaaaaaataccaaaaggttacataccatgattccgttgatataccagtcttgatatgacaaaattatatggagagataacagattagtggctgccagtggtaaggatgaggagatgtttgcagaaagaggaaggaagtaggtgtggctgtaaaagg

SEQ ID NO: 745657 - DNA, 655 bp, Homo sapiens
tcattaaccattaaggaaatgcagattaaaaccataataagatgaactctttccccctaacactattgacctatcagaatggctaaaataaacaacagtgataacacgtaatgcaagtgaggatgaagagaaactggatcattcatacattgctggtgggaatataaaatggtacagccactctgaaaaagagtgtagcagcttcttagaagacgaaacacatgcttaccatacagcccagaaattacactcttgggtatttatccccccaaaaatgaaaacttgtgttcacacaaaaacttgcatattaatgtacatagctgctttgttcagaataacaaaaaatctggaaacaaacccaattttcctttaatgggtaaatgattaaggaaactgtggtatgtgcataccrtgaaatatatattcttttgcaatgagaaagaatgcactattgatacattcacatggggaatcaccaaaaaattttgctgagtggaagaaaaaaataccaaaaggttacataccatgattccgttgatataccagtcttgatatgacaaaattatatggagagataacagattagtggctgccagtggtaaggatgaggagatgtttgcagaaagaggaaggaagtaggtgtggctgtaaaagg

SEQ ID NO: 745658 - DNA, 645 bp, Homo sapiens
ataatacaattatacataaaacaagacacaactataggaaaatccaggagaaatcccagaaactgcatagttctatgagaattttaactcatctcttaccaagccatgaaaaaactttgaatgataaaaataaagttgagtaacggacrtatattgaatttggttcctgacaacagatactgcatcttctttacagagtctcataaaacttacaaaaatggatcatatattaatctataatgaaaacctcagtaaattccacaaagtaaaaatagcttgagtggcatcctttgcatcaatgagataacactagaaataatgaagtagaaccaaaaaaccccaccttagtcacttacaaatttggcagtcttttaaaactcatatttgatcaaagcaaaaattaaaatataaaattctaaatagctaagaaataatgataatggaaatgtaaaccaagcagaaaataaaacatacctttaaactttgagaaaggatgaatcaagtatccaatttaaggtgcatttttataagtgctatgaaaaaaataaatatgaaaaacacaaatacattagaaaacagtaggttggattttttaaagtcaagctaattctccggaaaataaatgggcagataatgaactagaga

SEQ ID NO: 745659 - DNA, 520 bp, Homo sapiens
gttgcctcaacctggtccaactcacagaactgacctacctagtggggctgggaaggtttaggcagacagacagacagacagactgcctgaggtgtgagggagtacacttaccccctgtgaccaaaaccccatgtgtggccagcgtggccgattactcatggtctggggagggaggacagccggatccagaggtaaagtctaacccatggagtcctaagcaatgggaaaggagccccatgtggattaaataaacatattcctgcctgcagatccccttttctaaatgcataaggcagatgyactatctgaaggactttggactcagtgagttgtgacttatgtaaacaataccacactgacttaaaaataatccacaaggcaggaaaaaaaacctctttcattgttataaaactgaaccaagattacatttttttctcctgtaattgcttctcagggtccgtaaatagaccttattataaagagctggggaggggaacagcaaatcaagataaagtacaac

SEQ ID NO: 745660 - DNA, 588 bp, Homo sapiens
tgacattaaacattagcgttctgtacaaatccttcctggataactttgtttctatttctagatcctactgagatggttgttagatccataagacacacatctacttatatgcctaaactatcttagtatacaattgtgcaactacacccttgacccaatttccagagcattttatttggatggactgagaactttcaaaataatcagtgctcattcatttttacttaatagtttatatcctaatttatctctttcctgtcacaattataataaagtaacaatgagaaactaggttgtwccttccacatttgacttagaaatctcctcagctaactatccaacttaatcagttagaaattacatctttcactcagtggctgcaaaaaattcagctcagttttcttacactttatgacaagaatagccttccctccagtttcaaatagtgtgttcctcattaccaggtaaaatatcaccagaaaaactgtcaaagctcataatctagcaacattctattcataatatatgtattctctaagatagtagaagctttctctctagctctcctcattactttcggagtcctca

SEQ ID NO: 745661 - DNA, 567 bp, Homo sapiens
agatatcttgaaagctttcccaagaaggatggctaaacctagatagtgaagactacaataaatatgttactcttcaatgcccagacattgaagaaaatctactagcatcaaaacaccatccaggaaaacataacctcaccaaataaaccaatcaagtcacccagacacaatcctggagaaacagatatgtggcctttagacagagaattcaaaataagaattcaaaataagaattctcaataagaagctgcattgaggaaattcaaacgagataacactgagaagaaattcagaaatctataasataaattgaaataactgaaaagaaacaagcagaaattctcaaactaaaaaacacaattggcatactgaagaatgtatcgaatcctttaatagcagaattgatcaagcagaagaaagaattagcttaaagaaaagccttgaaaatacacagaaaagacaaaaggagaaagaataatacataatgaagcatgcctacaggatctagaaaagcaccccaaagagtcaaatctaaaagttattgacctaagggaggaggtagagaaa

SEQ ID NO: 745662 - DNA, 567 bp, Homo sapiens
agatatcttgaaagctttcccaagaaggatggctaaacctagatagtgaagactacaataaatatgttactcttcaatgcccagacattgaagaaaatctactagcatcaaaacaccatccaggaaaacataacctcaccaaataaaccaatcaagtcacccagacacaatcctggagaaacagatatgtggcctttagacagagaattcaaaataagaattcaaaataagaattctcaataagaagctgcattgaggaaattcaaacgagataacactgagaagaaattcagaaatctataagataaattgaaataactgaaaagaaacaagcagaaattctcaaactraaaaacacaattggcatactgaagaatgtatcgaatcctttaatagcagaattgatcaagcagaagaaagaattagcttaaagaaaagccttgaaaatacacagaaaagacaaaaggagaaagaataatacataatgaagcatgcctacaggatctagaaaagcaccccaaagagtcaaatctaaaagttattgacctaagggaggaggtagagaaa

SEQ ID NO: 745663 - DNA, 567 bp, Homo sapiens
agatatcttgaaagctttcccaagaaggatggctaaacctagatagtgaagactacaataaatatgttactcttcaatgcccagacattgaagaaaatctactagcatcaaaacaccatccaggaaaacataacctcaccaaataaaccaatcaagtcacccagacacaatcctggagaaacagatatgtggcctttagacagagaattcaaaataagaattcaaaataagaattctcaataagaagctgcattgaggaaattcaaacgagataacactgagaagaaattcagaaatctataagataaattgaaataactgaaaagaaacaagcagaaattctcaaactaaaaaacacaattggcatactgaagaatgtatcgaatccttyaatagcagaattgatcaagcagaagaaagaattagcttaaagaaaagccttgaaaatacacagaaaagacaaaaggagaaagaataatacataatgaagcatgcctacaggatctagaaaagcaccccaaagagtcaaatctaaaagttattgacctaagggaggaggtagagaaa

SEQ ID NO: 745664 - DNA, 485 bp, Homo sapiens
aagccttgaaaatacacagaaaagacaaaaggagaaagaataatacataatgaagcatgcctacaggatctagaaaagcaccccaaagagtcaaatctaaaagttattgacctaagggaggaggtagagaaagaaatagaggtagaaagtttactcaaagaggtaatagcagagaacttccaaacctagagaaagatatcaatatccaagtacaaacaagaaggttrtagaacaccaagcagatttcacccaaagaagactaccttaaggcattcaatattcaaactcacataggttaaggacaaagaagggattctaaaagcagcaagagaaaagaaacaaataacatacaatggagctccaatacatctatcagcagatatttcagtggaaatcttacaggccaagaaaagtgccatgacatatttaaagcactggaggaaaaaataacttttagcctagaatagtatatctggcaagaatat

SEQ ID NO: 745665 - DNA, 608 bp, Homo sapiens
atattgaaattaggccagttaataatcctgcaatgacctgtagggggttcaagtaaagggaagagttgcacatctctcactctaaatcaaaagctagaaatgattaagctttgtgaggaaggcttctgaaaagcccaaataggctagaagctaggactcttgtgccgaagagttagccaagtggggaatgcaaaggaaacactcttgacaaatattaaaagtactactccagtgaaccttctacaagcaaaaaattatgacttgatgaaagcttagatgatcattagcatttttttagcgataagatatttttaaattatggtaggtacactgtttttaagacataattctattgtacacttaatagaatacaatatagtgtaaacataactgtcatatgcattaagacattaaaaaaccaaaaatttgtgtgacttgytttattgcaatattcattttattgcattggtctgaaagtgaacttgcaatatttctaaggtatgcgtgtacctctcctcaagtgatcccattgccaatgttaaattaactcacaggatatagtgttagtaatcagcaaacagtaaagtcttaggaaaatagctagaaca

SEQ ID NO: 745666 - DNA, 618 bp, Homo sapiens
agttaaaagtagataacatagaacaatgtgaatgaacataaatattctgtttaaaaacagacaaagccttttcataatttttcatttgctttcttaaaataaatatgttgtcataatagccattgctttaagtttgatgagaygttggttaagcacccaccttgaatctccacagtccgttttgggtccagaggccacatgattagaactttttaagatttgtctctggtttcataaatgttactttggagaatcctattatatttagataatgtttaataagtattacccataaataaatacatattcagcttatatggcggaaacacaaaatgctacactacttctcttgttgatatattaagcttccacggttcctagacttgggaaaattgtcactatatatgtatagctgtctatctggaagatacactgaggttctggccacgtagttatccttctgggtatacttaaaaaagaagactttattgattgtctggaacctaaatgcctactatttagtaaatgagctcaatgggttattttccaacattctttaattttggtttgttcatctcaacaagaccattcacatctatcttttcctcttctttgtct

SEQ ID NO: 745667 - DNA, 597 bp, Homo sapiens
tctattatgtgcaggattagtctcggcactatcgaggatcacaaaagcctgttagttatggagtcttccagcaataggcttacagtcaagaatgggaaacaacacatatgcacgtaatttgattgaaatgtaggaagtcttaaggatgataggaggagttcagataaagactagaaagttctcaggtgccagattgcttccagccaacagatcagaggaactgccatagaggaggtggctgtgtgtgccctggacctcaaaggagagagatgatattcagacgtgtagcagtgatgggcagaagcacattttaagtggagggaatgaaacaggataagcaagactggtgattgaaaaactctgtttgtctgtgcagaaaagagaaatcttagtttgactggagcctctggcacatgaaagggatttagagtttgccrtttctgtgaacctgtccatcttcaccctcatgctgttctcctttcctcttttaacctgtatcttctctctctttgttttgttgactttctcttttttgttttctgttgtccttttttatgagtggagcatttcagtgcaagagcaaatgggagtggagtg

SEQ ID NO: 745668 - DNA, 610 bp, Homo sapiens
gcccggttaaattggaaaacttaagctcaatgcatttccactgatttctctaggtgctctcatgaggctcaacagtacacactcaataaatgcacaatgaataaatgaatagttgcaaaagggtatctgggttaaagaatcatcataattatcatacaaaatgtacttgagttgccattcgtattttatctttgtctttccaataagccttgaccccattgtggagagaaaaaaatactttgattattttttaaatttccwgctactagaagactatatatggtccataataggccctcaatacatacttgtttgaaggaataaataactaaatcactgaataaacaatcctgtcttctaagccgatttagggaaatgatgggagatagtaagccccttctcaacatgaaagccatgttgggaagggccttgtatataagactaaggatgttgcgttttattatttattccttttcctataggggatgactgaagcattttgagtaatcagtgaatgatttagtggtcaagactgttttagaaagattattctgatggttatgtagaagatggattgctgtggtgataaatctgatgtatgtctaagctt

SEQ ID NO: 745669 - DNA, 479 bp, Homo sapiens
cacgtccccaccagactcaggagcccagctagcttcacccagtggatcctgcaccggggctgcaggtggagctgcctgccagtcccacgccatgcgcctgcactcctcagcccttgggtggtcgatgggactgggcactgtggagcagggggtggccctcgtcggggaggctcgggctgcacaggagcccactggaggtgtggggagtctcaggcatggcaggctgcaggtcccgagcccttccctgccctgcgggaaggcagctaaggcctggcgagaaattgagcacagcagctgctggcccaggtactaagcccctcactgcccaggccggtgggaccrgcgggccgctccgagagtggggaccgctgagcccacgcccacccgaactcgcgctggcccgcaagcaccgtgcgcagccctggttcccgcccacgcctctccctccacatctccctgcaagctgagagagccagctc

SEQ ID NO: 745670 - DNA, 516 bp, Homo sapiens
ccacgtccccaccagactcaggagcccagctagcttcacccagtggatcctgcaccggggctgcaggtggagctgcctgccagtcccacgccatgcgcctgcactcctcagcccttgggtggtcgatgggactgggcactgtggagcagggggtggccctcgtcggggaggctcgggctgcacaggagcccactggaggtgtggggagtctcaggcatggcaggctgcaggtcccgagcccttccctgccctgcgggaaggcagctaaggcctggcgagaaattgagcacagcagctgctggcccaggtactaagcccctcactgcccaggccggtgggaccggcgggccgctccgagwgtggggaccgctgagcccacgcccacccgaactcgcgctggcccgcaagcaccgtgcgcagccctggttcccgcccacgcctctccctccacatctccctgcaagctgagagagccagctctggccttggcccgcccaggaaggggctcccacaatg

SEQ ID NO: 745671 - DNA, 625 bp, Homo sapiens
gtaactaacaaatgaattagatacaataatatataaagaattcctactaattaataagaaaataggcaaaaaaagaaattttaaaaggatataaataattcagtgatgaagccaaatgctcaataaatgtatgaaaagataatttcatttttaagtagggaaatgaaaaagaatgcaatagtgaaaaacatatccatcggattaataaaacttaaaaatattttataatatcattgacgaggttgtggaaaaatagaaaacttgcacactttgatgaaaagataaatytattaaaaataccctggagggaaatagagcaatgtcccagtgaagctgtagatacgcacaacatttaaacttccaggtgcatactctcctagagaaacggagcacacgtgcataagcagacagatggtgggatattaaaatatggtgtttgtaatgtgaaacattggacacaggcctaacagctcatcagaaaaaaaagaatggataatgaactgtggtatactccatcaacagcttaatacacggcacttaaaaggaatgaatcagggatctacgcattaacatggtgaaaactcaaaaatagaatactgagcaaataaatgcaaattaaataata

SEQ ID NO: 745672 - DNA, 612 bp, Homo sapiens
caaagattagagattcctttgaaattgataaattatcaaatttatgtatgatgcttccacatttatgtttaggtaaaaaatggaaagacttttttaagagaaaaccaagggttaaaattgagttattctatagaaacatgttattttaaaacataacttgtaatcatttaaatagctgaatcccaacaattttaatttacaaaattatttatcttgtaagtaactatgattattttccctagacttccaactgcactttcaactagatgttcagatattagctagtgccaacrtttcgtatttataaaatcgcatgcactctgttgccatttagcgtagtgaatacccatttgtaaacaaagtggtgatacattatgatagccaaagggcaaagctttacctgaacagagattcatcatcttttaatgcagcacagcttgctacttgcaatatcatcaagcactctgaaaggttcttgtcagagattgatgacctaaacagtcactgaaacttaataacagcgttaacaactgcaggtcgatctcacacaccacaaaatagtgcttgtgtttttctccatgcttatttttagccaagttatatcaacatttt

SEQ ID NO: 745673 - DNA, 576 bp, Homo sapiens
aaaaattatactctcccatgtaattaaaggtatttctgaaaaaaaaatgcttattcatgaaggacagtgtttttataaaatttgatatctaatgactgatgtttaatagctgtggaataaaagaatgctaaaagtcatactgaatgcctgaaaaaatgagtcagtagttgggactagaaccaaccaaaagatccacagagtagaggtgataagaaggtgtcttgagattttagaatcaatagcaaaagctattagtatccatagccatggaattargcaaaaacaacagacaggagaagaaaaatttattcagtgatgaaaagaacattgaaaccaaagggaaggaacaagtgactcatcacaaaagtgtaccactattaaaggtaagagaatagacctgctgtggagagaattagaaactggttgctaatgtgcctacatattgagaaaaacattctagttcctattttcctaaatttcaatcacatccttagaataaaattctattatctaagctgacctaagtttacttctgttcctcaaaacctgaaagaccctaacaaaatatactggtat

SEQ ID NO: 745674 - DNA, 576 bp, Homo sapiens
aaaaattatactctcccatgtaattaaaggtatttctgaaaaaaaaatgcttattcatgaaggacagtgtttttataaaatttgatatctaatgactgatgtttaatagctgtggaataaaagaatgctaaaagtcatactgaatgcctgaaaaaatgagtcagtagttgggactagaaccaaccaaaagatccacagagtagaggtgataagaaggtgtcttgagattttagaatcaatagcaaaagctattagtatccatagccatggaattaagcaaaaacaacagacaggagaagaaaaatttattcagtgatgaaaagaacattgaaaccaaagggaaggaacaagtgactcatcacaaaagtgtaccactattaaaggtaagagaatagacctgctgtggagagaattaraaactggttgctaatgtgcctacatattgagaaaaacattctagttcctattttcctaaatttcaatcacatccttagaataaaattctattatctaagctgacctaagtttacttctgttcctcaaaacctgaaagaccctaacaaaatatactggtat

SEQ ID NO: 745675 - DNA, 637 bp, Homo sapiens
ccagaagaagacattgttatcataggcaatgatagttccatcgagttactgcccctgaacaaagtccagtgggacaagatatggaggtggaagacagtaagactgatgatccakaccctgtgtggtcctagccagtgtgtgtgtttgtgtcttagtttttaacaaaaatgtttgaaaagtaaaaataaaatgttgaaaagagaaaaaatttatagaataaggttataaggaaaatatttttgtacattgtgcaaaacgcaatgagcttggattttaagcttataaattactataaaatcatcaaaaagatttttaaaagtttataaagtaaaaatgttacagtaaacaaaggttgatttattattgaagaaagagaaatttttttttgagatttagtgtagcctaagtatacagtgtttataaagactacagtagtatacagcaacatcctaggttcacattcactcactgctctctcactgacttattcagagcaacttccaatccagtaggctccattcttggtaagtgccctatagagttgtgctatttttatattttataccatatttttactgtaccttttctgtattcaggcacacaaatacttaccattatgttacactggctacaatat

SEQ ID NO: 745676 - DNA, 603 bp, Homo sapiens
atttctcacagttctggaattggaaagtccaagatcaaggcaccagcagatttggtgtctggaaagaacctgcccctggttcacatatggccatcttttctctgtgtcctcatatggcagaaaagaaggcaaactctctggagtcttttttatgaggacactaatcccgtttatgagtgctccaccctcatgacctaagcacctggcaaaagtcccacctccraatactgtcacattctgcatcaggatttaacatctgcataatatttaacaaacattcagtctatggtaggtgaacataaaaccagaataaaatttcagctctgcatggaggaaaaaggttgggagtaagttttgggtgaccaagtatcaattttacctatatctgctctacatattaatgtcctagacctcatatctttctaagaatgtaattgaatataggaatttttcaacccacttttttttttttttttgagacgaagtctcactctgttgcctagggtggagtgcagtaccatgatctcagctcactgcagcccccgcctcctgggttcaagcaattctcctgcctcagcctactaagtagttgggactacaggc

SEQ ID NO: 745677 - DNA, 485 bp, Homo sapiens
gctcaaatccccactttttactattattaatattccaatcattttgaataacttccaatcattttggatttgtatttaattgatatattttaatttgtttaacactgttctttgaatattgtgcctaaaaagtgtcagaggcgtttgaacaagagtgactccatttgagtgagggcttgaaaaatgaggctgggatttgytgagctgcctacccagaaagtcaggcattctttgcctccaggtgtttacagttaaggaaactaataatgtttactaaacagacccagacttgggagtgtccagatatcctgatatctggagaacaaaggcattcctaattttgctttaaagataatgatattgattcttgcaaactatataactaagaaaattaatcctttatcacaaacctttgtagcagagcacatctccccatgatctctttttatcatatatacacaagcgttgtacctagggtggatgca

SEQ ID NO: 745678 - DNA, 603 bp, Homo sapiens
gcttgagtcttccctaagctttttcaaatcaataaggcttaaaaatcatttctttcatagacagacaatagtagcagcacttaaaatagcaattactgtccactcctaccacaactattcatgtagatattcacaagttattgctttcaatgcacttaaggctatagttagaagaaagtatattcatgttgttacattccaaaagacaaagagaaatgggaaagtatatgtgcaagaatattccaaaacaagaagtagaaagataatttataagcaactaaaggaagagaaaatttagaattttagagataagattttttttwaaaaaattcaccattagaataggaaataaaaaatttttatcgataggggaaaaatctattagctaggtttatggtattttaaaaaatgaactcaaaatcattcatccaatgaaagtaagtccagtatattgagttcacaagcaaaaccacatttaagcacaaagaatactgagtgctgtatttacagcacccataaaaatggaaaaggaaggttttctaaaattaggtttataatgttttctcttataaacataatagatgcttattatagaaaatgtga

SEQ ID NO: 745679 - DNA, 622 bp, Homo sapiens
gctgatctgattttggcttttgaaaatttactcagactgtagtgttgagaatgaccatgcagtaggtggggcaaaagtaaaagcaagtacatcttttagaaagcttttgcagtaattcatgtgagatgcaatggtttgggccagactggtagcaatgcggatgktaaaaaatcattagattgcagatatattttaaaggttattaaaggttattagcctttatggcagaattggcaaatattaatagattaggtagaggctgtaaagagcgtcagagatgattccaaggttattgatctgagcatctatagggatggagttgccattaaccaagaggagaaacgctgcagatagagaaaagttagattattgttactatctaaattatctgcccatctctagttttgccccctttcaactctcaactttttaaacagaaaacctgactgagtcctaagctaattaaaaatattcattagatcatcatctcttttaggataaagtccaaactccttgacctgatttcattttttatattttgtctctccctgttctttttcctcccatgcttcctacccttatcatcacaccattagtcaaataatacctaacatattagata

SEQ ID NO: 745680 - DNA, 646 bp, Homo sapiens
agctgatctgattttggcttttgaaaatttactcagactgtagtgttgagaatgaccatgcagtaggtggggcaaaagtaaaagcaagtacatcttttagaaagcttttgcagtaattcatgtgagatgcaatggtttgggccagactggtagcaatgcggatgttaaaaaatcattagattgcagatatattttaaaggttattaaaggttattagcctttatggcagaattggcaaatattaatagattaggtagaggctgtaaagagcgtcagagatgattccaaggttattgatctgagcatctatagggatggagttgccattaaccaagaggagaaacgctgcagatagagaaaagttagattattgttactayctaaattatctgcccatctctagttttgccccctttcaactctcaactttttaaacagaaaacctgactgagtcctaagctaattaaaaatattcattagatcatcatctcttttaggataaagtccaaactccttgacctgatttcattttttatattttgtctctccctgttctttttcctcccatgcttcctacccttatcatcacaccattagtcaaataatacctaacatattagatatactatctttccgtttctaaaat

SEQ ID NO: 745681 - DNA, 622 bp, Homo sapiens
gctgatctgattttggcttttgaaaatttactcagactgtagtgttgagaatgaccatgcagtaggtggggcaaaagtaaaagcaagtacatcttttagaaagcttttgcagtaattcatgtgagatgcaatggtttgggccagactggtagcaatgcggatgttaaaaaatcattagattgcagatatattttaaaggttattaaaggttattagcctttatggcagaattggcaaatattaatagattaggtagaggctgtaaagagcgtcagagatgattccaaggttattgatctgagcatctatagggatggagttgccattaaccaagaggagaaacgctgcagatagagaaaagttagattattgttactatctaaattatctgcccatctctagttttgccccctttcaactctcaactttttaaacagaaaacctgactgagtcctaagctaattaaaaatattcattagatcaycatctcttttaggataaagtccaaactccttgacctgatttcattttttatattttgtctctccctgttctttttcctcccatgcttcctacccttatcatcacaccattagtcaaataatacctaacatattagata

SEQ ID NO: 745682 - DNA, 620 bp, Homo sapiens
actctcaactttttaaacagaaaacctgactgagtcctaagctaattaaaaatattcattagatcatcatctcttttaggataaagtccaaactccttgacctgatttcattttttatattttgtctctccctgttctttttcctcccatgcttcctacccttatcatcacaccattagtcaaataatacctaacatattagatatactatctttccgtttctaaaatatgtagcccccttttctcattcatctcatytattgctcatttacctttgctgttacttcttcaaggaagctattttgttgaacactataatacattccctaaatatacccatatgttaagatgcttttgttattaggacattttccacattatatcataattgcacatttaatttcactcaccattcactgtaaacttcagtaggaatcaaatctggctcgttttttaaatgtacaagttagctgtgtaacacatcatcagaaacatagggtcttaatacaacaataattacttattttgctcacaaatctacaatataggtagtctcagtgggtaaagtttatttatgcttcatgtggtatgagctgggatggcttgacttgagctagact

SEQ ID NO: 745683 - DNA, 620 bp, Homo sapiens
actctcaactttttaaacagaaaacctgactgagtcctaagctaattaaaaatattcattagatcatcatctcttttaggataaagtccaaactccttgacctgatttcattttttatattttgtctctccctgttctttttcctcccatgcttcctacccttatcatcacaccattagtcaaataatacctaacatattagatatactatctttccgtttctaaaatatgtagcccccttttctcattcatctcatttattgctcattyacctttgctgttacttcttcaaggaagctattttgttgaacactataatacattccctaaatatacccatatgttaagatgcttttgttattaggacattttccacattatatcataattgcacatttaatttcactcaccattcactgtaaacttcagtaggaatcaaatctggctcgttttttaaatgtacaagttagctgtgtaacacatcatcagaaacatagggtcttaatacaacaataattacttattttgctcacaaatctacaatataggtagtctcagtgggtaaagtttatttatgcttcatgtggtatgagctgggatggcttgacttgagctagact

SEQ ID NO: 745684 - DNA, 500 bp, Homo sapiens
ggagaaagaaataagtgacctgaaaacaaccagaaagcaaattacaaaatggcagtagcaagtctatatctatcaaaaattaccttgaatataaatggattaaagtcttcaatcaaaagacagactggctaaatggattaaaaaaaaagatccaactataagatgcctacaaaagatgtattttactagtaaagtcacagattgaaagtgaaaagatggaaaaaaagtatttcacacaaatgtaaactgagaaagaacagaagtagctatacttatatcagaccaagkagactttaagccaaaaactagaaaaagagaaaaggtcattacataatgataaaaggggttaattcatgaagaagatgtaacagttgtaaatatatatttgtctaagattggagaacccaaataaataaagcaattctgaaataatctgaaaagagagatagaccccaatgctatcatagtaaggtacctccacaccccaccatcaataatag

SEQ ID NO: 745685 - DNA, 628 bp, Homo sapiens
aggctaggaagaaactgcatcaactaatgagcaaaataaccagctaacatcacaaggacgggatcacattcacacataacaatattaaccttaaatgtaaataagtgaaatgctccaattaaaagacacagactagcaaattggataaagagtcaagacccawcagtgtgctgtattcgggagacccatctcatgtgcagagacacacataggctcaaaataaaggaatggaggaagatctaccaagcaaatggaaaacaaaaaaaagcaggggttgcaatccaagtctctgataaaacagattttaaacaaacaaagatcaaaagagacaacgaaggccattacataatggtaaagggatcaattcaacaagaagagctaactatcctaaatatatatgcacccaatacagggcacccagatccataaagcaagtccttagagacctacaaagagacttacactcccacacaataataatgggagactttagtaccccactgtcaacattagacagatcaacgagacagaaagttaacaaggatatccaggacttgaactcagctctgcaccaagcagacctaatagacatctatagaactctccaccccaaatcaacagaatatgc

SEQ ID NO: 745686 - DNA, 628 bp, Homo sapiens
aggctaggaagaaactgcatcaactaatgagcaaaataaccagctaacatcacaaggacgggatcacattcacacataacaatattaaccttaaatgtaaataagtgaaatgctccaattaaaagacacagactagcaaattggataaagagtcaagacccatcagtstgctgtattcgggagacccatctcatgtgcagagacacacataggctcaaaataaaggaatggaggaagatctaccaagcaaatggaaaacaaaaaaaagcaggggttgcaatccaagtctctgataaaacagattttaaacaaacaaagatcaaaagagacaacgaaggccattacataatggtaaagggatcaattcaacaagaagagctaactatcctaaatatatatgcacccaatacagggcacccagatccataaagcaagtccttagagacctacaaagagacttacactcccacacaataataatgggagactttagtaccccactgtcaacattagacagatcaacgagacagaaagttaacaaggatatccaggacttgaactcagctctgcaccaagcagacctaatagacatctatagaactctccaccccaaatcaacagaatatgc

SEQ ID NO: 745687 - DNA, 595 bp, Homo sapiens
atgctgctgtgaacaaacctaccacaatgtctgttgtataaaagtataacacatatggttatgtataatacataatacttgataataaacaactatgttactggtttatgtatttactattgtgagacaaagtagcaaatgtaaggagtcaygtttgctcattctgcttgtcaggagaatttcacaaaggccctgactcggtgactgagcacagccctctgaaaaatgccctgaagatgataagcaggatagagcacagattcccatgtctcttgcctgaatcaccatgtttttagaaaagataagttcagtaatcctagcccttgcctcttcctatacataagataatgtctgacaggattaatgattgtgcctctataatctgtaaccagatgtacccttgcacccacattttgatgagattttgccctaatgtaagttctgagcacatttaatgtaacttctgagcacatgcagagctgctttcacctgtatgtaagctgcgggctgcaacactgccttaaagaagtctaacagaagctccctgaaagattctcagaggttgcaatcctcagtaagacatctgaataaaact

SEQ ID NO: 745688 - DNA, 551 bp, Homo sapiens
tgtgtatatatagtgtgtgtatataaaatgtgtacccatatattaagtgtatatatatttatgtccccatatatatgtgtatatacttttatgtaatatatattttatacacatatatacttatatatcctgttttttttcaggttaatattaagacacatatggaaaacttacaccatatgagacacatccattggcactctagaccacctacagaattacagatgggagtctcatgatctttatacttcatcaaatagttcatactctctgcccaggtcttatctgtgttttcttagaagaacataaaaatgtaatatgactctaccatcaaaaaatgtgtcaataaaacttaaacacagtttaaaaaattaatggtgaacgttgccaaatgtctatgataaatttgttttasaaaatatgatcattgtgggaatgaagaaataaaaataattagacgagctagaacaacctttacaaaaaagatagctaacatatttattgagcactatgtgccaggcatcctacctttatttgccatttgatactca

SEQ ID NO: 745689 - DNA, 627 bp, Homo sapiens
tcatcctactctctatttccatgagatcaactttttaaactcctacatatgaaggagaatatgtaatatttgtgtttatgcctggcttatttcgcttaacataatgaccttcagttctatccatattgctgcaaatatcagtatttcattcccttttcaatggatgaagagtacttcattgtgtacatataccccattttgtttattcattcattcattgatggacatttaagttgattccatatcttgctattgtgaatggtggtggaataaatatggagatgtaggtatctctttgatataccttgttttttaatacaacatagttacgttgaatatttattagatttgccattaggatattgaacatccttggctaccattgctccttgcatataacttctttgatctgacttaactttttcctcttaattaaatttatgctaggattttttaattaaaaggggatagaactcagcctaaatrtccttaaataaaataggttattttataaaacatttggaatagaatggctttcatgcaggttgatagccatgattaatttttcaactttgcttttacagcatcaaaactcatctcatgtttggaaaaaaaattggggctgtc

SEQ ID NO: 745690 - DNA, 527 bp, Homo sapiens
gctttgactcattggttcaaaaataaaaagggcttaagtcaaacattttgtccgaaaaggaaaaagaatataatgcctttcagttcacatgactttaataatctttggggaataaaaacagttttacatgcaaggtgtgtaagaaaatgaaatgtattttcagtaaaagattatawgaaggcatgggaatgtggattttaaagggttaaaggattgttttaagttacatgaaagctgaaggtttgaacaagttatggaaggtttgtgaaaaattaatcttgtagaagaaatatgtgtgtgaacatattgactaaagttaaagagatagtattcagtttttctgtaaatcaaacaatggaataaaagcaaaacatagttattttagggcattgatctgctctttaacataaaattgtaaagggttattcgaaaaaggtttatgagactcttatggtcagacattaaagctgaaaagatttgtctacaaggttttattaagaattggggttggctcggtactcatgccg

SEQ ID NO: 745691 - DNA, 618 bp, Homo sapiens
tacacacagaccaggtttgtaataaaaacaaaatataaaaatacaaaagccacaaaatgtcccagctggcagagactgcactccaaatgggagggatcctaggcaggaagcacagttcatatttatggaacagaacgggacagctagatgctttggttctttgggggaagtatttagcctaacccaatcacaacatatatattttctaactcagggattcatgagttattttcatagattgctcatggttattaccgaaggttgctctgtctctttgaaaccaaccatgttgccgggcaacagcttccttgttgatttcatttctcctcttatcattgtctcagtaacttcagcaaatctatccatattctgytctctcccacacaaaataaagtccctttacattcctgaattatgaggcagcagaagtaaaaagtgatagattcatcaagcttaattataagataagatgctggatattttactgctatttctgcagtctcagctttggtttgagtttgaagcattatgggtcaaaattcctaatgatttttgaaaatgccacctgtgaggtctgtggcagagcaagcagttatactgggggaaagcaaaaataaa

SEQ ID NO: 745692 - DNA, 666 bp, Homo sapiens
ctcttcctcctaaaccaattctagtccatgcacataacaaaagatcaaaatacatcgagcaaaaactgaaagaactgaaagaagagacagataaacccactattatagtaagagattgtagtacatgtctctcaataaatgaaagaacaaacagacagaaaatcagtaaagatacagaagacttgaacaacactaccaaccaaattgacctcattgacatgtatagaacactctgtctatccaacaacagcagaatacacatttttctcaaggtacatgggacactgagcaagatacaccatattttggaccacaaaacgagtcttaatacatttaaaatyatacaaatcataaaaagttttttctgaccacaatagaattacaatagaaatcagtaacagaaagatatctagaaaaatcctctatgtaaaaaccaaacaatgcactctaaagtaacccacaggagaggaaatgaaaataaatcaaaaagcactttgaagtgaatttaatttttaaagtgaaaaaaatgacatatcaaaattcatggtatgcagctaaagtaatgcttagagggaaattaaagtatcaaatgtctatgatagaaaaaagaaaggtctcaaattgatgatctaagcttctatgcttagaagttagaaaagaaaaata

SEQ ID NO: 745693 - DNA, 599 bp, Homo sapiens
aatcagtaacagaaagatatctagaaaaatcctctatgtaaaaaccaaacaatgcactctaaagtaacccacaggagaggaaatgaaaataaatcaaaaagcactttgaagtgaatttaatttttaaagtgaaaaaaatgacatatcaaaattcatggtatgcagctaaagtaatgcttagagggaaattaaagtatcaaatgtctatgatagaaaaaagaaaggtctcaaattgatgatctaagcttctatgcttagaagttagaaaagaaaaataatcccaaagtaaggagaagaaggaaataataaatataagagctgaagtcaatcaaatagaaagcagactaaaaaaatagagaaaatcaacaaagctagaagctggttctctaagaatakaaataaaattgataaatctctagccagattgaacaggaaaaaaagacgcaaatttcacatatcagaaatgaaacaaaggacatcacaagatattctacagacaataagaaaatataattacaaactttgtactaacactaattcaacaactttgatgaatgagtacatttattgaaatataactatcaaagctcactaaaaat

SEQ ID NO: 745694 - DNA, 632 bp, Homo sapiens
tataattcctatcctcagtaaccttaaattttagtgaaaacctaggaagcaagaagtcctgagctgcctatcagacattagcattttatagatgagaaccatttgacaatttgaagggggccaccagcacccgcctctgagttccctcagtatttactgatcattatttttactatcttagccagcggagtgtagcagggcaacacrtggggagaaggtcagcagggaaacatgtgagcaaaggaatctgtatcatgaataagttcaaggaaaggtactgtgcctggatgtgcacgtaggccagatttatctttcacttttcataaacatctcagtgtagcaaagagtaacagagcagcattgttgccagcttatcttgcctctagccacagggtggttttctcctatctcagaatcgaacgaatgggaatggtcggctttacactgagacattccaatcccagggaggagcaggagacagaagccttcctcttatctcaactgcaaagaggcctccctctttcactactcctcctcagcacagaccctttaccggtgtgggcctggggcatggtaaggtctttcctttccaacaaggccatatctcaggctgtctcagtggggggaaagcc

SEQ ID NO: 745695 - DNA, 523 bp, Homo sapiens
cgtgggccaccgtgcccggccaatcctttattacaatataagcttactcttgtttatcttgtcctcagagtaataatcggaggcttcggtgaacgcctcattcttcgttctgaattcccaggcaaacttttttgcaccatgattatgccatgcagatcgtttctgtcatgtactttgcttcctgtatcttgctgtttatactgggacctgaattcctcttgttggggctccattttcattcarattatagttattctatccatgcagtttagagagctttttattctccttatcattcatcaagaaactgaactgagcaatgttgtatcatctgtccacatggcttggtttgttctgagctataaccttcattcacttattcagcaaaatttcctaaacaactactatatgccaggtgttttagatactggggacgcagcagtgaacaactgggtcaaagccttattctcctgatgttatgttctattgaaggagataggcaaccagtttctgatggtgactg

SEQ ID NO: 745696 - DNA, 628 bp, Homo sapiens
ggagggccactatgacagtaaggtgaggggtgttttgcgaaaggaagaaaaagtagggaaagggcttttatgctctgaccataaggaccataaggtctgtgagtgccccaaaggtcaggcagaaaaacacttttcttttctgaaaaggaataaaccaggcaagaaacaatcagggttacgaagtgagatgggcaatgttatgatctgacagttaacattttttcctgaggttagcagatttgggaggagttgttargaagggcttgttctgagttttgttgcttgctttttccaatgcctggtcaaagtccaagggcctaagggaagaagaaaaactcacgaaagtttggccaagccaagttagtagataattattttgtacgaattggtcactaggtacaaacaattcagtggatcatttataaggcaaagagtgggagtttggagagtgtgtgtctgatttcactatatttaagaaagggcggcatccatgtgtcttatctaagtcataaggggaagggtagttatttgcagtaagcatttcctagaacaggggtcctcaatgcccaggccacagacaggaatccttccatggcctcttaggaaccagggctcagagcaggaggtg

SEQ ID NO: 745697 - DNA, 627 bp, Homo sapiens
caatatcttgctgggccagttggtgggaattgtcttctatatgaggacagtctttaatgattggtagagggggttgatttataatatttaatgtgcagacaccagcacagaggatcaaagaaaatgaataaacagagaaatatgttctaaataaaaatagcaagagaaatttccagaaacttatgtaataaaatgaagatatataattttacccaacagagaattcaaaatatggtcattaagatggttactgaggccataatagcaatgcacaaataaaatgaaaatttcaacaaaaagaaaaaatgtaaaaatgtgccaaatataaattatacagctgaagaatataataactgaactaaaaawatcaataaagggttcaacagcagactagatcaagcagaagaaataatcaaaggtaggtaactggaaattattgaatcagagaagcaaaaagaaaaaagaatgaagaaagaatggagaatggtagtgtggacccatagtccctcaggatgctgaggatgggggataacttgagcccaggagtttgagtccagactgagcaatatgaagagaatctgtatctttaaaaaaatttttttaaaaagagtgaagagacctcttctg

SEQ ID NO: 745698 - DNA, 645 bp, Homo sapiens
ttatcaactacaatgatgtaatattctagattttctgttgccatttcaacaaagttcacagtgtcttcaccaggagtagatttatggctagccagttatcccagcaccatttactgaagaaggagtcctttccccattgcttgttttttttcagctttgtccaagatcagttggtgggtgtggccttatttctgggttctcttttctgttccattggtctatgtgtctgtttttctaccaataccttgatatttttgttactgtaaccctgtagaatagtttgatgtcaggtaacatgatgyctccagctttgttctttttgctcaggattgtcttggctattcaggctctttttgggttccatatggattttaaaatagttttctctacttatttgaagaatgttattggtagtttgataggaatagcattgaatttgtaaattgctttgggcagtatgtccattttaatgacattgattcttcctattcatgtgcatgggatgttattcaatttgtttgtgtcatctctgatttctttgagcagtgttttgtcattctccttgtagagatcttttacctctctagttagtcgtattcctaggtattttattctttttgtggcaattgtgaatgggactgcatt

SEQ ID NO: 745699 - DNA, 645 bp, Homo sapiens
ttatcaactacaatgatgtaatattctagattttctgttgccatttcaacaaagttcacagtgtcttcaccaggagtagatttatggctagccagttatcccagcaccatttactgaagaaggagtcctttccccattgcttgttttttttcagctttgtccaagatcagttggtgggtgtggccttatttctgggttctcttttctgttccattggtctatgtgtctgtttttctaccaataccttgatatttttgttactgtaaccctgtagaatagtttgatgtcaggtaacatgatgcctccagctttgttctttttgctcaggattgtcttggctattcaggctctttttgggttccatatggattttaaaatagttttctctacttatttgaagaatgttattggtagtttgataggaatagcattgaatttgtaaattgctttgggcagtatgtccattttaatgayattgattcttcctattcatgtgcatgggatgttattcaatttgtttgtgtcatctctgatttctttgagcagtgttttgtcattctccttgtagagatcttttacctctctagttagtcgtattcctaggtattttattctttttgtggcaattgtgaatgggactgcatt

SEQ ID NO: 745700 - DNA, 627 bp, Homo sapiens
ttaaaactgtgcaacattgctgagagaaaataatgaagacctaaataaatggagaataatcacatgtgtatgaattgaaccctcaatgcatttaagttattcattgtctcccaaataaaaattgctttttaacatagaatatctttcttatagaaagtaatgatcttcttatatttatatttaaaaagcaaaagttctggaactgctgaaaaaagcttgaaaaattaaattgaagcatttaaagttgatctaaagttgactttacatcaagattctgcaaaactacatagtcaagagagtgctatgtttttattataactaaaaattgttagtggaagagtttcagaagtaaaactgcaaacacaggggcaattgattttgacaaagatgccaaagtaattccayagacaaatcaaataatttttaattttgctggaacaacttgatttctatatggaaaaaactgaccaactttttacaccacacacacatattagaaaagtattataaacttaaaattagaatttaaaatgttacagcttctgaaagaatacagaaaatgtattcgatgcctctgtgtaggcaacaatttctgaatctaaatccaaaaagcgacaacatcaaaat

SEQ ID NO: 745701 - DNA, 626 bp, Homo sapiens
tttctaacttattctcaaatggcaatcttcccttaggatgttagtaccagactgtaaacataacagtgcaaactaaaaccatacaaagcaatcttaaatctcaataagaaaaattaatattctgggatctttaagcattattgrttgaacattaaaaactatcttattcttacttataaatgcatagaaaaattaaaaacagtaaaatgcatatttatgttatacaccataatttatagcaatacatacaattaatttattttattcatgtgtataaaacatcaaaactatcttattcttacttataaatgtatacaaaaattaaaagtagtaaaatgtatatttatgttacacaccatgattttaaatattagcaatacatacaattaatttattttattcatttgtataaaacttatcaagagtaatttgaacagtgctcatcttttcttaatgtgaaatttacatataagtgagcaccatttttataacttagtgaattattattctacttcctaaatttgaatttacttctaacatattatcccttgcattttcaatatcatgaagcatctttgagagatttttttttttttgagacagagtctcaccctgttgcccaggta

SEQ ID NO: 745702 - DNA, 521 bp, Homo sapiens
atccacatttcaagactgttttgatctatttcttcagtgatacaaagataaaaccaagtagcataatggctcacctgatttttggttcttctgaagtgtttttttctgtgtggatagctgttacattggtgtccttgaagaggggactatcagtagagccttccattctaccatcttgctctgcttctcagcctaatgtcttgtttcttgaactaactttacctgtaatacttctagctatttttcaaggtttaggtcaaattccatcaacaaccaaaggaactactctcttttgtgctcccaggaaaaaggaatctttacttactcaacactgatatcattamtcagtatagagttgccagtttgcttgggtcagtcccaggttatgcctgttgtatctgtcagcagttgtccatagcatccttttttactcacaaaagtagccaagtaaaatgagtaattacacagcctcctattttgtgtgattccagagctaccttctatatcttctttgggtaaga

SEQ ID NO: 745703 - DNA, 511 bp, Homo sapiens
tcaaacatttgcatatctgtccataggatagatcctggacagtattttattgtgcttcagaaacccatttctcttattaggagtgaggctgggaagttttatatacatttgggagctttttgtgtttttctttctgtgaactgttcaggcatacatatacagagactgactagctgtcctccagacctgttttcttttcctcctggggtttcccagcctcctggcaggtaactgtggctggtggactgaggcctgggcaatggatggtgggccygagtggcaattctcccaagcatgattcataaaaacctcctatgagatcctcctactctttcttccccatctgctggaaagatgttgacacccagagcgacttatagagccaggtgttgaagatggcagagcttctgtcagcctggtcctagattgttttcaaaaagaagagccaaccctccccagtcctgtttccttttggaaaaatgtaggcaagaaaaatgttcatagtgttagg

SEQ ID NO: 745704 - DNA, 532 bp, Homo sapiens
actcactctaaatcataatcttatcacctaaaatgatagactcacatacataaatgggcaaagaacatgagtaacagttcacaaaaaaggaaatgcaaacagattaataaatacatgaaatattccattttgttagtcatcaattaatgtaaagtgaaacaaccatgagagtttatttttcctttctcattcccaccagcagcttatatgaatgcctaactgactattctccttcctggtatgaatgtaaattagtacaattttctggaaaacaattttgcagtatgtaattaaaaaccagagaatagtcataccttttgrcccaataatcactcttcaagcaatctattccaaacaaatagtcagatatccaaacatccatgtacaaaactacttatggaagcatttatattagtgaaaaaatgaaaacacctgaaaggtccaagaatatgaaattgattaagtaaattgtggtatattttaatgatgggatattatgtagtcatcagaactattgtcaaagaattgttat

SEQ ID NO: 745705 - DNA, 600 bp, Homo sapiens
gaattatgaaatttaagatgtttacacaggctttatgtaaagtagttgtaacccctttacctaaatgtcttacgaaaataagtattgtatctaactgggggatttttcccctatctagtactataaaactgaagacatgtacatctgctctttgagaactgttgcttggaytcactaaatgaaaagtagtatgattccctgagcccacaaaatatagcctaaagggtggagtgctagttgagacaaatcctccactttatagccctttatgaagtatttattggggcttaatgcaacaaggctgtactttccaatgacaaagactgaactagagaatttccacttgaggaacatttactgccttgctatgaaatgttaactgaagctacccctatgctgaatgaaaataatggtgccccaaagagtaaaataaaaaatggtttacatagaatcttgctacctggggatacaaggaggagaaacttataagcagagagcttcttttttccctaggactaattctcactatgtgaggatctgctagattctacagtgcctgatagacagctcccatgagttatttggtttgcgaatggcatt

SEQ ID NO: 745706 - DNA, 642 bp, Homo sapiens
tggagggactactgtagttggtcagtaaatcaccaagtgtctcttctctgcttttcaatgatattttcccccaattatgggtatgcattttgagaactaatgagtgtttgggtgttgggtgttggtcatatcaaagaccctttggtgatcagcctcttttttctaaaacttcaattttctgatttttgacatgaggctaggagtttactcttctgtgtcattgtgaaacgagctctacaaaagatgcgagcacattatgaagcatgcaaattatgagatatgtaagacatttgtacccatgattgcttggatataggttgtcacataagaagtgctggatttaaygtaggggaattacacaatctcttgcatttaccctattactctgagaaaacagaacaatactttcttcagggtttgtcaggatatatgcagggattggcttgccatcatgttaacctataaagatactctttccaccttttaactccaaaagtaggctactttctggtgggctagtccagcatttggctatcaggcaattctgttcttgagggtgtttcactaaattttattgtagcagttttgggtaccggtagaaattgaaaagggctgcatgactaataatcccacttggggaaa

SEQ ID NO: 745707 - DNA, 418 bp, Homo sapiens
tacattcagaatcactctggggatcctattaaaattctagttctcaggcccatcccaaaaatttgtatgcagtaggtctgagggatattggtctgtgcatttacattttcagtgagtgctctagatcattttgatgtttgtggtccacagaccaaactttaagaaaaaaccyatgtggggcttggaaaggaattcttcaggatttaaattttataattttaggtaatggaagttttcatgtttttgctcagtgaaaattcggtcagtttcagtaactctgactgtttgaatttgtttattgcattaaatgttttttataacatgaaaacagacaatgagctttttaaagaaaaccatactgataaaatataatcatagaaacacacataacacatacacacacccctgaatagtccag

SEQ ID NO: 745708 - DNA, 442 bp, Homo sapiens
catgccatgtcctacattgtttcagagtttcagaaaactggacagggattttatagagtaatggttcttcaagtgttgtcctggaccagcagagtcaccttggaacttgttagaaatgcaaaaatcagaaatctgggtgtagaggctgtcaatctgtaggtaaacaagccttccaagtgtttctgatgcaccctaaatgtgatarctctgtagtatatgatgcaatgatagggagtaggaattaaatatgaagttatacacattagcctgcccccggctacagaaatggttgggactaggttgtcacacacttgtagaaaggaactaatgcaatcaattcatcatgtcttttgacagactctaagggcagatatggttcactttgttcaaggacaagtaagtcctattaaactactgtgaagaaaggaagattcaagaaaat

SEQ ID NO: 745709 - DNA, 630 bp, Homo sapiens
acaatgtgcaataattaaatcaagctagttaacataaccatcacctcaaatacttaacactttttgtgttgagaacatttgaaaattactcagcaatttcaaaatgtataatactctataacagatattaactatattcaccacactatccaatagaactcaaaaaaactgcatattcctcttgtgtgagatttggttccctttgaccatcatctcaccactcctcacactctttagcctttgctgagatccatttgtcaaagagatgtctgcacccaaggtctgtcgcagcactatgtacaataaccaagttatggaatcaaattaagtgtccatcaacagacggatgaagcaaatgtggtatatacacccaaaagaatactattcagtctttaaaaagaaggaaattctgtcacttacaacaatgtgaatgacattagaaaacgttatgctgagtgaaataagccaggcacagaaagacaaatacracatgttctcaattatatgtggaacctgaaacaattgaacccataggagcagagaatataatggtggttacagaggaagtcagtttttaaaagagactaaggaaatacataaaaaactcaaaatttaaggtagtgactccct

SEQ ID NO: 745710 - DNA, 536 bp, Homo sapiens
tatatattcataatgggtatatcgtcaaaggaattagttgttaattttggttgttatctttgtcagatatggtataagataatgttcacccaggaaatgaaattccaaacttttgaaatatcttcatagttagaagttatttaaaagcataggaattatctcttaacagtttgaaaacaatcaacataaaaagatcttcagcattatttttttcccttaacggtttgaaaactttcccaacttttttggtcattagtttatttagttatatcttgacacaattttataattattagcacrgaattttaactagtagtttcttaaattttttaaattttttctacatatttagttatatctcatcctgattcctacattaatgtgccttttcctttattatattttccaagtcttaacaaatatttggttttctcaaaatcctagattttggaactatttactaactactttttactattacagaatttattaatttcttttatttgtttaaaattaattccctccacctgctttct

SEQ ID NO: 745711 - DNA, 528 bp, Homo sapiens
tcatcattatacagtaacaagtggtttgctgataaactggctctgaagaaaataattgaaaagccctgatttgtagcatttgcaacccttgtggtgtaaatgcttccactgtggcaaatttccaagttactgatacaaggtcattgcactcagagttggggcaagatggatacaactaactggccctcaggagcaagctccaacataccactgatagtaagtttcttttctttttttcccccgagactgagtctcactctgtcacccaggctggagtgcagtggtgtgatcttggctcactgaaacctccgcctcctgggttcaagcaattctcctacctcakcctcacgagtagctgggattataggcacgtaccaccatgcttggctaatttttgtatttttagtagagacggggtttcaccatgttggccaggctggtctcaaacccctgacctcaaatgattcacccacctcagcctcccaaagtgctaagattacgggagtgagtcaccatgcctggcctgaa

SEQ ID NO: 745712 - DNA, 602 bp, Homo sapiens
atccgcagttggaaatcaaaccctcaccaccatcactttatgcaccttcaggatggggcttccttggccgctccccaccccttctgcccatctgctgggatggcttggtgcccactccaagttggttggagcctatggaggtgccaggcaacaatgtgttttgatgggcagcctgcagaaggtggcaattgccatctcttgtgagtgaaggccgtaagcgctgcyagccctggcatgccaggtctctgtacacttgttcacacctgttgactctccagtgccaagaaaagcatactcgagctaggaacgagggtagggggagatgacactctccaagcaccagcctctttgggtttccttgtggggacagatagaacttagggagatttggtcagcgagtttcagacccatacctgggtccagcactggaattgctcagtggctctttgtcctctaatgttagtctgtgcccactcaaggaaaggtgcccagctgggaaaccgcagcacaggtacaattcaatacatacacagccttatctctaagccagagaaaagaggaaaagagaaggccatgctgagtttaggaaacttctttccact

SEQ ID NO: 745713 - DNA, 602 bp, Homo sapiens
atccgcagttggaaatcaaaccctcaccaccatcactttatgcaccttcaggatggggcttccttggccgctccccaccccttctgcccatctgctgggatggcttggtgcccactccaagttggttggagcctatggaggtgccaggcaacaatgtgttttgatgggcagcctgcagaaggtggcaattgccatctcttgtgagtgaaggccgtaagcgctgccagccctggcatgccaggtctctgtacacttgttcacacctgttgactctccagtgccaagaaaagcatactcgagctaggaacgagggtagggggagatgacactctccaagcaccagcctctttgggtttccttgtggggacagatagaacttarggagatttggtcagcgagtttcagacccatacctgggtccagcactggaattgctcagtggctctttgtcctctaatgttagtctgtgcccactcaaggaaaggtgcccagctgggaaaccgcagcacaggtacaattcaatacatacacagccttatctctaagccagagaaaagaggaaaagagaaggccatgctgagtttaggaaacttctttccact

SEQ ID NO: 745714 - DNA, 635 bp, Homo sapiens
agcaagacagtctcaaaaaaaaaaaaaaaaaaaaaaaaaaaagaaggagggcagaggcagtggtccagctataaagccaggagatggccatgggggagagtttaattcagtacccccaggacacctagagctcttgctaggcccacagctgttttctggttgtttgaaaggtcactgtgtcaacaaaacccctgggggccaacacctataagtcacagcagacatgccaggtctgcgcagaggtgcactgctcagcttgttcttcaagagaacttgctgggagaagtgcagctggctgaragcctccagctgccacacctttctgtctggctcaatattcaggtttcccctggctgcttctacccaacgcctgaacatgcctggggtgctaacgctgcaacatttctgcccacagagagcccctctaataggcaatgtttgcctgcgattctccactggcctttcagagactttctcgagctgcactgtaatctgagactcttcctacccaatgcttccttccttctctcctttcacaagtgtaggctgtttctgcctcctgctcctcccttctcctttatcctccacaggtgttttccccaataaatctcttgcacatctaattctgtctttgt

SEQ ID NO: 745715 - DNA, 632 bp, Homo sapiens
gctatgttctgagaaatacgttgttaggtggttttgtcattgtgtgaacaccacagagagcacttacacaaacctagatggtacagcctactacacacccaggctatatggtatagctattgctcctaggctacaaacctgtacagcaggttactgtactgcatactgtaggcagctgtaacacagtgctaagtgtttacatatctaaacttagaaaagatatagtaaaaatatggtgtacaagatttaaaatggcacacctgtatagggcacttaccatgaatgaagcctgcaggactggagrttgctctggtgagtcactgagtgagtgatgagtgaatctgaaggcctaggacattaccgtctgctactatagattttataaacactgtacacttacgttagactaaatttatacgaatgattttttggtcaggcatggtggctcatgcctgtcatcctagtactttgggaggccaaggcaggaggatcacttgagcctaggtgttcaagaccagcctgtgcaacatagcaagacgttctctctacaaaaaattttaaaactacctggacatggtggcatgcgcctgttgtccaagctactcaggaggctgaggcagggggatcccttg

SEQ ID NO: 745716 - DNA, 464 bp, Homo sapiens
ttggaaggttgcaccacagtcacctccagccccgaccctgtcagggacgagaacaacaggaaaagatcgcactcaccccccaaaacaagaaggaactgtcaaaaatcctaatacagccacattttcttattttagggactaaatcaaggggaggggccragggaatagaactagacaccatgtcacttccatcttgagtcacttatccatgtccacacaccccacacacatctctgagcaagggttatcagggctcatgaggaagggttgacaggggttgaccacaaccccaccaaagtgggagaactcaaggctgggagagggaaggagagcagccagcagaaagcatggactgcagctgctttctctcaagtctgctgggccttacgtcacagctgctcattaagcacccacttgacgccggggaagtgaaatagcacagacctggcaccagaaagaacaaa

SEQ ID NO: 745717 - DNA, 627 bp, Homo sapiens
ggtcaagggacaggaactggggatccttggaagcaggagagcttagcttatctaacaaggcacaagtttggaaggttgcaccacagtcacctccagccccgaccctgtcagggacgagaacaacaggaaaagatcgcactcaccccccaaaacaagaaggaactgtcaaaaatcctaatacagccacattttcttattttagggactaaatcaaggggaggggccaagggaatagaactagacaccatgtcacttccatctygagtcacttatccatgtccacacaccccacacacatctctgagcaagggttatcagggctcatgaggaagggttgacaggggttgaccacaaccccaccaaagtgggagaactcaaggctgggagagggaaggagagcagccagcagaaagcatggactgcagctgctttctctcaagtctgctgggccttacgtcacagctgctcattaagcacccacttgacgccggggaagtgaaatagcacagacctggcaccagaaagaacaaatgtggcacccactgctccttttaaggactggctcaagaagcagcaggcctcagggcaggaggtgaggcaaacacagcagtaccttcgcgggagagg

SEQ ID NO: 745718 - DNA, 518 bp, Homo sapiens
ctacttttttagggaataatacatgtaggtatgctctggacgtgaggccattcctaactgggcttgccctttggtgacatcccaggatctgagtctgtgatctggtatagcctattagaaagcccccaaagtctccatggaatggcaacggcccattggaccagcccaaccaagttataccttactttctctatctacaggctgcctcccctgacatgggaagacagacatcgaggagatctgctgggcccacaggagctccaagggaaatcacagaaatgctcrccttatatataaaactgctttattaaaaagtcagctattaggaaaacaaagcccttacaagggttctatcaaaaagtacaaattttaaataaatgcatcagaaaaatggcagccagatataccagccacagtcacaacctcaaaggccttgtggggaaggaagggagaattagggaggaggttccgagaactcaaggaagaggctgggcacagagggtctttgggtgcctgca

SEQ ID NO: 745719 - DNA, 589 bp, Homo sapiens
gcccttctcacttccccccctcctccaggaatctttggcttccagaggaccccccttacacacacacacacacacacacacacacacacacacacacacgaggaagccctcccaaaacagctgccttgcccacctcagcagcacagaagtcaagtggctaccagaactgagtgtgctagtggactgctggaaccacaggcctctaacccagcctcagtctcattcctgatccaggcccaggtgtggggctgccactagtaatggctagccagatgctatttcaaggaaaaagctgttttttttactttctgagaaatttcaaggataytggtagtgtggagtgtttatggccttttgtgggttgatggggaagaaataactcactcctccaccctgctcctaggtcagccagggcagcctgttgacttaaaattcctgaattgtcgccgggtgcggtggctcacgcctataatcccagctttgggaggccgaggcgggcggatcacgaggtcaggagattgagaccatcctggctaacatggtgaaaccccgtctctactaaaaatacaaaaaaattagcagggcgtgt

SEQ ID NO: 745720 - DNA, 582 bp, Homo sapiens
caaagcatttgaatttccagcgaaccttattttgtcagccttattttgggtatcaccaaccccattttgtaaatgaaggaactcagccttagaaagattaagtgacttgctcacgatcacatagctagctgaggacagaaacgaaccttggccaggttttctcacttccaagccagggctctgtccaggatataaagctgcttcatgtgagattkaggagtgtttgtgacgttctcatgggggttgaatagggaccaggagtgcatactttgcacagcaagacattttaaagaaacatcacccagtaacatggaagacaaagtcaccagcagagtgggtgactggctgagtagggagagcactaaactgacagctcagatccggcatcgacttttctccttaaacacgttccactcactccttactttgttgtggataatcatcagtcctatgtattatttgactaccttcattattaatctctttttatgtctctacatattatgggtgataatcacagtacaatggattagtcactgcactttatgacatggtgattaaggtttattagactgtagcatg

SEQ ID NO: 745721 - DNA, 555 bp, Homo sapiens
ggtccagagatatattttgtttggcttacactggatttttttttttagtcaagccaaaaactggctatttcacctagttatttgaatttctggcttcttttgaaagatcaagggatctgacactctggatcccaatttttctgtgccaagagtcagctggagcttcatggctgatcctggtctttgagaacctgcagccctggaaccccctcacacagggtgggcataagtgctacactttgaccatcccctcacactctggttgctccacccctaccagcacttgattttcygacttgctctagatcccgtggatcacagtcatccataaaagaaagaagtttgggttcatctcaacctagcccgtactccaatccagctgcacaaatcaaggagcccattggctctgtttgtgtgacaccagaaatgtgtaaacatttcattcaaccccacaaaccagccaaatgacgccagccaagtagccaaaaagacagcagcactgcgtgtttttattttcttaaatattagaaccacaaacacatccagaaaaaaaat

SEQ ID NO: 745722 - DNA, 565 bp, Homo sapiens
aaaacaaaaaacctaactgcaagcttcagaatctgggaaaccagctagaagaagagagggagggaagtgggggaagcaggacggataaaaatacagttacaacaagaaggaaatggaaaataaataaaggaaattccttyacccaaactaagtcccttgagggagatttgttagaatggatggtggttggggggcaggggagaggggataaaattcatgtaggactgtacaatttgtgggggattcttctaaaatcatttcaaaaaggacagccaagcagaattcatacaggactcatttggatttattactctcttttgcagtctacactttctgaagtgtggatttatgagttttagatcatttgtttcccgtcccactaaggtaaatagctcagtgcgtttggtgcatttatgattgttgtgcagaggagtgcagctgatgaattacttcctttcatttatcttttgaccagaaaatgtatggttttctagcaatttaacttttaatctgtaacatttttcttctcagttttgttgcaggtgcagtatagctgtttctaatc

SEQ ID NO: 745723 - DNA, 617 bp, Homo sapiens
gaatgcaaggctggttcaacatgttgaaatcaatcaatcaatatatgtgtcattaatagaataaagttaaaaaattttatgatcatttcaatagatgcaggaaaagcatttgacaaaatccagtaccctttcataataaaaacattcaacaaactaggaacagaaggggacttcctcaaacwgataaagaacatctacaaaaagcccaaaactaacattatacttaatacttatactcaataatgatagattgaaaacttccctcctaagattaggatcaaacaaggatatccactttcactgcttttatttgacattgtcctggaagttctagccagagtacttaggcaagaaaaagaaattggcattcacattgggaggaaagaattaaaatgatctctctttgtagacagcatgatcttatatctaataaaaattattagagcaaataaaacagttcagcaaatttacaggacacaagatggatatgcaaaaatcaattgtacagttgactcttcaacaatataggtttgaactgtgtgttcacttatatgattttcttctacctctgccatccctgagatagcaagaccaacacctcctttttctctcctcct

SEQ ID NO: 745724 - DNA, 617 bp, Homo sapiens
agtccaggtttccttatcagtgcgcatttgagcatgactgggcccacattacaatgaacactctactttagtttctgaagcctgagatttcattaccttttttttggcaaccatgaaactctgctgacacatatggaactttcaattaataaaaacctctaggattgtttcccttgtactgttactaagcctttctgggatctggttatactgcttataccttctgaatgatgctacatgaaaaatttcaaatcaacaaccattgaccaactatttgataatattsatacttgtagatcaaaactagaatgtaatagtgcccatacctgaaggtctaaaaagtactttccgatagttcttattatatttatttatttttctctgggcatgaagacaatcagattatagttagcaaacaatttaaagactaaaattttcataatttatctatttatatcagtattgctatttagaacactgaccctgcaaagttatatacctagtccaacaatgctttctttgttgggtgattaggacaataacatttttgaggggtgcctacttagtgcttagtattcaaaccatttttcaaacttcaactttcgaattacatttaa

SEQ ID NO: 745725 - DNA, 617 bp, Homo sapiens
agtccaggtttccttatcagtgcgcatttgagcatgactgggcccacattacaatgaacactctactttagtttctgaagcctgagatttcattaccttttttttggcaaccatgaaactctgctgacacatatggaactttcaattaataaaaacctctaggattgtttcccttgtactgttactaagcctttctgggatctggttatactgcttataccttctgaatgatgctacatgaaaaatttcaaatcaacaaccattgaccaactatttgataatattgatacttgtagatcaaaactagaatgtaatagtgcccatacctgaaggtctaaaaagtactttccgatagttcttattatatttatttatttttctctgggcatgaagacaatcagattatagtyagcaaacaatttaaagactaaaattttcataatttatctatttatatcagtattgctatttagaacactgaccctgcaaagttatatacctagtccaacaatgctttctttgttgggtgattaggacaataacatttttgaggggtgcctacttagtgcttagtattcaaaccatttttcaaacttcaactttcgaattacatttaa

SEQ ID NO: 745726 - DNA, 565 bp, Homo sapiens
ttccccaagagctcgcagtaagaaccaaacatttccccgcctccctttgggataattccatggtgaaagaatctgtttttaaaaataagtaggtcatgataatgaccatttctttctatgttggcgtattagtttgctagggctgctgtaagtaccacaaactcaktggcttaaacaacagaaactgtctcacagtcctggtagctagaagtccaaaaccaaggtgttggcagggttggctccctccattggtcatgagagagcatctgttccaggtctctctcctagcctctggtggctgctggcaatcttgatgttcctgggcttatggatgtgtcatccccctctctgcctttgtcttcactggtgttctccctgtggatgtgtctgtattcagatttccctattttattttattttattttatttttcgagatggaaattcgctctttttgcctaggctggagtgtaatggtgcgatcttggctcactgcaacctctgcctccaggcttcaagcaattctcctgcctcatcctcccaagtaactgggactacaggcatgca

SEQ ID NO: 745727 - DNA, 629 bp, Homo sapiens
tgagatggcggcatttgagtgaaaacctaaaggacatgagataatgagccatttggacagctgggagaatctgcattccaggcagagaacagcaaatgcaaaagtcctgaggaagtggcagaacgcaggagcaatgaggaggctggagaggctggagtggaraaggataggaggtaaggtccgagagtttgcagaggcactagagcatgcagggttctgaggcccatggtaagaatttggcttttattaatacttgcatcagatgagaagccactgagcagagagttgacataaatgatcactctgggttctgtattgggaaaaataaattctatgggagtgtggtagatttaaaaaatatgtccacaagtgcctcgatgctcctctctttaaaggatggagcctaacctaatctctttcccttgagaatgggctggacttagcggctttcgtctcacaaatagaagtgggggtagcaatggtgcaggagcttggagattgaatcaaggggcaatacagcctcctcctggctctctccctcttagctctcttgctctaaggaaagccagctgccatgtcatgaggacattcaagcagccaagggagagcccacctgcttaggaactgga

SEQ ID NO: 745728 - DNA, 430 bp, Homo sapiens
tacaataatcaaatatataaattgaggaataaaacataatcatgaaacatatttataactgcatatggaaaatacagaggctaattttttaaataacatattttgaaagcattaactagtaatttgaaaagatcgcatttgacaggccagtatgaacataccttgaatgcagccacacaggttccccataagaaaaatcaaaatcagggaaaatgaaacctcaatggttcaatctgctctgacctttgaaaaactcagcacagatagtggcacttasgaccaagggcaggagatccctaatcccatcaccatggcgatagggcataaacattccagggtgaaggcacaatccacactgtgaggtccaactgctgccatgcagacaggtgggcttttacaagtacaggaaggtcatcaaaggctcagtgtt

SEQ ID NO: 745729 - DNA, 608 bp, Homo sapiens
ccactgatctgctgggagacagcaattaggtagacagcttaaaaccaagaagtatctgactccaattttagcactgaaaaccatattaaaatactttaattaaatccacaaacataaatgtgtagcacatttatgatacttctacatgtagaagtttggaaaaagtctcttctaaccctcatccagaggattctaataagttatagataccaaagagattagagaatttgtctgtcactttccacatatacattattttggctgtacragagtgaaaagtgtcactcagacatatttcgtaagtaatctcaacattatacagatatatacaaagacatcacatttaaattcgtgtgtacatctatgcaatgtacaacagtaactgcaaacatgaaccagtgtaaggcaatttcttttgtgacatatgacatactccttgaagggaagggtagagtccacaaagaactgtccttttcagcctgactgtctgtcttcatgacactctgtgatgaagctacttcaggaggcaagatgtctatttcactgacaaaaagcagtgaataattataaaaggagttgttttcaaatgtggaaaccacaattactca

SEQ ID NO: 745730 - DNA, 691 bp, Homo sapiens
aataatgtcacatagttcaacctaatagttgctcagtcaatatgtattgaatgttgaatgcatgttgtaatcagtgatcctatggtaggctgcatttcacacagttttctctagccaaagaaatgctagctatggttttgaaaaggaattctaaaacttcaaacagctaaaactggtgatatagactgtgggactggagatctgtgagactggagtgccttttgtccagtayattttctatgcagttcttggtacatttcccagcctcaggtgggagcatgtgtatttgggtctggagtgcttgtcagtagcccaaagaacctgggaagagtatgctggaaagctaagatggaaggcagggataggagctgtttggcctgaagaagaaagtggcaggaaagatattggcatagccaaagaagccttccctttaagtcctagtgtagggagacttacttttccagaccagagctcatgagatcatgcactcattccacagatttgtgtgagtctgtgatgcgctcagttatggctaggcatgggcgttccttattgtgagcttcctttttgtgcctggaacttctgtctgaagggttgtgggctggactgtagaccactggtcctcagaggcaagggttgaactgaggagaaagccccagctggatcctgctgggagaagcccagcactctg

SEQ ID NO: 745731 - DNA, 590 bp, Homo sapiens
acaagagagaaagatgagaagtagaaggaggatttcaaacgcaagcttcacctaatccgttatttttcaaatgaccaggcctatctctgtagctgaaaatcacctcaaataggatctctgatatacagtctccaaaagctcagctaagaaacttacaaagtctctctgccttaacttcatccaccttttttctctccagcttctcctcggtagttaatgattataaaaatayttattggctcatgcctgtaatcccagcactttgagaggccgaggcgggcagatcacgaggtcaggagatcgagaccatcctggctaacacggtgaaatcccgtctctactaaaaatacaaaaaattagccaggcgtggtggcgggcgcctgtaatcccagctactcaggaggctgaggcaggagaatggcgtgaacccacaaggcggagcttgcaatgaggtgagatcccactactgcactccagcctgggcgacagagcaagactccatctcaaaacaaacaaacaaacaaacaaaaaaacagtgtgatggccaggcgcagtgctcatgcctataatccaagcactttgggaggctg

SEQ ID NO: 745732 - DNA, 501 bp, Homo sapiens
aatataactttatagcttagatgatatataaaaaataaagatcagatgtaaccagaaactgagtttcttttttttttttttgagatggagtctcactctgttgcccaggctggagtgcaggggcatgatctcagttcaccacaacctctgcctcccaggttcaagtgattctcctgcctcagcctcccaagtagctgggactacaggtgcctgccaccatgccgggctaatttttgtatttttagcaaagatagggtttcactatgtcagccaggctggtcttgaactcccgaccttgtgatctgcttgccttggcctcccaaagttctgggattacaggcatgagccactatgcctsgcccagaaactgagtttctactctggcaagttaaacataaaaaattagtacatatcaggctgggtggctctaggccacatgcaagcaagctgcaaactgaattgcctctgcagctgcagaaggctaatttctacattgatatt

SEQ ID NO: 745733 - DNA, 556 bp, Homo sapiens
tgttgctgaattcaccatcgtggggatcacaggaagaggaaaactttttccagtagctcaggagctgcttatgtcgctgaattcaccatgacggggatcataggaagaggaaaactttttccagtagcctgtagttgcaaaagataataagctttccaacctgtgatcacctggagcaaacggagaggaaaggagataaacgaggagtgttgcgtgcggagtggagggaggctccctttctcctcccatcaccaactcctccttctcctcaggccaggcttttaatcaggctccccgcgtgcagtcagagagggcaargccagctcccgtctcagcctcccgtaggaagatctcccggcctcacctgagcgccccgcagccctgggtacctctgctcccgcccagggtcctatggcccctcctcccagcacccaacactgggaccccacctgtacccaggctggcctccctcccccgcagcttcctttgcagccgccgtccgcgggtctccaggcgtggccacacctcccggggccccgcaagggttaaggcagca

SEQ ID NO: 745734 - DNA, 605 bp, Homo sapiens
catcgatttttgattgaactgctcctcacgcaggcaactgactctgcgtagcgtgatccagggcaagtagctgcatggatttaattgtgtgtcctggtgaattgaatgaccgactcactatataaagaagttttattgctaaattaaaaatgatcatagcttggtattaattattagcaattataaaaattattgtgacttcaacataarcttttattgtttccgttacattttatttaacaatggttaattctttctcctgagccaacctcacaatacagtgagtgagataaaatatatcaagtgtttagcatggcgtcagacatttaggaagcagacaagaaacgatggtcttcattttatcacaggaaaactatacttttcccaaaagataaaagcattttggaaaactgtgggttttccaaaagagaaataaaaatggttccagcctgggctgggcgcggtgtctcactcttgcaattgcagcactttgggaggcggaggctggcagatcacaaggtcaggagttcgagaacagcctggccaacatggtgaaaccgtgtctctactaaaaacacaaaaaattagctggacgtggtggtgca

SEQ ID NO: 745735 - DNA, 649 bp, Homo sapiens
ctgacttgctttgataaatattctacaatgaaagtaatattgaatgacatctggactaggccttaagaagctttcaagcttccattttcatcctcttggaaccatgtaaggaagttcaggttatccagcaggagggactgtgtagagaaagaactgcagatcaagttttgctttcttgcatgacgcagtgattcctttcagttcaactctgaatcttgtcaggtctcaaatgtgccttagggtctatatggatttcaggatgaagacagcgtaaacatgtttggattattctagccctagaggataagagttcctctccctagggtagaattgaggttgacaaacatagctgctaaacaagtgggcaacaccatcttggatgttgcagctccagctgakcacccctctgaaagcagctgcgtgagtgatcccagccaataccatataaagcagaagaactagccagctgagcccagacaatccataccatcctgagaaataatgaatcattattgttttcagcacctacattttggagtggtgtgtggcatagcaatagacaaccaaaacaggaatcatctactttagctcactcatttcacagagactgaagagccagtgaagttaaaggacttgctcagagccacat

SEQ ID NO: 745736 - DNA, 563 bp, Homo sapiens
gggcattgtggctcacacttgtaatcccaggactttgggtagctgaggtgggcagatcacaagggtcaggagttcgagaccagcctgaccaacatggtgaaaccccatctctactaaaaatacaaaaattagccggtgtggtggcacacacctgcagtcccagctactcaggaggctgaggcaggagaatggcatgaacccgggaggcggagcctacaatgagcygagatcgcaccactgcactccagcctgggcgacagagcgagactttgtctcataaaaaaaaaaaaaaagataagaaaagaaaccaagtgtagcactctagctgaaacaaaaaaggaagtggagaagggtgcaacactttaataataataataacaattttattatattatatattgcaaaatattataattgttatatttatgttataaatagaatgtattataatatttacatttatattatagatatgatatatagtcattgtatttaaaatagtatatgtattaaatatattattatatttaatataataattataataactaacctttattcag

SEQ ID NO: 745737 - DNA, 601 bp, Homo sapiens
acttctttgtcatattttactttttctgacttagtctgtcttatctgatatatatacagctacttgtacttcctttagattttcgtttgcatggaatatatttttctatccctttattttcagtctatatgtgtctttacagatgagatgcgttcctgtaggcagcatatagttgggccatgtttataattaytattattaagccagtttatatcttttaactagaatgtttagttcatttacattcttggttattattgatatgtgagggcttatttttgtcattttattattggatttctggttcttttgtatatctgctgttcctttctttttattgtttatcattgtaatttggtggtggtttatagtggtaacatatgagtctattcatctattctctttcttactgtgtgtttgctccaccagtgaattttatattttcatgtatttccatgaaggtacatattgtccttttgcatcctcatatgggggccttaaacatttcttatagggctactttaatgatgatgaattccctctgcttttgcttatctgagaaagactttatttttctttcatttatgaagaatacctttgc

SEQ ID NO: 745738 - DNA, 572 bp, Homo sapiens
aacattaattccaggaaagagaggatccatttgcttcaaagagcccatcagcaagctgtccttcctgttttatcagtaagcaaagctgagagcaaataacagatgggactgtcccttggtggtggcgcagagcatgcatgaaatatagcacaatcttcctccagtgtgttatgcttttaacagtggaagatcatagcaggagaggtgtgggccaggatgaatgactgtctctgatgaaacattcttctcttctagcaagattcctgtagcarattgagctctggcagttgatctcagtggcttgatagagtgtcattataaaaacgcacctggaagattctgtggaaaagacaacctcagaagaccaaggtgaatccaaggcctgatctggactcttaatgggtggttaaattctagttcctttaaataagcatcaaagacgccacaaaaccacagataaagctgccatagacagctatatttgggactcatttatcatttgtcacaagcatttcatcctcttgcaatatttttttctacttagtacttctacaagaaggtgagtagttgtg

SEQ ID NO: 745739 - DNA, 589 bp, Homo sapiens
tcttgaataattgatttcttaaagaagtttttaacctgagtcttattgtgtcctgactacatgaagaaatatgagtcccacagtggataaataggccctgtgtgttctaaatgagtagaatattgacccctactctttycagcagtgtggtagagctgagtggtggagatgacttatgaggcgagtctaccacattaatttaggtgacatactctttccttcacaaatagctttaacattttctgctcacacagcaagtgcctttgccttcttttgaatcagcaataacatttgctcacttccacatatttaaataaccagttcataaaaagcatcatagtttgtttacacatattatacaaaagaaaatggagtttgtgtttgtaaaacttcacatttagtacaagcctttcaatacttgtttttagttaaaatattaatttttggaacatcctcattggaaatgacaatacacaaaatatacaattaaaatcaatatatgttatatatacaacatatgttgtttatataacatatgttgttatatataacatatatatgtttatataacatgttgttatatatataa

SEQ ID NO: 745740 - DNA, 655 bp, Homo sapiens
ttatttgcttgagaaattaactattaaacctgtagcttttaaaaattaccaagtaggctgggcacggtggcttatgcctgtaatctcagcattttgggaggctgaggtgggtggattatgaggtcaggagttctagaccagcctggccaacatggtgaaaccccatctctactaaaaatacaaaaattagccagggcttggtggcgcacacctgtaatcccagctactcgggaggctgaggcaggagaactgcttgaacccaggaggtggaggttgcagtgagccaagaytggccattcactccggctctgggcaacagagcaagactctgtctcaaaaagaaaaaaaaattaccaaataatttgtaacaaattaccaagtgatatgtaaaatctacattcttagtccatcccatagtcttaccccttccctgcctaagtgaaatgggagagttccctgatccccctctcaggacttgcaacaggggagtggcttggctatttggtcaccactgctgctcaaaacccttgagggagagggatcatgcagacaggtgggtgcagaggctggagcaagcactgtgttctctggtcacacggcagtgtcttggggtgggtgcctgcagccacagtgttaactgatgctctcttagcct

SEQ ID NO: 745741 - DNA, 617 bp, Homo sapiens
ttcctaagcctaggtaagatgaattatcatcatggatgttggcagaaagttaaaattggaaatgcaaaataaactgcttgaaattttagagattatgtattattactgtaatggatgtttccagagatttgggcacatactcagaagatggaggggaagattaaatcaaatatctctaacagggacatcaagggacctttagaggatagaatgtttatctcctctgatgtcaaactctctgacatcaactggattcaacrgtgtccttgtcttatcatcaggtcagtagttattaatttcatctgattcaggtaaaatttatgataatatttcactttttgccttcccttactgctaatgtaagggacatcccattttctaagtattttttttatttctttatttgtgtgtgcatatatatatatatatatatacacacacacacacacacatatacacacatatataattacagtaaatttcatctctgtcgagtactttacaaggtgtgctattgtttaagaaagagaaatgtcattaatattcatggatccctttggtttaacagatggaagattctttttaaattcatccttaaaggtgacttcttaacatgt

SEQ ID NO: 745742 - DNA, 631 bp, Homo sapiens
tccctgatgcactcagcactgcaattgtgtctctgctgtaagaaacttcctacaggtgaagaaatctgggactcagggtttgccatccaaattcttttgtcccatggggtgttcttttgatgtcgtactcttcctcttcccctaggaatagaagctcctgagagccagactacagtgawtactattgctcttctgggtctagccaaccagtggggctgccacactcaaagcttttgctgtggaaattcctgagagccagactagtgattattactgttcttctgggactagccaaccagtggggctgccacactcaaggctggtgctggggaatgtctgcaagggatctggtgttgtaattcatcttcaagtctcccagcagtgggtaccagcccgtgtatctttacatttctgaatgcaaaataaggtagttcaaacgtactagggttatccaggggtttttagttacttgccttggttttgagagcctagatttggttttgagtaatctagaattataaagtctgtttatagcttttgctgctgccacttgaaagaattcctaattctcaagagttctagaacccttaaagcgtgaatcatggagtgcttcagaccaaaaatgagttcc

SEQ ID NO: 745743 - DNA, 648 bp, Homo sapiens
aagtaaattcttataagggaaaccaaaagatttttaaccagcagaaacaaatgcctgataaaaccaaaagacaggtttccttatgatctaataaagtaattttgtcttcataattagcaaagtgctattgctaaaatagcacttaggagatgatgctcagatattcccccagtgggaataatgtacatgattcagactgtgagcaatgacagcataggataacttacacattgccaaatcatatccccgggtgccagaatgtgtgtgaatcttctacctactaccgactcatgtctctaagatacgttgacagacctrtttgtcatgtctctttagtctgtggtgtggtgtaatacaaagagcactgggttgaaggtcagaaatgttagagttctagttcaggctctaacacctgtgacattgtgcatgtcacgtgaccttgcctggtgtcagcttcctcatctgtaaattgaggttaatgatacctacattactcgctttacatgtctgttctgaagatcaaatggtatgtacttatgagtgttttggaaattttaaaatattaaatattctattactgtaggttttttcacatatacctttggccctacttaggggtcccctcccttcctccctttttcccttcct

SEQ ID NO: 745744 - DNA, 648 bp, Homo sapiens
aagtaaattcttataagggaaaccaaaagatttttaaccagcagaaacaaatgcctgataaaaccaaaagacaggtttccttatgatctaataaagtaattttgtcttcataattagcaaagtgctattgctaaaatagcacttaggagatgatgctcagatattcccccagtgggaataatgtacatgattcagactgtgagcaatgacagcataggataacttacacattgccaaatcatatccccgggtgccagaatgtgtgtgaatcttctacctactaccgactcatgtctctaagatacgttgacagacctatttgtcatgtctctttagtctgtggtgtggtgtaatacaaagagcactgggttgaaggtcagaaatgttagagttctagttcaggctctaacacctgtgrcattgtgcatgtcacgtgaccttgcctggtgtcagcttcctcatctgtaaattgaggttaatgatacctacattactcgctttacatgtctgttctgaagatcaaatggtatgtacttatgagtgttttggaaattttaaaatattaaatattctattactgtaggttttttcacatatacctttggccctacttaggggtcccctcccttcctccctttttcccttcct

SEQ ID NO: 745745 - DNA, 369 bp, Homo sapiens
gtctcacttgaatttttttttttttgaatttttttttttgcctcgatctggcagccaattcttaaactggttgactcctggttttacccatccttgtcctcagggcagcctcagccattggtccaggccctcataagtctgyaggagagtgggtcccactgttgttcagttctacattcctccaggcagtcatgtccctggtaaaagaggtgagggctttttggagaagcaccattgaatatactggtgctgacacagaccagtaggaaaatccactggtctgcagaagctcgagcatgccagtctcaacttaaatgtttctctagaaaattccagtccttcctctcatgacttcatccctttcctgga

SEQ ID NO: 745746 - DNA, 529 bp, Homo sapiens
tccggaattgtatgcccagtgcctaacgtaactatatactatagtataattgtgcacagtgagtgtccaaagaatgcatattgggtgtcgttaaaatctcagctgggaggtggggagctgggatccattcaaactgacaaygggccaggtgcggtggctcacacctgtaatcccagcactttgggaggccgaggcgggcggatcatgaggtcaggaaattgagaccatcttggctaacacggtgaaaccccgtctctactaaaaatacaaaaaattagccaggcgtggtggtgggcgcctgtagtcccagctactcgggaggctgaggcaggagaatggcatgaaccctgggaggtggagcttgcagtgaaccgagattgtaccactgcactccagcctgggtgacagagcgagactctgtctcaaaaacaaacaaacaaacaaaacaaaacctgacaaagaacaggggaaagaatgtaaattggggattgggagagtatcaaagaagaaaagaccatgagaaaaccag

SEQ ID NO: 745747 - DNA, 608 bp, Homo sapiens
agggttattggaactttttcaagatcaagctttccttttcatttcaatattattcgtggcattccgatttctcatcagatgactttttcgtggtcattcaactttgaactgtagctcgctgttcacagaaccatggcatcatgaggcttgaagggactgtgaaatgtcatccagcctgacagggccacatccatctttagaggagatggacggtctgtgcctgagacagagctgagaacctttgcctggaagcctcaacattcatcaccgagggcaatgactgctgaccctaactaaagraacaattttgtgatttctttgtcatgcttaaatatttttccatttgtttcactagagtaaatttttatcatcgtgacttcttcccttcttgttcctttatctcctgtgctgtttcttctaaccataaaatcagtacaattaagggttggttctacaaggttttttttttcttcttcttctttggtatagaattacaatatgagattacaaagtactgaaaaaaatatagggtagggagctttgggttatggaagcagctgcttaggttaactgtgacatttgatgaatagataacctgcagctgggag

SEQ ID NO: 745748 - DNA, 624 bp, Homo sapiens
ggataaaatgaaaaaagtttaatcacttttttccattgtaaaatgagtggcttcttgaaagtttttttggttaaaggagatgatgatatgaccacgtattagaatattatgcaaaaatttagaactatgctatgaaagaacatttaaggacactaacataccattgagtgcaaaaagcagaatataaaccttaattacagcatgatacaattttatcgttgttagataggyagatggaatataggaaagaacaagaatgaaatataaatggcagttaggtctcagtaggattatgagtggttttctttcttcattatgagggcttttttcaacacagttaaaagcaaacattttctgattatagaaacaatgaatatcattaaaataaataaaaactgatatccagtagaaaacattttcaaaatttaaagatattatttaaaattattttttaagccaccacaaagaaaataaattacaaaatttatgttttttttcattagggtgtatttatcatgatccttttaatgttcacaaatgaactactaaaggcaggtaaatttgatggatgaacatgtactaagtaggatttattttagatgatactttagggccccggttcaa

SEQ ID NO: 745749 - DNA, 659 bp, Homo sapiens
caataaaacaaagctctagaacaatgcttaatgtggataatcctttggaatgtgttctaacagaatgctaattgtgataatgaaataatacataacatttattgggagattactgtgggcactactactaagctctttatgtgtataataccatatgcaccccagaacaatttatgaggtgagtattgttgtgcccattttatggagggggcaactgaggcagagagagataagtgacttgcctgaggtcactcagttaggcagataagtcaggtgtcaaacccaggcagccatcctccaggtgtggcatttgtaactgctgggttctgctgctgcctgctggtggaaatctgtacttgcattatactggagaagcccttcctagagttccagastgattttcctggcactatccgtgtccctcttggtgagctaatcagcaaaggaaatccaagtctatgctagaaacaagctgcagggtctctgattcttccagaagctgatcccagcttcagtaaatggcaaagactggggtcccagagtactggcccctgtcagtcaccacaaagtctgagtaaagagaggctccagggctaccatactggagaaaaacttgtgtaaatggtcagtttaggatcctctaaggtggaacctttaaa

SEQ ID NO: 745750 - DNA, 613 bp, Homo sapiens
agaatatactctatattgattcaatcttgtgaaatgtgttgatatttgatgtcctagtatatggtgagttttggtaaatgtcctacgtgtgcttaaaaagaatgcatattctatggttgtcaaatgtaatgttctgtccattcagtcaagattactaattgttttgcttaaatctatgttctgatttttttgtctgcctcttttattagttataaacagaggcatgttaaaatctctcactatgattgtggattttccgtttttctttttagtactttcaacttttgtttcatacattttcaggattgttttatagctcagaatatgacctatcttagtgaatattccataggtgcttgaaaaaaatatatattctgctgttgttggatgatggagagttctgttacacatcaatttgatgytgttgttgagtgtctttatttctatatccttgctgattttctgtccagtagttctgtctagcagtagtaattggcaattgtggggtgttgaaatctctacctataattgcgaatttgtctattttgcctttcagctctatcagtttctactccatgtattttgggatcctgtttttggtgtgcacacattt

SEQ ID NO: 745751 - DNA, 655 bp, Homo sapiens
cctataagagaagcgacgtcaccctctctagagcagcttcataatgggggagatgtttaggccctggataatggcagtgggtgatgggaacagggtatgggtgatgggaacaggtggagaaggaaccagcacaagcaaaggcgggaagcagaaaaaggcaaggagggttggggagaggtggggtgggggttcttgcccatggtggaaggcaggaggaccaggatctggagggctgttctctcaggctygggtaggtcatgaacacttgtttggtctcagtcagtgcaccaggagagccagagcttctgaggagagtgatgtatctgggattctgcagctcagaaaatgataccccaaagtatagcactttggtgtgctgagtactttgaactaaaggacattggaagacctcagaagcaacctcagaaccatggtctctttgacttcctgcttcctatctctcacccctcatttctccctcaaagcaagtcatagaaacataattccttgtaccctaggtgggtcataaaaactggaacccctctcccccaaagtaagccatgaaccctggaaatactactctgacctccccatccccttctgtctaggaggtggccaaaaagaaattctctgacctacccttatctgatattag

SEQ ID NO: 745752 - DNA, 627 bp, Homo sapiens
gaacttatgattctgggccctggaatgtccacttatggaacccctccctgaggggataatggatcaacaagccttttctgaacctgtgaaccatctggctgaaaagccaattcattggacaccagaattgctaggaaaattgatctcagaatttcttgcatcactctgctgttccaacccaatcagtgcaaaatgattcattttccctcacctttctgttttggttgtgggctcttgaaaagcaggcctgtcctctctgacttgatcctttgtgacctttgatggtagagaacttgttcttcctaaaataaatcacccttccagcccttaatgrattccacgtgttaacacactcctacctttcttctgtctctccgtgttccattttctcccctctccagtcagcagttagccctgcagaaagagagagaatcctctttcccacagcttgcctcctctttgccttcactagaaagccagagtgaatgcacacacacacacacacacacactcacacacacccttagtagggagtgagaagtacccaggacagtttgcccagcctccaacaatgggccattcccatgagaatcaccatgcagagcagatgcccaagggactacctac

SEQ ID NO: 745753 - DNA, 642 bp, Homo sapiens
  misc_feature 415: n = A,T,C or G
cggcttggtttggccacgtgactagctctggctagtgagacatgaacaagcgtgatggaagtagtgcctttataaacacttgtatgctgggggcttgtcctcttggaatcttcccctcttgaaacccagctgctatatgttaaggcagtccaggatattctgccaaagagaaagggcacaaggagaagccctggaggatgggaaagaagccacttggagaagagctgaggcgccccaactgagctttcagctgaacacagccacaggcagctgaactgcacaattaaccaacagaatcatgagaatataaggttgttgttttaacctattaagttttgggctggttacatggcattagataaacaaagcacstacttcaccaggttgttctgaggatttgagaaaatatacaganaatgcatagggctggcatataggaggcactaggtaatggtaatcatgatgcccagagcttagataaagatgggtttccttgtcaatgttgaacaataatgaaagccttttttttaagagttggagatttgtgaagcagtgactgacatgctattcatcatggccaaggttttggaagctccttctctttctaggatactgggatccatgaggagacctgcaggggct

SEQ ID NO: 745754 - DNA, 530 bp, Homo sapiens
aaaaaatattttgtagagacaagatattactttttggcttaggctggtcttgaccttctggcctcaagcaacctcctgtctgggtctcccaaagcagtgggattacagtggttcttcatctttttcaccaatgtaaccctaacaacagagatggttgttaatactgtattgttattttaaggattaaaagctgttattttaaacttaaaatttcatgtgaattttggactctattttatatctgcttactaataattttaaattacttgttaattaaattgctccaaaaaaatatttgagtaatgccartggtcttaaaagatgtgtcatgtttatgctttcagcatcctatggtacatcttcatatctgtggtaataggtatgtctgtgtttgagaattaagtgtggtcttaggttatgaaggaaatttaaaaatagtggaaaagtagtggcatgtatttctcctttaaatagaatattcaagttgcagggaagaggatgaatttgaaggagttaagagtgggaataat

SEQ ID NO: 745755 - DNA, 559 bp, Homo sapiens
cacatatcccaggattttgctgacagatactacacaactttgcaattctttggagtataatctcttccctcttgggccaagctgtgtaactgacacgtggagaatatccttacaaggaatcggccccaggtgaggttatcacagagttttcaagcaaaggaaggaaggaagaccttttcggacacaggagtgaaagctacttctgctggtcagggaggttcaatgtgcctcagggatttgagatgctctgtttcatttgagtccaacaggatgtcctcattcagaattgtagtggcatgttgtttttaaatcaatgtcctaatgctcacatgtgaaacttgtgaaggwtgtaaatttaactgatatttgattctgtaacctgcataactaaatttagtatttgattttttggcaatataatcaataaaatatctctattatttttgttttatttattttgggggtttttgtttgtttttcctattagtgctcaaatatactcaggatattctgttccaaaacatggtccttatagttattttcactgcagataagtgca

SEQ ID NO: 745756 - DNA, 618 bp, Homo sapiens
ttttgactttttaataacagccattctggctggtgtgaaatagtatttcattgtggctttgatttgcatttctctaatgatcagtgatgacctttttgtttttcatatgtttgttggctgcatgtatgtttcttttgagaagtgtctgttcatatcctttgccttctttttaatgagactaaggtgtgtgccaccatgcccagctaattttttgtatttttagtagagayggggtttcaccgtgttagccaggatggtctcaatctcctgacctcatgatctgcctgcctcagcctcccaaaatgctgggattacaggcgtaagtcaccatgctgggccactttatttccttcttttgcctgattgccctggccagaaattctaatactatgttgaataggaatgttgagaaaggacaaccttgtcttgtgccagttgtcaaggtgctttcagcttttgcctattcagcattatattgactgtcagtttgtcatagatggctcttattattttgaggtatattccttcaatacctagtttattaagagcctttaacatgaagggatgttgaattttatcagaggctttttctgcatctattgagataatcatgtggtt

SEQ ID NO: 745757 - DNA, 560 bp, Homo sapiens
ggaactcatttgctgcctcttctttgtcagcagaagctgcttctcttgttatctttacattttttaagccaaacttctttcttaaattgtcaaactacaatttggtggcattaaactctccagctttcgatccttcacctttcttttgctctcagttgtcatgtaatgactttgctttttctgcaatcacattagagtctatatgtatgcctttctgatagcaattctgaaccaaaataaaatctgcattatcaatatgagataaaaaygtatttcacaaaaagcataggttttgcacctgctactatagctgcagcaatagctttgtgaatttctttttttttttttttttgtacaatggtccttacattagattcatttatctttaaatggtgggcaaccgcagatgcagaccttaatctatagtagatattaagcaattccacttcttcttgtaatgtcatgacttcgctgtgcttcttgggaaaattcccagcatcactagtggcactttgtgtggatcctatggtgttatttaaggtttactatatagcacaaca

SEQ ID NO: 745758 - DNA, 596 bp, Homo sapiens
ccacatcactgcttaaaatttttcaggctcctcattgttttcaaaaaagggcaaatttctttgcctagaaatattagctaacatatgttgattgcttaccatgtgaagggaactattctaagtgtatatacattaattcattttaacatacaaaagaatctggaagtgggttctttacagagaaatgaaatgaggcatagggagattaagtatcatttccaagataaaacagtgaatgttagagttaggacacaatctaagaagtacagcttcaaagctgtaattgacccattaatttatattgcaaaagggtcaccattcttgtgaagaattagaaccatctctatcctggaccccattgtatattcctccagycatactgactccctgtcatgttgtttcacacatttgtgcttttgtacaaactattctttccctcagctgtaattcaataattatttacttagttcttgttctatgccatggcatttcaagatattggaagttctgacacctattaaaataaaaatacagtcctatcttttatgtaggttatagactactgggacttgaaaacaaagagacacatagaaata

SEQ ID NO: 745759 - DNA, 622 bp, Homo sapiens
tgtcatattccctacatttccttatatgggtatatcatcctctggtgccccaagttcaacatacctagaccaaaattagcactttcactctcaaaccagtttcctcttctggcttctcttttgttaatgacttcttgatctctcagccggtgaggctaaagatttcaaaatgattttgctcccctctttccgttgatttctgtgtccatttgatgctcaacactaagttcacaatatcttttccttccctttcatttcttttgccttcactccaggtcaggcctttgactttgcctgggtcattcattcatgaattttttcactcagctaatatttatcaaacagctattatgtattaggctttcttccaggcactttggaatacgtctctgaataaaacagacacaaatctctgccttsttggagacattatagatacagcatggcctcctatgtggtactctctcgtctagtcaattcctttcatttcattgcatatttttttttcaaactgatcaaaaagcatgcttctgattatggctaggctttactaaacccttcaatgattccccttgtcctaaattgagtcaggctggtctgatatttacagcctctgagaccc

SEQ ID NO: 745760 - DNA, 617 bp, Homo sapiens
caggggtttatgtctctctttagctctaataatatttgctttatttacctgtatgctccagtgttaggtactgaattaacccctttatcattgtataatgaccttctttatctcttttcttagggtttgtcttgaaatttattttgtctgataaaaatatagctacttctkatcttttccgattcccatctgcatggagtatatttttcgatctttttatttgcagtctatgtatctctataggcgaagtgtgtttcttgtacatgagagattgttgaatgttgtttttttaatctatttatccacgctatgtctttttattggaaagtttagtccatttacattcaatgttattattgacaagtaaggacttactactgccaatttattatctgttttcagattgttttgtggtcttcccttctttcctttctttcctttctttccttcttccttccttctttcctgtcttctttttgaggaaatgatttttctttgatggcatattttaatttcttgctttttattttttctgtatctgttacagagtttttgatttaaggttatcatgaggtttgcaaataacatcttataacccattattttaaactgatgat

SEQ ID NO: 745761 - DNA, 632 bp, Homo sapiens
aaatgccctctgtgagcaggatccatctgggcctgtctttgtattatctgcatgggctctggagacaaggggaactggtgaaaacataaggctcatgctgcctgtgctatgcataataaactcttgtttctgacccaggagtcttgagtcttctgttagcatctrtgaaactgtggcaggctaacttggtagattgcaagtcatataagatctcagactgtcacaatttttgacatatttataattttaaactttgattcttaaaatatatttttaaactttttactcacatgttgtgggggagggaggcagatacgcgactactgctccatttgatagagagtatttctcatatttctttacagaagattcaatcaaaataataagataaggcatttactccataatcatttctaatacacaaatgtatatttgaattaaatcgtacctctctgacttcctttttttctcattatgaaattataaaaaaggctcctttttctgacttcaagcacctgtaatataaaacttctttgggtgactacatgtatctgctggcatatcaaaataatatcatttcaatgtggtttcactttaaaatggtataatttgagaaataaccataattttac

SEQ ID NO: 745762 - DNA, 638 bp, Homo sapiens
tagtagaggggatgagagcatggactctggagccagactataagggtttgaataccaactccattatatactgctcttgtgatcttgggtaagctacttaagtcacttaacctctgtaatctccagttttttttatttgtaaaacacggtagttgcaagtaacaagaggtatataaagctcttagaatagtgcttggtgatagcatgccttatattgacctttgctgttaaaattatttaaatggtattatttcaatattaaataaataagacctctttattaatttctaaaattcctgtaattttatactaacttctgttgatgctccaaatatgtctaattgttatctttgtctatttttgaaacctcttattcaccccagtgtactgtcatcctatttcaattacctaccagctaaagtcattgaaattartccaacaggtcagtctaaaatgatagggtttattttatgctctaagattgattaaaaatcccattattataaatgttgccctaagatacaagtggcaaacataaaaccttgttttttgcttctgaaaattcctatcactgttgttggaagaaggtaagagcaataacctttttgaacaggatcccaatggaagtagaaatgaat

SEQ ID NO: 745763 - DNA, 604 bp, Homo sapiens
gagaagaaatacgtcaataaaagaaactcagaacacattggcaacacaacatttaaaagcacaacccagagatttcaataggacattcactgagtagagaagctcggccaattctacaaacaaattactttctgaagtaattttctctcataatactcagyttaaacctaaggattatagtaataccaaactatttcatatacctccactgaaaatataataggaattattcatttattattttcttcatttaataatatgtttacttggtgcctattaggtgctaggcactgttctaaatcttcagatccattagagaacaaaacaggcaaaaatccagctctgagtttagtaaaggtacataaacaataaatataaacttcagaaataaggaaattccagtgtgtctgatggtgaaaagggtcataggaaaagcatagtgcaataagaaaagattaggatggactgcagtgctgggaatagggagtttccatttaaattcaatttaactgtaaataaaatttaaagactcaagaaattaaaatattctcccttggctctagcttgattggttatatatagttacactgctataagccaagga

SEQ ID NO: 745764 - DNA, 566 bp, Homo sapiens
aatgttggtactttgatacaaatagcattgaacctatgaattgctctgggccatatggccattttaacaatattgatttttcctatacatgagcatggaatgtttctccatttgtttgtgttgtctctaatttcttttatcagtgttttgtaattgttatagaggtctttcacttatttggttagctatattcctaaatattttattcattttgaggctattgtgaatgggactgcattcttgatttggctcttagcttggatcttgttggtgtataaaaatrctactaattttttttttctaaatgaagtctcgattttttgcccaggctggtgtgcagtggcatgatcttggttcaccacaacctccacctcctgggttcaagtgattctcttgcctcagcctcctgagtagctgggattacaggtgtgtgccaccacacttggctaactttttttgtatttttagtagagacagggtttcaccagactggccaggctggtcttgaaatcctgacctcaaatgatccgctgacctcagcctcccaaactgctgggattataggt

SEQ ID NO: 745765 - DNA, 617 bp, Homo sapiens
ttaaaagttgtgtcattctaataaggtgtatatgtgttctttttgaagataaggattttgccttttcttccagtatagggaggctgactttcacatgggaagtttatcttctgcttttttaaaaaaagagtgaaggtcaaagtgatctttatgtacctgctgtttttcaagtctctctctctctcttttttttttttttaatagagatggggtctctccatgttgccctagctgttcttgaactcctgggtccaagtgatcctcccaccttggcctcccaagtactaggattacaggcatgagtcaccacacctagccctcaagtgtctttaactgaaatagtcaatatgccagaacagcatattttaacgtcttaraaatttcacatatacaaatctgagttggtggctgtgaagagaattgtgttagtacctgagaagttttgaaaaaaataagatttctgccagagaagaaaaaagaagaggaggagttgtaggaagagaagaggaagtctttggagaagaaagagactcagtcagctttgagacagtattttgcagtgaagtaatgcttgtgttctaaatgcattttgaaacctcaggatgacaattaaaaat

SEQ ID NO: 745766 - DNA, 607 bp, Homo sapiens
attttgtcccagtggtcatgtgtctgtttatatgctggtatcatgctgttttaattactataattttgtagaatattttgaggttttgcccccaactttgtattttttgcttaagatctttttgacaatttggggtcttttatagttccatatatattttacatttttwaaatttatgtgaagaatgtaattggtatttttatacatattgcattaaatctgtagatcgctttggatagtatggatattttaaaaatatttttccaaccatgaacatggtatatctttccatttatttgtatctttctcaatgcctttcatcaatgttttatctttttcattgcagatatcttaacctccttggttaaatttattactaggtattttggggtaactattaaaagtggaattgttttcataatttctttttcagatcgtacattattagcatatagaaatactactaatttttgtatgttgattgtgtacccttcaactttaccaaatttgtttgttagctcgaatagggttttttccccctgtgcaatctttaacttaatgcgttcagagtttttatcatgaaagatgttaaatttcatcaagtgct

SEQ ID NO: 745767 - DNA, 615 bp, Homo sapiens
atctttttcattgcagatatcttaacctccttggttaaatttattactaggtattttggggtaactattaaaagtggaattgttttcataatttctttttcagatcgtacattattagcatatagaaatactactaatttttgtatgttgattgtgtacccttcaactttaccaaatttgtttgttagctcgaatagggttttttccccctgtgsaatctttaacttaatgcgttcagagtttttatcatgaaagatgttaaatttcatcaagtgctttttctgagtcttttgaaataatgatatagtttttgccctcgatttcattgtccatgtgtgcacaatgcttcgttcccacttataagtgagaggatgtggtatttggttttctctttctgcattactttgcttaggataatggcctccagctgcatccatgttgttgcaaaagacatgatttcatactatttatggctgcatagtattccatggtgtatatgtaccacattttctttgtatgtgtgtttaactttttaagttaatttttatttataatttttgtgggtacaaatgtaggtgtagacatttgtatgttacatgaaatatttttatatag

SEQ ID NO: 745768 - DNA, 551 bp, Homo sapiens
aaaaaaaaaaggaaaaccacaacaacaacaacaactataatctttggtaaaaattcatctctttggggaaaaaatttgggaaagaatgggtaatccatatgtaatagatgcaaatcacttacctttacaaaacagctgatcttctggaatcagccttatgaagacatctgcactgtttttatttgttctgaccataaacttgctttctaaatgtcagtaaaagccttctaacttaatgaggatttggaaggcaatttccattttatggcctcaatctcagaagagatgtaaatttcatacctgaaccctaagtaaatatmttttctccatttggcacacaaaaatgtgagagctcaatatgtagtatttgttcctgtattaacagaatgcaattcaaaacagcatattcagtaatgaacccttaatgctaagtaaaaagaaaaaaataatatagtgatctggggtcaattatgggaatccgtattgggagttgttaaaaaagaaaaaacagaatatttcactaagtctccaaatatatcaccagagaagtc

SEQ ID NO: 745769 - DNA, 496 bp, Homo sapiens
tttgcatcttgccacacctttactttatgctctcattcagtgtgttggtcccagaaaatctggattgtatctatgtaagattccataacactggtaacctctgtctcacatttaatccataaataaagaggaacttgaggcagcacagttagctttttgtaacacagcaagggctacacacaatacacaacatctcctttctaaacaaccccaaatacttggtgacaaaatagtaaagatttcatacgacagaaatctgctgtaggtacataagagaaataagtwgcttcatccacagaggtgattacatcaagaaaagcataaaacaatgtaaataaaagaatgaacacacacatacacaaaaggttaatatactaatttagaagacttattttccaacacaataaaactgatacttgattagcaggaatccattagagcatgacaagagctgaacatcttcagatgtaggcattagtcaatatgccccactggg

SEQ ID NO: 745770 - DNA, 652 bp, Homo sapiens
cgcaatattcgggtgggagtgacccgattttccaggtgcgtccgtcacccctttctttgactcggaaagggaactccctgacccctcgcgcttcccaagtgaggcaatgcctcgccctgcttcggctcgcgcacggtgcgcgcacccactgacctgcrcccactgtctggcactccctagtgagatgaacccggtacctcagatggtaatgcagaaatcacccgtcttctgcgtcgctcatctttaattttcatattaagttttcatatgaagttgtcctttctgacaataattagccaatagttttatttgtttttatatttattcttgctttttgataataaataaaaccagcaatatgtaatacttgtgttgtctacttattataggatattagtctaaaatagattgtggattttttagatatgttaaaaccaatggtagagctaatttattcactataccatataataaaaacattttatctgccagaaacttctttgtctgtggcttagaggaatattatagtacaggctttgttgatacaataatagcatatgatctgtagcaagattgtatatgctggaacacagtcagaatctatttgtggaatcaaggcaggatcaatgagctcagcaaagagcttattcta

SEQ ID NO: 745771 - DNA, 608 bp, Homo sapiens
gactttgatttaattttttgggcttattttctatgaggaaatatcataacttttaggaattcataccagatattcaatatttatgcaaaatactaaatatcaaaattattgagtgctttttttggtctggcttctagtcatattgtttgataytgacttttaattttgtgttgtttgcctcctcacttggtttagtaaaataagcacagacttgagtgaaaagaggtaatttagaatcttgggtcatctacttattactctatgtaggctaactttcctagcaccaaaataaaggtatagacatattcccctagaaaagttaaaagcactaaattagatataactgagactgcatccccgaagctctagcatgtaagagacactccatagacatgtttctgtgcatttgtattttagctttattctctttttaaacatttgataacttttttcctgatagtgaaaatctactaaaatcatgatttaaatatagtaatcatccttctttcttcacacctctcaaatttaactgttatattgagtaccgattcttttaagtttaaaattatttttaaatatgaagcaaaatttatcacaggattaatccc

SEQ ID NO: 745772 - DNA, 608 bp, Homo sapiens
gactttgatttaattttttgggcttattttctatgaggaaatatcataacttttaggaattcataccagatattcaatatttatgcaaaatactaaatatcaaaattattgagtgctttttttggtctggcttctagtcatattgtttgatattgamttttaattttgtgttgtttgcctcctcacttggtttagtaaaataagcacagacttgagtgaaaagaggtaatttagaatcttgggtcatctacttattactctatgtaggctaactttcctagcaccaaaataaaggtatagacatattcccctagaaaagttaaaagcactaaattagatataactgagactgcatccccgaagctctagcatgtaagagacactccatagacatgtttctgtgcatttgtattttagctttattctctttttaaacatttgataacttttttcctgatagtgaaaatctactaaaatcatgatttaaatatagtaatcatccttctttcttcacacctctcaaatttaactgttatattgagtaccgattcttttaagtttaaaattatttttaaatatgaagcaaaatttatcacaggattaatccc

SEQ ID NO: 745773 - DNA, 608 bp, Homo sapiens
gactttgatttaattttttgggcttattttctatgaggaaatatcataacttttaggaattcataccagatattcaatatttatgcaaaatactaaatatcaaaattattgagtgctttttttggtctggcttctagtcatattgtttgatattgacttttaattttgtgttgtttgcctcctcacttggtttagtaaaataagcacagacttgagtgaaaagaggtaatttagaatcttgggtcatctacttattactctatgtaggctaactttcctagcaccaaaataaaggtatagacatattcccctagaaaagttaaaagcactaaattagatataactgagactgcatccccgaagctctagcatgtaagagacactccatagacatgtttctgkgcatttgtattttagctttattctctttttaaacatttgataacttttttcctgatagtgaaaatctactaaaatcatgatttaaatatagtaatcatccttctttcttcacacctctcaaatttaactgttatattgagtaccgattcttttaagtttaaaattatttttaaatatgaagcaaaatttatcacaggattaatccc

SEQ ID NO: 745774 - DNA, 542 bp, Homo sapiens
aatacaccaatcagcactctgtgtctagctcagggattgtaaatgcaccattcagcaccctgtcaaaatggaccaatcagctctctgtaaaatggaccaatcagctctctgtaaaatgggccaatcagcaggatgtgggtggggycagaagagggaataaaagcaggctgcccgagccagcagtggcaacccgctcgggtccccttccacattgtggaagttttgttctttcattttttgcaataaatcttgctgctgctcactctttgggtccacactgcctttacaagctgtaacactcaccgcaaaggtctgcagcttccctcttgaggccatcgagaccacgaacccaccagaaggaagaaactctgaacacgtccaaacatcagaaggaacaaactctggacacaccatctttaagaactgtaacactcaccatgagggcccgcggcttcattcttgaagtcagtgagaccaagaacccaccagttgcggacacaatactataaacaactctacacaaataaactagaaaatctaga

SEQ ID NO: 745775 - DNA, 684 bp, Homo sapiens
aagtttatgtctactcttgccattttcatgtgcattcacagaaatcttctattcaattagccatctggagtaaagagtctttcttttctgtaatatttggtatattagggacctcagttttctctgttttatcataatctgaattctctttgtccatagcatatgttacctatttttgtaaattttatactcctataaaaatattttttctctaacatgacattttaaaactagaagaggcctttgaggcacctagaccaaaacccaaaattcttttttctcattacaaagaaagagtaatagagccatgaagtcatacctgaaacccacatatcctgacttcccatctagctctttttgtaggcctgtgtataatctcaaactattcttattcctcaacttctggctttagtccataggtaaggcaactattaatttcctgtaggtaaaagggttatgtacacttgaattttgaacaatttccttgcaattaatttttctcctggagtccaagaatatagcttggragctaaactttttaaagttatttgaatggcactgtctcattctgtctctctttctctgctctttctgtcccttccccctttctttgctcccttgcctcctctcatctctctctactccccttttgtctttccctgtccccacttcccccacccctct

SEQ ID NO: 745776 - DNA, 609 bp, Homo sapiens
ctgctttgttctctttgcttcctctctcatcatatgatgtgctgccttcccctttgccttccaccatgactgtaagcttcctgaggcctcaccagaagcagatgccagcaccctacttcctgtacagcttgcagaactgtgagtcaattaaacatcttttctttataaattacccagccccagggtattactttatagcaaagcaagaatggcctaatacactggggaaaactagaatgtatgaatggcatcaaaggactgtagctgataatccattcttgcttgtttttgccaaagagaaagggaaatacaagccccagcataccacttcttccaaattgagaaaggaagccaggtttccatttctttaataaaattttcaggttcgtgtcattttcagaataarccaaagaggtctggccgccaccattttgccacctttggcagtgggtcacctgaggtcaggagttcgagaccagcctgaccaacatggtgaaaccccgtctctactaaaaatacaaaaaatagccaggtgtggtggcaggcacctgtaatcccagctacttgggaggctgaggcaggagaatcacttgaacccgggatgcggac

SEQ ID NO: 745777 - DNA, 654 bp, Homo sapiens
caactgagaaattccgtatgcaatttgcagatcttgatcacatgacatttctgattttctctagatagctagagaggcacaagtttaggaataggcctgttatagaagatgttgcctgtgtccaatccctcacactctcaggtgaactaaactattgagaagtctgcatttgctaccttctgacagtacagtattttagaatattagctttgaggagatggatgaattagtcagaggtaaagctgattactattatttcagtgtggtcctattaatgcagggaagagaaatactcaattttgtggtcatagaacgcacacagatctctccayggtcatcttaccaagctgcctcagtctcccagggtgctttataacagagtacagatgttttagtacaaatccatcaccaccactcagaaaaaccatgttaatcagaagaaacatcaaaagcatcagcttggaatcccaaaggagcggtggcaggtgcaggtagtgtcactgcctctgacgtgctggggccgcattcagaagggatgctgtctctactggcaggcagaaagcactgaggcctgaatcacttgagtgagcaaaagttttatccgaaatattcagataacttgggcaaaagcaaatgtttggtttaaatagagta

SEQ ID NO: 745778 - DNA, 654 bp, Homo sapiens
caactgagaaattccgtatgcaatttgcagatcttgatcacatgacatttctgattttctctagatagctagagaggcacaagtttaggaataggcctgttatagaagatgttgcctgtgtccaatccctcacactctcaggtgaactaaactattgagaagtctgcatttgctaccttctgacagtacagtattttagaatattagctttgaggagatggatgaattagtcagaggtaaagctgattactattatttcagtgtggtcctattaatgcagggaagagaaatactcaattttgtggtcatagaacgcacacagatctctccacggtcatcttaccaagctgcctcagtctcccagggtgctttataacagagtacagatgttttagtacaaatccatcaccaccactcagaaaaaccatgttaatcagaagaaacatcaaaagcatcagcttggaatcccaaaggagcggtggcaggtgcaggyagtgtcactgcctctgacgtgctggggccgcattcagaagggatgctgtctctactggcaggcagaaagcactgaggcctgaatcacttgagtgagcaaaagttttatccgaaatattcagataacttgggcaaaagcaaatgtttggtttaaatagagta

SEQ ID NO: 745779 - DNA, 612 bp, Homo sapiens
tgatgcagtcaataataaagctagtatggataacttaggaaatagatctccccgccccacatccccagttttagattctggtttggaactatttggataattatttcacttcggctatacaagcttatcttttttcccccatttatgaatttgatctattattttaractaagatctatttgcagtcataaaataggagacaggctttaaacactctacaagtacacatttgtattcttatggtgagataggcattcaactggaaggttaaatggagttcagataatttctttttttattctttgctctggcttttgtctcatgtctttcagcaaaagtgaataaagatgtctccattttacaccaaaagattcaattacttttcaaatgctgggtcaacatctgcagatgaacaatcttaaccaacgtattttgattctacacaaacttatgtgacacttttgttttctctccaagagcagagaatagattcaagcctgctattctgagctggagcttccactgccactagcactgaacttttggcaggcagccaaccaatctctgtagcccagtgaaactgattccatctgctccagcagtgcaatatat

SEQ ID NO: 745780 - DNA, 603 bp, Homo sapiens
ttatttaagtcagttgatctctattgacagtaaatgacagaaaccaaatcaaactagcttaaggattacaaggcttttattggcttatgaaaagttttgggcactggcttcaggcacagccaaattcaggtggtcagtaatggcaatctgtttttttccatgtctctactcttctttcctctgggttgacatgtttctgaggcaggctttctctgctaagatgtctgccagtacttccaggtaaatatccaatgatcttcaagaacagtaggtagagagtttcttttttcttatagttctggtaagggcttcaaatgtgagtctcattagtactacttagactggcttatacacttaatcatccatgagtgctgagtgatcatggatgaccagggcagccggaatttcrgttagccaggcctgggccacatttcccagcagcaccagaaccataaggagagagagcatgggaatcagaaagcggatgcatgccagcctggcaaaaagaaaacaacagatgtccccagtcttacttcacgcatcccccaaacatttcctgagtctctgctgcattctctgcactgactgtggacgagcaagaga

SEQ ID NO: 745781 - DNA, 513 bp, Homo sapiens
catccatcagggtggctcaggtcacaaggtgtaataaatacatcttgtatatttacataattatatgtctacctacgtatctgttgaaccaaggtttttggtttctaaagtcttcttgctcaggagttgacaaaccataacccataggccaaatctggaacgctgattttgtaaatgaaattttaytggaacaaagtcatgtctctatgtctctttattgacatattatctgtggctgctttcatgctacaggtagttgtgacagaactgtatggcctgcaaagataaaaatatacttattgtctggccctttgcagaaaacgtttattgacccctattgtagcccatcggggtttctcacccttctggatgaatatttaaatgcaattaagaaaaatttcttgccagttttatccagaaagaacaaaagttctcagcacattatgaagtgattaagggagaaggcatgatcatgtgttaaaggcttgcctgatgggaatggaaagtagaggc

SEQ ID NO: 745782 - DNA, 539 bp, Homo sapiens
agggaatattcatgcctctcagtcagaaagaaagaatagacagagatggttcagttctggttctgtgcctaccaggagagaataagcttcctcctctcaacttttcccaggacactcaccctcaaacatatccagctcttcctgcaaagctcctttcctgctattacctcattggacccttgcctcctgytgggttactcatatttttttaaattattaacttataagaactctttacatattatagatatcattcctcttttacttatgttgtagacatcttcttccattggtcacttttcatttaccttcatatgaggtattttttgcttcatggaagttttaaatttttatgtaatcaagcctgggaatccagatgcctttgcatgcaccaggattgtggggcagggtgagctggtgacggaggcctgctgtggtgagagaattgtgacacaggaaggccagctcacaggcttgtgccttgagacttggcaaatgtccagcagcctggacaagccctcccctccactcctctcccc

SEQ ID NO: 745783 - DNA, 455 bp, Homo sapiens
tagatagaagttatatatagatagaaatgcatttatatgcatatttttaaactgttaatataatattgtgtaccggaagttgtctgtgatggtctctccatgtgattttttttgaaacttttttacacttcctcttgctggacaccagtgaacaggctgatttcagagatgtgagatgtgcctctaggatcagtggaatatggtatttggaaagaagaaggggacaaaaaatgaaggtcggttacctgaatatgtgtttaggragattgatccaatactccacaccattgaattctgcttgctaagtaattctgtttccacctggaaacagaacaacttcctttatatgctttggctacaacttcctttatgtgccttggcttctccaatcaaagtcctcagcaattactgcctcatgtacaacaattttctcttttggttgagttttctagggc

SEQ ID NO: 745784 - DNA, 533 bp, Homo sapiens
catgtaagccatatttagacaggattgtttgagaagggctgcctatggacataaaagtaaaataataaattttatacagaaatgagggtatcctggtcatcattttgttagaggccctctttattcagaaatagcatcaagatgaatatattccaatattttgatttgcattcagaaattcaggttgagcctggcacagtggctcacgcctgtaattccagcactttgggaggctgaggcaggaggatcacttgggctcaggaactcaagaccagaaatctagtttgtttctactattgtccagtggaatactgtatgcccgaattaattgttcaagtggggaaaaaaggcatcttatagtctacttgatwattttcaaaatagaaatattttttaaatcagaaaataagaaatcaagtaaatgctattatttaaaaatttcagatgacacagttacaaatatcatccagaattctactgctattaacattttgacgtatatatctgtgtatgtagctattcttttaaaatgg

SEQ ID NO: 745785 - DNA, 583 bp, Homo sapiens
tttgggatatacactccccacagtttttactaatgcgtgatcaaaaatgttgccaagactggtttgggacatgctatgtttgaaaggcctgggaatgtccaagaggtaacgtctaggcttggggctagatatgggtctgggggttggagagacagccttgagcattgggggtgaggaagggagaggggctgagatggccgtgagtacagagaaacagggcagggtggaggacagagcaagtggtttgaggcttggctgcactttgaatcacctggggagcttttaaactattccctcttggcttttctgatttaaytggcctggggagaagcacaggcatcatcaccttttaaactttctaagtgattccaattgcaaccggagttgagaaccactgccttagactagtggtcttcaacatttcctgttgtacatcccctaaataaattttggaaaactgtatactctgttacacaattttaagttgacatctaaatttcatatcataattttaacagctgcaaaaaaccataatttccctcatgttgtgtatattttctccagaacctcagagttgcatatt

SEQ ID NO: 745786 - DNA, 627 bp, Homo sapiens
tagcaggaccccttccatacaaaagctggaaggacaccaaatagatggtccagaaaagaagagaaaaagtattttctgcccaccaccctattacttcctaggagccacatttataagctactgacatgtacagaagaaaaatgcaaatggaagaaaaaacctggtgaacaaatgattttaggacctaaaaacacagggtaaacactctttgtcagaatttcaaccatgttaggctccaatacattggctatttcacccatctggtcttattgtttgactattagcaccagcaataacccatgattctgtgatcatctccccatggaaaaacaaaaattaagagatttttctgtggaaytggtatttgtttgtatgaattaggactgaatttgtactttacctcttcttcttgagaccttttcttatgagccatcttgtataacttatgcagttttcgagcatcaaattctgtaaacttggaaacaaaaatccataggttcctaaaaagaaaaatgaacagttctggtgaattatagaattagaaaagcaattttttatgatcttcatggatggcaagctattaaattttgctgtggtatactccctaagcatagaaattaagctaca

SEQ ID NO: 745787 - DNA, 611 bp, Homo sapiens
gtttgagaccagcctggccaacatggtcaaaccccgtctctactaaaaatacaaaaattagccagaaattgcttgaacccaggaggcagaagttgcagtgagctgagatcgcatcgctgcactctagcctgagcaacagagcgagactccgtctcaaaaaataaataaaatgtatccatactttccactagttagacttgaataccccataactaaacatggaaaatagcgtttcccatatctcaagtaacatacctttttcatcacttctgttcccaagtatgattacaataatcatcccaccaccayaaagaaaacttatttaaaagttcaatatgaaaataggcagggcgcagtggctcacacctgtaattccaatacttttgggagtccaagctgggtgggtcacctgaagtcaggagttcgagacctgaccaacatggtgaaaccccagctctactaaaaatacaaaactcagccaagtgtggtggtgcacgcctgtaatcccagctactcaggaggctaaggcaggataatcacttaaaaacgggaggcggaggtggcagtgagttgagatcacaccactgcactccagcagcctgggcaacaga

SEQ ID NO: 745788 - DNA, 497 bp, Homo sapiens
ttgtaaactcaaaattaagaaatttactcaaaaccgcacaactatatggaaattgaacaacctgcttctgaatgattcctgggtaaataatgaaattaaagcagaaatcaagaagttcttgtaaactaatgagaacaaagagaccgtgtaccagaatatttgggatgcagctaaagcagtgtaaacagggaaatttataggactaaatgcccacatcaaaaagctagaaagaactcaagttagcaaactaacatcacaactaaaagaacaacagagccaagaggaaacaagccccaaagctagtagaggacaagacataactaaaatcagagctgaactgaaggagayagagacatgaaaacccttaaaaaagaatccacaaactcaggagctggttttttgagaaagaaataataagatggaccactaggtagactaataaagaataaaagagagaatgtttaaacaaacacaataagaaatgataagggagatat

SEQ ID NO: 745789 - DNA, 595 bp, Homo sapiens
taagaaaaaaggccagcatcagtaatcatcaggtaaattcagattaaaaccacattgagatattgtctcattttgttagaacggctattatcaaaaaggtaaatgataagtgttggcaagaatgtgaagaaaagggaacccttgtacactgctgatgggaatgtaaattagcacagccattgtggaaaacaggttggaagttcttcaaaacattaaaactagaactacrcaacccaccaatcccattactggatatatatccaaaggatctgaaatcagtatgtccaagacatatctgcattctcatgcttattacagcattattcaacacagccaagatacggaatcaacctaagtgtccatcaacagatgaataaagaaaatgtggtatatatacagagtggaatagtatccagccttaaaaaatgaaattctgtcatttggagttcacgtggatgaacttggaagacattatgttaagcaaaataagccaggcacagaaagacagatatcgcatcattttacttatttgtggaatctaggaaagtcaacttatagaaacagagagtaaaataaaatgataattaccagaggc

SEQ ID NO: 745790 - DNA, 649 bp, Homo sapiens
tgggggttcttcagtgttccatgggtcattctaaatttggcatttgtcccttcttttaccttataaatgtttttaattgctcaagagtgctacatgtcatgaaaggaattgcctgggtgatgtcctaaatacagaaataataatttgcttgaaatggaaaaatagaaatatcacctcttatccaaagtacttctcttgggcttggccatrtaatgactctccaggtggaactgaattatcttctcatttggactataaacacaaccataataaatcatccaggcagtatatgttcttcatttcagtagttctggactttgaaactgtctttattgtttaaatgttggcatttatttatgaataaaactctctccaggcttttcatgccttctggaactctaaattacttatgtgacagtaaattatttataatgaggccccagagcaaggatgtggagtagaccttctaataataatttcctatggttgttttcctccattatgacttttgatgttcataataatgtcaaaaatgtgtaaaacagtgagggtgaggaattgagtttgcatttataggttatcaatgtgttaagatatggttgtcaagaatttagctacccagaagtcttacagaaacacttcctttcta

SEQ ID NO: 745791 - DNA, 592 bp, Homo sapiens
aaggcaagttttcctgcttccatgacaatggaaggcaggtaactcctttatggaatttgagcttgcatccaatagggaaaaggaggtttttttcctgcttctaggatggtagagagttgtcttgagcctgagacccatccctaggtaagtagctgaactgggggtttgttttggctaaagttaacaatcaggtgctcttaatttctccttcccattagagcgctcagtgatcatagaagctgcgcgattgtttgttttgcttcactgtttgttgttgttgttgctgtttgtttctgttttgttgttgtttcattctttttcccattgggtttgatcagctctacctgacttgataaaatcctaaagaagttccaaattatgggaaacaaggcctctrgagtggctaaatttcccgtccctccccaccaacacacacacacacgaaaagggccgggcacagtggctcacacctgtaatcccagcactttgggaggccgaggtgggcagatcatgaagtcaggagttccagactagcctgaccaacgtggtgaaaccccgtctctactaaaaatacaaaaattagctgggcgca

SEQ ID NO: 745792 - DNA, 657 bp, Homo sapiens
gctggatttcctaggccgactaagactccctaagcctagctgggaaggtgaccgcgtccacttttaaacgcggggcttgcaacttagctcacactgaccaatcaggtagtaaagataactcactaaaaagctaattaggcaaaaacaagaggtaaagaaatagccaatcatctgtctcctgagagcacagcaggagggacagtgatcgggatgtaaacccaggcatgcgagccgtcaacatctacsctctttgggtcccctccctttgtatgggagctctgttttcactctattaaatcttgcaacagcactctcttctggtctgtgtttgttacggctggagctgagctttcgctcgccgtccaccactgctgtttgccgccatggcagacccgccgctgacttccatccctccagacacagggtgtccgctgtgctcctgatccagcgaggcacccattgccactcccgatggggctaaaggcttgccattgttccttcatggctaagtgcccgggttcatcctgatcgagctgaacactagtcactggtttccacggttctcttccataacccatggcttctaatagagctttaacactcacctcatggcccaagattccattccttgggatccgtgaggccaagaaccccagg

SEQ ID NO: 745793 - DNA, 657 bp, Homo sapiens
gctggatttcctaggccgactaagactccctaagcctagctgggaaggtgaccgcgtccacttttaaacgcggggcttgcaacttagctcacactgaccaatcaggtagtaaagataactcactaaaaagctaattaggcaaaaacaagaggtaaagaaatagccaatcatctgtctcctgagagcacagcaggagggacagtgatcgggatgtaaacccaggcatgcgagccgtcaacatctaccctctttgggtcccctccctttgtatgggagctctgttttcactctattaaatcttgcaacagcactctcttctggtctgtgtttgttacggctggagctgagctttcgctygccgtccaccactgctgtttgccgccatggcagacccgccgctgacttccatccctccagacacagggtgtccgctgtgctcctgatccagcgaggcacccattgccactcccgatggggctaaaggcttgccattgttccttcatggctaagtgcccgggttcatcctgatcgagctgaacactagtcactggtttccacggttctcttccataacccatggcttctaatagagctttaacactcacctcatggcccaagattccattccttgggatccgtgaggccaagaaccccagg

SEQ ID NO: 745794 - DNA, 657 bp, Homo sapiens
gctggatttcctaggccgactaagactccctaagcctagctgggaaggtgaccgcgtccacttttaaacgcggggcttgcaacttagctcacactgaccaatcaggtagtaaagataactcactaaaaagctaattaggcaaaaacaagaggtaaagaaatagccaatcatctgtctcctgagagcacagcaggagggacagtgatcgggatgtaaacccaggcatgcgagccgtcaacatctaccctctttgggtcccctccctttgtatgggagctctgttttcactctattaaatcttgcaacagcactctcttctggtctgtgtttgttacggctggagctgagctttcgctcgccgtccaccactgctgtttgccgccatggcagacccgccgctgacttccatcmctccagacacagggtgtccgctgtgctcctgatccagcgaggcacccattgccactcccgatggggctaaaggcttgccattgttccttcatggctaagtgcccgggttcatcctgatcgagctgaacactagtcactggtttccacggttctcttccataacccatggcttctaatagagctttaacactcacctcatggcccaagattccattccttgggatccgtgaggccaagaaccccagg

SEQ ID NO: 745795 - DNA, 590 bp, Homo sapiens
ccgctgacttccatccctccagacacagggtgtccgctgtgctcctgatccagcgaggcacccattgccactcccgatggggctaaaggcttgccattgttccttcatggctaagtgcccgggttcatcctgatcgagctgaacactagtcactggtttccacrgttctcttccataacccatggcttctaatagagctttaacactcacctcatggcccaagattccattccttgggatccgtgaggccaagaaccccaggtcagagaacattaggcttgccaccatcttggaagcagccggctgccattttggaagccacctgccaccatcttgggagctctgggagcaaggaccccccagaaacatgtccacctcggcctcccaaacttaatcctatttatagtgttagaacaatgcctatgatatcgtaaatcaggctggatgtgtacttgccatttacatccacgtatgtgtatgtttccatgtgaatacctgtagaacttaatgcctgacacagaaggcactcaatagatgccagttgttcttatcattggacacacagaaacatagacacagacacttagatg

SEQ ID NO: 745796 - DNA, 636 bp, Homo sapiens
gatgaactaaagaaggaactatttaggttttgagcagaattttggaaatacaaggagcccaggactgttgttccagccagtaaaaggctttcaaaataagaaatggtcttagagcaaagataaaatttagggcactgcccgtaaattgtggccttgggtaaatgtgaaatcaagaatgtggctgtaaaaccctttattaaaacctcagaaaaatttaagggcattatttttgtagaccttttggatagacaaaagggcttccgagaatatttttttcccccttgagacagggtcttgcwatgttgtccaggctggcctccaactcttaggtacaaagagccctcttgagcagctgggaccacaagcacacactgccacgcccagtaaagaatcttcagagtatacatcttagatcctctctgctagacaataggacttctaagaatcccacagcaacctcacaagtggcttaaagtagaagaaggcctactaggggagaaatgggggtatggctattgtcttaagtagtaaattatcatttgatatttaagaaacccacaagtttttgaaagaattgtatcaagttgggtgggaagggacggagacagttcaaaatgcagcagaccctggtcatta

SEQ ID NO: 745797 - DNA, 643 bp, Homo sapiens
ttcagtgattttaatgctaactgtattttcctggattctgtttatttgaacattgtagaggtgctatctctagtagggtcacacggtgtgttgtctggggtatcctaggcccgacctggcggggtggacagactgatgtcagtccagagagkgagctgagctggtcgtgggttttcttctctgctttgctccccagggccttgaggcctggatgggcactgagggtgttgagaaggctgctagctgaatgaaccccaaatttagaaatactcagaaatggaaaatgtccttttaacccccatccaggtcagtcttatgaaatccgactactggagaatcggaagctgggagactttcaagatctgaacacaaaatatgtcaaggtaagcctcacaggctgttctcattgcctcggggagaggggcttgattagggtctgggcacctgggcttgctggggttgggcacgggtagctggaaggttagggagaggccgggttcagctcagccctcaacggtgagacgcagcccctgtttggcttctctggagcctgttgcccaggtggggattagatgggctggcagcgttgaacttttctgagctgcagtttgctcatctgcacaaaagggttaataacgtaaag

SEQ ID NO: 745798 - DNA, 608 bp, Homo sapiens
tgcagaccccgtgctctgacacaggctgcatagttccagagtgacctctcagtggtgcgggggctcattctaatccagagcagtgggacttaagggagggacattgtactcaaggtccctaaaaaaaatcaggcccactgcagtcaaccccacacctgagtaggcgcctgcctgtcagttcccggagactgtggagtgaagctgtcatcgcatcttgtttgttttaaacccatccacagaggcgtggctggctgcagccatgcgttgatgagcgggttggacacattcctttggtgccgtctcctcggtgactgcatgtctgggtcggggcaccrcggctggaggccaggagtctacctctggagctgaccctggggttcaaacctcagctcccctggtctctgccatgtagccttaggcgggtcgccatcctctctgcgaaacagggtgtgttggcagggggccacatgcatagctcagcagccctggctgtgtctgtagcgctgtctgctgtctccccagcccgtcccccacagcggctccagtggctacgggagtctgggcagcaacgggtcccacgagcaccttatgagccagacctcctccag

SEQ ID NO: 745799 - DNA, 496 bp, Homo sapiens
gaaaaacaaaaaaccatgcagaaataagcaagactcaagcattggctctcatggaacaaatattgctgaacgccatataaaccaggaagattaaaccatacatttttaacaatctgcaggaggccacatgtggattagaaagagattttgaagctgatgtggctacagacattgagatatttccagtttcttgcagaatttcctgtagaaccccaccagctacctaggsagaaaaaaactccctgaaaaaaactcgccatggtgctagccatgattcctttcctctcttccatgggaaaaatgacttgattttcaggggcaagggtagcaaaggtgtatattgcgaatgccattagaaaccactggaggagagtgggggctcaggggtggtctctacacatagaaaagggtcaggaatatgtgctaatatgctaggcctagcatcatcactcaaagaagcgaataaacacttttgaagaccatgcccctgagatcc

SEQ ID NO: 745800 - DNA, 629 bp, Homo sapiens
aggaccctgtgatgattgtgttacctgtacaaattgtttgtaaaatgtgtgtttgaacaatatgaaatctgattgtaaaacatgggtgtttgaacaatatgaagtcagtgcaccctgaagaagaacagaataacagcgattttcagggaaaaaaggaagataaccataaggtttgactgcctgcagggttgggcagaatagagccatagttttcttctcacagaaagcctatacatggatgtgtgaataggagaaatatcrctgaattcttttcccagcatggagtaatcctggggaaggtatgcattcctgggggtaggtctacagatggctgctctgagagtgtctgtcttaggcggttaagataggactgaaagatgccctcttctcctgcagtgccctcaggcttactaggattgggaaattccagcctggtaaattctagtcggactggttgtctgctttcaaaccctgtttcctgttaagatgtttatcaagacaatgcatgcacagcgggacacagaccctcatcagtaattctaatttttgcctctgccttgtgatcttttattgccctttgaagcatgtgatctttgtgacttactccctgtttgtacaccaccccccat

SEQ ID NO: 745801 - DNA, 645 bp, Homo sapiens
aaccatagaaaaagataatattaaaaccataatttgagaaaagtcttctgcctttaatgtttttaaaataataaaaagaaaaaaaatagaggcagagacttgtactaaaattgaaagatagtttcaaaaccctgagaaaatcagtctatcaccttgtacagattaaacatatttattttaaatgtgctatttgattacttaaatatatagttctccaattgctctgatttaattttctttctttctggttttaatccatttttatatatatgtgtatatgtatatatatatatatatatatatatatatatatatatatwttaaatatatgtaggaataattttggaacaagaatgatgttattttcctccatagaggagacacataatctcataggccaatatcattggaagctggtatgcaatttctacagcagacattctgcttcaggttacccatcttatgggagttcattttggatcccagcacaaagggatagatctctcctttggtgggtcttaggctttaatcaatactgttctaccagagaggcagccgaaagttctaatctttatttcaaattctaaattatctgttctgagattttcatatttctgcaggtaaaaactaaccgtaaatactaag

SEQ ID NO: 745802 - DNA, 558 bp, Homo sapiens
atgtcaatccactaagaagacatgagcatccttaaagttgtatacaccaaaatacagagtctcaaaataacttgaaggaaaaactgataagctgaaagatgaaatagacacattcaaaattatagcttggactttaactttaaaaatcaataaatttcaaacttcaaatsaaattgactaatttattactagacacaaattaccagaactgatgtaagaagtgttagaaaatctgaatacacctatagtattaaataatatgaaatcttaattaaaattctgcacacaaagaaaatcccaggtccagttgccttcaatgaattctaacaaggatttaatgaaaaaataatatagatctctactacattctttcagaaaataaagtagaacatgagcatccttaaaaaaattagccaaatattggccaaatattagccaattgaatcaagcagtatttttttaaataatatacaataaaattgtgatttatctgaagtatgtaaacttggtgtaacattcaaaaattaataaaaattatgtacataaggacagatcata

SEQ ID NO: 745803 - DNA, 567 bp, Homo sapiens
ttctccaacagtttaactgtacatactttttactgtaagctacctcaaatctttctcagaaataggtgcgagatatgtggataaataagttagaagtaaatgttgatgagaggcaagtgcataggcttggggtttaaaaagaaacagcagaagcaggtagctgtgtgcccctggataagccccttggtctctgaatctatacttatcagtaaaatggggatcctgatgcctgacacctgacacctgatgcctgagttgaaatggaaattggctaacacgatgctattaaatcctgggtcttcttattaaaggcctcaattccttcytctcttctgtcatgctgggagcccccccaggattcccgggtagagggcgcgggtccggccttgaagccgggttctcagggcctcactgcggggtctctgcagcctcggtcgctggcacaaatgctggactgcagcagcccctggggtcccctaggggacctgggcgcccctaccttatctccgagtcctccttagggtacttgtccaccaggctgatgacgtccagcaccactagccccac

SEQ ID NO: 745804 - DNA, 441 bp, Homo sapiens
catcctggccaacttggtgaaaccccgtctctactaaaaatacaaaaatttagctgggtgtggtgccacgtgcctgtagtcccagctacgcgggaggctgaggcaggagaattgcttgaacccgggaggcagaggttgcagtgagccragattgcctgggctccagcctgggcgacagagcgagactccatctcaaaaaaaaaaaaaaaaaaaaaaaaaaaaggaaaggaaaggaaggaaggaagggccgggtgcagtggctcacacctgtaatcccagcactttgggaggctgagatgggcagatcacgaggtcaggagactgagaccatcctggctaagatgggtgaaaccccatctctactaaaaatacaaaaaaattagccgggcgtggtggtgggtgcctgtggtcccagctactcagggggctgaggcaggacaa

SEQ ID NO: 745805 - DNA, 610 bp, Homo sapiens
ctttgggtaggttctttagtttcctcctcatctaacagggctgttgtgggactcagtgagagagaggatggctggaagtgcacataggatactgcctggcagactgtaggcattcagtaaacgcgagttctccgttaacacgaaaacattacaaacagctaaaatgacagctgcttgagagaataatcggtaagtgccacaaccgggctagaaaaggatgaaggacaagctcctgcccactcctttggaaactccacacctgggccrgagaaagactcgaattcgaaaactaagtttcagtcgcacctgcctccgggctcgcttcagcctccgaggggtctgcggaggcgacgtcccagtcaggagggatgcgcgcctgcgagccccccggggatctcggagccgctccactgcggtgcctgccgctatcttccccacgccttagtaactgcgacgcgacggcagacagtgtaggcggcaaccgacggccgggacgtctaacctcaagtcccagcaagccccgcggccacgtcctctgactacctcgcgccagcaagacccaaactacggatcccgattgactccgcgcggcgcgtcacgctgtcagctc

SEQ ID NO: 745806 - DNA, 628 bp, Homo sapiens
cttggtcatcgtggctgttggacaagatgctaaagcagccacagccaccaagctagtgggtactggtgtactctctgtactttttaaatgagatggttttaaaatgcaccacaacattgaccttctaaacaaaaggcactgcctctaacttcagtttccttttcctggcatcttcttattttttaccccagaaataacagaaccttaacatacttctccaatcttccccccagtccccctcacacttgccaaaccaatatccttgaaccagagttcttaaccatagactaaagatttaagaatatacaaattcaatgggaggccaaggcgggcagatcatgaggtcaggagatcgagactatcctggctaacayggtgaaaccccgtttctactaaaaatacaaaaaattagctgggtgtggtggcgggtacctgtagtcccagctactcgggaggctgaggcagcagaatggcatgaacccgggagacggagcttgcagtgagctgagatcacgccactgcattccagcccgggcgacagagtgactccacctcaaaaaaaaaaaaaaatacacaaattcaaaacaaactactttaggtgaataaagcactgagatattaacaactc

SEQ ID NO: 745807 - DNA, 634 bp, Homo sapiens
aaccaagtcaagtcctctgttttctgtcctcatagtacccactattcacatcattcccccccttttttttcttttttgcctttagccctcaccacaactgtaattagataactcatttatcttcatttgattaatgtctgtatcaagtgaatgtaaattctctaagttcagggcttttttcaacttttaagttcaggagtatatgygcaggtttgttacataaacttgtgtcacagaggtttattgtacagattatttcatctcccaggtattgagcccattagttatttttcctgatcctcatcctcctcttaccctccacccgctgataagcctcagtgtgtgttgttctcctctatgtttgcatgtcttctcatcatttagctcccacttataagtgagaatgtgcattatttggttgtctgttcctgcattactttggtagagataatggccttcagctacatccatgtccctacaaagaacatgatctcattttttaatggctgcatagtattccaaggtgtatatgtaccacatattctttatctagtctatcacactgatggacatttaggttgattccctgtctttgctattgtgaatagtgccgcaaggtttgtcttcatctttc

SEQ ID NO: 745808 - DNA, 611 bp, Homo sapiens
cttgggagttgggaatgtcggcctcggttccacccagtcttttctatagcattttccttattttcgggactgtaatggcgtgtatcttttttaccccaacagccgcaggcacatgcgggatgaacaggcaagcagtggttacccatcccctttccctcctgactggggctgggacacatggcacaagggccgggcagagcaggctggctggcattccctacaatatccatggtgccttccccttccctggctgaggagtccagctctgtgcaagccccagggaagaaacaacaattaaaagtttccctccctgatggawgaactcatttgcataagaataagaagcttttcctccaggcatctttccagggctgtactttaactgtttttttttttttttccttctctccacccagtcagcagttaacacagccttgaactttaagctatttgtttcttttctccatcaggtcagcagttaatttttatacagaaggctttttttttctttttttagaagacattttaccaggctaggaccccaactatcactgtctatattctctgtaaagttttaattgtgaaaaaggatttgtgaggttggtcttaag

SEQ ID NO: 745809 - DNA, 673 bp, Homo sapiens
gacctaggatgctattgtttctggaggcagtggcatgacttgctgcaagagaaatgctagatccctgagggtgcacatgggtgggcagtggccccagtgttggagggataaatttgttagaggtagcagtggcaggcccaagtggctgatctttaggcccctggttggcaggcaccaacagtgccagtctcaagtaagctggttttttggccctgggatagcatagtcgtgtgccagtggtggcagcaacatgctggtcctaggccacttgaggggtgcacatggacaccagctatggtggcagcaggcccaggtagggtggtttcaagctcttaggaagtgcacgtgggtgccagtggtggtggcaatgggcyctacatgggctgatcttcaggctcctgaacagtgtgcatagccactgatgttggcaaattgggctacaggcaggctgatctgtaggatatgtgcaagcactgctgctgtcagcagtgggccagtccttgggaccctgggtggtgtgtgcccacaatggccatggcagcagcaggacccgagggttggtcttcaagccactgaggagtgcattcaggcacatggtgatcccactgctggaggcactggaattgctttcagcagctgcagccccaggtaagcagctctcagtctctgggga

SEQ ID NO: 745810 - DNA, 604 bp, Homo sapiens
cataatataatgggtacattctcctcatgatagtcatgatttttcgaataacctaaacctgctcgaaaacttcgtggatttccattagaatcagaataatatacagactgtgaatgtgctctaagtccaaaggccctggattgtccttcctctctgacctctcttcactccattctccctcttcctctttgtgctctggcctccgtagctctcctggacacttgcacaggccacatacatctgcttcagagagtcttcatgtgttgtgtgtcattactttttcctggaatgacatcctcccagatcttagtagtgccagctcttctcattgttcctatctgaaagatgccatgtcctcaggccatctatgaaatctaattgaagaaaaccccagtcattacctcccagtcctctgcattccattacccaayattattttcttccacggtacattccaatatctgatatcgtcctattttcttggtttctgatttgttttctttctttctcccttgactataatctccatgaaaacaaaacaaaactaaaaacaaagctgtatttatcatgttcactggggcatcccccaaatctaagataagtg

SEQ ID NO: 745811 - DNA, 602 bp, Homo sapiens
acagaggctcctgaggcccagttcttcacagtttcaagaagcagctgtaaaaccagtctcccagctgggactatgccaaagaggattaaagaatgagcaaaaaggatagaaatgtggtagattttaactttctaaaacacttttagcaaggcccaatcctccaaatatttcataaactctgggttttcctacaaaaggatttaattggaaatactaatttgtcatatgatttgtgaccttaaaaagtagatttcttatgtgtgaatcaccctagaaaactctgacttcatggaactcaaaaatgtcaagcaatgcaatttctttatctaacaacttwtcatccactaatttatattgcacaaatgtaattttcttttaaagatttttttgttatagttttgccacattttctaaagtcaagtaattatatttaacaaattcatctgataattcctctcagaactaaaagatatgttttgattcaaactgcaaacatattaatgaaaaatgatatgatcttaagatgcaagttacttccatgtagaaccatttatatcaaggacattttaatttttttctcctaaagttctaatttagtaata

SEQ ID NO: 745812 - DNA, 591 bp, Homo sapiens
gataactatttcttttaaaaatgtatattaaagataagttctgtctctttggctacgtcagtcatgctgttcatttaatctatgttgacattattattacaacaataactgaggacttactctgttctaggcagtgagttatgtgctttattcaatttttcctcatttattatgcataaaacccccgattacatagatgaagaaactaagaatcaaagagttaaaaataaaacatcaacaaaagytttaggaaagaatgtcaaaaagattataattagcaagtgatgggattgctatttcttcacaatcttattttatattcaaattatatcaggaacccatctaattggttatgcaacagagttttatatcactacacattgtccttctagaaattatttatgcctttggaacattactagatcattatctctatatctttttctctctgatgatgttactagtttacatagtatttttaaggagaacagttgtgtcttactatgtgtatggtgtatgcccaacagtatttagctcagtctcatacctatatggattaaaagtatatttggtgaacaatttactagcatt

SEQ ID NO: 745813 - DNA, 595 bp, Homo sapiens
aattaaaacatactaccagaaaaaaaacaccttcacattaaaaaaaaaaaaaagtcggaatagatggaagaaagtgaaaccacaaaacaaccataaaacaaataacagaatggcacaagtccctatttatcaataataacattaaatatgaattgactaagctctccaatcagaatacatagagtggccaaatgggggaaaaaaagacctaaagtttcttgcctacaaggaacrcacttcacctataaagatacacataggctgaaaataacaggatggaagaagacattccacgctaatgaaaaccaaaaaagagcaggagtcactatacttctagcagacaaaatagatttcaaggcaaaaactataaaaagggatcaagaagtttattgtataatgataaaggagtcaattcagaaagacgatataacaattgaaaatatatatgcaccaaacactggagcacccagatatataaagcaaatattattagagctaacaagagagacaaatctccatataataatagctagagactttaagaaccaactttcaacattgaacagacaaaaaatcaacaaagaaacactggaca

SEQ ID NO: 745814 - DNA, 623 bp, Homo sapiens
gacttttgattgtgggtcatttttaaaaaaactgttatttgcttgggttgggtttggtttcactcaacagaatgtaaattctgaatgatatataactgttccccaatttcagttgttcagtcatatcacaccaagcatatcctcctatttttaggacactctgtcctcagtgatagatgtcctaaaattggctgtcttaatgtgtcctgattgaatttggggtataaccacatgtacaaattttaaatcagatcattcccaatacaccttccaaattttctgaaaatctgtctaatcatttttgtgaaatgttgtagtagacaaacagttcaaaatctttttttctgtatctaggcaacagagttgttttgttaatgaatagtgtactgataaaatgaaaggatgttttagaaagactttcttagatgcgagatcatgtggatctggaatggatagaaatcagggagtttagaacaatcatttayttttgaatttaagaagacatattagggaaggtgaatatgtgaatcccagatgaaatgagcccagctggggacctgggaaagggagcctattttagaggacaaacaaagcaccagaaggtttgggcaaaaatagcccat

SEQ ID NO: 745815 - DNA, 638 bp, Homo sapiens
gaagactagagaaaaatccatcttaagttatttcttaaaacaatctaagagaaaatcaaagtacactgaagaagttctcattttagaagataactggcttccattcttaaaagtgagaaataaaatatggaacaattttagagaaactagcttgcatatttgctgaagtactctcgtatcaaactagaacagattcatagtaaggggctcaaaaacagattctggataaaggtataaatgwtaacatatttttatttttcagtttgaaattgcaaaataatatcacatcccctgacatccaactatatacctgaacaggcatcactgatattaaagcacatttggattatcttcaaaatttatttaatggaattcattttatgtttaactggatttaatgctaatggtaatcttatagcacacatgtttgtgaagaattttatttttatttatttgaagtttgtgtacatagtaaacaattgttttaagaaagaatgaatcagatatgtttggatactgtagaggtattgttcttgtgtttattcatgaatgacaacctgattggcatagaagtattgactcatacttctttgtcatcaaactctgaactggtgaatcctttgtcttttaaaatttag

SEQ ID NO: 745816 - DNA, 593 bp, Homo sapiens
ttagagacggggtttcatcatgttggccaggctggtcttgaactcctgacctcaagtgacccacctgcctaggcctcccaaagtgctgggattgcaggcatgagccactgcacgtggcctatacattttcttatactatcttatttattttaattttaaaaattccagtaagtaaaattcactttctgaaatagagttctatgcatttttaaacatttatagttttttgtagctaccactacagacacaacagagaacaattctagtatcacraagaattccatcatgctacccttttgtgttcagacccttcttccacctctaaccctggtaaactgctgatatatttcctgtttttatatgtgtgccttttccagaatgtcatataagtggaatcatctatagacaacttctttgggtttggtttctttcaggcaacagaatgtatttgagattcatccatgttgtgtgtatcaataattcattcttttaaattgctgagtagtattccattggatgggtgtatcatggtgggttgaccaattcacttgaaggacatttagattattttcaatattgatgattgcaaataa

SEQ ID NO: 745817 - DNA, 651 bp, Homo sapiens
cttcctgttcttacttataagtgggagctacacagtgagtacacatgacataaagatgagaacagtagacactagagaatactagaggggaggagggggagaaagggttgaaaaactacttactgggtactatagttaccacctgggtgatggaatcattcatatcytgagtctcagtgtcatgcaatatacccaggtaacaaacctgcacatgtacccctggatctaatataaaagctgaaattcaaaaaaaattctttaaataagtgtttttttaacccactttcccctctctttctttcttctacttgttttacttttcccaaagacttaaatgagttcttgtctttcataatgaaacgtaattttttcacttttttattatttcaaagttaataatttttaaatgtatttaaacgtaaaattgaaggttgtgtgatactacttatatttgttcaactgaggcctctatgcctgaaattctgtgtgtgggaagaacacactgtcaaaagggtagaatagcgaatcaatgtgggaaggctgaaaattctctgaatctatcaaaatgtcacaaccaaattaggtttaattaaaagctaaaaaaaaaacccaatgttgaatcccacaaaattgttttagaagattactctt

SEQ ID NO: 745818 - DNA, 651 bp, Homo sapiens
cttcctgttcttacttataagtgggagctacacagtgagtacacatgacataaagatgagaacagtagacactagagaatactagaggggaggagggggagaaagggttgaaaaactacttactgggtactatagttaccacctgggtgatggaatcattcatatcctgagtctcagtgtcatgcaatatacccakgtaacaaacctgcacatgtacccctggatctaatataaaagctgaaattcaaaaaaaattctttaaataagtgtttttttaacccactttcccctctctttctttcttctacttgttttacttttcccaaagacttaaatgagttcttgtctttcataatgaaacgtaattttttcacttttttattatttcaaagttaataatttttaaatgtatttaaacgtaaaattgaaggttgtgtgatactacttatatttgttcaactgaggcctctatgcctgaaattctgtgtgtgggaagaacacactgtcaaaagggtagaatagcgaatcaatgtgggaaggctgaaaattctctgaatctatcaaaatgtcacaaccaaattaggtttaattaaaagctaaaaaaaaaacccaatgttgaatcccacaaaattgttttagaagattactctt

SEQ ID NO: 745819 - DNA, 651 bp, Homo sapiens
cttcctgttcttacttataagtgggagctacacagtgagtacacatgacataaagatgagaacagtagacactagagaatactagaggggaggagggggagaaagggttgaaaaactacttactgggtactatagttaccacctgggtgatggaatcattcatatcctgagtctcagtgtcatgcaatatacccaggtaacaaacctgcacatgtacccctggatctaatataaaagctgaaattcaaaaaaaattctttaaataagtgtttttttaacccaytttcccctctctttctttcttctacttgttttacttttcccaaagacttaaatgagttcttgtctttcataatgaaacgtaattttttcacttttttattatttcaaagttaataatttttaaatgtatttaaacgtaaaattgaaggttgtgtgatactacttatatttgttcaactgaggcctctatgcctgaaattctgtgtgtgggaagaacacactgtcaaaagggtagaatagcgaatcaatgtgggaaggctgaaaattctctgaatctatcaaaatgtcacaaccaaattaggtttaattaaaagctaaaaaaaaaacccaatgttgaatcccacaaaattgttttagaagattactctt

SEQ ID NO: 745820 - DNA, 599 bp, Homo sapiens
ttaatctataaaattatgtatcacaaataaaagtatattttacatatacactatatataactttatttatatgaactataaaaatcatgtttatattaataaaatatatttatttatatcaatatattaatataaagtatgcacaatgtatatttatataaaaatttttaattaaaaaatattcatttgggttcaatatgtatggatcgccagggcagaaacgtctcttcaaaaggtgaaccgttcttaaaatcaccgtcatttgggaaagagtgataccccacctgttttctgagaaacagcagaggcgtayggccagcggggtatctctctctttccctgaggccgaaaagtcagggaatttttcttccccacccctaggagctctgtaaaccggggatatttcagaaggatttgcacagggtcccggcttctgttgtaaatgagctccatggattctcggctcagacttgtgatcagctcacctgctccagaatcactgacacaaatgcaaccacacacttacacaaacacacatcaacacaaagaatcacaaaacacactcatagaaacacatggacacacgaagacatgcacac

SEQ ID NO: 745821 - DNA, 620 bp, Homo sapiens
tcacgcctgcaccatccagaaagcagaaggcagctggcccgggctgtacggttcgtagaatcagagagaacactgcttgccttcatgtctgtaccacaataaatctgccaactgtggtcaaagtctctggattcctgccccctcattttattttgtctattatggagtggaaggagtgagaaagattttgcttcctattttgttttgcaaggcgtttctaagaaaaacaacccgtgttctgcaaacgagattctgagtgtcccctgggcgtgatgaaaacaaactttgggaatccaagggcctgagaggcagagtgaatgtcattcacatttccctgcgaatgacaaagtcactttttattattattattattattattattattattattattatwattatagattcaggggatccatgggcagctttgtgtcctggggatattgtacaatgctgaggtttggggtatgaataatcccgtcacccaggcactgagcattgtacattcctgaggtatataatgtgtactaaaaataaaatgtatatttatatatgcactaatgattcaacttgattccttgtaattaagaaaaacaaaccccaaattcgagaggagttct

SEQ ID NO: 745822 - DNA, 619 bp, Homo sapiens
ttgtaacaaaaataattatctcaaagttcctacttaatgggtggccaaaaaataacatttcaggcagtagaaacaacctaagcagaagccctaaagcaacaaagaactgggcttactcaaggaactgaaagaatgtaagtttgacatcctcttggggtgagaacaaagtggcaaaatgaaaaattgaagacctcatcaagaaccaaacaatgaaggaatttacagtgcytaataaataacttggatgtgttttaattgtaatgaaaaatcaatgaagagttttgcgcagtaaatctttattaagttataatcagataagtaagtctgttagtggagaaatgattggaaggagataagaattaatggaaagaaactagactggttcattagagagccaggaaaaggtgatgatgtttgagacaagcttttgacagcaatacttgctactgaatttgctactggcatgaattaagtggaaagaatcaagtatgactcaaccactctgcttctagctcaaacaatggattgaatgtttctgcaaaatactgagtttggaaagtcaggggaagaacaagggataaaggcattaaaaagagggataataagagttcagtcttaa

SEQ ID NO: 745823 - DNA, 619 bp, Homo sapiens
ttgtaacaaaaataattatctcaaagttcctacttaatgggtggccaaaaaataacatttcaggcagtagaaacaacctaagcagaagccctaaagcaacaaagaactgggcttactcaaggaactgaaagaatgtaagtttgacatcctcttggggtgagaacaaagtggcaaaatgaaaaattgaagacctcatcaagaaccaaacaatgaaggaatttacagtgcctaataaataacttggatgtgttttaattgtaatgaaaaatcaatgaagagttttgcgcagtaaatctttattaarttataatcagataagtaagtctgttagtggagaaatgattggaaggagataagaattaatggaaagaaactagactggttcattagagagccaggaaaaggtgatgatgtttgagacaagcttttgacagcaatacttgctactgaatttgctactggcatgaattaagtggaaagaatcaagtatgactcaaccactctgcttctagctcaaacaatggattgaatgtttctgcaaaatactgagtttggaaagtcaggggaagaacaagggataaaggcattaaaaagagggataataagagttcagtcttaa

SEQ ID NO: 745824 - DNA, 588 bp, Homo sapiens
gagtgttaacagctcataaatgcagcccggacccaaagagtgagcagcagcaagatttattgcacgaagagcgaaagaacaaagcttccacagcacagaaggggacccaagtgagttgctgaggctggctcgggcagcctgcttttatttccttatctgaccccacccacatcctgctgattggtccattttacagaatgctgattggcccattttacagagagctgattggtctgttttgacagggtgctgcttcgtgcatttacaaaccttgagctagacayagagtactgattggtgcctttacaatcctttggctggacacaaaagttctccaagtccccactagattagctaaacacagagcacagattggtgtgtttacaaacttttagctagacacagagtgctgattggtgaatttagaatcttttagctagacatggagtgctgattagtgcatttacaatcctctagctagacataaaagttctccaagtccccacccaactcaggagaccagctggcttcacctaatggatcctgcaccagggccatgggcagagctgcccgccagtcccacgccgc

SEQ ID NO: 745825 - DNA, 464 bp, Homo sapiens
cctaatatcagaacttcctctcctcagaagtggtataaagtgtgtgtgtgtgtgtgtgtgtgtgtgtgtgtgtgtgtgtgaaaatagaagctttggcttcccataaattttatggtgtatagtcagcattgattaatggagactctaataagaaaaaatgttactggtgatattgaaaataatgtagaggaattttaagtggtgtagtcatccagtagattttgccagtttaaagrcagtagaacaattaagacatcttctttcagtttgagtattttacactcccatccccaaatacgatgaggctcattttgttttaccattaacattaatgggatttaatttacagtgggacaaataggcctctgactttgtaagctgaatgtgattatgaaatcaatgtttagaaatcataaaacacctattaatacttgtcgtagaggcatttgatgaagtttaaaatc

SEQ ID NO: 745826 - DNA, 577 bp, Homo sapiens
caactctgctctttaaattttctccatggatccaccattttccttgcctttagtatgcttcttttttctttagtttgttatatttgattatagtaacctagaagttatttatctatgggaattataatgctaaaaaatagtgctaatacatagaaaaaatatagtcaaatctggctgtatagattaacaggccatatatttctaaaaaaattaaaattagcatcatttttatcacgtattttgaagtagtctaaaaatcagttcttagaaccagaattccaaaattttcataaagatgatatagtacatatattttacttaatttccctcctccaagtcatctgaaataaatgaaaagactaaaaaatatgaaacagaaacatcattataccatagactgtgaagaatgtttaygaatgaaatttaaactaaatcactgaaatttggcaaacttccacttcccactaccatatatatttctctaaaagacagtgagagaggcctgaaaaacagtacatatgagcatgcaaaaaagaagaagaaaaaagaaagaagtgtaagtgctgtggtatagaca

SEQ ID NO: 745827 - DNA, 507 bp, Homo sapiens
ctgtctggactacttatgatgtaaatggcatactaggtgccaaaggaagtttatggctatcagacaactgcctacttagataccaggtgctattccttgagggactggtgcttcaaatacatatgtgtgtggccctcaaccctgccacttttctcccagaggatggggaaccaatgaaatgtgactgccaacaaattatagtccagacttatgccacccaagatgatctcttagaagtccccttagctaatcctgaccttaacctatatactgatggaagttcatttgtagagaatgggatacraagggcaggttatgccatagttagtgatgtaaccatacttgaaagtaagcctcttcccccagggaccagtgcccagttagcagaactagtggcacttacccgagccttagaactgggaaagggaaaagaataaatgtgtatacagatagaaagtatgcttgtctaatcctacatgcccatgctgcaatatggaaagaaaggga

SEQ ID NO: 745828 - DNA, 466 bp, Homo sapiens
atatggcttattattagagtagggtaagtcagagaatttctttattctaagtcctaagcagaaaactgagaaaaggttagagtaatgtttctacatcctatgacccactttgggggaagaggaatcctatggcctgccttgrgaaacaaagagaagcaggagaaagaaggagagaaggaagtcagaaagaaacttttcttctgaggtctctccaatgtcctttaggttgaagtacttagcatcctgaaatgccatactttggggtatcactttctgagccccaaaagatttaatgtaccataaatgtcatttaggtcaacatttaaggaggtaaaaagaagacatggaatatatttagcttacaataatttataatatctcacagcatctggatgaatggatagatagatacataggtagctacctagataaatgtagctatattatgtatacaacgatgatttta

SEQ ID NO: 745829 - DNA, 466 bp, Homo sapiens
atatggcttattattagagtagggtaagtcagagaatttctttattctaagtcctaagcagaaaactgagaaaaggttagagtaatgtttctacatcctatgacccactttgggggaagaggaatcctatggcctgccttgggaaacaaagagaagcaggagaaagaaggagagaaggaagtcagaaagaaacttttcttctgaggtctctccaatgtcctttaggttgaagtacttagcatcctgaaatgccatactttggggtatcactttctgagccccaaaagatttaatgtmccataaatgtcatttaggtcaacatttaaggaggtaaaaagaagacatggaatatatttagcttacaataatttataatatctcacagcatctggatgaatggatagatagatacataggtagctacctagataaatgtagctatattatgtatacaacgatgatttta

SEQ ID NO: 745830 - DNA, 618 bp, Homo sapiens
gcccccagagctagctatgccattttcagggcaccttgttcaacaaatggaaaaaaagtactggtaaaggtactagaataaaaaagtatttttctcttccacagtctctctgtacttgtcatgatgcttttcacaatgtgtcaatttaagtaaatgaaaataaaaatttcttattatgaacatgagtatcagcagtcatttttatgttgtacaatgccaattcaaaggcaaacacaagagcattgagctcttaggcagaatcacccaatcacacaattcttaccttgtagctcacatgggcacacatatacaacagtgcaaacgctgcacaaaactaactcaactggttttgttccacttatttttttctcatttctttttatttaatatttttggatccatctsttgttctgaggaaacagcttcctcttaagcagttttactcttctgacacaaggaactggttgactgaatgtgtcagattaaactttccctccattacatcaaacctgctgtaaccaatgttgtggccagacactcttagcaccctaggtctgctttgcctcttatggccattcatatctatatgaacttgtatattaataaggataaaaagtt

SEQ ID NO: 745831 - DNA, 636 bp, Homo sapiens
acgcgtggacatgcatgtgtatttctgtgtctatctgtttgtatgcagattaaagtcctgagtttatactgatacctctggttccaaaccaacacaatggggctcgctttagcctttcctcacttgtaacttctttttccaacagtgagaaacccagctgtcattattatgatattcttactaattttttcagttctagtccatgcctcaagtagtttcagaattgcttgccacacccttggaggaaatacattcacyggctacattacagcatttcttttttttttttttttgagacatagtctcactctgtctcccaggctggagtgcagtggcacgatctcggctcactgcaacctccgcctcctgggttcaagtgattctcctgcctcagccttctgagtagctgggattacaggcacgtgccaccatgcacagctaatttttatatttttagtagagacagggtttcaccatgttggtcaggctcgtcttgaactcctgacctcaggtgatccaccctcgtcagcctcccaaagtgctgggattacaggcgtgagccaccgtgcctggcccatcgcaggatttctgtgcggttctttttgcctttagccatacaggatccagtcccggtac

SEQ ID NO: 745832 - DNA, 636 bp, Homo sapiens
acgcgtggacatgcatgtgtatttctgtgtctatctgtttgtatgcagattaaagtcctgagtttatactgatacctctggttccaaaccaacacaatggggctcgctttagcctttcctcacttgtaacttctttttccaacagtgagaaacccagctgtcattattatgatattcttactaattttttcagttctagtccatgcctcaagtagtttcagaattgcttgccacacccttggaggaaatacattcactggctacattacagcatttcttttttttttttttttgagacatagtctcactctgtctcccaggctggagtgcagtggcacgatctcggctcactgcaacctccgcctcctgggttcaagtgattctcctgcctcagccttctgagtagctgggattacaggcacgtgccaccatgcacagctaatttttrtatttttagtagagacagggtttcaccatgttggtcaggctcgtcttgaactcctgacctcaggtgatccaccctcgtcagcctcccaaagtgctgggattacaggcgtgagccaccgtgcctggcccatcgcaggatttctgtgcggttctttttgcctttagccatacaggatccagtcccggtac

SEQ ID NO: 745833 - DNA, 438 bp, Homo sapiens
catttccttggtattacacactaaagtcctgagtcctggggatgggttttgaggtttggaattcaacatgaagtgactcaggcaataatttaaactctttttccattattgagtatccatctcctcttttaagatacattctaatccgatccgtcattcgctagatgatgccgttatcatcccgctttaatcaggtttgaggctggacggtaaactgagtatctgaagtagtcacacattaagaccagtgaggcctaatttcaaggatgcagtgcagcacaagaggggtttcgggytgttctaagggagttgatggtttcagaatgtgtcctttgtagtggggcatgcaggacccagggagaggattctattgtcctcttccctggggaagctcagaagaggaagatcgtggggtcatctacagctctcgccactgct

SEQ ID NO: 745834 - DNA, 477 bp, Homo sapiens
ccaccgtgccggcctgcgtgctggctgtggtccctcaggcttgtgtgctgttggtacctttctcaccagtctggcagtcagtgatccctgttgcatgggggccatggtagtagttttggctacttctgtttgttaaccataggtacaacacaaagcatttgtaaataatgaactccaatcattgccgtttctgcctgcagcctggaattgtctcgccatttaaacgagtattcctaaaaggtgaaaagagtagagataagaaagcccatgagaaggtgacagagaggcgccctctgcacactgtggtgttgtcattgcctgagcgcrtcgagccagacagactgctgagcgactatattgagaaggaggtaaaggtaagtcgtcatgggccacaggacgtgcctgccaaacgacagtgacggtcatgcttgtatccaccagacactcttgagtttataagacacagccacacaaaca

SEQ ID NO: 745835 - DNA, 606 bp, Homo sapiens
agacagagaagatgatcaggaggtcagtggtcagtccaggcgtaacaccaagatagtaggaattctagaaagagaacaggagaatggaaggataaagggcccttgccaggggctgagggcatgagcttgcagccggtgagggcttgcccggtactagcacgagggaggaaaatgtcccacatggaccctggaatatcagagctgtggaaacaaaggaaaacttctacacctatccagaaggaggaaaaaaatgagctctaggttggagatgaggggatcagaggccttcaggctcccccacygcagccctggaaaccgaggactgtgggatgcaaggacctgagaatttcggactgtgatttctcagctagtgtgctatttcccgccaatttgtccactaattagggagaaacgaaaatactgtcagacgtgtggcacctccagcatctgattcccacatacctttctcaagctctggcggctgtgcgccaaggtgtggagcaaaccacgacaaaagaagctatgagatttggggagcggagccaaggcaggagagggaagccccagggagggcggtgccccagcgtggcagtacaccccgggtgg

SEQ ID NO: 745836 - DNA, 626 bp, Homo sapiens
aggaagctgtagttctccctaaacttttgtcacctaatcttgtcctctgggggatgaataatcagcaagtggcattttgggcctcagcacaaaacagccttttcaggtgtcagcaggtcagactttggtgcttacagaaaactcggggccactgcggtgtaaacgctctaagtggtctrcagaccatgaggagctgatggaaggagacccaaacatagcaccgacaagcagggaatgagaacaacaagaaggaggggaggccagaagaggaattcccactggattggacccacgcagttctgtagtcatggctggtgttgtgttccagtgactctgataggggagaaatctcactctacctttcctgtggtttttgaaaataatcttggttacgttaactgtgtgtggtaaactgcatagagctcagttcacagcatggatttgtacggggaacatttttgttgttttcatttgagccaaattaaagagctcttccaggaagtgtctggaagcttggtcaggaaggatgggtcctgtctgatggctacaggcgagattctggtgcccagattgggcgggcaatatcagtgttcccgccctttattgattggcactccataatgctt

SEQ ID NO: 745837 - DNA, 611 bp, Homo sapiens
atgtgagtgtgtatgtgtgtgaacatgtgtgcatgtttgcatgtgaaagcatggggggcatgtcagtgtgtgtagtgcatgggtaagtgtgagggtaagtgcatgtgtgtgtgtgtgagagtgtgtgactgcacatgtgtggcatgcacgcatatgaggatgtgtgttttcrcccatgtgtagagtgtgtacaggtgttcaatggtcgtgcaagtgtgtgtactgggtgtgtgcatgtggtgtgtgcacacacgtgtggtgggggcacagatgtccctcttgagcttgccccccacccaggcagcatccgtggacatgttgttgtccttacctgccctggcctttgggggttgctctctcctcccctgccctgtctctccctgctccttccttgcctgaggcttgggtgaggactgcccagcccacctgtccatgccatgctgccagccctcatcctgcactcagggctgaggacgtctgaaagctggatgctccccagccctgcctggagtgaggccagccttctgcctcagctcccagggctctgtggccatctcccatgcccctctccccatccctgctggggagtaggagcaccatggtcctctcct

SEQ ID NO: 745838 - DNA, 572 bp, Homo sapiens
agggcattctcactaggtaagccctagtaggccagatttagttttagttttttaactcagaagtacattttaggtttccaactttaagagttgttttaagcttaagacgttaactttgtaagaatttgtaaggatctaggcatcttccaragtgagtttagaaagttctgtatagttatctgaggtggcatatattccatatggatgtctttgcacagcgctgcatggtgactcagagccctgtgttccctcctcctggctccgtactgtggactctggcaggtcccttcgatcctcacagcctcagtttcttcaggagagacttaggctgggatagactccacacctcactttggtgctgggactccactcatggaagagaaatagcacttagcctggtttccttctggggactgaattggtcctttggtctctgaggttcaaaggtgacaagatcatttagtggtgatgaacaggcatactcaatcaaatacatgttgaatgaagaatggttgcctgggctaatcccaccttttaaattctatgtgtccatctatagtacattctagtga

SEQ ID NO: 745839 - DNA, 572 bp, Homo sapiens
agggcattctcactaggtaagccctagtaggccagatttagttttagttttttaactcagaagtacattttaggtttccaactttaagagttgttttaagcttaagacgttaactttgtaagaatttgtaaggatctaggcatcttccagagtgagtttaraaagttctgtatagttatctgaggtggcatatattccatatggatgtctttgcacagcgctgcatggtgactcagagccctgtgttccctcctcctggctccgtactgtggactctggcaggtcccttcgatcctcacagcctcagtttcttcaggagagacttaggctgggatagactccacacctcactttggtgctgggactccactcatggaagagaaatagcacttagcctggtttccttctggggactgaattggtcctttggtctctgaggttcaaaggtgacaagatcatttagtggtgatgaacaggcatactcaatcaaatacatgttgaatgaagaatggttgcctgggctaatcccaccttttaaattctatgtgtccatctatagtacattctagtga

SEQ ID NO: 745840 - DNA, 566 bp, Homo sapiens
tcccgcctccacctagcccgagctgatcttgggaggacggttcatgagccattagctgaaggggaggataaaggtcgagcagtgggagcccagaggccctaccaggctgaagaactgatcctcttggtctggatggaagttcagacgcgcaaaagccagaagtacgctgcacaggtggggcagggtgatgtcctgcgctctgttcaggacgtgctgggtgggtcagaaatagcagagggacagaataagctctctgcccagcacgctgtcctcctgccyggctctgagtctgaggagagcctgcatggccaggggcaatggcaggaccctccatccagggcccatgagctgtgtcgggaacagagaaggacttacacaggcccagacactccttcgcctggcagcaactacccacagaggctggggacacctagaagctgcttctttctgataagggatttagaaatattctccaaccagtaaacttagtttagactggtcacacataaacgtaactgcaggtgtcatctttctgtacagttccactttgcgagggggatcagtga

SEQ ID NO: 745841 - DNA, 600 bp, Homo sapiens
attctgttattgcaattttcacgttcttgaaattcttccttgttttgtttcactcagcaacttttgtattcagtttactgtttccaaaactcatcctgtttcttttattcttgactcttttctttcctaatggctttctctttgagtatcatgaaagatacatcctcttgcacagtactcaattgaggctgccaagctarttcttagaattccttctgattcctctaagtacagagctttcccttggggaagtaaaaaggttttcttacagtgtccagcactagaagagcaagtaatgcatcattcactgtttagttcttgccttgctattttctgggagttttagtctaaagagagaaagatgagtgggttcggggcgggtagaggggagagtgaggagggtgagtaaacagcctctggctgctcaggtttatggtcttccagatcagggtctctgaggctctgcaagcataagtttaatccatgtttgtgagccatatatttagttgaaatacttcttagagtctagtaataagttgtctgtaattcttattattttactggtggtgtgagtttcatatttttctatgactttatagg

SEQ ID NO: 745842 - DNA, 594 bp, Homo sapiens
aataaacaatattagattttattcatatctcaaatcttacaccaaaataaatttcagatagatcaagacttacatgtgaaaaaaatgaaaacttgaaagtaagacaagaaaatatgggagaattattttacaatctgggaaagcctttctaagcatgatgcaaaatatagatgcaataaaasgaaagaagctaaatataaatacatgttttaaattctgcttagtaacaacaccagaaacaaactcaaaaggcatgaaaagcttggaacaactatttgtattcctatggattgataagaaaaagaccagtaattcactgaaaaaaaaaaaatgggcagaggatatgaacagacagttcttagaaatttcaaatggcttttaaacatatgaaagtatgctctatctttccataataaagaaaatgcaaatttaaaataccagattggcacagataaaaattttgataacaccatgtgggtgaaggttagagaaacagatgctctcacatattgctggtgggagtgtaaactggctcaacccctgcggagaacaacttgacgatatctatcaaaatctaaagcgcatgttttggca

SEQ ID NO: 745843 - DNA, 631 bp, Homo sapiens
taggtgtttcgctggcttttttttttttttttttttgacacgggcttacctgggctggagtgcagtgctgcagactggcggaatcatagctcactgcagcctcaaacttatgggctcaagcaaacctctcatcacagcctcccaaatagctgggactacaggcgcatgccacaacacctagcttatttttgtattttttgtagagacagggtttcaccatgttgcccaggctagtcttgaacttctgggttcaagtgatctgctctcctcagcctcccaaactgtttggactacaggtgtgagtcaccgcacccagcctacttttgttttgatgttcaaattatcctatttgggagcccctgccagctggctcctgtgtacttttaacatgtcccattactttttgagcatatctttactttcttttaraaaatatttatatatttatttttaattttaatttttaaaaatttttatagaaacaagagtctcgctatgttgcccaggctggtctcaaactcctgggctcaagggatcctactgcctcagcctcccaaagtgctgggattacaggtatgagccatggcttctggccttccttactttctgatgcaagatatttctcgcttat

SEQ ID NO: 745844 - DNA, 662 bp, Homo sapiens
ccaggatggaaaaggggatggtaagatgaagtttgcagggagggcttcctggaggagagggctctgaaacatgagagcattcgggcaaataggaagggcaggtattttggtggatccagaggcaggtggattcagaggtgggtggctcaagagtacgggcctccgtctcctcgtcttcctaagcatatttaactgtgaatgaagcaagacaagaggtgtatttctccatgtaagggaaatgctaygaagaaaaggcatttctggtgtcagaatcacgattgtcagtgggagtgtcaggaagaaacttcgtgactttttctctcttcccaggcgcccccagctgttaggtttcatggcaacccaatgtggtagaaggcagtttcttttccattcttgctgttagatttttatgttgtgtgaccttggggctgccttagggcctctctgtccttcatgggtctcacctggcagaggagggggatacacagggtgatttccatagggacttacagctctaaaatgctcgagtgtatgatctaatcatgatgacacacagtcagccacagtgaaatccctgacacatctcaaatttgaactgcatctttatgagtggaaaaactgtttcctgccccacaggacattttgatttaactaggacacac

SEQ ID NO: 745845 - DNA, 662 bp, Homo sapiens
ccaggatggaaaaggggatggtaagatgaagtttgcagggagggcttcctggaggagagggctctgaaacatgagagcattcgggcaaataggaagggcaggtattttggtggatccagaggcaggtggattcagaggtgggtggctcaagagtacgggcctccgtctcctcgtcttcctaagcatatttaactgtgaatgaagcaagacaagaggtgtatttctccatgtaagggaaatgctatgaagaaaaggcatttctggtgtcagaatcacgattgtcagtgggagtgtcaggaagaaacttcgtgactttttctctcttcccaggcgcccccagctgttaggtttcatggcaacccaatgtggtagaaggcagtttcttttccattcttgctgttagatttttatgttgtgtgaccttggggctgcmttagggcctctctgtccttcatgggtctcacctggcagaggagggggatacacagggtgatttccatagggacttacagctctaaaatgctcgagtgtatgatctaatcatgatgacacacagtcagccacagtgaaatccctgacacatctcaaatttgaactgcatctttatgagtggaaaaactgtttcctgccccacaggacattttgatttaactaggacacac

SEQ ID NO: 745846 - DNA, 652 bp, Homo sapiens
ccctccccttgtgaggagggggcactcctctccagcccctggtaccacagtcctcacgatggtgcagtgatttctagccaggcgtcaagatgcgctgctttccctctcctgcctcatcccttgttggcagctccagttcaggccgtggagggacgtgatgctgggctgtgtttactaaacccaygggttttcagcctcttaagcccagctccgatctccaattagttgagagcgctgggttgactaacctctggtatctgagcacagacagagggtgctgtgggtctgctgggtggcagaaatggttccttccggcttggcgttctctcctggccactcttcctgctgcctctgactactcagccttgttttcggtgtgtaggccccagctgcccactggaactgccggctaatgcttgctctcccaagatctttaactcctcctggctgcacctgggtagggatggtggcatcgatgcccctctgtctgctgaaggacctgttgctgcttctgtcttttcacccctccttggctgatgacccagagccctctgatgatggcattctcctggcaagagaaaaagacttaactagacttctgaacttgaacagtttcaggttatattttaatttttttttttttgtacaggtt

SEQ ID NO: 745847 - DNA, 625 bp, Homo sapiens
ggcagacatcagagaaaaaggcaactatttcccatgtggaaagctggtccctaaaaaaatgaagttaaacagaaatgtttggggcttctctctgaatccctcagcatctagataatcaccacaaacttctcctcaccaaagcctaatgggaaatagaaacaatccaatttcattagaggaggaccaaaaaggaacttataatgcagaattcttcaattagcattayataacttcctgcctcatccggtttgggtcacacaacctctccgtgtctaccagacactccaccaatactttactgagggcagggtacttcatcagcccttctcccctcatgatttcatcagagataatttcaaggtactttgcaccacatgaagtcccttcctaccagtgtgaccagtgtctcatctgtcatcattagtacatcccagaggcagcctgttattagggcaagaaagaaatcaaaagtaggtggactaacagttgactaaacttcatcaagtcttgcctcaacataactggtcacgtaataactactctaaggcatcaagttcttgctatggttccaaataaaataccttctatacgaaaaacccttcaaatccttctacttcatgttaca

SEQ ID NO: 745848 - DNA, 569 bp, Homo sapiens
gctaataaacttctttttttttctgcctattaatctgtcttccattagtctaatttacagagccccagccagagaacctggaagagcagaaaaaaaagatgtattttccttccctacaggcacaaaccgttatctgttcaccaaccaatttcctcttcttcycaggcattgcaagacttcatttcccagcctcctttgcagttaagtgtggccatatgacggagttccagccaacagaacatgagcagaagcaacccgtgccacttcctagcacatgaaaagtttgtgtgtgtgtgtgtgtgtgtgtgtgtgtatgttcattcctccatgttcttcaccctcagacagcttgatgtgaacaagcatggtgaccctggaagcaacatgctgaagatagcagagccacaagatggcaggatcctgggtctaagaatcagtgctgagtgccagccagctggccacagtatgcactttggactccctatcatgtataagcaggatatattttgaggtttatttgttacagaagctaacatttccttaaataaagccctttagaagatatgttt

SEQ ID NO: 745849 - DNA, 569 bp, Homo sapiens
gctaataaacttctttttttttctgcctattaatctgtcttccattagtctaatttacagagccccagccagagaacctggaagagcagaaaaaaaagatgtattttccttccctacaggcacaaaccgttatctgttcaccaaccaatttcctcttcttcccaggcattgcaagacttcatttcccagcctcctttgcagttaagtgtggccatatgacggagttccagccaacagaacatgagcagaagcaacccgtgccacttcctagcacatgaaaagtttgtgtgtgtgtgtgtgtgtgtgtgtgtgtrtgttcattcctccatgttcttcaccctcagacagcttgatgtgaacaagcatggtgaccctggaagcaacatgctgaagatagcagagccacaagatggcaggatcctgggtctaagaatcagtgctgagtgccagccagctggccacagtatgcactttggactccctatcatgtataagcaggatatattttgaggtttatttgttacagaagctaacatttccttaaataaagccctttagaagatatgttt

SEQ ID NO: 745850 - DNA, 569 bp, Homo sapiens
gctaataaacttctttttttttctgcctattaatctgtcttccattagtctaatttacagagccccagccagagaacctggaagagcagaaaaaaaagatgtattttccttccctacaggcacaaaccgttatctgttcaccaaccaatttcctcttcttcccaggcattgcaagacttcatttcccagcctcctttgcagttaagtgtggccatatgacggagttccagccaacagaacatgagcagaagcaacccgtgccacttcctagcacatgaaaagtttgtgtgtgtgtgtgtgtgtgtgtgtgtgtatgttcattcctccatgttcttcaccctcagacagcttgatgtgaacaagcmtggtgaccctggaagcaacatgctgaagatagcagagccacaagatggcaggatcctgggtctaagaatcagtgctgagtgccagccagctggccacagtatgcactttggactccctatcatgtataagcaggatatattttgaggtttatttgttacagaagctaacatttccttaaataaagccctttagaagatatgttt

SEQ ID NO: 745851 - DNA, 637 bp, Homo sapiens
gcaggcaagttgtacagttgagagtcacagtggctttttatgaagcatttaggaggcttaatcacttttcttttcttttagagacagagtctcactctgtcaccagtctggagtgcagtggcacgatcttggctcactgcaacctcctcctcccgggttcaagcaactctcctgcctcagcctcctgaggagctgggactacaggggagcgccaccatgcccagctaatttttgtatttttagtagaaacagggtttcaccatgttggccaggagggtctcaatctcttgacctcgtgatccgccccctattggcctcccaaagtgctgggattacaggcgtgagccaccgcgcccggcctcccccctcccttttataagataactcttatttatttatttatttattttttgaggtggagtctctctctgtagcccaggctggagtgcagyggcgcgatctcggctcactgcaaactccgcctcccgggttcacgccattctcccctctcagcctcccgagtagctgggactacaggcgcctgccaccaagccgggctaattttttttgtatttttttagtagagacggggtttcactgtgttaagccaggatggtcttgatctcctgacctcgtg

SEQ ID NO: 745852 - DNA, 637 bp, Homo sapiens
gcaggcaagttgtacagttgagagtcacagtggctttttatgaagcatttaggaggcttaatcacttttcttttcttttagagacagagtctcactctgtcaccagtctggagtgcagtggcacgatcttggctcactgcaacctcctcctcccgggttcaagcaactctcctgcctcagcctcctgaggagctgggactacaggggagcgccaccatgcccagctaatttttgtatttttagtagaaacagggtttcaccatgttggccaggagggtctcaatctcttgacctcgtgatccgccccctattggcctcccaaagtgctgggattacaggcgtgagccaccgcgcccggcctcccccctcccttttataagataactcttatttatttatttatttattttttgaggtggagtctctctctgtagcccaggctggagtgcagtrgcgcgatctcggctcactgcaaactccgcctcccgggttcacgccattctcccctctcagcctcccgagtagctgggactacaggcgcctgccaccaagccgggctaattttttttgtatttttttagtagagacggggtttcactgtgttaagccaggatggtcttgatctcctgacctcgtg

SEQ ID NO: 745853 - DNA, 637 bp, Homo sapiens
gcaggcaagttgtacagttgagagtcacagtggctttttatgaagcatttaggaggcttaatcacttttcttttcttttagagacagagtctcactctgtcaccagtctggagtgcagtggcacgatcttggctcactgcaacctcctcctcccgggttcaagcaactctcctgcctcagcctcctgaggagctgggactacaggggagcgccaccatgcccagctaatttttgtatttttagtagaaacagggtttcaccatgttggccaggagggtctcaatctcttgacctcgtgatccgccccctattggcctcccaaagtgctgggattacaggcgtgagccaccgcgcccggcctcccccctcccttttataagataactcttatttatttatttatttattttttgaggtggagtctctctctgtagcccaggctggagtgcagtggcgcgatctcggctcactgcaaactccgcctcccgggttcacgccaktctcccctctcagcctcccgagtagctgggactacaggcgcctgccaccaagccgggctaattttttttgtatttttttagtagagacggggtttcactgtgttaagccaggatggtcttgatctcctgacctcgtg

SEQ ID NO: 745854 - DNA, 572 bp, Homo sapiens
ggctctctactgccaggcctcatgctggttcctttgagctccaaatagttcaggcctgtaagcaccaaggaatgcttcccaggcaggagctgtggtggtgaggagggccactcctcattgacagagcagctctactrtgtgaaggagagatacacagaatcctaattctagagaaggtaaactccagggcaggcatgaggaatgaagaacgtggccatcacctaggagagatggggcaggtgcctgaacagcacttcttcccaaggggccagcccttgtctctgacatcctctcactgctctgagcaggtgtgttaccggcgcaacggccacaacgagatggatgagcccatgttcacgcagccgctcatgtacaagcagatccgcaagcagaagcctgtgttacagaagtacgctgagctgctggtgtcgcagggtgtggtcaaccagcctgagtatgaggtacgtccctgcggctctatcccagtgcgcctttccagggctggcgatgactagaaaaggtgggccacagggccagttctcacttttgccagttatgaggatacacgtgag

SEQ ID NO: 745855 - DNA, 579 bp, Homo sapiens
tctcaaaggtggtgatcaaagtcttttcatttagctttttgtgactattaagctgctcatttggtgaaggtgatcattagtgtcttaatgtgaaacaaaagcttcgggacaagaacttctggttgaagatcaatatgagagataacgtttcagttacagctttaataattgtaactgtagggagcctggcagagctggtattatgaattaatataatatataatccaccaggtacaaacggagagtacaaataaaggaggattgctagcagtgactacactgggaatatttgggtgagagggaactgtttgataaatgcgacgttgactcaaagtgggcwccagtacagtcgccacaatcacatcgttcaataagagaatgcatatctgaggggcaaattggggagggaattcaaccaaggagaataaaactcggaacgaccccttgaaaagcgattaattttgcacattccattatcctataacgtttcttgtgggatttttttctttaagtgggtaaaatctaacatacggttgacattttcatgtgatttgctgctgaggtactattgtactcttg

SEQ ID NO: 745856 - DNA, 611 bp, Homo sapiens
ggccaagcaaataagtgacagatgcaagactgcaactagcattttgactcctgctcccaaaaaggatttattctatattgctttttgtttataaaaggttaacagcattgagatctgaagttgatgtgcagaggcttcgtggatgtggtggtacttacrttaggctttaaaggctggcctggagtgagagaatatttcaattgcaagggaaaattatgagcaaaggcccaaacccaagcaggacctgactctgacctataggagaaaccaaagcaggttgggacaatagcagatgagaaaattagttggcctggggtggaggttcttgccttggtcaagttacagattttatacagaaagggcgatagtagccagagtccagaggtatcaaatacaatgccgaaagtcaatggcaacttgctgaggctttttaaaaggaaagtaaaatattaagaagaaaactctattacaaaatatgttaaatattataaattatcaatgttacaaaaaaactgatatgatacatatttaaattacaattctagtacagctgtaagagtggataagcaatgggtgggttgtaaagaaatgaaagaattaggtgcacaaaa

SEQ ID NO: 745857 - DNA, 611 bp, Homo sapiens
ggccaagcaaataagtgacagatgcaagactgcaactagcattttgactcctgctcccaaaaaggatttattctatattgctttttgtttataaaaggttaacagcattgagatctgaagttgatgtgcagaggcttcgtggatgtggtggtacttacgttaggctttaaaggctggcctggagtgagagaatatttcaattgcaagggaaaattatgagcaaaggcccaaacccaagcaggacctgactctgacctataggagaaascaaagcaggttgggacaatagcagatgagaaaattagttggcctggggtggaggttcttgccttggtcaagttacagattttatacagaaagggcgatagtagccagagtccagaggtatcaaatacaatgccgaaagtcaatggcaacttgctgaggctttttaaaaggaaagtaaaatattaagaagaaaactctattacaaaatatgttaaatattataaattatcaatgttacaaaaaaactgatatgatacatatttaaattacaattctagtacagctgtaagagtggataagcaatgggtgggttgtaaagaaatgaaagaattaggtgcacaaaa

SEQ ID NO: 745858 - DNA, 594 bp, Homo sapiens
tcacctattaagtgtacaataatattacacctaataaaaatgtacatacgtgtacagacaggggaatgtctggtcagtggattagtcagaacacatttaccgattaagttcacctttttctgtaagtgtggttcatggcacccaaaaayaattacaaaacatggcacccaaaaacaattacaacagtaacatcaaagatcattgatcacagatcatcataatacatataataatgaaaaatttgaaatattatgggaattaccaaaatgtgacatagagacatgcagtggccacattctgttggaaaatagtgctgatagatttttatcagggaagcaaaagcacttccacagcagaatctttatatattcattggctaagattgagtcatttggccaagataatctagaaatcaagtgtctggaaaagaaaaagaacaacaggattatagactggttatagtgcatcctctggagctgggcagattgctgcctgtaatactgtgcttcataacaagcaattccccaaacctttgtggtttataagaacaagcatttgttccccgcttatggacatgtaggtcattaatgactc

SEQ ID NO: 745859 - DNA, 730 bp, Homo sapiens
actgaacaattctgtcatcacaaggatcccccttgttgcctttttgtaaccacactcacttcgctctatatatagacctttcatctgtccatttataaaatcgtcatttcaaaaaatcacagtaattgaatcatatagtatataatctttcagattggcttttttcattcagcacaattatctgaatatccaagttgtatcaatagtttgtttctttttattgctgggtagtattccatggtatggatgtaccaccatttgtttaatcagtcatccgttgaaagacatctggtctgtttcaggtttttggctattacaaataaggattgctatgaacattcatgtacaggttttggtatgaacatatgttttaatttctctaggataaatgcccaagagtgcaattgcagggttgaatattaattgcacgttaaaatgtataagaaactgccaagctgttttctagtaaagtraccttcccaccagcaaagtatatgtgatctagtttttgaacatcctcattaacacttggtgttgtcattattttaattttagccattctgttaggtatgtagtgttatttcatttttaaaaattttttttggagacaggggtctcactgtcacttaggctggaatgcagtgtcacaatctcagctcactgaaacctccgcctccaaggctcaagcgatcctcctgcttcagcctcctaagtagctggatgacaggcg

SEQ ID NO: 745860 - DNA, 596 bp, Homo sapiens
agtaaaaatgctgccttgtcttgtagttcactaagtaattccacatggcttctcttatttcattcaaccaggaaagttgaaaggtaggtagggttgtttttactatcatttccaatttacagaagggaaaatagaagtgagaacttaaaagtgcttagtgtgacatattcaaagtcaaagaaagagtgctgggcctcatgtctactacacttttatccagtccaccataaacyagaaatatgaacagggagataacactaaaaatcatgacactgtagccctttatagagaaaaacaagttacccaaaacagatgttctgtaacaaaagccttgttaaataattggggaacagaattcaggaaaaattaagattttcaaaatatttttatatagaaattttttacaaagattttacaacatagcaaatcattatgtcatactgtagaaagatgaagcaaaggattaaactccaaggataaagaaagtgctcatagcaacgtattgcagtctccatgaaagtgcatataaacggttaaggcaaagtaccatcttggtacagacatgttgcaaactgacttttaaaacaattttttaa

SEQ ID NO: 745861 - DNA, 665 bp, Homo sapiens
tacactatattgtattttgataatatagagtaaaatgcattgatccattggcagatagaaatgaagtcagaaataaaaggcattcaaccccacacaaaactaacctgaggcaaccttctactctaatgcccctacgttcagkgcataagaaatcatgacttggcagggtgggacggaaaatgcatatatatataatacatatacacacacacataatacagaaacataaatgttttgttgtaacaaaatcaggcagagtgccacacaagagaaaaaacataaaaagcataattacctagtgttagagacattcctcttttgcactcctttgcagcggaaaggagtaaaaatccactaaaccttatatgattgtagttgctgctgtttgtttaatccaactttctcatgagaacttcctttgcttgacttactgtaaagttgggataagcatgtgtcacctttcttgtgggacttttaatgaacatgacaaaatatcctcctggaacaaccacggtgccactggttttctggcaaatctgacctcctaacctattaaccaaaggtcacataaaccataatcagaacttggaagagaggcatcttcttcctctaagagcaaggccagaccacaggctgagaatttcagatactattcccatcacatg

SEQ ID NO: 745862 - DNA, 597 bp, Homo sapiens
atacctttgcaaaagttcatatgccttctttctaaccaaatcccaattgctggagaagtttataaaaacttccttttatgggaaataaataccattaatgtcaggattatattctattgttttgatgcaagatattcaaacagaaacgtgtgagaatttccccagaaacaggtgcaggagtatctcagaggagaacrtgatacaaatctccaatctgccgcaaaagcccttttgcctaaaaatcatttttgtgggatctgtgtccataaaaattagaagaaacttgccctttgctgtccaaagtaaggttaggaagactgcgattgggtatcagcatagtccacagccattgctctgatggaataataagaggggaggaccatcctttcccatcctacactggataggtctaaggtgaagctgcccacgttcaactgactggcaggtgctgtgtgatagaagtttcctggaacccacagaccccaggccttttggaaagtatgcgcatcccatcttccggctaagctcaaaagctgcgtgggtaacaggtttttttttttaattacttggcattacatttaatacggaaaaagaaat

SEQ ID NO: 745863 - DNA, 620 bp, Homo sapiens
attcagcacttgctgatttccttaggatattgcattcttatcgatgttagagtgttctattatttgtcatatttttattatggcttataaaacaatctcaggaggcgtcctattttcaatgttctgagtatttttagatagaataggaattatgtcttctataatsttttatttgtattcattcataattgtgtatgtacacacatatctttgaggtatttctttggaaactattaaagtaatttctatgctcgttgccatatttaatatttaacagtttcttgtgtcatattccattaatttaaatttatattagaagaacaatattgaagatttgctaacatttacttgtgtacactattgtctttaaattacttattacctgtgtatcttaggctttttatatatatgcttaatcaatttcattatggtgtatttatattttattattttttgcacatataaagatttatgtattttattatgaatacaaaatgggctttgggtttgtcagttttattaattttctgtcttataacttattaatttctctccattattttttggaaatgtatttgtatgtatccctagtctttatttacatgtgtttagtacttgaa

SEQ ID NO: 745864 - DNA, 620 bp, Homo sapiens
attcagcacttgctgatttccttaggatattgcattcttatcgatgttagagtgttctattatttgtcatatttttattatggcttataaaacaatctcaggaggcgtcctattttcaatgttctgagtatttttagatagaataggaattatgtcttctataatgttttatttgtattcattcataattgtgtatgtacacacatatctttgaggtatttctttggaaactattaaagtaatttctatgctcrttgccatatttaatatttaacagtttcttgtgtcatattccattaatttaaatttatattagaagaacaatattgaagatttgctaacatttacttgtgtacactattgtctttaaattacttattacctgtgtatcttaggctttttatatatatgcttaatcaatttcattatggtgtatttatattttattattttttgcacatataaagatttatgtattttattatgaatacaaaatgggctttgggtttgtcagttttattaattttctgtcttataacttattaatttctctccattattttttggaaatgtatttgtatgtatccctagtctttatttacatgtgtttagtacttgaa

SEQ ID NO: 745865 - DNA, 573 bp, Homo sapiens
cctttctaggaatttgtcagtttaatataaggtatctaatattttgacatacaattatctatactattcacctctatttttttttcattcctgtaaggtcagtggtaatctctcttcattccttgctgactctacagttggagtcttctctctctgtcttttgctttctctctctctctctctttctttttatcattctagctaaagatttcccaatattgttaatcttttcaaagaatcagattttggcttcattgatttgtctctcrttttcctatcttctgttttattgatgtctgatctattgttattatttgctttcttctgctttctttaggattaatttatcctcctttttccagcgttttaaggtgcaattttaacgtattgctttgagggttttcttctttcttaatataagcttttacagctataaatttccctctaagcactgcttttgctgcaactcataggttttggtatggcatgtctttattttcatttatttctaggttttttttattttccttttgatttcagcttgactttcttggctatttggtgttcaaatat

SEQ ID NO: 745866 - DNA, 622 bp, Homo sapiens
tccaattctcaaaaacggagtggcaaggtttaagaagaacatatgggattggagatattttggggccatctttcaaaatacaatctgctgcagatcccaaatcacaaaagagggagacaactatatgtagctaccagtaggagggctactctagaggatgcttgagaattattgctttcatcaatctgagacaaaattcacacacatgagctagaatatcatttccaaatgataggttggtaggatttgggggaattttatggagtagagaaaaccaaacttagatgataattaacaataaatattgtctgtatctttatggcttargaaagtttcatgtctgtaaccaggaactcactactttttatttttgttttgaacatttcttctcaattcattccttgcatgagattttgtccccattttgaccatcatacttgtttgcattctcctgcttttgtctttaatgctttaatttggggatatatatccatatgtctatggatacatgtatatggatatgtatgatttggggatatatatccatatgtatatacatatgtatgtgtatagagatagacagatgatagatagatagatagatagatagtagattcttctc

SEQ ID NO: 745867 - DNA, 566 bp, Homo sapiens
acaatcctctccaacatgtttacattgtttatagataattttaattaaaggggattacaatgcagataaagtaattttatatcctattttgtagggttgtattgtattggttccattttctgatgtcattaaatttcaataaatgcaaakcttgcatattttattgtatgaatagatattgatcataagacttatgtgactagagctctgttttaaagacttttatttccagtaatttttagcttagtacataatgctctgataaacttttttatgcatacattttggtctgcttttcagactactctctcattctttcattttgcacatatatattttgtgtgttttatgggacagaaactgtttctagcacttttgatacaccaataatgaagaattaaaaggaaatatgggactctagaaatctaaataatttaatgttctttacaaatattggcagatttgcacctatgattttaaagttagagatggtcttcaagcactacacattttgaagccttgagattaatcactgattgttggaggtgggatcccaagacctgtct

SEQ ID NO: 745868 - DNA, 566 bp, Homo sapiens
acaatcctctccaacatgtttacattgtttatagataattttaattaaaggggattacaatgcagataaagtaattttatatcctattttgtagggttgtattgtattggttccattttctgatgtcattaaatttcaataaatgcaaatcttgcatattttattgtatgaatagatattgatcataagacttatgtgactagagctctgttttaaagacttttatttccagtaatttttagcttagtacataatgctctgataaacttttttatgcatacattttggtctgcttttcagactactctctcattctttcattttgcacatatatattttgtgtgttttatgkgacagaaactgtttctagcacttttgatacaccaataatgaagaattaaaaggaaatatgggactctagaaatctaaataatttaatgttctttacaaatattggcagatttgcacctatgattttaaagttagagatggtcttcaagcactacacattttgaagccttgagattaatcactgattgttggaggtgggatcccaagacctgtct

SEQ ID NO: 745869 - DNA, 637 bp, Homo sapiens
gcagatagtggtatctgtcaggacaaataaaagcatctcatgcttatagcccaataagttaaattttctcattaaattggtgattttctgaagctagtttccttctttagaaaaaaaagcaataataacaatctgttattattactatgatccactggctggtaatcatgagccggacgtgctgactctctatacctagcagtctcaagggcacctgtgagcggtaaaatggctttcatccatctcacaacacttgaactgtgcacatgtttagygaacaaatgtttacttctcacactttgtttttatctgtagtattcctgtaagctgtgaacaggaattcctgtaggtgtgaacactccaaggtgccatacacttagtttgacatcaaaggaaaactactcttatctttccccttgtggtctttgttctgcactgtttgtctcaacaccacatacttccctcttataccgccaatgctcccaactttctcaatcattattcatccttaaatttcaggccttggtgttcctttccgcttgacacagatttcctgcataaaaccttggcttctcttcaatcaccatacaggttttctggtagtcttacactgctgtaggtaaatattattcagttc

SEQ ID NO: 745870 - DNA, 633 bp, Homo sapiens
gcttcttcagttcagcaagttgaagcgccatattttggggtataggtttctgatccccaatgccttcttcactaaagctgaatgctttggaggggaacatgttccagaagaaactgtgtaagtttgggagtcagacaaaactagatcctaatcctggtatacccatttatcgactatataactttgagacagttacttaatcctgctcaacctcagtttctgttctgtataatggggactcacacctcacttgtgaagttgggataaggaatattacacatatatatgatatatttgaagtacctaaaccataagttttgtctttaaactctggctttttgcacatatasgttgtctgaattcttggtggaacttacagaattatcatcatttgaggttacagccatcagaacttcacaataaactaaatatcatttttggaggaattatacataattaaaatatttgtagcctgcatcatcagtggtagttgccaagactgtgagagatgaagatatatatatatatatcttcatcttgtggcacctagaaccaactaataagcccctagggagaatgctaaatggctatgatttcctcatgccctggagttatagctgaggctaaattaca

SEQ ID NO: 745871 - DNA, 633 bp, Homo sapiens
gcttcttcagttcagcaagttgaagcgccatattttggggtataggtttctgatccccaatgccttcttcactaaagctgaatgctttggaggggaacatgttccagaagaaactgtgtaagtttgggagtcagacaaaactagatcctaatcctggtatacccatttatcgactatataactttgagacagttacttaatcctgctcaacctcagtttctgttctgtataatggggactcacacctcacttgtgaagttgggataaggaatattacacatatatatgatatatttgaagtacctaaaccataagttttgtctttaaactctggctttttgcacatataggttgtctgaattcttggtggaacttacagaattatcatcatttgaggttacagccatcagaacttcacaataaactaaatatcatttttggaggaattatayataattaaaatatttgtagcctgcatcatcagtggtagttgccaagactgtgagagatgaagatatatatatatatatcttcatcttgtggcacctagaaccaactaataagcccctagggagaatgctaaatggctatgatttcctcatgccctggagttatagctgaggctaaattaca

SEQ ID NO: 745872 - DNA, 630 bp, Homo sapiens
agcgcacagaaaaatacataatattataacactgtaacagcagtatgtaaactgctagtatcttaagtagaaacactaaactatgaaccaattaagaattgtaactataacaaccttttaagacagatagtagagtaaattataaatagaaacaacaatgttaagaagtgggaggatgacattaaggcatagagttttcattagtttactttttgcttgtttgtttatataaacagtgaggtttttatcagcttaaaataataaataaggttgtatttgcaagtgtcatggtaacctcaaaccaaaacaaaaaccagatacataaaaaataaaaatcaagaaattaaagcatactaccagagaaaatcaccttcagcgaaaggaaaacatgaagaaaaggaagaagaaagaaaatactacaaaaayaaccagaaaacaaataacaaagtggcaggggtaagttcttatttaccaataataacattggatgtaaatggactaaactctccaatcaaaagacatagagtggctgaatagattaaaaaaaaaaaaaaaagaccaaatgatctgttgccaacaagaaacacatttcacctataaagacacacgtaggatgaaagaaaaagtgat

SEQ ID NO: 745873 - DNA, 630 bp, Homo sapiens
agcgcacagaaaaatacataatattataacactgtaacagcagtatgtaaactgctagtatcttaagtagaaacactaaactatgaaccaattaagaattgtaactataacaaccttttaagacagatagtagagtaaattataaatagaaacaacaatgttaagaagtgggaggatgacattaaggcatagagttttcattagtttactttttgcttgtttgtttatataaacagtgaggtttttatcagcttaaaataataaataaggttgtatttgcaagtgtcatggtaacctcaaaccaaaacaaaaaccagatacataaaaaataaaaatcaagaaattaaagcatactaccagagaaaatcaccttcagcgaaaggaaaacatgaagaaaaggaagaagaaagaaaatactacaaaaataaccagaaaacaaayaacaaagtggcaggggtaagttcttatttaccaataataacattggatgtaaatggactaaactctccaatcaaaagacatagagtggctgaatagattaaaaaaaaaaaaaaaagaccaaatgatctgttgccaacaagaaacacatttcacctataaagacacacgtaggatgaaagaaaaagtgat

SEQ ID NO: 745874 - DNA, 647 bp, Homo sapiens
aagtgttcaacagtaagcaataaggggcaggatgagatctgttatcaaatcttcttaagggtaatgcaccatttaatgaaggttttatggacgggaaacaatgtgcatcacctagaagaaaaacattacaaaggacttggtaccaccagtacattctgtattctgccatagacttacttatttaaattgaaatgaaagctgatccactataaccagaaggtaactgacaatctgataaaaacaaattcactaagtaattkcctgctactaatagcaagcatctgtctttagtataacttgaccgttatttttgaaagtcaaagtgatgtatgcatcaataggaaaagttatacagcaaggaaaatggttgggaattcaggttgaacctattgatccataggaggaagatttcagccagtaaccctagccaaaatcaagttctttttggtagcttttcagtgattaagagtaaatttgctgtagtgcaactccatttactaaatcatgtggaagctactacttttattgtctttattagaattttatctaatgccttaacaatatagtaacactctctttctgaccgttaatgggctaatataccagacagatatataaaatatcaagtatcaaaatattttaatttg

SEQ ID NO: 745875 - DNA, 535 bp, Homo sapiens
tcatgttgagtcagtttctgcgtgggggtcatagaaccagttgagtcagttctttgggatgagtcacaggtctgggtggcatcagtttgcatgcccgaatgcagaaggctgaaaaatatctcaaagaccaattttaggttttcwcagcaaagatgttatcactaggagcaactagggaagttacaaatcttgtgacctccagctacatgattcctgagcagtaagcaagccagagaacaatgactggttattgcttaactgtgcttctagcattgcagaattcaggcaccaccataattctaacatagtggccttttcttagttttacaaaagcattttcagtctctgaacaaggaggaccttattttcaggaagagtctattaacatccttgcttttaagttaatctataaactaaatttctaccatagttagcttagcctacattcaagaatgaggaagggcagttagcttgtgaggtcagaagcaagatggagtctgttcctgttagatttatcttgctgtcataattttag

SEQ ID NO: 745876 - DNA, 535 bp, Homo sapiens
tcatgttgagtcagtttctgcgtgggggtcatagaaccagttgagtcagttctttgggatgagtcacaggtctgggtggcatcagtttgcatgcccgaatgcagaaggctgaaaaatatctcaaagaccaattttaggttttcacagcaargatgttatcactaggagcaactagggaagttacaaatcttgtgacctccagctacatgattcctgagcagtaagcaagccagagaacaatgactggttattgcttaactgtgcttctagcattgcagaattcaggcaccaccataattctaacatagtggccttttcttagttttacaaaagcattttcagtctctgaacaaggaggaccttattttcaggaagagtctattaacatccttgcttttaagttaatctataaactaaatttctaccatagttagcttagcctacattcaagaatgaggaagggcagttagcttgtgaggtcagaagcaagatggagtctgttcctgttagatttatcttgctgtcataattttag

SEQ ID NO: 745877 - DNA, 535 bp, Homo sapiens
tcatgttgagtcagtttctgcgtgggggtcatagaaccagttgagtcagttctttgggatgagtcacaggtctgggtggcatcagtttgcatgcccgaatgcagaaggctgaaaaatatctcaaagaccaattttaggttttcacagcaaagatgttatcactaggagcaactrgggaagttacaaatcttgtgacctccagctacatgattcctgagcagtaagcaagccagagaacaatgactggttattgcttaactgtgcttctagcattgcagaattcaggcaccaccataattctaacatagtggccttttcttagttttacaaaagcattttcagtctctgaacaaggaggaccttattttcaggaagagtctattaacatccttgcttttaagttaatctataaactaaatttctaccatagttagcttagcctacattcaagaatgaggaagggcagttagcttgtgaggtcagaagcaagatggagtctgttcctgttagatttatcttgctgtcataattttag

SEQ ID NO: 745878 - DNA, 535 bp, Homo sapiens
tcatgttgagtcagtttctgcgtgggggtcatagaaccagttgagtcagttctttgggatgagtcacaggtctgggtggcatcagtttgcatgcccgaatgcagaaggctgaaaaatatctcaaagaccaattttaggttttcacagcaaagatgttatcactaggagcaactagggaagttacaaatcttgtgacctccagctacatgattcytgagcagtaagcaagccagagaacaatgactggttattgcttaactgtgcttctagcattgcagaattcaggcaccaccataattctaacatagtggccttttcttagttttacaaaagcattttcagtctctgaacaaggaggaccttattttcaggaagagtctattaacatccttgcttttaagttaatctataaactaaatttctaccatagttagcttagcctacattcaagaatgaggaagggcagttagcttgtgaggtcagaagcaagatggagtctgttcctgttagatttatcttgctgtcataattttag

SEQ ID NO: 745879 - DNA, 631 bp, Homo sapiens
tttaaattatttttaatatcttataggtgtatgtatgagccataagaaacaaaaaagagaatagcaatctctttggaagcaaatcgtctaaaaaataaatttatctgctcaaattgatatgagaatataggagaaaattttttcaattcctacaaccccacacatagtacattgtttttgaaattgttaagaattcatgcagaaaattgcaaatgatactgaaaaagcaacatcagcttattttaaattgctgagctagaagattttatagggaagacaagaaacagktgtttatttttaaatagcactactccctgtaatagctacataaacattccaaaatgaaatattttgttaatactagataattccaataatgaagatgtaatggccaattaaagtaacttattgttgtttgtattctgtggtaataagagtaactttagatattgttctcattgtaaaatattgatgattttcatgtattaaagccttctcgttgccttagaatatgtaaaatgcagtagtacataaaatgttacatcaattttattctattaattgtttccataaactcttacatagagtgttattgcagaacctttcttaatgaacctgttttatgctgagt

SEQ ID NO: 745880 - DNA, 591 bp, Homo sapiens
tagatatatacccaggagtagagttgctgggtcatacggtaattctatgtttaactttagaggaactgccaaactgttttccacaactgcggcaccattttatattttcaccagccaatatatgagggttccgatttctacagtactcgttattgggtttttttttgtttgtttctttgtttatagccacgctagtgggtataaaatagtatttcattgtggttttaatttgcatgtccctagtgactaatgatattgagcatcttttcatgtgcttattggccatttgtaaatatttgaagaaatgtctacttaagktttttaagtggccatttggccattcttaaatgaggttgtttgtctgttgttgttgaattataagagttttcttctctctcactctcttttttttttttttttttttttttttgagacagaatcttgctctgtcacccacaatagagtacagtggtgtgcacacggctcgctgtagcctcggcttgctgggctcaagagatcatctgcctctgccttctatgtatctggcaccacaggctcacagcaccccgtccagctaatttctttaaattt

SEQ ID NO: 745881 - DNA, 590 bp, Homo sapiens
aaccagtttttctgtagccagtatgcgagtatcaacttgtggcatgtgaatgccacaacttaatatgtatttaagaaaatatgtttaatagaaaataggtttaaaatgaaaatatgtatgtttccatatatagagagagatggaagaatatatattttcttttttaaactaatgccatagttcaattatttaagccagacagctaaaactgcttctttttgtccaagtatatggctcacccctgtaacccagtactctttggaaggctgaggcaggaggatggcttgagtccaggaattcaacaccagcctgggcaacatagtgacaccctgtcactacacacctttttctgttcatacttctatttaacaagtgatgctggaccatgatgttcccagcattttattttttaatttcatcctaagatctgctcttrtcccccattaagaaggattggtagaatgttctctttcctaatgacagaagtatgaaataacttgttcatcaggagagtttattattgatattgttaatatttaaatacacattccataaattggaatattttgttgtacagtctgagatttaac

SEQ ID NO: 745882 - DNA, 625 bp, Homo sapiens
taattttttctgaaatcaggtatttttttacatgagaaatattggacatatctagaccacattcctcatattccactccatttatctactgacattacccttcctactagaatcttccattttctgaggaacttaatattgttgaggcagatactgtggttaggtttcccaaagccatttataactcctttctcttatcttcctttatacttctgactgagaaggcaaattatttgacctctcagtgtccatcatagctacagatggccatatgacatagttttgrccaatgctgtgtagatacaaattctaaaagaggcttttattctcaaataaaaagacaaagttccacaaggataaggtctcttgtactttccttcctagttttggccaacaatataaatatatctagaggagcagcagttgtctggtgacctaaatgttttgatgacaacaggctaaaaattgtggctagtcaactgtaaaccaacagcaagaataatttatctgtgaaattatgtaatcttggatctctatgatgatattcaatatttagtggctaagtcaaaaccttaacatctggtaagtgcaaaaattattataaccctaatatcaaggaaggtac

SEQ ID NO: 745883 - DNA, 525 bp, Homo sapiens
tgtttcatgtaaaatttaaagtaactgccactgaagcttttcttttgctttcattgcagctttctctttctggagtttaaacataagttcagagatgtggggcacaggataatctaatgagagccaacagctttacagaagaagcaatatgtctttttccaatacagatgccgtgtttttaaatcaattgtacttctttactcttttattttaggttacttttccccyaaggaatgtatttatccttgagtatacagatatccaaggagattaatttttcctatgtgacttcgcctctcacagccccttccataagaggttagacaaagagacaggtccaagttctattcggagctgctttaggacatgtaaagcacccttcaataaaaggacaaagtaaaccccatatagcagtttattgtcggttggttggttttgtttttcccccaggtagatatagcagcagtcagcagggaaagaaaattatatctactttttgattcctagggattcttcatctgtgat

SEQ ID NO: 745884 - DNA, 525 bp, Homo sapiens
tgtttcatgtaaaatttaaagtaactgccactgaagcttttcttttgctttcattgcagctttctctttctggagtttaaacataagttcagagatgtggggcacaggataatctaatgagagccaacagctttacagaagaagcaatatgtctttttccaatacagatgccgtgtttttaaatcaattgtacttctttactcttttattttaggttacttttcccccaaggaatgtatttatccttgagtatacrgatatccaaggagattaatttttcctatgtgacttcgcctctcacagccccttccataagaggttagacaaagagacaggtccaagttctattcggagctgctttaggacatgtaaagcacccttcaataaaaggacaaagtaaaccccatatagcagtttattgtcggttggttggttttgtttttcccccaggtagatatagcagcagtcagcagggaaagaaaattatatctactttttgattcctagggattcttcatctgtgat

SEQ ID NO: 745885 - DNA, 525 bp, Homo sapiens
tgtttcatgtaaaatttaaagtaactgccactgaagcttttcttttgctttcattgcagctttctctttctggagtttaaacataagttcagagatgtggggcacaggataatctaatgagagccaacagctttacagaagaagcaatatgtctttttccaatacagatgccgtgtttttaaatcaattgtacttctttactcttttattttaggttacttttcccccaaggaatgtatttatccttgagtatacagatatccaaggagattaatttttcctatgtgayttcgcctctcacagccccttccataagaggttagacaaagagacaggtccaagttctattcggagctgctttaggacatgtaaagcacccttcaataaaaggacaaagtaaaccccatatagcagtttattgtcggttggttggttttgtttttcccccaggtagatatagcagcagtcagcagggaaagaaaattatatctactttttgattcctagggattcttcatctgtgat

SEQ ID NO: 745886 - DNA, 629 bp, Homo sapiens
gtaggggaaacgattgccagctatctgatactgtagagatttaggccagatggaaacttgctttaaaaatcaaaccagtttcagtcataccaacatgagctttcttggatgtctgctttggagacattatgttattatcatcatcatcatcatcatcatcatcatcattattactaaagtcagaagtcactaaaatattgtattacattttcaaaaatacctgggaggtggatacaagaatgtcatggtaaaaatactgatcctggactagaaggagtagaaaataataattgtaacttgtgttattttccctcaatgatctaaaatctggaggtgaaattctttaaaagtacatcataaaggcagctaggagaactgatgtggtagctccaaatggctattttgttagaggtagtaaaactttttcaatgtaagtgaaatgatccagcaatcagttcctccaggacttttcctgaatgtttacttttaaagaacatttataccttctgtagaatgtaaagggaggatggacacrtgatactcagaatagtcaagtcactttacaagaaaaaagacaagaagcaggctgataggaagtatgaaaatactgggaagtccttaatggtcag

SEQ ID NO: 745887 - DNA, 480 bp, Homo sapiens
aaaaaaatactcttaccatatgattcagcaatcacattccttggtatttacccacaaaagctgaaaatgtatgtccacacaaaaacttgcatatggatctttatagcagctatatttgcaattactaaaactttaaaacaaccaaaatgtccytcagtaggtgagtagataaactgtgatatatccagtttataatggaatattattcaatgctataaaagaaattagctatcgccgggcatggtggctcatgcttgtaatcccagcactttgggaggccgaggtgggtagatcatgaagtcaggagttcaagaccagcctggccaacacagtgaaaccccatctctactaaaaatacaaaaattagctgggcatggtgctgtgagcctgtaatcccagctactcaggaggctgaagcaggagaatcgcttgaacccgggaggcagaggttgcagtgagccgagatggtgccattgcact

SEQ ID NO: 745888 - DNA, 480 bp, Homo sapiens
aaaaaaatactcttaccatatgattcagcaatcacattccttggtatttacccacaaaagctgaaaatgtatgtccacacaaaaacttgcatatggatctttatagcagctatatttgcaattactaaaactttaaaacaaccaaaatgtccttcagtaggtgagtagataaactgtgatatatccagtttataatggaatattattcaatgctataaaagaaattagctatcgccgggcatggtggctcatgcttgtaatcccagcactttgggaggccgaggtgggtagatcatgaagtcaggagttcaagaccagcctggccaacacagtgaaaccccatctctactaaaaatacaaaaattagctgggcatggtgctgtgagcctgtaatcccagctactcaggaggctgaagcaggagaatcgcttgaacccgggaggcagaggttrcagtgagccgagatggtgccattgcact

SEQ ID NO: 745889 - DNA, 505 bp, Homo sapiens
ggatcccattattatttggctttaaaggagatgttggtcttcagcaatgagttgacccacctgcctttttctttcctgacatatttttggcaagagtggatttagtaggtagcggccacttggcaggctcttgggatgctagattttcacaataaccctgtgatgtgcatactgttmtgatcctcatctcacagatgaggagacagacttggtgggctgaagccatttgctcaagccactgacttggcagaatgtgggccggaacttaggtctgtggaattcccagccggtgctcacgcagcactgcacagagatgtttctggaaggtggtgctccctgacgacacctcggaggccatccaggttgcgaagggaaaggcgcatgtcttggcctcttccctgttgttggcactactcttctacctcttgcccactttatctcccactgagagaccctattctaggaataccaacccagactgcagagaggaagaaagcctgagggt

SEQ ID NO: 745890 - DNA, 597 bp, Homo sapiens
ctcaaaagcaattgcaacaagaccaaaaattgacaaatgggatccaattaaagggcttctgcaaagccaaataaactattaacataataaacagacaacctacggaatgggaggatattcacaaactatgcatctgacaaaggcctaatatccggaatcyataaggaacttaaacaattcaacaagcaagaaacaataaccttattagaatcgggcaaaagacatgggcagacacttctcaaaagaagctgtacaaatggccaacaaacatatgaaaaaatggtcaacatcactaatcatcagagaaatgcaaatcaaaactacaatgagataccatctcacaccagtcagaatggctattattaaaaagtcaaaaaacaacagatgctagtgaggcttcagagaaaagggaatgcttatttactgttgatgaggatgtaaattagttcagctgtggtggaaagcagtttggagagttctcaaataacttaaaatagaactactattcaacccaacaatcccattactgggtgtatatccaaaggaaaataaatcattccaccaaaaagttacctgcaatcatatgttcatcacaag

SEQ ID NO: 745891 - DNA, 522 bp, Homo sapiens
tcatccctctgctcaccgagataaatgcatatctgattgcctcccttgggaaaagctgatcagaaactcaaaaggatgtaaccatttgtctctcatctacctgtgacctagaagccttctccttacttcagttgtcctgcctttcaggacagaaccagtgtatgtcttttatttatttatttattagacagagtctcattctgtcgcccaggctggagtgcagtggcccctgatcttggctcactgcaagctccgccttccaggttcacgccattctcctgcctcagcctccccagtagctaggactacaggcacccgccaccatacccggctaattttttatatwtttttagtagagatggggtttcatcatgttagccaggaccagtgtacatcttacatgtattgattgctatctcatggctccctagaatgtataaaagtaagctgtgccctgaccaccttgggcacatgtcgtgaggatctcctgaggctgtgtcacaggcacatgtccttaagctt

SEQ ID NO: 745892 - DNA, 712 bp, Homo sapiens
agaaagatctaatatcagtggcctgaacttccacttttggaaactacaacaaaaagagcaaattaaatttaaagtaagcaaaagaaaagtaataattaaaaattagagaagaaatcaatgaaagtgaaaacagaaaataatcaaaaaagctgattctttgaaaagataaataaaatcaataaacctctatccaggttaattataggaaaaaagacatgttatttactatcaaatatgaaagaggggccatcactacagatcccatggacatttaaaggataataaaagaatattatggccgggcacagtggctcacacctgtaatcccaggactttgggaggccgagtcgggcggatcacttgaggctgggactgtgagaccagcctggctaacatgatgaaaccccatctctactaaaaatacaaaatwttatcctggcgtggttgtgcatgtctgtaagccagctgctttggtggctgaggcacaagactctcttgaacccagaaggcagagggtgcagtgagccaaaatcatgccactgcactgggtagctctgggcaacagagcaagactctgtctcaaaaaaaaaaaaaaataaagggaatattatcaacaactctatgcccaccaatctgataacctcaacaaaatggaccaattctttaaaaggcacaatttgttaaaattcatgtaaaaagaaagagaatctga

SEQ ID NO: 745893 - DNA, 609 bp, Homo sapiens
ttcaccatcttggccaggatggtcttgaactcctgacctcatgatccacccacctaggcctcccaaagtgctgggattacaggcatgagccatctgctgaactttcaattaatccttcagtctggtgatcccagttgcccagacccttacctccagttgaagtcaaccaggtgcctccaaagcttgctctttcctcccctgggtatgtgtcagagggacagacacctttttcaatggtgatcctgtgacggagacctgagcrtctttggagagatgctggaacaggagaacgatgcttcacaattgctgctccagggatggaactgtggtccaagaacagatacttcacactccaccctaccccaccaggggcttctgtgtgcaaaatcacttcctacagggaggcaatgtgggcaggctgggaggtcggttgacttggatgattgttacgacttagccaatggtattaaatatacacgtctaacaggagtcccagaagaaggttactgagatgatcagacctgtcttgttgaagagacaactctggaggctaagtgcagccctgccaagagaataagaaaatggatcactgatcatgagctggtattg

SEQ ID NO: 745894 - DNA, 594 bp, Homo sapiens
gatggagtggggtgatgtttgttgtgcacctaccataccaggactgggtcaggcatgctcggaggtctgagtgcagaggcctcttcccttgatcctgagccagtgtgtcaggtccaggaaaacccaaggagcagagatgggataagacttcaaggacttgggacaaggggcccttgtyacaagggctctgtgtgtgtgtgtgtgtgtgtgtgtgtttctgaacatgggtttctgacatttggatttctttccccatttatttagtaagcgtatatgtgcattgaataaatgtaattgagcacctaccatgtgtcctaactgttcaaaatgctggggctacaaccatgaacaatgaggcaaaattgcaaacctcatagaggctggatgctagttaaggagacaatgtttatgtaaacaacaaccaaaaaatcaaatcctagccctgctgtgtgactttgggcaaggcacttagcctctctgagcatgagtgtctctctttgggatgttacctaatgactcctgccttacagagctactcagagagaatgtatgtaaactgaaactgcattgcaaactggaaagctttgtgcttat

SEQ ID NO: 745895 - DNA, 576 bp, Homo sapiens
gtagggaataatgttgggggtagggaataatgtcagaggaaactggatcctggcaggccatggaaagcaatggtgatttcattctaagtctgatgggaaagcaaggggggctctgagcaggggaatgccatgatctgacttacattttaaagggtttgtgamcttgtcgagtgtagactggagttggtggccacagtggcaacgaggaaacctgctgggaggctggagagatgagggtggcttgctcagggtagaagcagtgggggatgaatgtggcccgtttctggatgtgttctgatagtagaagcaagaggatggaaaggatgtaggggatgagaggggagagtgatcagggttgactccaccatgtcttgtctaagagaccaagtagacagtggcactatttactgaggtgggtgctggagatctgggggaagacgtcacaagtttggttttgaatatgctgcctgggagatgctttctgacctccaagtgcagaggtctcagtggcagctgagtgtcaggggagaggtggtctggagtgtaagtttgggattcagcagagtatttagaacc

SEQ ID NO: 745896 - DNA, 612 bp, Homo sapiens
aggaggtgacatatgactatgaccaagtgggaggaaccctggaggagaaaggagcctgaacaaaggcccagaagcttgaaaagacaaggtacaatggaagagttgcaagttccacagtctgcagagcaaggtctgtagggtggaggacctgggctgtgacaaggccagcagagggcacgttgtaaggtccttgaatgctggaggaagcatcttggaattcaccmtgagagcaatgaatggggaggcatggtggagtctgagcaggggtgagccatgctcagccccttgggttctacttgctgcccgaccagctggtgacaatctttcctctgagactcaaatcaaagcagaatgctctgggctggactcaagtccaagctctgagtaactgtgggcttttccttccctggaacttaatttccccagatgtagaactgaacctctgaggcctccctggtcttacaagctaagtttccagagtcctaggccccagagccacatagatctggctcaagttgctgctcttggtaacttaaaactcaacaactcataagctgtgttgccttggacaaatctcttctcatctctgagcctcaatttccccacctataa

SEQ ID NO: 745897 - DNA, 510 bp, Homo sapiens
gaaaacttatcaggattgtgtcctacaggtgtgtggaaagcagaatttataaaagatgaaattggacatttggctgaggaaattccaaatggtgcattaaaggtgtggccttgtgacttctgcagcctccagtaaaatgcaagaggaccccggtgtatattgttctcctccctgtttccatatgttctcattgttcagctcccacttataagtgagaacatatagtcctgcattagtttgctgaggataatggcttccatctccatccatgtccctgcaaagracatgatctcattcctttttatggttgcatagtattccatggtgtatatgtaccatattttctttatccagtctatcattgatgggcatttgggttgttggggggttaggtgggggaaggagagcattaggaaaaatagctaatgcatgctgggcttaatacctaggtgatgggttgataggtgcagcaaaccatcatggcagacgtttacctatgtaacaaacctg

SEQ ID NO: 745898 - DNA, 622 bp, Homo sapiens
tctatgaaaggtagcagagttgtctttggttttgattaatggctagtcgagaattaatctttggttcagagctttattgcgtttgaactgaactgcagctcacctgactgccacttccttgaaatacctgttttgaagggttgcaggttagcaggagcaaaaaacccgacacatctagcaatgtttgtgttccaaagtatactttgaggaaaaaaaaagtggaaaacatcctaagaatctttgatattttttatatttttattgcaatggcataagtacttattatgagttaaattaggaagaataaaaataagcacaacatcgacatgtccatgaaagggacaagccaagaagggagggatgggtgtcagggagtaatgcttttcaaaggtgaggagtagtcaggggtttctgctttgccccctttatttggtaataaaacagggcttttacattttgaagcagctgctttatgtgtccaarataagatgatcacattaaaatgtcactgctatcaaaacgtcatgtcaaaatgacctcatctgaatgtcctactgtatgtcaggctgctccaagtttcaagatttcactcttgcacccctaaaatatcaccatgttcctg

SEQ ID NO: 745899 - DNA, 507 bp, Homo sapiens
gcccacgaccggcagcccacgctatggatccctagaggaaggaggagaagacagctcgccgcccacccccatcccattttcctcttcctttatctcattgttgccgaagctgtttacggcagcgctccctctgctcctgcatggggcgggctccgggcacggctgctcggcaggcgctgctcccgcggcgactgggggattctgcctaattcacctcccagccggygcagagaggaccggagagcggtggaggcccggactgcagcagcgttggggccacctcccagcgtccccaccctaggaggctgcatgcggattgaagagctgcgcctgggggctgggccggccccgctgatcccgacctagcgagcaggatagcaggaccgcccaggctgcggaggggctcgggggcaggaaggtcagagcagcaagatggccagtaagaccaaggccagcgaggccctcaaggtggtggcccggtgccgccccctcagcaggaaggaggag

SEQ ID NO: 745900 - DNA, 507 bp, Homo sapiens
gcccacgaccggcagcccacgctatggatccctagaggaaggaggagaagacagctcgccgcccacccccatcccattttcctcttcctttatctcattgttgccgaagctgtttacggcagcgctccctctgctcctgcatggggcgggctccgggcacggctgctcggcaggcgctgctcccgcggcgactgggggattctgcctaattcacctcccagccggtgcagagaggaccggagagcggtggaggcccggactgcagcagcgytggggccacctcccagcgtccccaccctaggaggctgcatgcggattgaagagctgcgcctgggggctgggccggccccgctgatcccgacctagcgagcaggatagcaggaccgcccaggctgcggaggggctcgggggcaggaaggtcagagcagcaagatggccagtaagaccaaggccagcgaggccctcaaggtggtggcccggtgccgccccctcagcaggaaggaggag

SEQ ID NO: 745901 - DNA, 619 bp, Homo sapiens
taggcaggaatttttatttcatttacagctttatctcttgtgcctggaataatgtctagtgtgtagtacttaataatactggtagaatgaaagaatgggatattgtcttattttccagggcagatctatatattttgagatgaaatgagcaagtgactgggctgtgatttttttttttcttttttctttctttttttttttttttttgagacggagtctcgctctgtcacccaggctggagtgcagtggcgctatctcggctcactgcaagctctgcctcctgagttcatgccattctcctgcctcagcctcctgagcagctgggactacaggtgcctgtcaccacgtccagctaattttttgtatttttagtagagacggggtttcaccgtgttaaccagtatggtctsgatctcctgaccttgtgatccgcccacctcggcctcccaaagtgctaggattacaggcgtgagccactgcccctggccaggctgtgattttcttaagattaaaaagtccaagtctttcacttagctaaacaccattttattttacttacatagaaatgggctacaggcaaagccagggttttccttgtgaagcagctttgagtactgcg

SEQ ID NO: 745902 - DNA, 619 bp, Homo sapiens
taggcaggaatttttatttcatttacagctttatctcttgtgcctggaataatgtctagtgtgtagtacttaataatactggtagaatgaaagaatgggatattgtcttattttccagggcagatctatatattttgagatgaaatgagcaagtgactgggctgtgatttttttttttcttttttctttctttttttttttttttttgagacggagtctcgctctgtcacccaggctggagtgcagtggcgctatctcggctcactgcaagctctgcctcctgagttcatgccattctcctgcctcagcctcctgagcagctgggactacaggtgcctgtcaccacgtccagctaattttttgtatttttagtagagacggggtttcaccgtgttaaccagtatggtctcgatctcctgaccttgtgatccgcccacctcggcctcccaaagtgctrggattacaggcgtgagccactgcccctggccaggctgtgattttcttaagattaaaaagtccaagtctttcacttagctaaacaccattttattttacttacatagaaatgggctacaggcaaagccagggttttccttgtgaagcagctttgagtactgcg

SEQ ID NO: 745903 - DNA, 596 bp, Homo sapiens
cacagacaccaggctgagggggcaggcgaggtgcagcagatcccagtgggccccggctagtcctagtctgaatgactcattccttgtttccgtccactgtggtctgagtgccttggcccaggggcccccaagaggttgtaacacaggctggcctctcgcccatcagggctcagcagacaaaaattaaagatctcactcctcaggaactcayacagacagcacaggcatgctctgtactctgcctcaccagaccagacctcaggccagaggaggctgatggccaagagaggaaggaaagtcgtctccagctgctcctcctcctcttcaccccccatgacctgccatgaaggcctggccctgcccactgtcttcttactccccctctggtcctccgcctaacagtggtggtgccagcggcatctcctcagctctgttccgttcctccccatttctgactgaagacaacagcaaaggtgaaacagcctgtgcctcccaggaggaacagacttatagggaactaaccatacattttctggcagcccatttctgattaagtcactcacctgctcaacaaccttcaatggatccccactact

SEQ ID NO: 745904 - DNA, 630 bp, Homo sapiens
ggaaaccacagaggtctctggaaacagggctgcctggcatacatgcatgtacatacctggacacaatgctaatgcccactatgtgttcacagataaggagaaacttcagaaccacaaggggccacaggattgtggaaaggccctcgggtcgggcagcagctccatgaatgctatggacagcccttctggaaaggtcactcagcagccaaggctcagccagacatcagagcagaggccacccccaccacctcccgccaccaaagaaaacgaggctacacatggaacagaaatgattagaaaggaaaaaaaataagaaatagaaaagacraattccaaactgcaaaggcccggaaaaaatgcctagtgtaaaaagtgaagtagtaaccatctctgttccagcaggatgggctgatcaggtttttcacattgggcccaactccaggttgaatagccgacacaggccctgagcatggcgtgatcaggtctggggaaaattgctgccctgggcctggcctgtggacctgaagtgtcccatcttgtctcccactgtccacccccactccatccctgccagcactcacacacacagcggctccgcgatggatccagcatgaggccaggtctgcatgt

SEQ ID NO: 745905 - DNA, 691 bp, Homo sapiens
tactggcaagcatctaatttatgtcaaatctaatattattttcctagagtgaaagttttccctgtcttgtcttagtcctaaggaaactttttaagattttctttttcagaagaagatgaattgtgaaagcaaagttgaataacacatgttaaaatttgttgtgaggaarcaaaatgtgtcacacccatttaaaaacacttgatatatatatatatatatatcccaaaaatacttaaaaatgactgaacatcggccatttcttttaacattaaatgttaaagaaaaatttcaagtgttatattttaatcaaaaccaaagcttttgagtaatttgagaggggagaaaaatggagatgggaagcttttgcaggagaattttttgctcagacccagttcaaatttgtgattccatttaggtatattattatttccataactctgaagtttctgaaacaaatgtccttctttttgctgactgtctcagatgtacctagctgtgatggtagacagtggtgttgttaaaatggaagatgaagcatttcaggaagtcacaaaaagcaactggtgttcactgagcatcaatcacattgagcttgacaggcaatgcgtagccatgactcagccatcccctcaaccagaactctccaatactgtgtatcattgcctccattttcatagaggcagtgaccgat

SEQ ID NO: 745906 - DNA, 537 bp, Homo sapiens
agaaagtttgggggttttgcagtgtacctttcctaatgcttggattttggaaggatatcaacatgtcttttctgcaatgatgatgataaaataataatggctagtatctttttagtcattgctgtgtgctaggagttaagtgctttgcatgcattttctcatttaaccctaacaactaaattaagtacttttgaattttcattttacagatcctgaaactgattgctyagagtgattaaataatttgcccagtggttggagccagggcataaaacaggtacaatgaactccagtatctgtgatttggtccctatattgcattgtctttaaccacattggatgtttttagcttttatgtcagttaatttgtcagtttctgccagcatattttgacttctttgctgtagatgaaatattttcatgtaaaaaattcattttatgtattgatgtttgtttcctaagtaatacccaaaactattgtatttgcttttttgtgtgtttagtattcctttgtttattgccaaacttgggcatgat

SEQ ID NO: 745907 - DNA, 607 bp, Homo sapiens
ttggagatgtatttagtcttgtcaaaagttttctttacaatatattgttgttctaattcctgatctggaaccaccttgattgctgcttttcctccaagcatctcattgactttatgagccttcaatatacttctaataacttattttttacttatgatagccacagtagtctctattgattgaaaataaaatcccttaactgataccagtccacatgaacacaattatataagtacaagaatattaattgcagtattgtttgtaattgtaaacaacacatatgcctaacaatagaatgaatgaataaatatactacacatatattaaggaatatgtatttttcagctattgttgcatgagagcaaacacawtgtctatgtgaaacacaaaagcaagcattcctttctccctcacaggtcttagtttatctgtgataggagatctgtttcatgatgaggatttatgagttttttatgggattcacttcagctgtgggtttaccacataggtgtgtcacactgagatcaggaagaagaggtagtggctctctggagtttgctcttgtcatcacaaaggcaataacatatgagaatgagtcttaccacct

SEQ ID NO: 745908 - DNA, 587 bp, Homo sapiens
atgagatgtgcatgtctgctatgtctgctgttgttcccagtacatagcagaggtttgttaaacatgaatctgctcttgagatctttgaaatctacctgaggagtgtaataatttctcatactgaaaccagcatgccttgttcaaaataacttgttattcataccacattgctgtcaatccttgtgcctaaacattaagtagccatcagtgatttaaaaaaaaaagcaaaaagaaktttgtttatgagcatttgattttaaagacatatacttagcaatttcaggacattatcaggtttgatatttatagcaatatctaatgcttgtaactcttattatcatttcaattttacaaatgagaaactgaaacttcggtgggtaaaaagaccctccaagtttacatgccaataagtcttggtgttagtatttgaacgtatgttgtaagactccaaattctatgctcacactcaataagcaccacagacaagcaagcagcactgtcacaggagcagagccaagaattaatgacttcagagggaaagaggagcaatatattacagctgcctaggacagataaaacttttcaaa

SEQ ID NO: 745909 - DNA, 599 bp, Homo sapiens
cttgcaaaattcactcattaactccagtagtttattaattattccttgttttctacttccacatttattttatctgagaataatgacagtagtgttcctttcttttcaatcattatatttctgtttgaggggacttttataccagataggatatccaacacaatgttaaaaagaagtggccaataattatagtctcattccacactactctagtctccttaggaagacagcattcaatatttcaccattaaatattgtttgctgtaggttattttgtaaatattcattgtcagaataaaaaataatgtaacacacttctaagtttgctgaggtttttttttagaaaatcataaatgggtctcmtttttatcaaactttttacaacaattgatatcataagccttattcagatgtaatattaacaaataatgattgaattgtgaatattaaatgaatttgcataattggaataaagatcattttgtcattataaattattctttttacatatcactggtttgttaatattttatttagagtttttcatctatgataatgaggagcctttaattttactttttgcaactttcagtttatgt

SEQ ID NO: 745910 - DNA, 520 bp, Homo sapiens
caattcgatcaagtggaagaaagggtattggtgactgaagatcaaattaatgaaatgaagtgagaagagaagtttagagaaaaaagaataaaaagaaatgaacaaagccttcaagaaatataggactatgtgaaaaraccaaatctacatttgattggtgtactgaaagtcatgggaagaatgaaaccaagttggaaaacacctacatgatattacacccaggagaacttccccaacctagcaaggcaggccaacattcaaattcaggaaataaagagaacaccacaaagatactcctcgagaagagcaccccaagacacataattatcagattcaccaaggttgaaatgaaggaaaaaatgttaagggcagccagagagaaaggtcgggttacccacaaagggaagcccatcagactaacaacatatctcttggcagaaaccctacaagtagaagagagtgggggccagtattcaacattcttaaagaaaagaattttcaacccagaatttcatatcca

SEQ ID NO: 745911 - DNA, 604 bp, Homo sapiens
actgcttttttaagtatcctggaatctgttcaatttttggtgtccaaaacaacaggcactgtttttttaagtctcctggaagctgttcagttaatggggtttaaaacaatgacaaacagcccccatgcctgccccatcagtgatcagaaacagcaatccatagtcagaacacagaaccctaatatttggaggacaaggtccttattgmccactctagctccagtgagccatacaagaaacattggttgctgtccctacagctgcctgctgccagctggggatttgagatgggtagtcataactgtactgatggctgaaataaataaaaagtagataaaatttgccagccaaactgttccctggaagatgcaaacattaaaataaactccagagttccaaaatagtcacttcagactgtttctaacagtataattgttgtctaggtagagagacagattcttgctgcttcttactccaccattttccctgtcatcactcctgacatatattaaaaggatccctctggctgctatattggatatggactgtatagtagcaaggacagaagtatgtgtaccaattagaaagttactgaattaatcca

SEQ ID NO: 745912 - DNA, 548 bp, Homo sapiens
gcttctagggcctgggtgctcccactctctcctgtgcccctatttcctccaatcccccaaacctgctctggaaaagaataatagtgctcatttacacttcagtgtatgtctccgtttcctctcctagaggggatgtatgtttacatctcatttctgattragggaatataaggtttggtcccccgtgaaaacattgcaggtgtcaggaaggcagggcatggtgtctggggtcaggagaacttgtgttcctgaaatcagaccaagaaagctgctgcttttccagcctctgccctttatggttcctgaattgggagtgctgagtcagtggaagagtctcataggagaccagtttgcttctcttttctttcctctgtactcacggcggagtttgcagtccggattctgcaatcccagtgttcccagaaccaagctgggtctggctacgttttctcaaggcccaataatgagaagcagacaaactgggaaagaagggaatttattgctgtaaccggattcagggagaaggccagagataattccaccagaca

SEQ ID NO: 745913 - DNA, 569 bp, Homo sapiens
ttcttcttggtttggatccattgctggtgaagtagtgtgatttttggggggtattgacgagcttgttttgtcatattaccagggttggtgttctggttccttctcatttgggtaggctctgtcagaaggaaggtctatggctgaaggctgttgtccagattttttttgtcccacggggtgttcccttgatgtwgtactctccctttttttctgtggatgtggcctcctgtgagccgaactgcagtgattgttgtctcttttctctcttctgggtctaaccacccagcaagtctacccagctctggactggtactgggggttgtctgcacaaagtcctgtgatgtgaactgtttatgggtctctcagctgtggataccagcgcctcttccagtggagttggcagagggtgcaatggactccatgagtgtccttagctttggtggtttaatgctctatttttgtgcttgttggcctcctgccaggagatggcgcttttcataaaggatcagctgtagcagtgtggagagggactggtggtgggcatggctctagaactcccaagattatat

SEQ ID NO: 745914 - DNA, 394 bp, Homo sapiens
ctccctttaatacccctaaacaagacagagtaacagctgacgaaagactagagtcaggacttccaggcaagaaatattacagcctcttttgtaatgtcgcaaactggaaacagctcattaaaagggaaatgttagcatgaactgtggcttttgtctctaaggartattaggcagctaatctctctctacaaagaaaactaggaaaatgtccacgaaaatctttcactgtgaaaagcaatgtgtggtattttatgtactatgatatcatttgtaagattaaaagaaaaaaaggctttctcagactatatgggtttgtaggatttctggacaggagggatgggaggaagaccacaccccagagtgctaatagagattatctcatcgggttaggacc

SEQ ID NO: 745915 - DNA, 569 bp, Homo sapiens
tgtggcctaacatatagtctatccttgaaaatgttccctgtgcgggggagaaaaatgcatgttctgcaactgttatcatttctttttacagaagaggaaagtgagttgctatataacttcacaattaaaatgtatatggcattttaatagtataaatatttattttaatgaatkttacatgtttaaattatttaagatatgtagaacacgtatgtcatatgtcctgtaattacacatttgtcttaatatgactctgtgttcctgtgacccctatttttctatattctaagatctttgatggaaatattgaggtatctcagagggtacctaagtaaaatttagtcacataattagcctacaataaatactacatcaatgaataaataaatgcattaaataaccagcatttgctataaatgggttaaagaacagtattgcaatggctgatcagttttcctccttatagaactattgttctccctaaaaacttgcagctccaaaacaacaattaatttttttttttttacctgtaactcatcttcagtaggcttggaaataattgatttata

SEQ ID NO: 745916 - DNA, 390 bp, Homo sapiens
tctcaaaagaagacatacatgtgaccaacaatcatatgaaaacagagctcaacatcactgatcattatagaaatgcaagtaagaaccacagtgagataccgtctcacaccagtcagaatggctattactcaaaagtgaaaataataataataataacagatgctggtgaggttgcggaggaaaagaaacacttatacactgttggtgggagagtaaattagttcaaccattgtggaagacagtgaggygattcctcaaagacctaaagacagaaataccatttgacccagaaatcccattactgggtatatgtccaaaggaatatacattgttcggctatacagatacatgcgtgcatatgcttattgcggcactatttgcaatagcaaa

SEQ ID NO: 745917 - DNA, 527 bp, Homo sapiens
tttgacaaattacataccaaggcatgaataaaatgagtaacatacattttgatacatacaaggttttagggaacctcagctctgcaacctcacagtgtttgaagacatctacttttaccttagagaaactaattgatataagatatatgtagtagattcagtctaaagttctgatctatttaaatccatggatctaaactgcaacacgagtaaactggactctcttcgtggaactctcaaatatgtttttgatggtaagktttgtgtaaaaccaaagaacttgaagacagtatagaggaaaagaaaaaagtgatagaacaggcaggacacgcagacagagaggggatagagaaagcaagaagctaaaagtaatgaactggcaaggtgtctataaaatgactagagattgagactaggaaaaatcaccatgaaatgaagtaaccaataagcaaggagataaaatgagggcagatatgttcaaagtcaaaactggagatggcaaaaaaattctaccttaatggaaaaga

SEQ ID NO: 745918 - DNA, 489 bp, Homo sapiens
aaaagtatactatagaaaatatatacagtattacataaattatgtaaatgtaatattctatattgctcagatacctgtgtgtgtatatatataaaatacacacataattattaaaaatagattaaaatactgcagacaaatcaattgttaatattgtattacttttaaacaggattatgcaaatatgataacatattaacaaaataataatatgataaaatattatcaattacattctgttgtatgatatagtgtcttcgcctatattcttttatatatttaaaaaatttccccaaacaaaaaattaaatgtaaaagatatttattcttagcttttcctttaargactgattttatacacagataaaacaagagcattaatttttgacacacttctagattgcatcttgatctcaaccttcctcccagcatctggacacttacttgtgattatgagtactcaggttattgtctctctctgacagctctc

SEQ ID NO: 745919 - DNA, 637 bp, Homo sapiens
ttttttgtttttttgtggtttttttgagacagagtctcactctgtcacccaggctggagtgtaatggcgcagtctccactcactgtaacctccacctcctgggttcaagcaattctcctgcctcagccttctgagtagctgggagtacaggggtgcgccaccacacccagctaatttttatgtttttagtagagacgggattttgccatgttggccagactggtctcaaacccctgacctcaggtgatctgcccacctcggcctcccaaagtgctgggattataggcgtgagccaccacacccggccaaattttggaaaatattgatcattatttcttcaaataatttttgtcaccatccttattcctctccttcagagacttcagttgcatgtatagtgcacttgaaattgtctcacattcaccrattctctaggtttgggggctttcgagcactgggatgaggttcagttatttttttctttgattttagaacatttatattactgtagcctcaggttcactaattctttattttgcaatatctaatctgtttatacagtgtatttttcatctcagacatagcagttttcatatctagcagtcatatttggatcctttttatatcttccatatct

SEQ ID NO: 745920 - DNA, 545 bp, Homo sapiens
gtagctattataaatatgtttaaagattttaaaaaatatatatatatatatatttatatacatataatgggtaaacacatgagaaatactggcagcaaatggaaactgagaaagaaataaatggaaattcaagagctagatccttcaatagcaaattytaagattcactggccagacttaacaacagatttgtgacagcagaaaaacaagtcagtgaacttgaaatgaaaataatacccagtctgaagaagaaagagaaaagaaaccacacaaccacacatacccctactataatctggggaaaacacatacacacacacatacgcacgcgcgcacacacacacacacacacacacacacacacgccctctgtaatctgctggcaataccaagcatgtaattgatgagaggcgaaagacactggggcagaaatagtattatggggaaataatgatagaaaattcccaaaatttggtgaaaaataaactgtcagatccagtgtctcaataaatcccactcagaataaatatagagaaaccaactct

SEQ ID NO: 745921 - DNA, 545 bp, Homo sapiens
gtagctattataaatatgtttaaagattttaaaaaatatatatatatatatatttatatacatataatgggtaaacacatgagaaatactggcagcaaatggaaactgagaaagaaataaatggaaattcaagagctagatccttcaatagcaaattctaagattcwctggccagacttaacaacagatttgtgacagcagaaaaacaagtcagtgaacttgaaatgaaaataatacccagtctgaagaagaaagagaaaagaaaccacacaaccacacatacccctactataatctggggaaaacacatacacacacacatacgcacgcgcgcacacacacacacacacacacacacacacacgccctctgtaatctgctggcaataccaagcatgtaattgatgagaggcgaaagacactggggcagaaatagtattatggggaaataatgatagaaaattcccaaaatttggtgaaaaataaactgtcagatccagtgtctcaataaatcccactcagaataaatatagagaaaccaactct

SEQ ID NO: 745922 - DNA, 380 bp, Homo sapiens
caaactctgaagatacaaaagatgtactttaagccatctgcttaattagatactcagattaaaagacagactgacctcttcagatctaacattatcctgaggcaatagaatacttatctccctagcaaatctaaatgtctaccaattagaaaactgtaacatttccaagaaaatacrtatgatcttcccctcaaatactataatcaaaggcaaaaattaaaaattaaaacttactagccattttgctcagaattttacagcagttaatgagtttttcagttggtttccagttatactttgacaatgaaaaaatgattcaaaaccacaggtacattggtaagtggggttttaacttggcaatcacggattcttaaggttgg

SEQ ID NO: 745923 - DNA, 573 bp, Homo sapiens
ttagttatataggatttctgtccaaggtcctcccctccacttttggagcatatataggctaaagagtggaaggaaagggaggaaaaaaagaaaaatgaatgtaaaaattagcatatccattcatttttagagctctcttctcatgtactgaataaatggattaagttgtctaattattaggaaaactctccaactaaagtaaatagaccctatgataaaaaaatggatttgtgccasgcgtggcggctcacgcctgtaatcccagcactttgggaggctgaggcgggcagatcatgaggtcagagatcgagaccatcctggctaacacagtgaaaccctgtctctactaaaattacagaaaattagccaggtgtggtggcgggcacctaccaagtagttgtcccagctacttgggagcctgggaggcgacgttgcagtgagccaagattgcaccactgcactccagcctgggtgacagagtgagactccatctcaaaaaaaaaaaggattcgttaacactactcaaagaaatcagagatgacacaaacacatagaaaaacatcccatgctcat

SEQ ID NO: 745924 - DNA, 493 bp, Homo sapiens
acctgctccatgaatatttgatcttctgttataatcacacgtatctctgaggtgctctctctctactgtgtttttctgttgttgggttgggtaatttgtgttgtactacattcaaattcactgatgctttcttccctagggtgctgatgagcctgtacagtgagttttgtttttctcttcgtttttggctaatgctaaagcattttcttttaattctataatttcaatttagttcctatcttccatttatttgataactttctatattttyatttaattgtgtttgtgtttgatcattgaaacatttttataatggctgttttaaaatcctgatcagattattctaatatctgtgtcatcatggttttgctgtctaataattgtcttttttcattcaatctgagatcttcttggttcttagtatgataaataatattttattgacatgtggacattcggggaattatggtttgagacttaggattttatttaa

SEQ ID NO: 745925 - DNA, 493 bp, Homo sapiens
acctgctccatgaatatttgatcttctgttataatcacacgtatctctgaggtgctctctctctactgtgtttttctgttgttgggttgggtaatttgtgttgtactacattcaaattcactgatgctttcttccctagggtgctgatgagcctgtacagtgagttttgtttttctcttcgtttttggctaatgctaaagcattttcttttaattctataatttcaatttagttcctatcttccatttatttgataactttctatatttttatttaattgtgtttgtgtttgatcattgaaacatttttataatrgctgttttaaaatcctgatcagattattctaatatctgtgtcatcatggttttgctgtctaataattgtcttttttcattcaatctgagatcttcttggttcttagtatgataaataatattttattgacatgtggacattcggggaattatggtttgagacttaggattttatttaa

SEQ ID NO: 745926 - DNA, 598 bp, Homo sapiens
ggatggttctccaatacgatgcctagggaaaggcactggcttcagctggacgctcactccagcaggattctttgcacaatgctagcaaagatcagtgagaggaaggctggagccaggcactgcttcatgacagcttgaatttggcaagacgggggataagagttaatgatctccagccacagagtggcttaccatttcctttatgttttctgtaccttgttaacatatcagtgtatctgctgtaggatgagttctaagcctttctttctttagggaataaaaaaaaaatccaccccatgactgtcccatcactttacaaatttattatttacactcccactgactttaggagagaaaagctaacacttgtktgcatgcgtgtgacaacgattccttcaaaggatgttgggaatccaatctaacagggatcttatatacacagcaacacgtaacaaagggatttactgtcaaaacgtttattgcaaaatggagtcttagaacaaaggaaagcaaagaaaagttcacatcaaaatgaaatgtatgacaccaacttggatttctgaatacactgtggactttgtgctggaatatcaaattc

SEQ ID NO: 745927 - DNA, 613 bp, Homo sapiens
tcttaacatcttttatagtttatgtgtgaaaaggaatttgtgcttggctactggtactaagattgtacttcatctcaggaaaagcagaggggggcatttcacaccaaagccctggcaactgtaaggctttgaaagaaggcagcataaagtttgttttcatatatgaaataatgttgaggctaaaagttcaatrtatgtatagttgtgtcttaaggtcaaaaatttttgagataaggaaattcaaacacttggggagaattttaaaagtaaaagcactgtatgtgtgtggactcataagtgcaaaaatgaacctcaaaagtcttctagttcatataaatgtgacaaacaatttaaaagctgtaacagtctacaataactataaccaacatacatatatacctaacaccaacaaacatgtttatatacatttatatacacatgcacattaaaggagtgggagcagtgggctcctggtgagccactctgaacggtcaagccacgttcctaaaccacgctgctcatcttcccaagccctcttgttccagggaggtgcccgcaacgatggcctgctgcagaatacagagtggctttttcatgtttgatgggttgtaag

SEQ ID NO: 745928 - DNA, 582 bp, Homo sapiens
tagggtaatctcaaactcctgagctcaagcaatcccacctgtctcagcctcccaaagtgctgggattacaggcttgagccactgcgcctggccgcataatgttttcaaagttcactcaagtggtaagcatataagaagacttcaattctgttttattgccgaatactattctgttgtatggatatactacatttggtttattcagtccccagttgatagatatttggattgttcccagtttttggctattacgaataatgctcctatgaacatttgtgtacatgtctatgtgtgtaaatatgttaatttttcttgggtagatttcagggactgatattgcaggtccatatggtaagtttatgtctaacttttaaagaaactatcaatctgttttccaaagaggctctaccattttatattcctgccagcaaygtatgagggtttcagtttctccacatcctcaccaacatttgatattgtctttttttttttctgagaaaggggtcttgctatggtgccttggctagtctcaaacttcaaactcctgttgtcaaacagtccttccctgccatcctctgcctc

SEQ ID NO: 745929 - DNA, 600 bp, Homo sapiens
gatatgtaagatatatcaatattatcattcagtttttattaaaaaatctgtaattttgtttataatttttctttaagccatgagttatttagaattgttttgtgaacattttaggtatcttataaactgatttctaatttaattgtatgtttatctgagtagtactttggtttcaatatttaaaacatattaagyatgtgtgttttctgtcacagtatatagtctgagtggtgaatattccatctgtgcaagaaaaataatatgcactccactttattaaggatagtattctaatgttaattacatccctttagttattacttcaggtttcagtattcttacagagagaggggtgttgaagtctcaaactataattttgtatttgtctgtgttcattttcagttctgacagttgttgcttcacatatttttttcaacttgtcatatcaaccctgagagagatgttgcatttctatttacatttctatttacagttgcagatttgtctatttctccttttattttaaacatattgtttaatgtgggttgatgttctcttagatgcacatgcatttaacaattatgtactattaatgaagta

SEQ ID NO: 745930 - DNA, 602 bp, Homo sapiens
attctgactggtatgagatggtatctcattgtgattttgatttgcatttctctgatgatcatgatgttgagctttttttaatgtttgttggccgcatgtgtgtcttcttttgaggcatgtctgttcatgtcctttgcccactttttaatgggattatttttttttcctgtaaatttrtttaagctccttatagatgctggatattagacctttgtcagatggatagattgcaaaaaatttctcttattctgtagattgtctgtttactctgttgatattttctcttactgtgcagaagctctgtattttaagtaggtcccacttgtcaatctttgttttagttgcaattgcttttggcatctttgtcatgaaatctttgcccatacctatgtcctgaatggtgtcgcctaggtgtctttccagggtttttatagtttcgggttttagatttaagtctttaacccatcttgagttgtttttttgtaaggaagaggtcaagtttcaattttctgcatatgcctagccagttctcccagaaccatttattaaatagaaagtcctttccccattgcttatttttgtcaggtttgtcaaagatcaga

SEQ ID NO: 745931 - DNA, 622 bp, Homo sapiens
ttacattttctaaagcactattttatccttttgcaaatctctttattatttggtttagaaggagacattagaatttttatatctgaccttatattaatctgcagtgatatctcatgtagcctctggaaatatccactgtactcttgttaagagataaaaaaagtcaaatgacaccttagtattatcttagctttattgagatataatttacataccacatttacytgtttaaagtatgaaattcagtgtttttttagcatatttactaaattatacaataattaccataatcgaatttcagaacattctcatcaatgtaaatagaagctctatacccattatctgtcattccccatttccctcccacagcaacctgcaacaactaattttctttctgtctgtatagatttgcctattctggacattttatataaatactaacatacaatatgtggccttttatgacctgcttcttttatttatcatactgttttagaggttcctccacattgtggcatgtgccagtcctttttttttttttttgccaaacattttatcatgtgaatagatgacatctatctatttattagttgatggactaatgttggttgatgggtttttc

SEQ ID NO: 745932 - DNA, 583 bp, Homo sapiens
ccagatatataaaggaaatattattagagctaaagagagaggtaggccccagtacaataataactagagacttcaacatcccactttcatcattggacagattttctagatagaaaaatcaatgaagaaacatcagacttaatctgcactatagatcaaatagatctaataaatakttacaaaaaaattaatgtctcagaatacacattttttgggtatcttgtgttttctcaaggattggtcattctcaagaatagaccatatgttagttcccaaaacaagtcttaaaatattcaaagtaatttaaataatatcaaggaacatctctgaccagcataaatgaaactagaaattaataatggaaaaattttggaaacaataaaaatacatggaaattaaacaatatgctcctgaatgaccagttggtcaaagaataaattaaagaagaaattgaaaaaaattttgaaacaaaagataatgaaaacacaagatacccaaacttatgggatacagcaaaagcagtactcagggaagtttttagctataagtgcttacgtcaaaaaagagaaaaaaaacttcgaat

SEQ ID NO: 745933 - DNA, 625 bp, Homo sapiens
gaaattatgatttggctttataattgagagcacctgaatcttatgttttatcaaggttaatctgcaaatactgataatttccttttccactagactcacaagtattttgggggctgacacgctttcttctttgtttccctgagatcatcaactcaggaatcaaactgcttgggtttgattcctgctctaccagttcctagcttcaaaactttgkataatttcttcagccattttgtgcatctttttaaaaataaaatagcagcaactattatagggcttttgtgggaattaaaatcaattaacgaatacacgatatttaatataacccctgatacctagtaagcactcaatattagctgttgttttctgactattctgagactcctaaattctcatcaccataatccagggaggtgggtttttcggtaaaaattgacaatcatattgcaactactacttacggtatcctctgtttctaatgactgaagtcaatacacaaatactcagttataagccttttaacctgtatcattaaaggcatgtgatagctaattttatgtgttaacttggctgggtgccgagttgtttggtcacagaccagtctggatgttctatgaagtaattt

SEQ ID NO: 745934 - DNA, 573 bp, Homo sapiens
ttcctccaccatgcattacttggaagatgcagtaattttaattactgaaaggaccatctcaaatcatctttagtcacaacaaactgtaaacatttatagagcaatatatttgtaaaatgtattttatattggggaagtatgatacaatacagaaatcattgaaagcaagataccatgaccaagcaattaaccatcaattattcaattttaatttaatatataatagatctgaggcactgcctataaagtggaagatataattataatactayagacgtcattccagctttccagttgcttatggtccagcagggaggatgcacatgggaaaaataataactaatgacaaatgtgatgagtcttaacaaagaagaagagcatattgcaagggaatgtaattcactccagggttagtaaagacattatttaggaaataatgtttaaacagagacttatgagatgagtattacccaatcaaaaataaaagacagctttctaggccaagaacacaacatgtgaaaggttgttgataatgcaagagcacatgtgaagcacagaaaacattctgtgtgg

SEQ ID NO: 745935 - DNA, 583 bp, Homo sapiens
gttgagtggacagtgatttcttggaatgctgggatccataagtctctcagcctgcaggggggctgtgtgtgtgttggggcatgtcttcaacacttggtcaggccatttagaatgctgtttgtacagagcctcaatgtcagccaaaggtgagagtagggtcttctccagtctttcctgaaaacacacacagccctatgcacatgtgtgacctctagattcccatgaatatgtyggataatttcaaaacccctatggtcattttatttctcagcttttctttttaagctttttggttagacttttattttcccaactgtaatctctcacttcaggcagtcttgttatcaacaaacaatccctgaggagaggcttttagaactaggtgagtaggagtgaggaaaaataaagacaagcatatttagtgaggtcttcctaggagtcagagacagataaaaaaaatgactattctttgaagatgagggttttcaagagcttgatctgttctctctttcgtaccaaaaatgcaagctttagtttttaaggctactggagagtggtagaggagactaggttaagttaaaat

SEQ ID NO: 745936 - DNA, 643 bp, Homo sapiens
gaatagaggaagaatttcttatgtgctggtaagattgtagataatcatttctgcataattttcatagctggattgctttaataaagccatttaaaggttaagttctagatgcttcatgttgcttatcaatgttttaaagctaaaatagaaaattagctgttaagttggctcaaccggaaattcagtatatcctttaaaaagagaaatttagtaagcagtgtgtctaaagaatgacatatggttgggtacagtggctcgtgactgtaatcccaacactgtgaggctgaagtgggaggatcacttgagcccaggaatttgagaccagcctggaaaacagtgagacctgcatctctacaaaaaaacaaaaaattacccaggcatggtggcacacaccttgtggtcccagttgcttgggaggctgaggtgggagaatcacttgagcctgggagatcaaggctgcaytgaagtctcatcacgccactgcactccagcctgggtgacagagcaagacctgtctcaaaaaaaaaaaaaaaaaaaaaaaagaacccccccccccaacaaaaaaggcatgtgatcagtaaaaaagacattatttgcttatattgtagagtggttctaaaatatagattttacattgagaaat

SEQ ID NO: 745937 - DNA, 643 bp, Homo sapiens
gaatagaggaagaatttcttatgtgctggtaagattgtagataatcatttctgcataattttcatagctggattgctttaataaagccatttaaaggttaagttctagatgcttcatgttgcttatcaatgttttaaagctaaaatagaaaattagctgttaagttggctcaaccggaaattcagtatatcctttaaaaagagaaatttagtaagcagtgtgtctaaagaatgacatatggttgggtacagtggctcgtgactgtaatcccaacactgtgaggctgaagtgggaggatcacttgagcccaggaatttgagaccagcctggaaaacagtgagacctgcatctctacaaaaaaacaaaaaattacccaggcatggtggcacacaccttgtggtcccagttgcttgggaggctgaggtgggagaatcacttgagcctgggagatcaaggctgcactgaagtctcatcacgccactgcactcsagcctgggtgacagagcaagacctgtctcaaaaaaaaaaaaaaaaaaaaaaaagaacccccccccccaacaaaaaaggcatgtgatcagtaaaaaagacattatttgcttatattgtagagtggttctaaaatatagattttacattgagaaat

SEQ ID NO: 745938 - DNA, 585 bp, Homo sapiens
tgacaccgctgcatatgttttaatgactagatccaaactgtgttgttcttaaatcaaaaattggataatttttaatatttatgtattaatcacatagtatgctctctgaagttctcttaagccttcagtttatactcttaattttctttctgagctggggaactgactttgcactttggttacacagaacattggtttccaatttagtttaactgaaatttgctgctgatatgttgagtttgttctttaaaaaatatctcatatatctcgtctttcctccttagaagaacagacctaactagcgaatgtatgaatgaaaatgcatctatttcagagccgacatgaagagtttagtttttttactttataaactgtgaatatgagtatgccagctgcataygatgtaactaatcatatttaaatatatttcactttctctttgacttgagaccttttgaagtctgtataaacttgttttgaaatatagtctccacttacaaatgtcataacaaaatacttttttgcatgataaaaaattgattacaaaaggcatattctttcatggtttctgcaatgagaggaagt

SEQ ID NO: 745939 - DNA, 647 bp, Homo sapiens
ttaattattaatattccttactggggaaagaactcagcaatatttctcttactcgtttttggcaataagagaaatatggctctgtcctgcgtggcttccaggcagtcagacctaatggttatctcccttgttccctgaacatcgctgttatcctgttcttttttcaaggtgcccagatttcatattgttcgaacacacatgctttgggaacaatttgtgcagttaacgcaatcatcacagggtcctgaggtgacatacatcctyagcttataaggatgatgggattaagagattaaagtaaagacaggcataggaaattataagagtattgattggggaagtgataaatgtccatgaaatgttcacaatttatgttcagagactgcagtaaagacaggcataagaaattataaaagtattaatttggagcactaacaaattgtccatgaaatcttcacaatttatgttcttctgccatggcttcagccggtccctccgttcagggtccctgacttcctgcaacatctctccctttctttttatataaatgtgccatggtgatgaaggcttgttctctcgattttgacgcaggattctttgactggtccagcacactaaagacaagccgattaaacagggaaacataa

SEQ ID NO: 745940 - DNA, 645 bp, Homo sapiens
tcccttctctgactctcttttcggactcagcccacctgcacccaggtaattaaaagctttattgctcacgcaaagcctgtttgatggtctcttcacagggacgcgcatgaaactgcctttgttcattcctgggcacaggccaaactaactttgggagaaatttagtttatagtttaactttgaaataaagatgataatgaaaccatctttgcaaaaattataacaatgagaaaattaatgacagtaaaagatatctaattggccaggcgcagtggcttatgcctgtaatcccagcacattgggaggccaaggcgggcagatcacaaggtcaggagattgagaccatcctggctaacacggtgaaaccccgtctctactaaaaatacaaaaaaattagccaggcatggtggcaggcgcctgtagtcccagctactcsggaggctgaggcaggagaatggtgtgagcccgggaggtggagcttgcagtgagtcaagatcacatcactgtactccagcctgggctacacagcaagactccctctaaaaaaaaaaaaaaaaaaagagatctaaccaatccccatctttcctttaatctccaaactgcccttaatcattcctgggcttgggccaacctaactttgggaaa

SEQ ID NO: 745941 - DNA, 579 bp, Homo sapiens
cctacgcgttaacagtaaatgttttgagtatttatattctaatccagagtcccaccacaatcattcagaggttaggggccagattcctaaaccaatagaagatcaattattaaatacaatgttagaaatcaagacaagaatatactgctaaaaaaaaaactttatgttttcaaatttccaatccattcttcaaaacaaagtattaccttatgtcagaactctggttcccaactyccttatagttctctagctcattaatatttcaagagaagggagagagctaaacatgcattggcaattcatttaatatctatagttttattaataaacactggaaaatacaaactcctatttattttccataaatgacatgacaaaaattctttattgcattggggtgcgagtggggatgtgaacgggacgagggacgaggtataaaactagttattgcacactccaaaagctctgatttgaaaatatagtttaagccctggtttacagaaacactttaaaactctagtcttaatctagctaaagctccttaccatcttggcaacaaaagcaatttgagcaatttga

SEQ ID NO: 745942 - DNA, 617 bp, Homo sapiens
ttaattacttgatgcaaaagcataatggaatagtataactggaattggtgggttgtactgatttacaataagatatcaatcaaaagtaactcttaagtctttaatatttgttttccagggaaaagtctattaaaatagatataacaaaggccataaaataatccagtctgtgctagtctaattgtttaatgctrgaatagaaaacagaactacaagtagccagaagaatgtgcttttgctttgcttctctcccctctcctcttccttcctcctctctcattacaggaaacagctctaaaactcaatctagaccaagaggaataaaactaccatccctttgacacattcaaaagttgattaagttttcaaaaagcttagtaaaataaaaggcatatgtagctgactttgagggactagtctaaaattaaagaaattataaatgattcctacaggactttcacgcaaagtaaacttacatgggagcaatcaagcaaggctgtaagtaaaaataattccaaaccttgagataaacagatatttagcataggagagaataataaagtgggtcaattcagttctgagaaaccttaaaaattgttattttcttctaattttaa

SEQ ID NO: 745943 - DNA, 617 bp, Homo sapiens
ttaattacttgatgcaaaagcataatggaatagtataactggaattggtgggttgtactgatttacaataagatatcaatcaaaagtaactcttaagtctttaatatttgttttccagggaaaagtctattaaaatagatataacaaaggccataaaataatccagtctgtgctagtctaattgtttaatgctggaatagaaaacagaactacaagtagccagaagaatgtgcttttgctttgcttctctcccctctcctcttccttcctcctctctcrttacaggaaacagctctaaaactcaatctagaccaagaggaataaaactaccatccctttgacacattcaaaagttgattaagttttcaaaaagcttagtaaaataaaaggcatatgtagctgactttgagggactagtctaaaattaaagaaattataaatgattcctacaggactttcacgcaaagtaaacttacatgggagcaatcaagcaaggctgtaagtaaaaataattccaaaccttgagataaacagatatttagcataggagagaataataaagtgggtcaattcagttctgagaaaccttaaaaattgttattttcttctaattttaa

SEQ ID NO: 745944 - DNA, 624 bp, Homo sapiens
ttattgatactgtcatctattcacaagattaattgtttgtctgaaatggcagtaaccccaggtgcagacctcagtctatagtccatatcaagcagttcacctttttcttgtattgtcaatgacttttctcttctctgcttcttgggagcatttccagcatcactaatagcactttgtataggtcccataatgttattttttattttattattattgttttagagatagggtttagctctgttgctcaggctggagtgcagtggtacaatcatagctcattgcagcctggaactccttggctcaagttatcctcctgcctcagcccctcaagtagctaggactacaggtgtgcaccacratacccagctaattatatatatatgtttttttttgtagatacagggtcttgctgtgttgccaggctggtctcaaactcctgggctcaagcagtcctcctgccttggcctcccaaagtgctgggattacaggtgtgagccacttgcctggcttatgttattcaacatttatagtattgcgaccatgatgaaaaatattaatatgcaggaacctcaagggattactttttacagcaatacacgatttactggagaaatgaactgctca

SEQ ID NO: 745945 - DNA, 630 bp, Homo sapiens
tatgaaatagctaagaatactaaagtggtttcagatactataatattgagaaaaaactgttaattctgcaaaataactactttataaataaaaatatttacagtaggacctcacagggattcagttattacaactaaagcttctgtagtgctcatctaaggaatggctctagcagttctccaaataatatctactttaaataaactcactgaatccacttgtaaattatttccctttggctgtgtcattattcactatgctttcaaggaacatggtgatgaaagaagaaaaatacctctttctaacataaccatactggcaagaacatcaacattatcagtattcaaagaatgtcttggcaggttaaaccttcataaaaagaargaacactatctaatccaagttatcaaaatagcaatagtacttctcgtattatgcgcaatatgattgtttgtttctaatgcagaaaaaaaataaagacaacaatatcgtcaggtttaaattctaagcagacaaaaaaattctttacaaaaaagtacatatagaatgatgaaagtaggcatgcttaaaagaaaaaggctaagagcaaagtaggactcaatgttcaaagagatttatagtaacatgtca

SEQ ID NO: 745946 - DNA, 527 bp, Homo sapiens
ttcacttattatattttctaactcgaaagatttctcttccactcacttttctttctttctttttttttttgagacggagtctccctctgtagcccaggctggagtgcagtggcgcaatctcggctcacggcaacctccctgcttcccgggtttaagtgattctcctgcctcagcctcctgagtagctgggactacaggcgcatgccaccatgcctggttcatttttrtatttttagtagagacagggtttcaccgtgttagccaggatagtctcgatctcctgacctcgtgatccactcacctcagcctcccaaagtgctgggattacaggtgtgagccactgcgcccagcccacttttcttttacaaatatataattcctatttctctttatattttacctttttcatctatttttccttcctaattattatgttccttctgatgttggtctttttttaatttagggacaaactttttattactaaatatcctctggatccagaggtcatagggttatttttatta

SEQ ID NO: 745947 - DNA, 532 bp, Homo sapiens
aatgataaagtggcactatgtaccaggcacctgctgtagattaatttctttcaaaatcccatgaaatagtttctgtcctcattttacaggcaactgggccacagagtttgggtgctttggaggtcacacaactaggaaaagcaaagctaggattagaagtcaggacatctggcactggagtctgttttyttaactgctagaagagaaaataactcacattttctctagggtgcactgttggcctaaacaagggaaaaaaggaaaattaaaacctaaaagttaagaaaattagtcatacggttagagaggtcagagcttatttctgttatacactggaatccagtttgaacataaaacctttcacatcaggtattatttttcttacaattccaattatgttcagcaagtatatcccaatgctcttctgtgctgtcaagacaagcaagatcctattgtgtgtgctatcattggtagattcctcgtctaggcactcttggccagtgttgagtccgaatgctgttattatgtgaaa

SEQ ID NO: 745948 - DNA, 589 bp, Homo sapiens
agtatacaaaccaatacaaatggatcccactgctctgatgacactgagaagtgtgccttcagcaatcgtactaattcttagtaagcgaaccaatggtgcaattccattcccttcacatatttgattttgatgcatcctgctgtccttacttagagctatgacagcttcacctcctgataaagaaaagcaagatacatgtatgatactccagtgccctgttctacattatgcagaggacacggtggctsacacttgtaatcccagctacttgggaggctgaggcaagaggatcacttgagcccaggggtttgaggctgcagtgagctataattgtgccactgcacaccaggctgggcaacagagcaagatcctgtctctaaaaaataaaaataaaataaggaaaataacttaccaacatactgcattttagctgatggtgacaaaagcatatttattataaagctgtatccaatttgttctgccatatatttttgttgttttagtgtttgtcctgccaaggcccaaagtgcaacagctccttgttccttaacatctatttgaaatgcctatttttaaaaatatttcatta

SEQ ID NO: 745949 - DNA, 609 bp, Homo sapiens
tcggaagttccttatgacaaagaatagctgaaccataaaaacttattcacaaggctaaggtgggaggatcacttgaggtccggagttcaataccagactgggcaacatagtgtgaccctgtttctataaaaaaaaaataaaaaattagctgggcatggtggcacatgcctgtagtcccagctactcaggaggctgaggtgggagtggctcaccctgcactccagcttgggtgacagagcaagaccccctccctaaaaagaaaaaaaaaaaaacaccaaacttattcacaaaaartgtacctctttaaaggaatgctaactctctgatattgacatttttaaaataaagcattcaaggaaatatttcaaaaaactaatgttttaaaattcctgcactgaatatagctaaaaagcctgcagtgttactaatgtaaacatcatcttgtttattttagtttatattagatgccttcgatacagatataaatcttagctgttgattaatgcaaggatgctatttcactgcctgacctgctgaatagttagtatacacaaccgtaaaaagatcacttcaggaaatcggtcctagaaaaagctgtgaaacatgaga

SEQ ID NO: 745950 - DNA, 609 bp, Homo sapiens
tcggaagttccttatgacaaagaatagctgaaccataaaaacttattcacaaggctaaggtgggaggatcacttgaggtccggagttcaataccagactgggcaacatagtgtgaccctgtttctataaaaaaaaaataaaaaattagctgggcatggtggcacatgcctgtagtcccagctactcaggaggctgaggtgggagtggctcaccctgcactccagcttgggtgacagagcaagaccccctccctaaaaagaaaaaaaaaaaaacaccaaacttattcacaaaaaatgtacctctttaaaggaatgctaactctctgatattgacatttttaaaataaagcattcaaggaaatatttcaaaaaactaatgttttaaaattcctgcactgaatatagctaaaaagcctgcagtgttactaatgtaaacatcatcttgtttattttagtttatattagatgccttmgatacagatataaatcttagctgttgattaatgcaaggatgctatttcactgcctgacctgctgaatagttagtatacacaaccgtaaaaagatcacttcaggaaatcggtcctagaaaaagctgtgaaacatgaga

SEQ ID NO: 745951 - DNA, 676 bp, Homo sapiens
aacatggatgaaccctgaagacattataagagaaataggccagatacaaaagaacaaatattttatgagtccacttatatgtgatacctagaatagtctaattcatagagacagaaagtagaacagtgagtactaggggatggggggaaaaggcattattgtttaatgggtacagagtttgaaataatgaaaaggttgcggagatgaataatggttatagatacacgacaatgtgactgtagctaatgccactgccactgaattgtacatttaaaaataattaaaatgatamattttatgttatgtatatatatatttttttgagacagaatctcactctatcttgcctaggtgggagtgcagtggcatgatctcgggtcactgcagcctctgtttcccgggttcaagcaattctcctgcctcagcctctcaagtagctgggactacagacgtgaggcaccatacccagctaattttgtatttttagtagagacggggtttcaccatgttggccaggctagtctcgaactcctgacctcaggtgatccacctgcctcagcctcccaaagtgctgggattacaggcgtgacgacctcgcccggcttatgttatgtatattttaccataataaaaataattaaaaccatacttcaccaaatactgggttagttttaac

SEQ ID NO: 745952 - DNA, 642 bp, Homo sapiens
caagtctgaagcctagccaaagaaaaaaaaaatcattagacttttaagactcaagaataattctctttgactccattccctgacctctgggcccactgcgtctggcatattttgctgagagcatgtttctgggactcatccatgttgatatttgcatcagtagttaacttttttattgctgtgtactattccattggatggatatactatacttttttttatacattctatttgctgatggacatttgaacatcagttttttttcagtttctgtatattatggataaagttgctatgaacattgtgtacaagattttttgtgacatatgtttttatttctcttaaataaatgtcacgaagtgaaattgttaggtcatactgaaagtgtatgtttgactttataagaacctagtmaatgcttttccaaagtggctgtacaatatacacttccaccagtagtgtgtcagttacaacagcttcatgtactcctcagcatttaggattgtcggacttttaaaattttagctagcctagtgggtgtataatagtaggtgtcacattgcagtgttacttttgtatttctgtgatgagttttgatgtggcgtgtcttgttatgtgttgataggtcatcggtacatcttc

SEQ ID NO: 745953 - DNA, 522 bp, Homo sapiens
tcagagtgttgactttcatgctcagggtggttgactcatggcatgaagatggctaccgtagctccagacatcataccttgctcccacaaagccacagacagaaaggaagggcacatggagaaaagtcctgttacttatggttcaagtagctgtgagtgatggaaaacccaaacaacagtggcttaaataaaagaaagggtcattttttttgagacggagtctcaatctgttgcccaggctggagtgcagtggtgcaatctgggtcactgcaacctccgcctcctgggttcaagcgattctcttgcctcagcctcccgagtagctgggacgtgacaccacgcccagctartttttgtatttttagtagagatggggtttcatcatgttggccagaatcatctcaatctcttgacctcatgatctgcccgcctcggcttcccaagtgctggaattacaggtgtgagccaccacgcccggccagggtcgtttatttttatgtgaagttcctggcaggtggtgcag

SEQ ID NO: 745954 - DNA, 624 bp, Homo sapiens
aaattgatcatcttgtaactttttttttagaaaagttatccttagtattatattgtggttatgcacctgggagtgggcgtaattgccttattaaactatttttaatacaattttatattacatttgtgtgtgtgtgtatatatatcaaatataagtgatttggtcatacttgtacataaacatacatgactgtcatgatttctggggcataaactgaagataattttattgaaaaataagacatttcctttttttttgttttgtaggtgactgtgaagtcttgtgattgcttgaatggtggatcatgtgtatctgataggaacttttctccagggagtggagtgtacctgtgtgtctgcttgcctggcttccatggcagcctttgtgaagtggacattagtgggtgccartccaacccttgtggtcttggcagctatattagtggttttcacagttattcctgtgattgtccacctgagctcaaaggtaagattttgctcctcataacaaattagaaagaaaagctccttgaaacacatatctacagattacttaagcaaatgtgtggtcctaaagattttagtacacatctttacaattttaataaaagttattacaaatata

SEQ ID NO: 745955 - DNA, 635 bp, Homo sapiens
cttctgaagtaataaaacaaattaatataaaattttttttgaaggaaaagaattaggccaaaagaaaactgagagaaggaaacataaaacaaagccaggagtctaatcaggaagatggccaagttttccaaaccaatgtaagaagtgctgtgggaatccaaagtgtctgtcaacagataactggataaagaaaatgtggtaaacatataaatggaatgctattcagccacacaaaagawtgcaatcatgtcttctgcagcaacatggatggaactggaagccattatcttaaatgaaacaactcagaagcagaaaaacaaattccacatattcgcacttataagtggggactagagtgtacacatgggcatagagtgtggaataatagtcgctggaggctcagaaagatgggttggtcaggaggatgaggtgtgagaaattacttaatggctacaatgttcactaattgagtgatggttacctaaaagcccagacttcactaacatataatatatccatattacagaactgcacttgtatcccttaaatttatacaaagaaaataataaaatgttttatttgtcattattaagattaagaagagctatttcatgtttgtaatttaatggttatgg

SEQ ID NO: 745956 - DNA, 603 bp, Homo sapiens
aactttcgccggatctgcaaggtatgctagccgcaagtggacctgaattctcagaacagagttgaattccatactgcacgaattccacctccaaccggaccctcagaaataattcattggtgaacattttatccctacaataaatcaccaagttaagttttgtatatccgtattatactgtattatggtttttgtatatatatgttagaatcagttttggcactgtaaaagagatctctgtggagcgaatactcccctcctacttctttaatccatgacaaagaacatttagtttaaaatacagtgaagttaaaccaaaactactttcattagccctttttgcttgttttttgtgttcatacagataggaatattaatgaaaggtgacttkttcttatattgcaagtttccttacgtttttcagaaaaagtctgatctgtgttcaaccatctgcagcttgaaaaaacattatgtacaacatttatagcagtccagggtatagttttgtcttatcattttttgatcttaactcattttactgatgtaagtttgctttgtataaggggaatacaaacactatcctatacaaaacttaaaaataaa

SEQ ID NO: 745957 - DNA, 510 bp, Homo sapiens
ttctgtgggacaattggaccagtttcaggtatactacattttctttatccaatctactgttgatgggcaccatggctgattccatgtctttgctactgtgaatactgctgggatgaacgtaccagtacatgtgtgtttttggtagaataattyattttccctgggtatatacccataatgggattgctaggttgaatgatagttcttttttcagttctttgagaaatctccaaactgcttttcatagtgactgatttaatttacattcccaccaacagtgtataaatgttcccttttccccacagcgtcactgacatctgttgttttttgactttttaataatagtgattcggactggtgtaagatgatacctcattgtggttttgatttgcgtttctttgatgattagtgatgttgagcattttctcatgtttgttggccatttgtatgtcatcttttgagaggcatctgttcatgtcttttgcccacttttcaatggggttgtttttt

SEQ ID NO: 745958 - DNA, 510 bp, Homo sapiens
ttctgtgggacaattggaccagtttcaggtatactacattttctttatccaatctactgttgatgggcaccatggctgattccatgtctttgctactgtgaatactgctgggatgaacgtaccagtacatgtgtgtttttggtagaataatttattttccctgggtatatacccataatgggattgctaggttgaatgatagttcttttttcagttctttgagaaatctccaaactgcttttcatagtgactgatttaatttacattcccaccaacagtgtataaatgttcccttttccccacagcgtcastgacatctgttgttttttgactttttaataatagtgattcggactggtgtaagatgatacctcattgtggttttgatttgcgtttctttgatgattagtgatgttgagcattttctcatgtttgttggccatttgtatgtcatcttttgagaggcatctgttcatgtcttttgcccacttttcaatggggttgtttttt

SEQ ID NO: 745959 - DNA, 614 bp, Homo sapiens
agaaataataacaagaattataacctggctaacgattttttagccattactatgtagaagttgcattatatacattactttatctatacctcactatggcactttgaggtgggtaccacttccacctaatataaaagagaaggatgttgagtgccttgtccaagatcatgcatttagtaagggccctggttcttcccaagtcatacatagtttcttcttatttttcctgggttatttttctatttaattctattttttatctgaaaaggattttgataaatgacttcaagtgaggtttaaactttctttctttctttyttttttttttgagatggagtctcgctctgtcgcccaggctggagtgcagtggtgcgatctcagctcactgcagcctccacctccctggttcaagcaattcctctgcctcagcctcctgagtagctgggattacaggcgcacgccaccacacccggctaattcttttgtgtttttggtagagacagggtttcaccatgttagccaggatagtctcgatctcctgacctcaggcaatccgcccacctcagcctcccaaagtgctgggattgcaggcatgcgccaccgcaccccaccaa

SEQ ID NO: 745960 - DNA, 635 bp, Homo sapiens
caaaatgttattactaaaaaatacaataaattccaagaactttaaattataatgaataagaagaaaacaggtttgtgtttgtgtgtgtacatttgtatgtgtgccaatgtcagtttacagctgtaaatactttttaaaaagacaaagcatgtaacttacagacctgacatctgattctcatgtgactcactctgatttattgtgtgccatatggcttatttcaccatatttttaattctggcatgctatgaaacacctttattaattatattatagaaaaacagtccctcattcatgtgaaaatagaaaatattttgtttcacctacaggccccacaaaaagactaatatttcaatgaataattttaatctcttcctatcctttaggtagaaataataaacttaatctatccttgggcttctaaattttttcctctttttagttaataactatatatttagagaacacgagggaaacattttaaaatagcaacttrttaaaggttaatatatcaagaataacatgatttatttttgcctgtctttattttcttattttattttgataataatgtcaatacatgctttgaaataagtgttttgggaagtctgatataaaattctaaaaagctaaaa

SEQ ID NO: 745961 - DNA, 600 bp, Homo sapiens
gaaataaaatatgttgctaatacaaacttgggaaatacctgaagagtgatgcctcaaaaccaggcattggcactcaaatggcatttgctgtcttgctttaggagcctcatttggccagaccaggacagtccctattgtaaaatgacasggacatttgagcgtttttaagatcagatgtgatacctcaggacccctcgcttggcatatggggatgtaggggttaagtgtgcggctgtacctgtccaatccataggtcttggttgtgggttatcagggaagagaaaaagaaggactccttccatgtgcacagaggtctcaggacatggcccttctctgcttcacaaaagcccaagttcttccgcaaagaagagagagagtggcataaagaactgccaggtcaatggtctcatccaagtcatggcgtttcctttatttcctcattcattccttcaggtgtgtgatatgttagcaagtccctgggtgcaaagatgtgaataagatatgcctcttgcatcaaagggccccccatctagtcggcaaaagaagtaagtaaatagaccaggtagtgtgaagtgtcagctaagaggttgcatgtggcat

SEQ ID NO: 745962 - DNA, 597 bp, Homo sapiens
gcatgggggagtcacttcaacctgctgagcctgggattccccagcagtacaggtgaatgctgacacctgtctcagaagatgggtggggtgtggatgcgagggtgccttataaactgttaagcgctctccagttggaattatttttactctgtaaagctctggccatgttgtgaatagggcaagaagtagtagagtccataaggaaagaaatgcatttcatggaagatgctctgctttgaagttcataggtgtttcaatggtggtggtgatggtggtggtgtttcatttttgatgggtttattgtttcagaaaatccacctgcatcctcaatcatccttacttatgcactaaaatgagtctacagagagcaggctggcaggtccccttccttgccctcaggtggtaacacctgcctgatcygcacatgacactccagacacatctgttcccactgctcccccacaccccactaacatggtcatagccaagggctgctgccactcggaagccaatttacaaggaagcccgtgaggcttaggctccaggacccctcacttgggcagaacctttccaaagctccaaaccccattttgtatt

SEQ ID NO: 745963 - DNA, 619 bp, Homo sapiens
cctacaaccacctgatcttcaacaaacctgatgaaagcaatggggaatggattccctgtttaataaatggtgctgggagtacttgccagccataagcagaaaattgaaactggaccaccttccttatgccatatacaaaaatcaactcaagatggattaaatacttaaatgtaaaacccaaaactataaaaaccctagaaggaaatctaggcaataccattcagaacataggcacagttaaagttttcatggtgaagatgccaaaagcaattgcaacaaaagcaaatatagacaaatgggatytaattaaactaaatagcttctgcacagtaaaagaaattatcatcagagtgaacagaaaatttacagaatgggagaaaatattggcaaactatgtgtctgacaaaggtctaatatccagcatctacaaggaatttaaatgaacttgtaagaaaaaaacaaccccaataaaaagtggttgcaaatgacatgaacagacacttctcaaaagaagacatacatgcggccaacaaacatgggataaagctcaatatcgccgatcattagagaaatgcaaaatcaaaaccacagtgagataccatctcacaccagtcagaat

SEQ ID NO: 745964 - DNA, 619 bp, Homo sapiens
cctacaaccacctgatcttcaacaaacctgatgaaagcaatggggaatggattccctgtttaataaatggtgctgggagtacttgccagccataagcagaaaattgaaactggaccaccttccttatgccatatacaaaaatcaactcaagatggattaaatacttaaatgtaaaacccaaaactataaaaaccctagaaggaaatctaggcaataccattcagaacataggcacagttaaagttttcatggtgaagatgccaaaagcaattgcaacaaaagcaaatatagacaaatgggatttaattaaactaaatagcttctgcacagtaaaagaaattatcatcagagtgaacagaaaatttacagaatgggagaaaatattggcaaactatgtrtctgacaaaggtctaatatccagcatctacaaggaatttaaatgaacttgtaagaaaaaaacaaccccaataaaaagtggttgcaaatgacatgaacagacacttctcaaaagaagacatacatgcggccaacaaacatgggataaagctcaatatcgccgatcattagagaaatgcaaaatcaaaaccacagtgagataccatctcacaccagtcagaat

SEQ ID NO: 745965 - DNA, 603 bp, Homo sapiens
ctaacttggggtgctcctcaaaaatacagattatggcactactccaaccctcctggatcataatttgggcaaggtgaacgttattggaaatctgtatttttaacaagagtgtaggcgattgttttataattagaaaagtcttgaaatattgaactaagccaattcttctcagaaacattctggagatgatctttgcttttgaagatcatttcctctacttccctactctttcacctttcagaaccaaagaacaatccacatattctccaacaacacatcayaaccaacacttggccttctttttcctcctacatgcagagttcatcagattacagtctgcatagatctctgctgtgttttggaatagcaagactttttaagtatattttttcactaacaactcctgtggtgaggggttcatgttgctgaggcctctgcttagctttaaggaaatatagaagattaaaatttggttaattctggctttacatttaatacattgggataggcctgccattttcccctataataaatggatagaggacataagttgttggaataatttccaagcactcatttatacattgtattttcaggtaatac

SEQ ID NO: 745966 - DNA, 603 bp, Homo sapiens
ctaacttggggtgctcctcaaaaatacagattatggcactactccaaccctcctggatcataatttgggcaaggtgaacgttattggaaatctgtatttttaacaagagtgtaggcgattgttttataattagaaaagtcttgaaatattgaactaagccaattcttctcagaaacattctggagatgatctttgcttttgaagatcatttcctctacttccctactctttcacctttcagaaccaaagaacaatccacatattctccaacaacacatcacraccaacacttggccttctttttcctcctacatgcagagttcatcagattacagtctgcatagatctctgctgtgttttggaatagcaagactttttaagtatattttttcactaacaactcctgtggtgaggggttcatgttgctgaggcctctgcttagctttaaggaaatatagaagattaaaatttggttaattctggctttacatttaatacattgggataggcctgccattttcccctataataaatggatagaggacataagttgttggaataatttccaagcactcatttatacattgtattttcaggtaatac

SEQ ID NO: 745967 - DNA, 624 bp, Homo sapiens
gcattgtttcacttaaaattgtagtttccaagagcctatcaaggatgttaagtgagaacttactgtggtttctgttgctgagccaatattctattattggatgtaccaccattcaccattatccattcatcagttgttcctactttttggctattatgagcaatgctgctatgaaaatttattctaaagtctttgtgtggrgacatgttgttattattcttgggaatatacataggtgtggaattaaggagtcaaatagtaactgtatctttaactttccaaggaactgccaggtgttttccaaacctgctgcatgatttcacattccaccaacagtgtctgaagtttccagtttctcccctttttgcaaacacatcatcaggtgagtgtgtgtgtagccatcctagtgggtgcaaagtggatctcactgtggctttttaaatttgcatttcctggatggctaatgatgttgaacaccttttcacatacttattgaatatttgtgtataatctttagagaatatcccttcagataatttgcccatttaaaagttggattatttgttatcttttctatcattgagttgtaagagttctttatatgttctagaaacaagttcccta

SEQ ID NO: 745968 - DNA, 615 bp, Homo sapiens
tttcagagggcaagggagttttctcttggcccctatggtggtttcccatctatctgccttgcatggtgacagccagcctttagcaacttctaaaagaaagaggatctatcagctcagtctgagcaggcatgataaggtctcctyccttgcctggaggcactcatctgagcctccaaaccaccccattagtgaattctcagaaagaacattctgctgagaaagaggaggataggttcccagtcaaggctgggagcttgtagccactaatctcttggtgtctagatcaggtacaaggctgtctctctgtccccaccctctctggtcccctcctcttactgtccactcctttagaaggagcctgtggcagcatgaacaaaataaacttctccttcttgtccacatccatcataaaatatgcatagctggacttgggttttcttaaaagctaccaacttgccaatcatgtaaatcaacctatgtttctgcattaattgaaagaaccagaaaaaggccaaaagagaagatatttgcaatacacatgaaaaggtgatgtttccttttttgtataaaaggttcacataaatcaaaaagaaaaacatttgccactccttccac

SEQ ID NO: 745969 - DNA, 610 bp, Homo sapiens
ataaactattagaacttttttttaactccccaagctgcaacattaaatgcagagtccctacttagtgggcccaaatcaataaattcagcctgatccaactcatgttccttccaccattatcccacacccttaatatccattcccatgcctgtgctccagattgcagtttacataaattagagaactcaaacagttcttttcgaatgtagtgcacctcctcatgggtcacactctgcacctcacctctaggggcccaccaagcctttagtctagttataggcctagaagcaaacagaggtgttgggggtggcttctgaggagaatcaacattattttgcctggcaactgcctcaggcagcgcagggtttatctcttcagacaaaggtggaaaggctgatagcagcatgggtgggggagaggackttgccactactggggatggggaagctgttacttctggccaaaaatgttcatcagagtttattaactcagtgtccccagcttcatcagggtcctcccacatgtccccattccaagttgcagggtcccattcttttccaatcaatgccctcattctaacagtagacacctggtgaggctgtgcatgcat

SEQ ID NO: 745970 - DNA, 610 bp, Homo sapiens
ataaactattagaacttttttttaactccccaagctgcaacattaaatgcagagtccctacttagtgggcccaaatcaataaattcagcctgatccaactcatgttccttccaccattatcccacacccttaatatccattcccatgcctgtgctccagattgcagtttacataaattagagaactcaaacagttcttttcgaatgtagtgcacctcctcatgggtcacactctgcacctcacctctaggggcccaccaagcctttagtctagttataggcctagaagcaaacagaggtgttgggggtggcttctgaggagaatcaacattattttgcctggcaactgcctcaggcagcgcagggtttatctcttcagacaaaggtggaaaggctgatagcagcatgggtgggggagaggacgttgccactactggggatggggaagctgttmcttctggccaaaaatgttcatcagagtttattaactcagtgtccccagcttcatcagggtcctcccacatgtccccattccaagttgcagggtcccattcttttccaatcaatgccctcattctaacagtagacacctggtgaggctgtgcatgcat

SEQ ID NO: 745971 - DNA, 607 bp, Homo sapiens
gggacatacctcaatgtgataaaagccatctatgacaaacccacagccaacataatactgaatggggaaaagttgaaataattccctctgagaatcagaacaacagaaagatacccactctcaccacttctacttgacatagtactggaagtcctagccagagcaatctgacaagagaaagaaataaagggcatccaagtcagtaaagaggaagtcaaactgtcactgcttgcttatgatataattgtatacctagaaaatcctaaagacttctccaaaatgctcccagaactgataaaataattcaacaaagtttccggatactaaattaatgcacacaaagcagtagctytcctatacagccacagcgaccaaactgagaattaaataaaaaactcaactccttttacaatagctgtaaaaaaaaaaaaaaaaaaaaaaacccttagggatataccttactaagaaggtgaaagagatcctctacaagaaaaactacaaagcactgatgaaagaaatcataggtgacacaaacaaatggaaacacctcccatgctcagggatggatagaatcaatattgtgaaaatgaccatattgccaaaagta

SEQ ID NO: 745972 - DNA, 571 bp, Homo sapiens
ctactgccattgtattagggacaataataaactatgctaattaaccaagcttttttttttctttttacatttctagaccaataaattatatatatatccctaggaaatagcccatattttagtagctcctaattaaatatgtgattaaaataaaktatgccttttgtttaaatactagagaacttactcatttataagtaagaaaataatttcttgttttaccatcagtctctacattattattaccacacaaatagatatgagccttcaattttaataaatatgtttgtggtagattttatatatttcacatagaattggtatagacatacacactcttctagaaatctccaaaaattcagtaacactttatttattcagtatatattcattaagaactaaagatgtaaagaaaacttgtcaaaataaatgctccccagtcaaagtgaaatgtttagaaaatcagcacagatataaactttgtaaaaatagaattttgtaagaaactttgccttccccagttttgctgattttgaataaccaattatttttcataagagttgtgttgatt

SEQ ID NO: 745973 - DNA, 571 bp, Homo sapiens
ctactgccattgtattagggacaataataaactatgctaattaaccaagcttttttttttctttttacatttctagaccaataaattatatatatatccctaggaaatagcccatattttagtagctcctaattaaatatgtgattaaaataaagtatgccttttgtttaaatactagagaacttactcatttataagtaagaaaataatttcttgttttaccatcagtctctacattattawtaccacacaaatagatatgagccttcaattttaataaatatgtttgtggtagattttatatatttcacatagaattggtatagacatacacactcttctagaaatctccaaaaattcagtaacactttatttattcagtatatattcattaagaactaaagatgtaaagaaaacttgtcaaaataaatgctccccagtcaaagtgaaatgtttagaaaatcagcacagatataaactttgtaaaaatagaattttgtaagaaactttgccttccccagttttgctgattttgaataaccaattatttttcataagagttgtgttgatt

SEQ ID NO: 745974 - DNA, 579 bp, Homo sapiens
tcaagaatatgtggacagcatcaggaggaccaaagtcaaaataagttgcagctaatacagaatctttactattaaaaagaaaataaataaaagttcaatcagacatggagagacaggttatcatctatggtgatggaaaaaaaaaaaaaaaaaacctggtccatgaccatccaccctgaattcactcgatctcgcctagtctcagaaaaagaaaaaaaaagacctgcaattataaaataaataactaagctaaaattctcattttattagttgttttaccctttctctttactaaaattttattatgtatagtatcagatatgttgacctaraagaaaaaaagctggccgggtgcggtggctcacgcctgtaatcccagaactttaggagggcaaggtgggaggatgatctgaagttgggagttcaagaccaacctgaccaacatggagaaaacccatctctaccaaaaatacaaaattagctgggcatgctggtgcatgcctgtaatctcagctactcgggaggctgaggcaggagaatcgcttgaatctgggaggtggagtttgcggtgagccaaga

SEQ ID NO: 745975 - DNA, 620 bp, Homo sapiens
tgcttattttttatgacaagtcagttactaaaaggagacttaatctagtttgcttttacatgtattaatctattcactcatcatgaccaaattacacttctattgctaaataataatctcttagaactacagtttttctccaaagcctgtggctgtgttttaggggcctgtttataaaaatgagatataattttaagagaaaacaatattgaaagtactagcctaactactgtgcaactttctgtaagtctttagttattttaaactaaaatattttttaaaaggctaccttaatgaaattactactttaattattccattgtgataatttttcactttagtcaatctattcaattattttatcttttttttttcttatggagccttgaaatgtatctatagcrgttgttaaactgcaactatttctttttgctttttgaattcctgcctcatttcaaacacaaaaatagtcacaataattaatatttatatagaacatttactggtgacattgctttaatatacttttttttcttcatatgattgttttaacaacttactgatctatttcactgatgacaaaactgagactaaagttaaaaagggtcatgtgcaaggtc

SEQ ID NO: 745976 - DNA, 641 bp, Homo sapiens
gaggccctgggagccaaggccagcatgggtatgttacacttttctaattccttacctgtgctttctggtgaccacattctccagaattatgccaaagttttgattctgaggttagctcaaatgacacatcagttttctaacatcagttaggaaaacaggtccctctaggtatactktcatcttgtctttaaagaaagttttaaggaaaaatataaacattaattattaatgttttaaaggtagtatttatttgaaatttaaaatattttacattcagttttcatttcttttttatggtgatagttttgggtggtttaaagttagtttataaataatgacatttatcttgtcctatgtgaattacctgtaagtgttaacagagtggctaaacctggaggcctccttttactccctgttccagttcttccctttcctgaggtgaaaaccttaccctccaactagcacacctaggcatggtgactctacaagttcctattctcaaaaaagcgtcagaaaatgttagctagtgtactagtgtttagagatactgcaaaagctgctgggatgctgggactgcatttcctctgtagttggaaacctagtaattagatgtaagcattcactcaactcaaattttaggc

SEQ ID NO: 745977 - DNA, 583 bp, Homo sapiens
atgaatatttgaggatcttcataattccaactcaatccagctacgtactacatttggcattacatgaacctgtactaaggagagtgaacagacagcctaatttttaagtgaaggttgtgttagttgaagtaacaaattcacttttaaatatacctcttttcggccaggtacaatggctcacgcctgtaatcccaacactttgggagrctgaagtgggcagatcacttgaggccaggagttcaaggtcagcctggccaacatggagaaaccccgtctctattaaaaaatataaaaattagccaggtgtggtggtacgcacctgtaatcccagctacttgggaggctgaggcacaagaatcaccagagtctgggaggcagaggttgcagtgagccaagattgcgccactgcacctcagcctgggccacagaccaagactctgtctcaaaaataaacaaacaaacaaacaaatctacccacctctctttcccccagggtgaaataaaaaataaaattaaagaaaattcaaaggccagaggaaaaatataacagttccaaacatacaaaaaaaaagttagcaaaagt

SEQ ID NO: 745978 - DNA, 584 bp, Homo sapiens
tactcagctcaagtctatccaaaaatcactctttgagtatcctctatgtgctagaagttgggtgtgtagagctcatggtcctgtacttaggtagtttacagcattagaggaggagacagatgtacaaacaaatacatttcatatgaaggggtaagtattagaataggttgttggttgtctgctatgagagccagagtagagaataagctggagaggtggagaaagcctcctcataggtaatgrcattcgatctaggttctaaagaatgaataggagttacctcaatttctttatctgtaaacaaagagagttgggcaggattcctttgtgctttaaacttctgtgattttaatgctctgaattttacttggtcactaatgagggacactgggcctttgcattttgatttttgcagaagatcctatctacacaatcctaaagctcctccatccacagtaaaaatatgttgactgttcagttgttctgctatcctgccaaatagctgagcttttagatttcgggacaaagaattcacacaactggctgaatgtttcacttttcatcaggacattttggcatcaggt

SEQ ID NO: 745979 - DNA, 599 bp, Homo sapiens
ctccttctcggccccatggattggtttcttttcaaagttttctgtccttgagcttgatcttgtagatttcctatgtgttctgtttgggcattctcatccttctctttatggctccaaaatgtgtgcctctagctctggcctctctgaagtttcacagtttgtgtatatttggatgactcacaggaatcttaaacccgtattttcaagactgtatttattttctttctaccaaccatscaaccactgaccacctattttacttcttgtatttctgtcttggtggaaggcaccaagatcattttctctccttgtattgttacagctctaattcatgacttaattctatattgtattcagatacagaattcgttgttgggaaggactggggaaacagctgtaacatttgccaccctcagaagctgctggtcctgtgtcacaccaccttagcctcttgatcgaggaaggtaaagaattactttcactgatttttatctaatttctttgccttttgtttctgctgccttcacattgtcttctacagatagttattttctaaacctgcatttgtgtacattagaatgcaaactaagttcttttca

SEQ ID NO: 745980 - DNA, 599 bp, Homo sapiens
ctccttctcggccccatggattggtttcttttcaaagttttctgtccttgagcttgatcttgtagatttcctatgtgttctgtttgggcattctcatccttctctttatggctccaaaatgtgtgcctctagctctggcctctctgaagtttcacagtttgtgtatatttggatgactcacaggaatcttaaacccgtattttcaagactgtatttattttctttctaccaaccatgcaaccactgaccacctattttacttcttgtatttctgtcttggtggaaggcaccaagatcattttctctccttgtattgttacagctctaattcatgacttaattctatattgtattcagatacagaattcgttgttgggaaggactggggaaacagctgtaacatttgccaccctcagaagctgctggtcctgtgtcacaccaccttagcctcttgatygaggaaggtaaagaattactttcactgatttttatctaatttctttgccttttgtttctgctgccttcacattgtcttctacagatagttattttctaaacctgcatttgtgtacattagaatgcaaactaagttcttttca

SEQ ID NO: 745981 - DNA, 498 bp, Homo sapiens
taggcatttatgcagcatataatgaagtttcagtcagtgacagacacagactgcatatatgacagtggtcacgtaagattataatgtatttttactgccttttctatgtttagatacacttaaatacacaaatacttaactattgtgttacaattacctatggtattcagtacaataacgtgctgtgygggtgtgtagcctaggagccgtaggctagataatgcagcctagatgtatatatagtaggctataccatcgacattcgtgtaagatatgctatgatgttcccatgatggcaaaactgccaagtgtgtgatgcatttctcagaacatatccctgtcattaagagatgcgtgactatattggataccctattagatacctgtctaaatgtaattttttttttttttaaatgagatggggtttcgctctgttgcccaggctggagtgcagtagcacgatcatagctcactgcatcttcagatctcctgggctca

SEQ ID NO: 745982 - DNA, 649 bp, Homo sapiens
tacctctttgtacaacatgccctcttttaatttgttttgtttgcctggcgaacatgtgaggattttattgatttacaaaataaacaacagggagctgactgtacttgtacagcaataagggttggcttattggtcattttgaggtcactggcattgacttctacctttatttatttattttttattttattttttatttttttgagatggagtctcactgcactcacccaggctggagtgcagtggcgcgatctcrgctcactgcaacctctgcctcctgggttcaggtgattctcctgcctcagcctcctgagtagctgaggcaacaggcgtgtgccaccacacccggctaattttttgtatttttagtagagacggggtttcactgtgttagccaggagggtctcgatctcttgacctcatgatccgcccacctcggcctcccaaagtgctgggattacaggcatgagccaccacacctggccgacttctacctttacttatagcacaatgcttatggtgaaagagccagtgattgacttgtacctacagatcattatatgtttttctgttttgattttctgtctgacagcagcagcgtgcagggtcaaagacagccggccccccatgtcagtggtctaggatggcc

SEQ ID NO: 745983 - DNA, 649 bp, Homo sapiens
tacctctttgtacaacatgccctcttttaatttgttttgtttgcctggcgaacatgtgaggattttattgatttacaaaataaacaacagggagctgactgtacttgtacagcaataagggttggcttattggtcattttgaggtcactggcattgacttctacctttatttatttattttttattttattttttatttttttgagatggagtctcactgcactcacccaggctggagtgcagtggcgcgatctcagctcactgcaacctctgcctcctgggttcaggtgattctcctgcctcagcctcctgagtagctgaggcaacaggcgtgtgccaccacacccggctaattttttgtatttttagtagagacggggtttcacygtgttagccaggagggtctcgatctcttgacctcatgatccgcccacctcggcctcccaaagtgctgggattacaggcatgagccaccacacctggccgacttctacctttacttatagcacaatgcttatggtgaaagagccagtgattgacttgtacctacagatcattatatgtttttctgttttgattttctgtctgacagcagcagcgtgcagggtcaaagacagccggccccccatgtcagtggtctaggatggcc

SEQ ID NO: 745984 - DNA, 596 bp, Homo sapiens
tattctataaaatccccagcaagcctttgtttccttgcagtcagctccttttctgctgattctgcccattgctcccttgcaacgtattttcatgctttctctaatgattctgcctttctttacttacaactgccttggtaaatttttctgccacagcgccactggcctcagatagtcaccactcacctgcaacaagcctgagagccaattaagacaaggctttccccaagtagcacaaatgtatataccactactgtagttacttaatgtactcatttatcattttaaaattaccttatgtaccatcagttacatggtataactcttacaggaaaaaccaaattaatggaactctgcaattcaatgtaccccttcctctgcctccagcagaagcaacaggggacataaattccaactttagatgctactcttatagcatctacaagacttactayactgtgtgtgtgtgtgtgtgtgtgtgtgcgtgcgtgtgtgtgtgttacagagtctcactctgtcgcccaggctggagtgcagtggcggggtcttggctcactgcaacctctgcctcctgggtccaagcgattctcctgcct

SEQ ID NO: 745985 - DNA, 422 bp, Homo sapiens
aaaacctaaataagcttgtgattgcaaagtgctacaccaaagagacgtaaaacagactgccctccttaaacctagcaaatattctagactcctgttctcttacaataacctagaaaggtgaaaaaaaattctcattcagtggctttttaagcaaagttacagctaggctgaaacagtagttattccttgtttttcaaatatttttattttaaaatttataccttatttaatatgaatatttcaaagctagacttctgagttgtgaactgccaccrataaaaaccacacaaggactgcagctcaacttactgccgggtgggtggcggtgactaaggctcaagcaacgaaacatgcttttgcttagattttatccccagcatctttcccaaagccagcaaacacactagggatgcggtgtcttc

SEQ ID NO: 745986 - DNA, 658 bp, Homo sapiens
gtccacaacaataatgtgcccattgcggtccacagaaactcctttgggtcccatcagctttcctgatccaatttttgtctgtttgaaacaagtacagaaatagaagtacagtatagagtcaaagtttaaaccactacagaacatgaagataaacactgttttggtcaacatttacctgaaggttcaaacgggtacacagctactcatatatcacaaygaacttctgtcttggaaaactggctttgtcacatccattatctgctgctgatatctatataaatccttattcttttatttatttatttatttatttttgagacgaagtctcattctgttgtcccagctggagtgcagtggtgcaatctcggctcactgcaacctccacctcctgggttcatgcaattctcctgcctcagcctcctgaatagctgggactacaggcgtgcaccaccatgcctggctaattttttttgtatttttagtagagacagggtttcactttgttggccaggctcgtcttgaactcctgaccttgtgatccacccacctcgacctcccaaagtgctgggattacaggcatgagccctcgtgcccagcccttaaaatccttattcttaaaagagatcaccaccaaaaatagtctaggatcccctaaact

SEQ ID NO: 745987 - DNA, 508 bp, Homo sapiens
aaatcacttgaagaaactaaagtatgtagtaattagaaaagaaatactgtggctggacatggtggctcacgcctgtaatcccagcactttgggaggctgaggcgggtggatcatttgagctcaggagttctagaccagcatggccaacatggcaaaactctgtttctactaaaaatacaaaaattagctggacgttatggtgggcaccagtaatcccagctactcgrgagactgaggcacgagaatcgcttgaacctgggaggtggaggctgcagtgagccaagatcacaccactgcactccagcctgggcaacagacaaaacaaaacaataagaacaaaaaaacctagaaatattttgattattgttatgaaaaaattgggatacagttcttccaaaaaaaacttgaaaaggcaattgcaattagatagaaattatacttcataaaaatttatactcatccaagggcactataaagaaaatgaaacgacaaataccaactagattaa

SEQ ID NO: 745988 - DNA, 676 bp, Homo sapiens
tttgctccctgagatcagcagttgattttaattttatattatctatgtcgttgtgagataaaaagccttattaatgtaaacatcattccaaggagaaccatgcttcatgcttcacctcatcatattttagaagtacataacataaacggttttctccaactaaacctaattcactcagagttgaaaaaaaaaaaacaaaataaaaggtttgagaaactacagaatattgatgtatttaagattcacatgaatcaattattcagttatctggagactatctggaaattagatgtaatgtaatactccaagaacatctgcaatagatctttctctctctctctctctctctctttctctctctctcatacacagacacacacacacacasagagagagagagagagagagagagagagagagaggctttgaccagcagtccttgaggtttgtgaatattatgggtttaagagtttaaatcaattggtttatgcatttttcagccccaagttcctacaaaacaggaaacgttatatttgcagaatgcaggtcagagcactagctgtttcttcccagaaccttcgacctgtacaacgtgactaagaagtatttgggaagagagtttaggaagggtttcctgtttgtcttcatttattagactcttcttttctttcccaac

SEQ ID NO: 745989 - DNA, 517 bp, Homo sapiens
tgtctacttatttcggtcaaaatatactctgtgagacaagaaaataacaacgattatatttgtacttcagtggcaaaggtagcaaaatataatccacttctgagaaagctaaaaagagcagcagagctaagtaaaattcaagattgtaaaacagagaagcagttttcagacatttcaaaccgaagggttagtctcccaagccattcctgcaatgttaggcagaaaacagtcaagtgatttattttagagagatgctgatctatatgaggattaagagatctcaggctaacactgctggcagccacagagcagctttgggagtgtactaagaagatttcaaactgggagcaacttatgcaaaagacwcaattcccccaaccccccattggccagggctttaaacagtccttgtgattcgcttgttgccctttctttggcctatttactgagtagacacaatcagtccctctctattcacatagtcctttggttcacatatttgggtaaatgtattgtt

SEQ ID NO: 745990 - DNA, 508 bp, Homo sapiens
ttgttcctcttgttatccatttttcagttccctttctaatgagtttgttctccttataattttcttgtatctctgacccttcaatttgacttcattttgtgttcaagccaggaaaacctaccaatttgaacttgaaagagacagaactcacttagcacaattttcattctttacgttgtcrttgtaccacgttaaaatgttttcccttcaaataattatatggcatagcactttgaaatatgaccatttgcggaaacccaatttcagaaaatcaaacacagctcacgaaggtgctgactggataacaaattcaatccaggatcatagatgcctctaaagagatagttgccagatgttcttttggatatgggagaagataaagaattaggaaagaagaggcaaaggagagaacaatcatgaattaagcagggactttttaggggaaaaactagaaggggaatttttaattccaaataatttcctatctgtcaaactggccaactgatat

SEQ ID NO: 745991 - DNA, 588 bp, Homo sapiens
tctctagtgaaattctccacctcagcatctattttcatgaaccgaatacagtattttaaagcccctgcttttaactccaaagtctgaacaatctatcaatctgtttctcttgtcaattttcttctcttgatctttttgtatgcttagtaattttttattgtatgtaagacattgtgagttatcatatgcatatgtatacggaaaaaacgtagagcctccagatgatgttaccttcctccagaaaggatttaatttttattttttttaacagtctctgtaggagcagactgatgcaatccaattgggactgagctgacttgagactgagtttcagacactacaaagataggtaggcctctgatttgtcctcactctatggtgtggctcttcactagggccagaacamcaccacaacaaactattgaaagctccattcaacttcctcagtcgttttttgctcatctcttatgccttgctcagcttttatcttcttacccccaatagcttaagagctggaaaatggatcaagaggaaaaccagcacagagtgtgtctgtctcccttctctcctgaatcttgactcttcaag

SEQ ID NO: 745992 - DNA, 653 bp, Homo sapiens
agccattccatgagagcccctgcatctccctcttcaggtcttctccctcctctaggtctactctgcttcgcccactcacctctctcctccaggagccaattatacttattattattactgactccactttatgggtcccaaatgacaaatgaggatgagggcagaagaaaaggaatgctcaggttggatatgagagggagatgaatgtgggaggtaggaggaggaagaacaagatgggattggacgcaggtggattcaggaggtaamcccaggctgtcttggggtccccagcctggtttgggagaggctgtaagtcatgccaacatgcaacacatgggccaagggttgtgtgggcaagaagtccagtgcttgcaggccggtctccagtatccatgagggacttctgttggcttttaagccagagcgcttcgggccataggctaggtccctctgctggtctctggataggtttctttgcatccagggtgtcctggctggatcacattttccagactgatggagagtggtatgggtcggggctctgagcgtgtcttgatgtggtccttcatggttggacagatatcctggccataaaaaccctgactcaaagcctgacccaggaaggaatggaggactccagagagtagatgcct

SEQ ID NO: 745993 - DNA, 635 bp, Homo sapiens
ggttagaagtttatgggaattctggatccatggtttcctatggtctcttttacagatcttgttaatttattacccttggttacacttttaatggaaatcatgaagaaatggcaaaggaaacatgagctaattttttttccagtgacacatttcactgctatttaaatagctgttttgccaaaccaaacacagcgcttacagccagcggtgacacatgaaggagatcactgtggccgatcctgcctgcggcatccagaacaggcgagactttctctcagcttccccaagggccggacgccaaggggggcgggtaggagagctggagcctggggcacagctggagccccagagctgggtgcgtgcagcttccacccaccctgggcacggctgcttctctgttgcctcctgtccactccttacccctgaggagccctggggtaactgttttctcccagcagcctgggggaccccccagagtrggccacagcaagagcaccagcagggcctcctggccctcactgcaggatgatctgctcaggcctttagtggggaacattactgggttgcataaaaccagagacagactttggggaagccctggccatctcggttccagttctgtggtggcggcaaca

SEQ ID NO: 745994 - DNA, 597 bp, Homo sapiens
ctcatttaatctgtacaagaccctgggagatggtcattattgtccccattttactgatgagaaaactgagcccagagaagtgaagtgacctgggtacagataatacagctagtacaagaccctgggagatggtcattattgtccccattttactgatgagaaaactgagcccagagaagtgaagtgacytgggtacagataatacagctagtacatagtggatatagtaacatccactgtctttttctctttcttaagaactccatgaggtgggtgttttacccaagtgtttccagtgacatttatgacttgttttaagtgttctcaatatatctctttaacaatcaaaaaaatatcagcccccatagttgaaagtttgcaaaaaaaaaaaaaaaaaagaaaagaaaaataaattaaccatgaaagcttcagtgatactttgggctcaaatgagttctcaggcattttcagtaatataaggactctcattataacagctgagaaattcatagcaaaattactgactgtggttatgtatgtcacttactctctccccccttctttttttttttctttcttttctttttttattatact

SEQ ID NO: 745995 - DNA, 568 bp, Homo sapiens
taaagaaaattacacagaataaacagcttcctaataatttgcattttgcagtggtttgcatttgtcaatgtgcattcatattcaatgaacacatttaatttcatcaacattctttttatggtagatttgtatttcttggggaagctatcacactgaasccatcagttggaatatttattactatgaacccgggttatgctggtcgaaccgaattaccggaaaatctcaaagctcttttcaggcaagtgttatgctttgtggcttagcatctggtgcactcatgccacctaatgttgttggtttgcactgttaagtggtttgcttttacttgaaaattcctaaggaaaatcctatatgatttccttgggctccttttatagacagaactttcaccatgataaattaacccttttgaattataaaaccaggactcaaaatcagtatttaaaagttacgtggtatatttgcatatttactgttagctattttgtaatgcatatttttattataaacataatctttcataattttttttttctttttttttttttaacagtcaaagtgcatt

SEQ ID NO: 745996 - DNA, 551 bp, Homo sapiens
ggccacagctttgctctttggtcctcaggccaccagacccctcacagcatggcccttggctcttcctgcactgccctcaccctcagccgtcccaaggagtgcccagcactactcagcatgtagtccaggacctgcggcatcagcatcccctgggagcttcttagaaatgcagacctgtgggctctaccacaggcctctggaatcagaatcttyagggtggggcccagcagtctgtgttttaacaggttctcccggtgatgctggtgcatgctcaagtttgagaaccgctgctctcatagactgctcctccaaggggaagcagtgtggaacagcagagaaagtcccgtccctatctctgactgtgcagtgagtgtggcctaggaacaggtcccttcctaagctctagtgtccccatctgtaaaatgggctgattggcctccacggtcagagcggccatctggctgtgccatcctgcatttttaggaatggaaagcaggcctctgaggcagtggacaggaagacttctcatccttgaattctagctcccattc

SEQ ID NO: 745997 - DNA, 609 bp, Homo sapiens
gcacctgtaatcccagctacttgggaggctgagggtaagagaatcacttgaacccaggaggcagaggttgcagtgagctgagatcacgccactgcgctactgcctgggaggcagagggagactctatctcaaaaaaacccccccaaaattactaagtaccaactaggtctaggcatgcggcaagggtrtaaagatgattaaggcagaatgctggctcctaaacctgtcccagcagttcccactgctactgcctctgttcttgcctcaattattgcttatctccttgagcacgatgtcctaagaggcctccctgcctctggtctctccagctccaatcagctctccccagtgccaccagcatggtatttctaaaatatggttatcctcatatgctgaggtgatggccagtatgcctgtcataagtacaatccaaatagtgtcagcagtgagaaattttttaagcaacttatgtgttatatgttattaaaggagattcaaattttggaacaaagtacatcatggggggaaattcattgactttcataacaatacactacaattatatagtattgaatattgctgaacattaaccaatattcaatttggatt

SEQ ID NO: 745998 - DNA, 601 bp, Homo sapiens
acacggcgcgggactggcaggcagttccacctgcagcccccgtgtgggatccactgggtgaagccagctgggctcctgagtctgttggggacttggagaacctttatgtctagctaagggattgtaaatacaccaatcggcastctgtatctagctcaaggtttgtaaacacaccaatcagcaccctgtgtctagctcagggtttgtgaatgcaccaattgacactctgtatctacctactctgctggggacttggagaacttttgtgtctacactctgtatctaactaatctagtggggacatggagaactttcgtgcctagctcagggattgtaaacgcaccaatcagcaccctgtcaaaatggaccaatcagctctctgtaaaatgggccaatcggctctctgtaaaatggaccaatcagcaggatgtgggtggggccagataagagaataaaagcaggcttgcccaagctggcagtgacaactcgctgaggcccagtttacgttggcgaagctttgttctttcactctttgcgataaatcttgttgttgttcaccgtttgggtccgcgctgcctttatgagccgtaacactcaaccg

SEQ ID NO: 745999 - DNA, 586 bp, Homo sapiens
gcatactaatgacctacaattatcaaattaaaaataaaaatgctaaaggatgccagaaagaacatcagggaaagaccaactctcccttaactttttacaaataaatttaaacggtaaattagaaacacaaataaatgtgagtggctctagcattcaaatggagtaaatgaattgtgtaggagatgaaccccgtaactttttgttgttgttgttgttttaaatttcttgaccagctcttagaagatgatgatgtttatctccctgttctcggctgcctggtagaagaatggcacgcagggtttgctgggcaagcctgggtgctcctargtgtcctgcatgacaggagacagctgcacgatctgctgtacagtggggttgtcatggggagaaccctccctggccgctcctggtgcaggctccacgttgttgtccaggctcacttcataaaaaacttcggagagagggaggcgggggtctgagcacagtgcgagcctcccctgcccctgcctgcccaccccgcctgagagctctactcaccatcctgctcaccggcagccccaagttcctggggggctggggcccctgg

SEQ ID NO: 746000 - DNA, 586 bp, Homo sapiens
gcatactaatgacctacaattatcaaattaaaaataaaaatgctaaaggatgccagaaagaacatcagggaaagaccaactctcccttaactttttacaaataaatttaaacggtaaattagaaacacaaataaatgtgagtggctctagcattcaaatggagtaaatgaattgtgtaggagatgaaccccgtaactttttgttgttgttgttgttttaaatttcttgaccagctcttagaagatgatgatgtttatctccctgttctcggctgcctggtagaagaatggcacgcagggtttgctgggcaagcctgggtgctcctaggtgtcctgcatgacaggagacagctgcacgatctgctgtacagtggggttgtcatggggagaaccctccctggccrctcctggtgcaggctccacgttgttgtccaggctcacttcataaaaaacttcggagagagggaggcgggggtctgagcacagtgcgagcctcccctgcccctgcctgcccaccccgcctgagagctctactcaccatcctgctcaccggcagccccaagttcctggggggctggggcccctgg

SEQ ID NO: 746001 - DNA, 626 bp, Homo sapiens
tttttttaatggtaagaataaacttggttcatgcattataaacattttttaaaaaggaggccataaatattatggcagatttaaactactcaacttagacaaatagccaacaaaatgttttctaatttatcctatcctaagatcaacttaatatgcatcagagaagtttagtcatctttgccatttttttcccacaaaaaatggattgatcctttttcatctctttccttttaaattccagmaataattcagtttagttaggtctcaggccagaactgtctgatttatccaagttaaaaatagcccattctgctcacgtattattttcattttctggcacttgtgccattaaatttggggaattcacctatgaaaggagacatttgagctgggtgccattgaaggccccttttagatttgattttaaaatttttagatattataaatgatatccttttaaatggaaaggaagagtgccacccacttttagctcaaaaatggtgctactgagtttgagagacaacatcaagaaaaaaaaaatcagactccttaattcagaaccagctgcttggttttctatcctatagttacttcctctctgtaagaagctaattaggagagggatg

SEQ ID NO: 746002 - DNA, 599 bp, Homo sapiens
taaaaaaaaaaaaaaaaaactttaatcaagtggtcattttataattatattggggaaacactaggaaaatattctccaaataccacagacaagtcagaaaagaataaagtgttaaagatagaagatgcaggaaatctcatggatccccttttagcactgctcattgacagataaccttactcaactacaggtctttgctgtttgtagctatactatttttaacttatttagtgagatataattcacatatcrtaaaatttactcatttaaaatgtgtaactcaatgggtttcgtatttcatagggttatgcaacactgctatctaagttgagaacatttacatgacccagaaagaattgtggtaccaatgtacagtgatttctcaccccaccataagccctaaacaatcactatttttctttctttctgtatagattttctgattctgaacatgtcatataatgtgcatatacaaatctttttatatattcctggatttggtttgctagtattttgctgataatttttatatctttactgataagggatattggtccgtagttgttttttttttcttagaatgcctttttgtggttttg

SEQ ID NO: 746003 - DNA, 599 bp, Homo sapiens
taaaaaaaaaaaaaaaaaactttaatcaagtggtcattttataattatattggggaaacactaggaaaatattctccaaataccacagacaagtcagaaaagaataaagtgttaaagatagaagatgcaggaaatctcatggatccccttttagcactgctcattgacagataaccttactcaactacaggtctttgctgtttgtagctatactatttttaacttatttagtgagatataattcacatatcataaaatttactcatttaaaatgtgtaactcaatgggtttcgtatttcatagggttatgcaacactgctatctaagttgagaacatttacatgacccagaaagaattgtggtaccaatgtacagtgatttctcaccccacyataagccctaaacaatcactatttttctttctttctgtatagattttctgattctgaacatgtcatataatgtgcatatacaaatctttttatatattcctggatttggtttgctagtattttgctgataatttttatatctttactgataagggatattggtccgtagttgttttttttttcttagaatgcctttttgtggttttg

SEQ ID NO: 746004 - DNA, 589 bp, Homo sapiens
ttctcaaactcctgagctcaagggatcctctcgttttggcctcccactgtgctgggattataggcatgagccaccacactcagccaagagccatttccctaaattctcttttctgtgaactctctattcatatcctttggccatgttttctcttgggctggtagtctatattcttattgatttataggagatctttatatattaggaaattagtcttttgtctgtcatataagttgtaaatattttttcctagtttatcatttgcctttacccatggtggtttttgccacattaagaaaaaattcctaggtggttgaatgtatcarttgtttgggatttttgaggtttgtgtcatatttaataaggcttttcctgtgccaagattatttttttaactacctataatttacctagtttggtttacacttacatcttcaaacaaattggttgtctttcatttctttcttttaccctctaagaaaaccagaaaagatgactgtctttcatttctaagtaaagtgtaattttatttttaaattttcttttaacctaatagttatttaggaaaatattttatttttctaagcag

SEQ ID NO: 746005 - DNA, 515 bp, Homo sapiens
catagcatactttcaaaaacattatctctcttgatcctcaaactaattatttgtagtaggtggggcggggagtattgtttttgccttataggtgaagaagtaggctcagagtggtaacatagtgctacactgttaataagggatataaggaaagaaaagtactcaaatattcttaaaacacacttagtcttctttctgttaaatcatactgctgttcaacatttgtctgtactatatttacayaaggtgaattttcttttttttttttgctcaaaaaatgatagctctttattgttgctatgatcaaacacctactatgtattttcaataagcactaaggatacagaaataaataaggcatggggcctgccttaaagaggcatttagacagatttataggccaagaaatacaatgatgtgttctagtcaccattacaaaagtcagcacaaggtaaaataggggctgaaggaagaaagttgggggaaagtttataaaagtctttaggaggagatgg

SEQ ID NO: 746006 - DNA, 644 bp, Homo sapiens
aaaaataaaaaaggtaagtactttaaagtgtttttagcactaaaattctctataacatgtgaaatatatgtgattattccccatgcacagacaatacctaacttacagcacttttatattttggtttattttacataatatttttatatcaaggtataggccaaaaacattagataattgatgttttaactcataatagctragcaaatgatgtccaagcaaagagtgttgggtaaaaatacacgctgagaagaaagtcaaactaaggtaggtagtttaacatagagactgacactgctgtagcagcttccccatttctaaagtaaggatcaccagtagtgctttccaatactgttgttactaagatcaaatgagtttcttcatgtaaagctgtgcccctactatataaaaaaaaaaaaaatacttcaatgcatttatgccaaaaatatcactctgaaagcaaaggtagatttaaatcagaaagacaaaataaaataaaaccttcctatgtatttgtggttggggtgcagggtggaagttaagaaggagaagtctcagaaaccaaacaggcacgaaagactgcaatagaacacatgtaaaattgtttgataccacctgctggttattgcttggaatgacagaaa

SEQ ID NO: 746007 - DNA, 638 bp, Homo sapiens
cctacatactgagacacctgaggcctaactcaatgagagaaaaaaattttaaatgtctcctaatttttgccaactaatttttcaggttaaggtcaaaatagttaacactgataaaccccttttgtatgtaaaattaattttttactaataaggattattttacaaactggtcacagtgaaaagttgtaatgttttctttcctcgggatctttgtgaacaggactgagtttgacaggtttaaatttgctgctaagagttaaattatttcctctagccttcagccctagaatcctgtcattctgcatttcagcaagactaagctatgaacagcttaaaacatacaggtaaatagttggtttcctttgcttccatgtccctagtcaactgacattggcaattaactttattcctattctttaagagtctacaaggttccatgagctgtcagtgttcacatcacatccactgtcctaagtacatccttaacccmaaatcagtatattttttctttagcccactgggacttaatatgtcacttcacacaatgtaatttcccataaaccataaatgacctttaatgcgtcagtgactgcatcaaatgttatgataaattttttaatgactgaataatttggaga

SEQ ID NO: 746008 - DNA, 678 bp, Homo sapiens
tcagaacctgctctgagcctgatggatccttctccagccctcacccaggctcccagcttcttaccttgaggagcaactggtattttgttattctctgaatgggcttgatgaggaagtcactcagtgtcagcctctgatttatctcctgttttacctcctgaaacacaggcagcaatattagaagaaaaaggaactgaagaactggggtgctttgaataagggttcaaaggcatggaagacaggtctgcatgttttccaatgaagttgaagaatctttaagtaatgtgagaggtaaaattgcctagaggactgttcacttgttatgaacaacacataacacacatcaccactggcttcctgccttcctcccatgcttttacagtgagtacttccacaccttggtcttcatcccagtcctgggagaaaagctggaggggccttattctctccaccrcttcagggcaaaggcagggaaaaggggcttcttctaggacacacaagcctatggagccaggccctaaacttagatctccaaacactcagctgagtgctttttctaagtgatgatgctgcctttctcccagcaaaataaatccttctgggctagaccaagcagactaggaagtggctgcaaacccttcaaccaacagaagactccttagtaagtggtccctgggg

SEQ ID NO: 746009 - DNA, 607 bp, Homo sapiens
acaaatggatccctggacactgcaaataataaagagcccctaatgttctggtatgtacagttggctttctataattaaaaaaaattttctgaagcgaattttatcatgaaatagttttaaaatacagaaaaatatagaaaaaaattgacatctatgtactcatcacctagatatagtgtaaacatttttccatatttactccaagttttttaaaaataaaagattacagatatagttgaagccttttatgttgcccagttgcaatccyactctctaattgccctcatcaaagttaaattctcttctgaagctagtgtgcatctttcttatccatgttgttaaacatttacttttatgtgaatatagtattattttgtgttttatagtttatataattatcataatgtaggtattactttgcaacttcatttattcaaaattatttgagatttattcatgttcatacatgtagatctagttcattcatgttaattttttttttctttgagacagagtcttactctgttgcctaagctggtgtgcaatggcgcgatctcagctcactgcaacctctgcctcccaagttcaaatgattctcctgcctcaa

SEQ ID NO: 746010 - DNA, 606 bp, Homo sapiens
ttgagggcttccagattgtagtggaggaagaaactgcagattgatgggaatagcaagagaactagaattagcagtagagcctgaagaagtgactgaattgttacaaactcataataaaactttaatgaatgaggattgcttcttatgcaggagcaaagaaagtgattccttgagatgaaatcarctcctagtgagaatgctctgaactttgttgaaatgacaacaaagggttaggaatagtagataaatttagttgataaaacagtggcagggttcgagaggattgactgtaattttgaaagaagttctgtggctaaaatgctatcaaagagcattacatggtacggagaaatattttgtgaagggaaatgtcagttgacacagcaaacgtcattgttttattttaagacattgtcacagccaccccaacctttagcaaccaccagcctgataagttagtagccataagcactgagtcaagatcatccactagcaaaaagattataactcagtgaaggctcatatgatcaatcattagcatttttagcagtaaaatattttaaaattaagatatgcacattggtttttagacacaatgctattact

SEQ ID NO: 746011 - DNA, 656 bp, Homo sapiens
tgtgattgtgtatctgaaaatccctagaaagtgaatgataaaactaactgaaataattttaaaaactcagtaaaatagcagaaaaaaatcaacatacagaaatacaatctcacataattaggaacccgttacaggatataacagcaaaacaaaaacacctccatctccattgcaacaaagcagataagatgttaaggattaagtttaacaaaaaatgtgtaaaccctacatgagaaagagtttaaaacaatccttaaagacaacaaaagtagatgtgaagaaaggagaaaaaaaaagagctcttggttttgaacttaagataactcaacatcataaagttaatttataaacagtataatgtcaataaaaacaccaacgagcttttttgtggagttagataagctgatactaaacttcacatggataaacaaacaggaaggaagacccaggaaaacactaaaaatgaacgtttctgaaaggagactaagccctatcaggcattaacacataccrtaaagcctctgaaagcctttacaaaacagtcacattctggtatgtggatagatacatctgtggagtgcaacccaaagtccagaaatagacccaagcacatacagaactgcagtatatgataaaggcagtatttcaaaccactg

SEQ ID NO: 746012 - DNA, 654 bp, Homo sapiens
agactaaggagcaatactaatatggattcaacaataaaatttctttatcagccaaggatacgatttttaagtattatcataagaatttaggtacaaagttgttccatcattaaagttagctttgagactaatttgaaattactttttcatagattaatgtacagtttccttattcaattaataaacatttatttagcatccaccacttactaaaaactacrtgaaattcttattcataggcttttgaaagttttcatcttttctagcaaatattagcactacatttgttcttaaaaataatcaacatagtagaaagttctattacagccctctgtgtccatattgagtttagaactcagcagtgtcacttttaatatagtttttgtgtaagtgctgtactgttccaaaaggtgatttgtaaataactgttttgaaggacaaaatgctgttattttaaaagcatatattcatcatcctactagaaagagatttatttgaatcttattgttatggaatgctgaacagtacagttggagcagctgctgaaactcctaaatgaacattaatttttccttctgggtgctcagtaaaaacaaaatacaaactttatgataaagaatgcaaatatttcatttttacaaacatgttgttaac

SEQ ID NO: 746013 - DNA, 654 bp, Homo sapiens
agactaaggagcaatactaatatggattcaacaataaaatttctttatcagccaaggatacgatttttaagtattatcataagaatttaggtacaaagttgttccatcattaaagttagctttgagactaatttgaaattactttttcatagattaatgtacagtttccttattcaattaataaacatttatttagcatccaccacttactaaaaactacatgaarttcttattcataggcttttgaaagttttcatcttttctagcaaatattagcactacatttgttcttaaaaataatcaacatagtagaaagttctattacagccctctgtgtccatattgagtttagaactcagcagtgtcacttttaatatagtttttgtgtaagtgctgtactgttccaaaaggtgatttgtaaataactgttttgaaggacaaaatgctgttattttaaaagcatatattcatcatcctactagaaagagatttatttgaatcttattgttatggaatgctgaacagtacagttggagcagctgctgaaactcctaaatgaacattaatttttccttctgggtgctcagtaaaaacaaaatacaaactttatgataaagaatgcaaatatttcatttttacaaacatgttgttaac

SEQ ID NO: 746014 - DNA, 654 bp, Homo sapiens
agactaaggagcaatactaatatggattcaacaataaaatttctttatcagccaaggatacgatttttaagtattatcataagaatttaggtacaaagttgttccatcattaaagttagctttgagactaatttgaaattactttttcatagattaatgtacagtttccttattcaattaataaacatttatttagcatccaccacttactaaaaactacatgaaattcttattcataggcttttgaaagttttcatcttttctagcaaatattagcactacatttgttcttaaaaataatcaacatagtagaaagttctattacagccctctgtgtccatattgagtttagaactcagcagtgtcacttttaatatagtttttgtgtaagtgctgtactgttccaaaaggtgatttrtaaataactgttttgaaggacaaaatgctgttattttaaaagcatatattcatcatcctactagaaagagatttatttgaatcttattgttatggaatgctgaacagtacagttggagcagctgctgaaactcctaaatgaacattaatttttccttctgggtgctcagtaaaaacaaaatacaaactttatgataaagaatgcaaatatttcatttttacaaacatgttgttaac

SEQ ID NO: 746015 - DNA, 642 bp, Homo sapiens
cgagatctgatggtttaaaagtgtgtggcagttcccccttcaagctctctctctcttctcctgccaccatgtaagatgttccttgcctcctcttccccttccaccatgattgtaagtttcctgaggcctcctcagcaatatggaactgtgagtcaattaaacctctttactttataaattacccagtctcaggtagttctttatagcagtgtgaaaatggactaatacagaaaattgatgctagaagagtagggtactgctataaagatacctgaaaatgtggaagcaactctggaactgagtaacaggcagaggttggaacagtatggagggcttgggagaaaacaggaagatgtgggaaagttttgaaattcctactgactgttgaatkgttttgaccacaattctgatagtgatatggacaatgaactcaggctgaggtggtatcagaaggagattaggaacttattgggaactggaataaaggtcactcttgctatgctttagcaaagagattggcagcattttcccctgccctagagatatgtggaacttggaacttgagagagataatttagggtatctggaggaagaaataactaagcagcaaagcattcaagatgttacctggctgtttctaac

SEQ ID NO: 746016 - DNA, 567 bp, Homo sapiens
taactcctggcactcttatctcccttccttgttttattttccttgtgattatcactatgttgcatactatacattttacctactcatttagctttttatttgttctccacccttcttccaatagaacgttttattccataagagcatgggatttacatttgttttgtttatggctgtatccctggtgcctgaccacgataggggctccctgcatcctgttgaaagaataaatagacttkacatatcggctctgggagagggagtctctgctccctgctcagaatgagggcttggggctgttctctctcccactgtgtggagagcacctccctgagtgtgtgttcccaggcacaaggagcgcagatggaggcatcaagtcctcaagacacagcatgtcctcctggacctggccagctccaccctggcttcccaatccctccagaaacctcctctttggcatagctggtttgagtttgggttgatcactttcaactgaatgaaccctggccaaaaaagtcttggcccttgggaatcatgagaatttagccaagtgacagggtcaagaca

SEQ ID NO: 746017 - DNA, 620 bp, Homo sapiens
aaaagtagttagtgtattaaagtcaagacatggacattagctcctcacattctctggtcagtctcaactctagccttatgtaatgcttcccacaaccatctgatacagcacatagactcagaaagataaaggggttcctyaaatgacatacagatagtagtgacctggagagggcatgaatgcaggtctttcgatcttggtgtggtgtttttttcactccaccatgctgtttctcaaacagttgggaaccattatagtggctcaggccaaatgaccttggaacagtaatttttgccctggtagggcaagctttagttattgtgctcattcctttatttctccttcctcttaacatactgatactgcccccacagatgtccagggtccttgaaatgccgcaggttgccttgggccctttctatgctgcctccacaggcctccttcacaggcaggtccctgggtcctgagcctggctctctaagaacttacagagcctggtgctgtgacccagagcctggctaagtggcagccacagtcaattctgaaatctgatgctgagtcttaaagagggatgtacctctgccaaccctccctcttctccactgatattaagcctgggg

SEQ ID NO: 746018 - DNA, 620 bp, Homo sapiens
aaaagtagttagtgtattaaagtcaagacatggacattagctcctcacattctctggtcagtctcaactctagccttatgtaatgcttcccacaaccatctgatacagcacatagactcagaaagataaaggggttccttaaatgacatacagatagtagtgacctggagagggcatgaatgcaggtctttcgatcttggtgtggtgtttttttcactccaccatgctgtttctcaaacagttgggaaccattatagtggctcaggccaaatgaccttrgaacagtaatttttgccctggtagggcaagctttagttattgtgctcattcctttatttctccttcctcttaacatactgatactgcccccacagatgtccagggtccttgaaatgccgcaggttgccttgggccctttctatgctgcctccacaggcctccttcacaggcaggtccctgggtcctgagcctggctctctaagaacttacagagcctggtgctgtgacccagagcctggctaagtggcagccacagtcaattctgaaatctgatgctgagtcttaaagagggatgtacctctgccaaccctccctcttctccactgatattaagcctgggg

SEQ ID NO: 746019 - DNA, 620 bp, Homo sapiens
aaaagtagttagtgtattaaagtcaagacatggacattagctcctcacattctctggtcagtctcaactctagccttatgtaatgcttcccacaaccatctgatacagcacatagactcagaaagataaaggggttccttaaatgacatacagatagtagtgacctggagagggcatgaatgcaggtctttcgatcttggtgtggtgtttttttcactccaccatgctgtttctcaaacagttgggaaccattatagtggctcaggccaaatgaccttggaacagtaatttttgycctggtagggcaagctttagttattgtgctcattcctttatttctccttcctcttaacatactgatactgcccccacagatgtccagggtccttgaaatgccgcaggttgccttgggccctttctatgctgcctccacaggcctccttcacaggcaggtccctgggtcctgagcctggctctctaagaacttacagagcctggtgctgtgacccagagcctggctaagtggcagccacagtcaattctgaaatctgatgctgagtcttaaagagggatgtacctctgccaaccctccctcttctccactgatattaagcctgggg

SEQ ID NO: 746020 - DNA, 581 bp, Homo sapiens
aaaggcctgaacccagaggagccaatggtacaagtccttgcctgagtctgaagatccaagaaccaggagtggcaatgcctgagggcaggagaaaatggatgtcccagctcaagcagagagagagaatctgtccttcctctgcctttttgttctaattggtccctcaacagattggatgacccccatccacacttggagagagatcttcttactcagtctatggattccaatgcttacacctactagaaaggcactcatagacacacccagaaataatgttttatcagctatctgggcatcccttagctcagtcaagttgacacatgaaattaagcayctaaggtatctctgagactgggtagaaaaccatgtgagggtcatggacagactctcatcttccctctcctttctggttttagaaaacaccagcatgatctgccaccccactcctatccctccaggaagagccagtccagccaaaggaaaggtagcaggcacgaagtgctgtgagcaaaccaagtgccagccgacaccagtcagaggatagtgagatgagggatcccaaaatggctcccagggtg

SEQ ID NO: 746021 - DNA, 524 bp, Homo sapiens
attacctgtgcattttctgccaattatatgtgatactttaagagttatgtagttataatgactataaatatgtaaaatttttacatatgcaacctgctaagcattttacattttatcttattaaaaaacaaaattttggctgggcatggtggctcatgcctttaatcccagcactttgggaggccaaagtgggaggatcacttgagcccaggagttcgagaccagcctgggcaacacaacgagacctatgtcttcaaaaaatttaaaaattagccaggtatggtggcatgtgcctgtagccccaggtgattttgaggctgaggttggaggattagttgagcctgggagctagtggctgcagtgagcagygatcatgccactacactccagcctgggtgacagagcaagaccccgtctcaaaaaaaaaaaaaaaaaaaagagagagaaagaaagaaagcaaaaaaaaaaaaaaaaaaactacacacacaaaatttcagcaaattgaatttaaagatctaattggc

SEQ ID NO: 746022 - DNA, 607 bp, Homo sapiens
atgaacattcatgtacaggttttttgggaagcagcttttcttttgggtaagtacataccaatgaaattgcagggctatctgggaagtttatgttcaatcttttgagaaaccaaaaataatgctgtttttcaaagcagctgcaccattttatatttccacctgcaaagtacaagggttctaatttcttcatatcttttttttgtttgtttttgtttttttggttttttttgaggtggagtctcactctattgcccaggctggagtgcagtggccgygatctccgctcactgcaagctccgcctcccaggttcatgccattctcctgcctcagcctcctgagtagctgggactacatgcgcccgccaccacgcccggctaatttttttctattattaggagagacggggtttcaccgtgttagccaggatggtctcaatctcctgatctcgtgatccacccacttcggcctcccaaagtgctgggattacaggtgtgagccaccgcacctggccaatttcttcatatcttttctaatattaatctgtctttttgattagaggcatctcaacgaatgtggaaaagtaactcaactcattgtggtttggat

SEQ ID NO: 746023 - DNA, 478 bp, Homo sapiens
gtcttaagccccacagttaagaaacttgaatacatgcaggctcgtgagctttatttttatcaattccattttaatattttactgaccatcacctatgcctaggttttcataatagcaagtaaaatggctgaatctttgcacactcatagaattcttcttctcaaactatagaaactacggtaagggatgtctgcaaagagatatgattgaaaccatccttgccactggacttcttgcaacaaagcaaacaaattttwaaagtaatacaattaactgccaagatatttctcaaatattcaaatggaggagcagtttaccttaacctcaattaccttaatagaattaaggggtagaattcttagaaagtatctgttaagtgcttaacatgttcttgtagaataataataaagttagctattgctctagttgtctccccacagtttttgtgtactaagatgggtagagaaaaattatcagt

SEQ ID NO: 746024 - DNA, 633 bp, Homo sapiens
aatatatcccattagggcaatatttgttcactggaatacagagctgaatgggaaaagtcagtgttagaaggtgcaaacattttgtttcatgaatctataagagagtactacttgccaaagccacaaaaatttatgctcaaattgtgatgtatattgagcagcgarcaagcaagtaaatgaatacatttatagattttggtcctttgtttttaagtgtaaattcttttatgtatgctattcaaaatcccagtgtttgaaaatattccagaaacacacaaaaggtgtgactccttgctttatcattataccattagtgacgtatcaaatctttgctacttgacccaaaaggccagctctccatataggtagatgcagtagtctccttttttcctcggtttcacttcctacggtttcagttacccacagtcaaccaccatctgaaaatgtttaatagaaaattctagatttctgagttttgacttgcatggcattttgggtagcgtgatgaaatctcacgttgtcgtgctccatcccaccctgaacgtgaatcatccctttgtccagcaaatctacattgtatgtgctgtctgccaattagtcactgacattgtctgctcttgtcatccaaccatc

SEQ ID NO: 746025 - DNA, 630 bp, Homo sapiens
aaaaggccagctctccatataggtagatgcagtagtctccttttttcctcggtttcacttcctacggtttcagttacccacagtcaaccaccatctgaaaatgtttaatagaaaattctagatttctgagttttgacttgcatggcattttgggtagcgtgatgaaatctcacgttgtcgtgctccatcccaccctgaacgtgaatcatccctttgtccagcaaatctacattgtatgtgctgtctgccaattagtcactgacattgtctgctcttgtcatccaaccatcaacatcatgtttgctcaatgattcaggatcacctgaagcaaatgatgcttcctgtgaagtactgtcagaaggtcartcgtagcctaaggctgtgggtcagcagtagcctaacactacatcacaatgcctacgtccttcacctcacttcatctcatcacttaggtattttatcatctcacatcatcacaagaagaagggtgagtatagtgcaataacatattttaagaaatataaaccacatacacataacttagtatattgttgtaactaaaccattattattattgttaatctcttattgttcctaatctataaattaaactttatcataggcatgtat

SEQ ID NO: 746026 - DNA, 622 bp, Homo sapiens
gggatatgatagcttagcttgggctcagaggcctgacacctagcatgccccttacttgtaatactgattgtttagtttcccatagttttagccactccttattaatatattatacattacctttttattatatttattacttagtgtctatttttctctaaagaaagtgggctctaagccagrcatggtggtgcatacctgtagtctcagctacagaggaagctgaggtgggaggattgcttgagcccaggagtttgaggccagcctggacaacatagcaagaccctaggtcaaaaaaataaaaaataaaaaacaaaaaacagaaaaaagaaagtaactaagcttcataagatgttgggtctttgtccaattgtctactcttatattcctagatcaatgcctgacatatagaatgtctttaataaatatttacggagtaagttttctttactcttttaaaataacttacaacctaatctcaagggacatatatcaactgactggaaaatatagaaggatgagtagagtttttaccctttactttctatatatctatatactttccatatatatatatatctatatttctatatatctgtgtactttatatatatataaagta

SEQ ID NO: 746027 - DNA, 622 bp, Homo sapiens
gggatatgatagcttagcttgggctcagaggcctgacacctagcatgccccttacttgtaatactgattgtttagtttcccatagttttagccactccttattaatatattatacattacctttttattatatttattacttagtgtctatttttctctaaagaaagtgggctctaagccaggcatggtggtgcatacctgtagtctcagctacagaggaagctgaggtgggaggattgcttgagcccaggagtttgaggccagcctggacaacatagcaagaccctaggtcaaaaaaataaaaaataaaaaacaaaaaacagaaaaaagaaagtaactaagcttcataagatgttgggtctttgtccaattgtctactcttatattcctagatcaatgcctgacatatagaatgtctttaataaatatttacggagtaagttttctttactcttttaaaataacttacaacctaatctcaarggacatatatcaactgactggaaaatatagaaggatgagtagagtttttaccctttactttctatatatctatatactttccatatatatatatatctatatttctatatatctgtgtactttatatatatataaagta

SEQ ID NO: 746028 - DNA, 476 bp, Homo sapiens
cacagtgggtgtggcagatagtcaccacactgcctctttagacctagtggaacccatccctcctcatggggcagggcctccctgtgggaatttcagcaactcgccccagaaggttagggacagaattcttatctccctgggacaaagcccctggggtgaggagtggctgtggtttccatgggtcaacagaattagtcttttcccctgctggctctgaggaatccaggcagtccagataagtgagattctcaccagcacagcacacccactctgccaatgggcagccagagtscttccttaagtgggtccctgatctcatgcctcctgatggggtgagattcccccaacaggagtcgccagacaccttacatgggagcattctggctggcatcaggtcagtgcccctctgggatggagctcccacaggaaggaggaggcagacatctttgattttctgcagcccccatacctccagg

SEQ ID NO: 746029 - DNA, 622 bp, Homo sapiens
caatatataatcagcatgaaatatagtagtgacatattttagaaaaaaatttttaggccaggcgcggtggctcatgcctgtaatcccggcactttgggaggccgaggcgggtggatcatgaggtcaggagttcaagactagcctggccaagatggtgaaaccctgtctctaccaaaaatacaaaaattggcgggcatggtggcaggcacctgtaatcccagctacctgggaggctgaggcaggagaatcgcttgaacctgggggacggaggttgcagtgagccgagatcgcgccactgtactccagcctgggcaacagagtgagacatcgtcaccaaaaaaaaaaaaaaaaaawtagcaatgatattgaaatccaaatcagatttttattttatattaagccatatttctagtggcttaatgttctcaatagccacatgtgcctcatggcactctgttggacaaatgtctctccatatcatgaagatggcaggcaatgctgtacaaatcaatttgtaaatatgatatgaatctgcattgcctggatttatagttcagcttccctagtaccaggttaacaatctctgtggccttggggatatgagatattactattattgcta

SEQ ID NO: 746030 - DNA, 621 bp, Homo sapiens
ctccgaatattaaaagaaaaaaagaacaatggaaagagcaaaacataggtaaataaagtagactcatttcctcttgagattactaaactatatttaatggttgaaggcaaaagaataacattgtttcaaataggcagatagaatattttgacaattatgcatggagaaaggtaaaaagagaagtaatagttytacatgtcactcaagctggtaaaatgtcaacattagtagactgtgataagttatgtatgtcccaagtaaaatctatagcaacaactttaaaatctatataaaaagagaattttatatagataactaaaagtagaattttaagaaattctacttttatatagatagctaaaagtagaattttaagaaatttaacccaaagaaacgcagaaaaaaataagagttaacaaaaagatttaaaaaaaaaaaacatggaacaaccagaaagcaaaaagtaaaatgacagataagccctgacatatcaatatttattaatgaaatgtaaattatctaaatataccaattaacagacagaaatggcagagattttataaaatgacctaactataagccatcaacaagaaactccctttaaatattatcatagattga

SEQ ID NO: 746031 - DNA, 621 bp, Homo sapiens
ctccgaatattaaaagaaaaaaagaacaatggaaagagcaaaacataggtaaataaagtagactcatttcctcttgagattactaaactatatttaatggttgaaggcaaaagaataacattgtttcaaataggcagatagaatattttgacaattatgcatggagaaaggtaaaaagagaagtaatagttctacatgtcactcaagctggtaaaatgtcaacattagtagactgtgataagttatgtatgtcccaagtaaaatctatagcaacaactttaaaatctatataaaaagagaattttatatagataactaaaagtagaattttaagaaattctacttttatatagatagctaaaagtagaattttaagaaatttaacccaaagaaaygcagaaaaaaataagagttaacaaaaagatttaaaaaaaaaaaacatggaacaaccagaaagcaaaaagtaaaatgacagataagccctgacatatcaatatttattaatgaaatgtaaattatctaaatataccaattaacagacagaaatggcagagattttataaaatgacctaactataagccatcaacaagaaactccctttaaatattatcatagattga

SEQ ID NO: 746032 - DNA, 548 bp, Homo sapiens
ctactgcccccggccatgaattagattttgagtatattttaaatattcaaaatttaaaatattttaattatgaacattcacaattatattggaatgattatgctactggttatttcagtgaccttccacagatttaattttccccagtacagtcttcttttttttactccagatagaactagattttgaggctacagattatcaaggaactacctatttcataatgttactttgttaattgtagccattacttctcaacatgtttctttactacctgtgctaattaagaacagtggataattagcattttaagttgcttttctcccttagcgagaatgataaaatagacgttgyttgatcttctgaattcatgaatcataatctgtgttcataatttgagaatggttatgtgtttaagctattttttagtttgtgttgtttcctctacctttgtctctttaaactattggttacttttctaaattgatgtgatggcctccctgaaattaaacatttctattagtggcttcccgttaatctcatccttc

SEQ ID NO: 746033 - DNA, 626 bp, Homo sapiens
gatccactatttctattcctagtaacagtgctacaaaacaacagcctattcaaaaaatcagatgaaaatcaaaattataaacaaattcttaaatttaatctataacatatcaagactagcttctattcaacaatctcactgtccattactaaaacatcctctttagaaaaataaaagattcaatgagagaaggaagtcaaatagtcactaattaaagctttctaaattatctgtaagttgtgacaaactatgtcaaatatagtctatactactgagctcttttctccttacatctytgatcagagtgttaacaacccactcttgtgaaaatataagtccccaaagtcatgaaaaaatacctaacctaacagataacttcgtaagaaagaagatcctgccaagcaggaagaattgctgctgaaagcaacatggcaggacttaaaggaaacatgccacaaagttatctttgggacaagtgatcagagatggggacaaatgttaacagggctgaaacagatgaacatgagttcacatcatgagtcacttaaaacattactgaaaatattcaactgaaaggaaattacggttcttaaaaatcttaggttccagctgggctcagtggctca

SEQ ID NO: 746034 - DNA, 593 bp, Homo sapiens
tgggcttcagagacagcacttcagatgatgccggggtgaacatctcagacacgctcctgaagatgggaggggagatctcagcccagagccgaaggtgtagacgggtctgatgagtgggaagacaggaagggaaatgggaacttcacttggaaaaggagagatgccacatagttccgaagggcagggcactggccacagactgcccttcatgcccagctccacaagaaaccagggacccggcagaggatcagattccacacagggaccctcactgaggttgcacacacattatctcagtgacctttccagcccctacaggacttctggggaatccgaagccggatagctctgcacagccacccaccggtgacacaggcgtgcccacaaaacagtagagggccatgaattgagggccatggaggcttttytgaatcactgcccctccccagaggcccactgagagctttccaagctgaacatgaccctctccctgaataaggcagatcccatctacactgtggatgccagaaaaagaatcaatcccatggcccccggggacccccaaccttttggaattcatgtccttgtacaag

SEQ ID NO: 746035 - DNA, 541 bp, Homo sapiens
ttctgggtgtccagcgctggggcacagtgggatcccacactccctgtccctccagcctgtttctcatcacctgagggttttgttttccgtgttccggttgaagagatgtctgtgccaggagggttcctcccttcccatttgcaacctgggatgggtgacgcagatttatccgagacttgggagtgaggctgagagtcagttctttcgtatcctaagaaaggctgaccgtcccatcaaggcccgtgtgctgaaactgtccgtgtgcaggctcaggtggagcaggtctctgtcaggcagccatttgtatttgggcggtgggtgctttgcctagcttagtgcctaccatgcccaggcttgcaaatggggctktttgggctttgatgtgggctcaggctcagagggctgaagtggttgtggggaggggcttctggggactgtgtccatgtctctgtcgtttttccccatcacaccgtacactcccttgaggccagccgtccatcaccattgagtcatagtcgacagtttgatttacagcccgggt

SEQ ID NO: 746036 - DNA, 670 bp, Homo sapiens
gtcctcaggaaggatcctctctccagtttgagggaacccaccttgagaatgccagtaactgataacgggaagggggacagggaagtgctgggtagagaagagtggggtccccggcgagggctccacactcgggccttatgccctcggaccttatgccctcggacctaagtgaaaacaggcactcctgttttcgcctcaatgttgcattttctgagaccactctagctgtcacgtcccccccatcctgtgcccatataaacctgagaccttagcgggcacacacacaagcggctgaatgtcgagaggaacagagtggcagagaatagcagagagcggcagagagtggtggagagcagcagagcagcacggcagagaaggagggaagaggcgtctgaacatcaagaggagttgcgtccagaacggcggaactccaggggaagattatccccacacccctccaccttcccggaattccakctccccatcccgctgaaagtcacctccactgttcaacaaagtctcagcattcattacctttcaaacagttcatatgacctgatttgtccagtactctggaaaagaatggaggtggggaggttaacactcagctgtccccggacagcaaggctaaaggagctcactataacacatgcccacttgggctctggca

SEQ ID NO: 746037 - DNA, 595 bp, Homo sapiens
atactggaaggaaagaccttttttctttaatccttaggtagctcttgaaaatagtttagtgtgatactcattttaaattattttacaattaacaaagaaaaattaacatatattaacttctgatacatttgtcttaggtttggagctgttcgggatgtttctgtatatttcacatgccctgtatccagaagtgggctaaagacagccagtttcttgtatcttctgtgactgatgatgattttggaaagaaagattgtccctggccttggtaactttttctaattagttggattattattattattttcagatggagtttygctcttgtcacgcaggctggagtgcagtggcgatcttggctcactgcaacctccacctcctgggttcaagagattctcctgtctcatcctcctgagtagctgggattataggcacctgtcactatgcctggctaattttttgtatttttagtagacacagggtttcaccatgtctgccaggctggtcttgaactcctgacctcaggtgacccaccccaaaaaatcccaaagtgccaactaggctggcacgccaccacgcctggcctaattggatt

SEQ ID NO: 746038 - DNA, 588 bp, Homo sapiens
gaagcacaaggggtcgggggatttccctttcctagccaagggaagccgtgagtgactgtacctggaggaatggtacactgctgcccaaatattgtgcttttcccacagtcttcgcaaccggcagaccaggagattccctcctgtgcctggctcaaagggtcccatgcccacggagcctcactcgctactagtgcagcagtctgagatcaacctgggatgctggagcttggtgggggaaggggcatccaccattgctgaggcttgagtaggcagttctatgctcacagtgtaaacaaagtggcagggaagctcgaactgggtggagcccaccgcagcacagcaaggcctactgcctaccgagattccacctctgggggcagggcatatctgaacaaaargcagcagatagctcctgcagacttaaacgtgactgcctgatagctctgaagagagcagtcgctctcccagcatggcgttcgagatccgataatggacagagtgcctcctaaagtgggtccctgaccccatgtagcctgactgagagacacctcccagtaggggccacagacacctcattcaggcaggtgc

SEQ ID NO: 746039 - DNA, 656 bp, Homo sapiens
agcctaaatatctttcaaagttagcttggtcctgtgaaccctgaaaatctgagacatgtctcagttaatttacaaaatttattttgccaaggttgagaacacaaccccatgacacagcctcaggaggtcctgacgacatgtgcccaaggtggtcagagcatcactgggttttatacattctagggacacatgagacatcaatcaacatatgtaaggtgaacactggttctgtctggaaaggcaggataactcaaagcaaaagcaggaagattggaagcagggagggggctttcrggtcataggtagataagagacaaatagttgcattattttgagtttctgattaacctctccaaaggaggcaatcagatatgcatttatcccagtgagcagagggctgactttgaatagaatgggaggcagtttggccctaagcagttaccaacttaacttttttctttagcttagtgacttaggagccccaagatatattttcctttcacattttccccccttttctgtgggcagcaagtcacccaggtgccgaggcaagagaccaaggacacgagctgttccagtataataaaatataaaataagaatagttataccagatatagatcttagatatgattatatatgaatattattaatcat

SEQ ID NO: 746040 - DNA, 591 bp, Homo sapiens
atctctactaaaaatacaaaaaaattaccagggcgtgatggcacctgcctgtagtcccagctacttgggaggctgaggcaagagaattgcttaaatccgggaggcagaggctgcagtgagccgagatcatcccagtgcactccggcctgggtgatagagcgagactccatctcaaaaaaaaaaaaaaaaagaaaagaaaagaaagaaagaaagaaaagaaaagaaaaagttttcctgtaaagcacctctatttgcttctttttcttttaagaagtggtttcctatagcagaatcacttccgtttgttgaggtctcttacrtggcctaggcatttgttgaatagtaaatggccagattgatgtataaatcactgacaagtgagtattagtcacataatcctctgagttctccccttcagccttgatgattttgcttatgtattgttcttttccctccctatgagctttatggccgatgattttcctggttttacagcagaaactaatacaacagaaggaggctcttctccctccatatgtactcctacatgttgtaccattttttacaagaatgaaagcactataatactaa

SEQ ID NO: 746041 - DNA, 614 bp, Homo sapiens
atgagcattaaggtggggatggtaaccaagggtcttaacccatagacagctatggaggaggttaatagaatatagtattcctagacagatgggaagcctgttagctagttagggtattatttaatgtatacaaccaaaatgaatcaggaatgaataattaggaggttgagggcaacttactccatcaaaaaaatcagaatcctagtagggcatggtggcttatggctataatctcagcactttgggaggttgaggcgggaggatcacttgagcccaggagttcaagaccagccygggcaacatagcaagaccccatctcaaaaaataaattgattcattacaatttaaattttaaaaaaatcagaatcctttgaacagttccagacctaagccagtacttagacctaagccagtacttagacctaaaaccaatgactagaggagaagccaagacccatgaagaaagactctgcaacagtatgacaaacatattccagtaacgatttccctggtctttctcctaaagaacctatgaccattacttagatcactatactctgggggaaaaaagaatacttagatacattgaagactgtttggcacaggatccatgt

SEQ ID NO: 746042 - DNA, 512 bp, Homo sapiens
actggggatggcttgctgactggtagagaatttgtcccttccttcggctgtcattctatcatttacttgatgaagataccatgtatctccaaactctcgggctgcagctaaagctgcattcttttcattaaaggccagggtttgatctaagagtagcacaacatctctccaagtgaggtcaaaggtttgccctcyaccctgtaggacatctatgtatctatcaggatcatctgaaaacttccccaggtctgccttgatctactttaaatcagtgagggagaaggggacatgtacccgggttgggccaaattcccctccccctacagcttgaaggggacatagcctgaggggttttggtgctttggagatttctttgcttatttcctctgggccggggagattagaggaggattatcattaataggaaggggagctatagggaggctaggatatgggggtaagctgagaggtcctcctgtgggatgtaaattgcaagcttttcatagttgtgt

SEQ ID NO: 746043 - DNA, 512 bp, Homo sapiens
actggggatggcttgctgactggtagagaatttgtcccttccttcggctgtcattctatcatttacttgatgaagataccatgtatctccaaactctcgggctgcagctaaagctgcattcttttcattaaaggccagggtttgatctaagagtagcacaacatctctccaagtgaggtcaaaggtttgccctctaccctgtaggayatctatgtatctatcaggatcatctgaaaacttccccaggtctgccttgatctactttaaatcagtgagggagaaggggacatgtacccgggttgggccaaattcccctccccctacagcttgaaggggacatagcctgaggggttttggtgctttggagatttctttgcttatttcctctgggccggggagattagaggaggattatcattaataggaaggggagctatagggaggctaggatatgggggtaagctgagaggtcctcctgtgggatgtaaattgcaagcttttcatagttgtgt

SEQ ID NO: 746044 - DNA, 530 bp, Homo sapiens
tcctcatcccttaggcagttgatggtactgggtgttgtggagcagggggcagtgcccgtctgggaggctcaggccatgcaggagcccatggggggttggggggtgctcaggcatggcaggctacaggtccccagccctgcctcatggggaggcagctgaggcccagtgagaatttaagcgtggcataggtgggctggcaggctgggggaccctgcgcaccctcygcagctgctggcctgggtgctaaggccctcactgcctggggttggtggcgcaggccagccactctgagtgcagggcctgctgagcccttgcccacccggaactcacacttgcccgcaagctccgtgtgcagccccagttcccacctgcgcctctccctccaacctcgccacaagcagagggagccagctctggcctcgaccagcccagagaggggctcccacagtgcagaggtgggctgaagtgctcctcaagtgtggccagagtgggcgccaaggctgaggggcgccgagagcaagcaagggctg

SEQ ID NO: 746045 - DNA, 638 bp, Homo sapiens
acacacaaataagtgtctagtgacagcctgctctctggttcatagttggctgtcttctcactgtcttcacttggtggaaaggaaaaggaagctctctggggtttcttttatagaggtgctaatctcatttatgatrgctctgcactcacgacctaatcgccttctaaagtcccccacactcaaatacattaggggttagattttaacatatgagttttggggtcggggggaatgaccattcagtctataacagggagaaatcaaaagatgcatatctatgtggataagaatcttatgtaaatatttcagtggccctttcctgaatctgtagcctatggtttttgcattatttctgctttcccctctttctgttttggaatcagatgagcttctttgagggactttcttttatttagtatatgtttcttttctcttcagtgtccatcaactgaatttctacctctctctacattccttctgatatttttaaatgtcctatgctctttcctgaacatttttgctcttagacggcttttagtaatttacaagcctttgcccatctattctcaatagaatttgggttattttcataactaccttacccattatagtttttttgatgaataatttatttccca

SEQ ID NO: 746046 - DNA, 534 bp, Homo sapiens
cataaaattacatccaatttctttctctaaaccaacatattcttcaccttcacaaagcaaacacatggtgcactgaaaccgaggtgttaccagctttacatactgttctgccatttgtgaggggtgcaaccacaacataagtcagaaaaaaagctatccagcttttygtggaatctggtgaagtttacacttagcgataagcctctaagcctgaacttagcagggctagcaaaactttatttatttcctaactcctattattttagaatggttttcaaaataatactgcaagttcctaattgaaatacaaaacagaacaaaaagctgtgagaaatcttttttttctttggctccttaaagacttggaataatttatattagtgttgcatacattttaccttctacattttgatgtacttgctcttgaaagcactagaacaaattaattgaaataaaacctctctgaaaccatttgaatctttgatcctaccatagagttttaaaggctttcaggatataacttgtattttcccc

SEQ ID NO: 746047 - DNA, 539 bp, Homo sapiens
cacccttaattttacagaagaaattaaattaatatatcaggaatgattctcgtacctctaagtacagatattattgactctatttattatgcctcatgctttggtcccaaatgatactgttgagcaggtaagagttatacatttttaatagttttggaacaaaccaaagtcagcaaaccttcacagaaacttcttttttaattcacctagaattaaatcactgagcagagagaacactaaattcaagttcctgtagttaaattagtgaatatgcctatctctctctttcctttttaaatttttgttttctattgttattgttgttcacttgcttgctttcttgtctgagttttactctaaatatgaggctatttctatcctcagccatgatraggcaattcagcctagtgaaaagacactaagtctggaatctaaaactgagttcaagcttggctgtgagaagaattaccgtgtaatcttcagcaagacttgtaacacctttcacttagttattaatggggatggaagtcaaagcaatg

SEQ ID NO: 746048 - DNA, 440 bp, Homo sapiens
gcccccaaaggccctctgactgtataattgaactgcattaccatagctggtgcactgtgcccactgtgaaaccacaaataaaagtgagagtaagagaaaagttaccttgcatacccagctatgtggccctgaggayagcagaactcatctaagctgcagttctttcctctgcttttgcaaatagcaggacaaacggtggggatggtaataatacttacatgtttatagctcttacattcttacattttcaaggcattttatattaattggccaatttgatcctgtaagaaagacagccttggccttatactatcccagtatcacagaggagaatactgaggcacagagggatttgttcaaggacccacaaatagtaagtaattaaactgggactagattcctggaatgtttgcaaaacctttcccattctgctaagtcac

SEQ ID NO: 746049 - DNA, 616 bp, Homo sapiens
tcacaaatcattgtcccatgaagcatgtattccagtctttccaaagagcaaacacatggacatttatgcacaacatggaaaggatgtgcataaaaaaagttcattaatcaattccaaattggttcaccaatataacataaaattcagtgcagagatgcttttgttgtttgtttgccaattcttagctactgagagttgaagaactggattaaaatctcctggcaggacaagatgtttttttcctttttggccgagaatttagcgtttaatgggtgttcaataaatattatttttaattaaatggtggggggggtgctgaattaagtagagaaatgaaatatcaaaatacatttcagtcaatggatctcagaggcttcctccyctattctagtgatcaaggcagttttttgtttgtttgtttgtttgttttgagacggagtcccgctctgtcgtccaggctggaaggcagtgacacaatcttggctcactgcaatttctgcctccccggttcaagcgattctcttgcctcagcctcccaagtagctgggactacaggtgcgtgccaccatgcctggctaattttttgtatttttagtagagacagggtttcaccgtg

SEQ ID NO: 746050 - DNA, 616 bp, Homo sapiens
tcacaaatcattgtcccatgaagcatgtattccagtctttccaaagagcaaacacatggacatttatgcacaacatggaaaggatgtgcataaaaaaagttcattaatcaattccaaattggttcaccaatataacataaaattcagtgcagagatgcttttgttgtttgtttgccaattcttagctactgagagttgaagaactggattaaaatctcctggcaggacaagatgtttttttcctttttggccgagaatttagcgtttaatgggtgttcaataaatattatttttaattaaatggtggggggggtgctgaattaagtagagaaatgaaatatcaaaatacatttcagtcaatggatctcagaggcttcctcctctattctagtgatcaaggcagttttttgtttgtttgtttgtttgttttgagacggagtcccgctctgtcgtccaggctggaaggcagtgacrcaatcttggctcactgcaatttctgcctccccggttcaagcgattctcttgcctcagcctcccaagtagctgggactacaggtgcgtgccaccatgcctggctaattttttgtatttttagtagagacagggtttcaccgtg

SEQ ID NO: 746051 - DNA, 606 bp, Homo sapiens
attctcttgatcctctattatttaagtatttccctgtgacatttcctcaaaatttgaattaatagtctcattatattagaataaagagtgatttagatctttcaaccaaactgcacacttaaggctataagggcgtatgggtctgtgggtttgtgtgtgataaaagacttatgaatattatttggcaatgtaagggcatacatattctgctgcatccaacacaacacacatgcacacatactcacaccttcaatagaattttaaaccttctactagtgttactaattaaaaaggagtttatttttcaactagtgtgagttattcaacctctctagagaaggtaacagtagctacaatccatctcagtcttaaacacccacattttaaattcactatacaaacaaatatttatttagtgcctactctrtttgcactatggcactgggaagacatccaaaaagggggacaagaaagagaaaaagagaatagagataatttcttccctaaggggttttgatttattaggccaataaaatttctaaaaaatcaagctctttttttttttttcttaaactctcttcaactggtttatccaattctcagggg

SEQ ID NO: 746052 - DNA, 532 bp, Homo sapiens
tatcagacactttccttggggtgtggataaaggtgttactttcaccaaagccccctataacccttttgtttcacctgagggtaaaaaaaaaaaaaaaaaaaaaaaaaaagctatgcaaggagaaatacttatgatggtcacagtcccactaaaacctgagatatatttggaagattataggacgtcctccaccccacactacaaaaaactggagagaacaaagcaatacagagaaagtaagggaatggaaacacaaatttcaggattgtgattatatyttagctacagataaaatataatgagatgcacatatgtaggcactgtttgttcttaaatagaaaagagactcatatgtggtatttagtctgtgttttataaaatgtatgctatatctatctatctacctatctatccagtattaaatagggtaaaaataaactattgactatcaagtaactatagtaactaacaacttgatacactgatacattgatggaatatctccctagtcaaatatggatttagcctttta

SEQ ID NO: 746053 - DNA, 664 bp, Homo sapiens
aaactcctttattcgtggcaacatgaatgaacctgaaggacattatgtaaagtgaaataagccaggcacagaaagactaacaatgaatgttctcactcatatgggaatctaattgatttcatagaaatggggagtaggatgattaacagaggcagrtgcagtgtggggagcaaggaatgagagagattggtcaatgagtaaaacattacgttagacaggaaaaataaattctggtgttctatttcagagtaaagtgaaaataacagtgttgtgtatatttcaagatcgctccgggaaaagattttgagtgttgtcaccagaaagaaataataaatgtttaaagtgatagacatgagatttcatctcatgcaaagtacacatgcactgaaatgtcacactgtactcctgatacagtttgaatggttttcctctccaaatctcatgttgaaatgtaatccccaattttgaagagggcatctggtgggaggggtttgggtcatgaaagccgatccctcatctcattgggttggtgctgtcctcatgatagattgaatgctcactacatctggtaatttaaagtgtgtggcacctactcctttgttatttggcttccactcttgctatgtgatgtgcctgctcccatttcaccttccaccatgagtac

SEQ ID NO: 746054 - DNA, 664 bp, Homo sapiens
aaactcctttattcgtggcaacatgaatgaacctgaaggacattatgtaaagtgaaataagccaggcacagaaagactaacaatgaatgttctcactcatatgggaatctaattgatttcatagaaatggggagtaggatgattaacagaggcaggtgcagtgtggggagcaaggaatgagagagattggtcaatgagtaaaacattacgttagacaggaaaaataaattctggtgttctatttcagagtaaagtgaaaataacagtgttgtgtatatttcaagatcgctccgggaaaagattttgagtgttgtcaccagaaagaaataataaatgtttaaagtgatagacatgagatttcatctcatgcaaagtacacatgcactgaaatgtcacactgtactcctgatacagtttgaatggttttcctctccaaatctcatgttgaaatgtaatccccaattttgaagagggcatctggtgggaggggtttgggtcatgaargccgatccctcatctcattgggttggtgctgtcctcatgatagattgaatgctcactacatctggtaatttaaagtgtgtggcacctactcctttgttatttggcttccactcttgctatgtgatgtgcctgctcccatttcaccttccaccatgagtac

SEQ ID NO: 746055 - DNA, 571 bp, Homo sapiens
atcattctgggcataggcttaggcaaagattttatgacaaagactccaaaagcaactgaaataaaaattaggttgggcttaattaaatggaaagagtttctgcacagcagaagaagctatcaacagagtaaacagcccacaaaaagatgagagaaaatatttgcaaactatrtatctgacaaagatctaatatccagaatctaaaaggaatggaaacatatcaacaagcaaaaaacaaactcattaagaaacggacaaaggacatgaacttttcaaaagaacacatacaagtggtcaaaaaaacatgaaaaaatgctcaacattactaatcattagagaaatgcaaattaaaaccacaatgagataccgtctcaaaccactcagaatggctatgattaaaaggtaaatatataatagatattgacaagattgcagagaatagcaacacttatatgctgctggtaagaggataaattagttcagcctgtggaaagcagtttagacatttctcaataagcttaaaatagaactaccatttgacccagcaatcccattattggatatttaccca

SEQ ID NO: 746056 - DNA, 551 bp, Homo sapiens
tattgtgtagaaaaataggataaaatgcagatgcaatagcagatagaacttttggtcatataaaatggtggaaaaagaaaaaaatcaattctgacttctagattttcaactgagcagtttaaaaggtatcattggcaataataaaaataggataaatagcaagcgaatttggtaggctggtgaaaatcaagtcatctgcttgacaatattaaatttgaggtgcctaagatggactagctacttatcttggggatcccagtgtaaaatragtatgtagagcgcttatttataaattagtaatgatttcaacatggtgatagcaaaacattaaaccaaatataggcaacttttttttattatactttaagttctagggtacatatgcacaacgtgcagttttgttacatacgtatacatgcgccatgttggtgtgctgcacccattaacttgtcatttaacattaggtgtatctcctaatgctatccctcccccatcccccaaccccacgacaggccccagtgtgtgatgttccccttcctgtgtccaagtgt

SEQ ID NO: 746057 - DNA, 551 bp, Homo sapiens
tattgtgtagaaaaataggataaaatgcagatgcaatagcagatagaacttttggtcatataaaatggtggaaaaagaaaaaaatcaattctgacttctagattttcaactgagcagtttaaaaggtatcattggcaataataaaaataggataaatagcaagcgaatttggtaggctggtgaaaatcaagtcatctgcttgacaatattaaatttgaggtgcctaagatggactagctacttatcttggggatcccagtgtaaaataagtatgtagagcrcttatttataaattagtaatgatttcaacatggtgatagcaaaacattaaaccaaatataggcaacttttttttattatactttaagttctagggtacatatgcacaacgtgcagttttgttacatacgtatacatgcgccatgttggtgtgctgcacccattaacttgtcatttaacattaggtgtatctcctaatgctatccctcccccatcccccaaccccacgacaggccccagtgtgtgatgttccccttcctgtgtccaagtgt

SEQ ID NO: 746058 - DNA, 636 bp, Homo sapiens
gatggactagctacttatcttggggatcccagtgtaaaataagtatgtagagcgcttatttataaattagtaatgatttcaacatggtgatagcaaaacattaaaccaaatataggcaacttttttttattatactttaagttctagggtacatatgcacaacgtgcagttttgttacatacgtatacatgcgccatgttggtgtgctgcacccattaacttgtcatttaacattaggtgtatctcctaatgctatccctcccccatcccccaaccccaygacaggccccagtgtgtgatgttccccttcctgtgtccaagtgttctcactgttcaattcccacctatgagtgagaacatgtggtgtttggtttttttgtccttgcgatagtttgctgggaatgatggtttccagcttaatccatgtccctgcaaaggacatgaactcatcattttttatggctgcatagtattccatggtgtatatgtgccacattttctcaatccagtctatcgctgatggacatttgggttggttccaagtctttgctattgtgaatagtgctgcaatagacatacgtgtgcatgtgtctttatagcagcatgatttataatcctttgggtatatacccagta

SEQ ID NO: 746059 - DNA, 636 bp, Homo sapiens
gatggactagctacttatcttggggatcccagtgtaaaataagtatgtagagcgcttatttataaattagtaatgatttcaacatggtgatagcaaaacattaaaccaaatataggcaacttttttttattatactttaagttctagggtacatatgcacaacgtgcagttttgttacatacgtatacatgcgccatgttggtgtgctgcacccattaacttgtcatttaacattaggtgtatctcctaatgctatccctcccccatcccccaaccccacgacaggccccagtgtgtgatgttccccttccygtgtccaagtgttctcactgttcaattcccacctatgagtgagaacatgtggtgtttggtttttttgtccttgcgatagtttgctgggaatgatggtttccagcttaatccatgtccctgcaaaggacatgaactcatcattttttatggctgcatagtattccatggtgtatatgtgccacattttctcaatccagtctatcgctgatggacatttgggttggttccaagtctttgctattgtgaatagtgctgcaatagacatacgtgtgcatgtgtctttatagcagcatgatttataatcctttgggtatatacccagta

SEQ ID NO: 746060 - DNA, 636 bp, Homo sapiens
gatggactagctacttatcttggggatcccagtgtaaaataagtatgtagagcgcttatttataaattagtaatgatttcaacatggtgatagcaaaacattaaaccaaatataggcaacttttttttattatactttaagttctagggtacatatgcacaacgtgcagttttgttacatacgtatacatgcgccatgttggtgtgctgcacccattaacttgtcatttaacattaggtgtatctcctaatgctatccctcccccatcccccaaccccacgacaggccccagtgtgtgatgttccccttcctgtgtccaagtgttctcactgttcaattcccacctatgagtgagaacatgtrgtgtttggtttttttgtccttgcgatagtttgctgggaatgatggtttccagcttaatccatgtccctgcaaaggacatgaactcatcattttttatggctgcatagtattccatggtgtatatgtgccacattttctcaatccagtctatcgctgatggacatttgggttggttccaagtctttgctattgtgaatagtgctgcaatagacatacgtgtgcatgtgtctttatagcagcatgatttataatcctttgggtatatacccagta

SEQ ID NO: 746061 - DNA, 406 bp, Homo sapiens
cttaaagtgtaataataataataataataatgataataaaagagagagagggagatcggccccaatacaaaaataactggcaacttcaaaatcccactttcagcactggacacatcttccaagcagaaaatcaacaaagacacattggacttaatctgcactattgaacaaatggatataatwtgtatttgcagaacatttcatacagtggttgcagaatacgcttttttttttcctcagcatgtggaacattctcaaggatataccacatgttaggtcacaaaacaagtcataaatcatttttgaaaattgaagttatatcaagcttcttctctgaccacaatggaataaaactagaaaataataagaaagaattatgaaaactatataaatacatggaaattaa

SEQ ID NO: 746062 - DNA, 569 bp, Homo sapiens
caacataaatagtgggaagaaaaaacatctgaataaagatattggaagggtgatagatttggaaacataaagatgagggagtttacatagtaaatcatctgtttccagaagaaagctgaaaaccaacttattggcagaaaatgtgtgtgtgtgctcaagtgcattgcatgtgtgactggtatatagatgaataaatcagatggagatttaatgatctagaagaatgtctgaaatgaccatttttggggatgaaagagcaaacagaaaaatttagtgggtatatgagacactactgggtgccttcttgagatgtagggtarttgtttttaaatgagaccagtcagcatacttttaagttcgtgtgtagcttactgcacctgcacaggtgcagataacacatagactaattcagggagtataagaaagggagagcagggcaaggggattgaggatgaatgcaagaacgtgcctattgagatgggttgtggaaatgtagcttcataagaatagatgtgcagagctatgggtaatgaaattacggtagagtcagtggagcagacattatgata

SEQ ID NO: 746063 - DNA, 569 bp, Homo sapiens
caacataaatagtgggaagaaaaaacatctgaataaagatattggaagggtgatagatttggaaacataaagatgagggagtttacatagtaaatcatctgtttccagaagaaagctgaaaaccaacttattggcagaaaatgtgtgtgtgtgctcaagtgcattgcatgtgtgactggtatatagatgaataaatcagatggagatttaatgatctagaagaatgtctgaaatgaccatttttggggatgaaagagcaaacagaaaaatttagtgggtatatgagacactactgggtgccttcttgagatgtagggtagttgtttttaaatgagaccagtcagcatacttttaagttcgtgtgtagcttactgcacctgcacaggtgcagataacasatagactaattcagggagtataagaaagggagagcagggcaaggggattgaggatgaatgcaagaacgtgcctattgagatgggttgtggaaatgtagcttcataagaatagatgtgcagagctatgggtaatgaaattacggtagagtcagtggagcagacattatgata

SEQ ID NO: 746064 - DNA, 617 bp, Homo sapiens
tagccattgctttgattgtgctttgtcttcaggattgtgctgataaagccatgttccatctcctgttacaattctttgaggaaatgcttcaagatcttgatcccacttgtttaaaatttccattgaaagctctgctcttctctgcagcagctgacctgggtgcaatagttttggcacccactaagtggaaaatttgctcaactttaattttttaatcagaattgtgcaagctgaaccagttgagatgtctatggtgttggctattrtttgggtcattaattatcagtcctcttcaattagggcacaaacaagattttttttttttttttttttttttttgctaattgatgtggatagtctccactgagggctttgttttcaatgctatttcattccttcttaaaatgtattattcatttgtaaactgctggtttctttgggacattgtccccataaacttttcataaagtgtgaacgatttcatcattcctccacccaagattcatcataaatttgatgtttgttcttgctgcaatattagtagaattcctgttgctctgatagggctcaattgaaaatgatgtcttatcctttttagtgactcaaactagataccg

SEQ ID NO: 746065 - DNA, 609 bp, Homo sapiens
agaaaccactcatttttattctgtttttttcattcattggctggccagttaggctctgtgcagtttatccaatatgttgtgatgctttatagtgtcttttgtccaaacctagagcttgtctccttctgggtttagrttgtctgttggcttaacagctgtgttcattgtactgtgtttgccctctgagtttcccaaaacctgctgtgccagctgctgtttgtataggctcagtgggagaaaaaaagccatcacactgaagattagacagatgtgggagctctatccagattcaaatatctagtgctgtttggtatatttctgctttacctgttggtgtcatcagttgatggggacatgttgaggctatctaaaatggactcctcttttgcttccatacacatttcctctgacggatgatgaattactgattgttatatatgtccacataagggtgtcgctaaattttcttggtttgctttagtgtttatctcccttagtcagtaagttcttatcaatatctaacccagtttcttcctattgccacctaagggaatcaattttccttgaatttttgctctaataattacctttctaaaagtatttgagatt

SEQ ID NO: 746066 - DNA, 625 bp, Homo sapiens
acaacgtgaaaactcaatcaaggtgaaatagataatctgactagccctatagccttcaaattcgttgaattcataaatttaaaactcttgaaaaagacacttctgggcccacgtgcttccactggagaattttacaaatattttaagaagaattaacaacaagcttgcatgttctcttctagctcacttgatgaagcctattcgacatcactagttattagggaaacgccaatcaagaccacaatgagatacacgcctaccagaatacctaaaataaaaattataatagcagaaacaccaactgttgttgaggatataaggaaactggattactcatcaagattgccagtgaaaatgtaaaatagtgtcatctttctggaaagcaatttggtagtttctttaaaaaactgaaaaaaaactgtacatgrgattaccatacagaccagaaattacactctcgggcatttatctcagataaataaaaacctatattcacaaaaaagcctatacacaaatgttcacagcacctttgtttgtaatagccaaaacccaaaatcagcacagatgtctagcaacaggtaaaatggctaaaaaaactggtacatccataccattgattactact

SEQ ID NO: 746067 - DNA, 636 bp, Homo sapiens
atttggatcctgttgaaatcctctttcatcctatttctctacacatgtttttcctagcctctttgctccttcctgtaaaagaaaagccctttttgcataacccttgagatgattacagatcagtgttgtccctgtggcaatagcttcactctccctatgcaatggttcttttcccctcttccaataatcttttcaaataaagtctctcttaataaatccagatttgtttttttatttgacagtccccagtgtctaaaaggtgcctggctcatgatagatagctaatggatatttgttatggactaaaaatagattgctatttgggattctagccaaaatattgtagctcttttktgtcaacccgtatgcctggtgaatcccaatgcttgttgttgaaatcccaacactgtggagccacacagaggcagtttcactttgaactggctgcaggatgcagagacagaatctcaggagagacaaggcattcaagcccagaatgggtgcctgatggtagaaataaaattgccattaacctattatctcatttcattttattcacttgcagaaagaaatgcatgttctgatcatctgcagatttcagtttccctgttacccactcagtccttcacagcatac

SEQ ID NO: 746068 - DNA, 607 bp, Homo sapiens
gggtgggcacaatctaatctgctatcagtgtggctacagtataagcaggcaggaaaatgtgaaaagagagactggcctagcctcccagtctacatcattctgcagtgctagatgcttcctgccttcaaacatcaaactccaagtccttcagtttttggaactggcagtccttgcccctcagcctgcagaagtcctattgtgggacctgtgatcatgtgagataatacttaataaactcctcttaatacttaaacttaatacttaataatctcctctctctctctctcctatatataaaaggagatatatatatatataaaataggatatatatatataaaatatatatatawaaaataggatatatatatatgtgtatatacacatatatgtatatatctcttattagttctgtccctctagagaaccctgactaatacagattttggtgccaggagtggttctagaggaacagaattgaggatggagttctttcactggtttgggggtttctggagttggctgcttaaaatgattagaccccaaaatgctaaggacactacttctaatattatggagaacactgatagtccttgaagtgaactgtt

SEQ ID NO: 746069 - DNA, 607 bp, Homo sapiens
gggtgggcacaatctaatctgctatcagtgtggctacagtataagcaggcaggaaaatgtgaaaagagagactggcctagcctcccagtctacatcattctgcagtgctagatgcttcctgccttcaaacatcaaactccaagtccttcagtttttggaactggcagtccttgcccctcagcctgcagaagtcctattgtgggacctgtgatcatgtgagataatacttaataaactcctcttaatacttaaacttaatacttaataatctcctctctctctctctcctatatataaaaggagatatatatatatataaaataggatatatatatataaaatatatatatataaaatagratatatatatatgtgtatatacacatatatgtatatatctcttattagttctgtccctctagagaaccctgactaatacagattttggtgccaggagtggttctagaggaacagaattgaggatggagttctttcactggtttgggggtttctggagttggctgcttaaaatgattagaccccaaaatgctaaggacactacttctaatattatggagaacactgatagtccttgaagtgaactgtt

SEQ ID NO: 746070 - DNA, 675 bp, Homo sapiens
ccctggaatcaacgtcagctcaggaagaccctgatgaagctgggcacactaagtttgtaaactctgatgaaatttttttgccagaagaaacagcttccccatctcctgtagtggcaacatttcctccctaacccatgctgccattagcctttccacttttgtctgaggagacaaaccctatactgcctgaggcaacagtgatggcctcccctgagacagttaccaggtaagataatgttgattctccccaggagccacccccaacacccctgtttgcttctagatctataactagactaaagtcccggcaggcccctagaggtgaggttgagagtatgaccatgaggaggcatactacacttaaaaagaactgcttgagttttctaatttatataaacagaaatctggagaacagggatgggaatggatagtagggtatgggataatggtggaaggaacacagagttggatcaggctgaatttattgatttgggcccactaagtagggactcrgatttaatattgcagcccaggaagttaaaaagagttctcatagtttatttgcttggttagctgaaacatggattaaaagatggaccactgtgagtgagctggaaatgcctaatctctcttggtgtaatgtagacaaagggatccaaaggcttagattgggat

SEQ ID NO: 746071 - DNA, 675 bp, Homo sapiens
ccctggaatcaacgtcagctcaggaagaccctgatgaagctgggcacactaagtttgtaaactctgatgaaatttttttgccagaagaaacagcttccccatctcctgtagtggcaacatttcctccctaacccatgctgccattagcctttccacttttgtctgaggagacaaaccctatactgcctgaggcaacagtgatggcctcccctgagacagttaccaggtaagataatgttgattctccccaggagccacccccaacacccctgtttgcttctagatctataactagactaaagtcccggcaggcccctagaggtgaggttgagagtatgaccatgaggaggcatactacacttaaaaagaactgcttgagttttctaatttatataaacagaaatctggagaacagggatgggaatggatagtagggtatgggataatggtggaaggaacacagagttggatcaggctgaatttattgatttgggcccactaagtagggactcggatttaatattgcagcccaggragttaaaaagagttctcatagtttatttgcttggttagctgaaacatggattaaaagatggaccactgtgagtgagctggaaatgcctaatctctcttggtgtaatgtagacaaagggatccaaaggcttagattgggat

SEQ ID NO: 746072 - DNA, 527 bp, Homo sapiens
gttccactggactgcaggaaaataatctatctttactttgtagcaaccatgacctcagtcactgggattactagagttctatgagaagacaatgtatttttttcaactatacaccatttctttgaatgatgcctgtctcacagtgttattctgtcaattatatcagagatttgttggttagaaaacattccacaggtgtgtgtgtctgtgtgtgtgtgtatatatcctttttattttggttgagcctgcttctgaaactatattccttctagtttgcctctagaatttcatccataggttattttagcctcctaagactatgaaattggattccaatcttgtgaacactgccatctaagaatttttagtacttttttttwaattttaggtcagatgcaatgacttctgaggacaacttgtctacttgcaacaattctagttgaatccaaaggaagagtcactaacattcattttctaatggaataaatattataaatataaatggaaagactattataaatcattta

SEQ ID NO: 746073 - DNA, 615 bp, Homo sapiens
ttggtatatgctggcttttcaccatataaatccacagaaatcaagatacagcaggtactatgagtgccaaattttacagagggtcagcatagctaggggtccatataacctggaggttgattttggtttcatgttgatagaaaaataaattagtgataaattaaagatgatagaagcctttcagcccaaaatacaacctgtgttaaatttactgmgtgaaacacaaattgcagaatctctggttattttgtgaacctctctatcaaatctgcatcccatgagactccttgccagctataatcttttggagaaggatcactttagaataggctgctgctagatttacctgagcttaacatttatttggaaatattgattactcaaaatctgagtaggctgtcaatatgattgtctgtggttaattttatgtgcaaataatcatggccaatgatgtcacaacatacattttaaaacatgataaggtttgttccttagccatgagcctttctgcttggttcattccttctttttatttttttcttctatggtataaggacatttggaaaaataaactcaaatgaaaaacaaacttacttagtgcagttaatcccaaaa

SEQ ID NO: 746074 - DNA, 582 bp, Homo sapiens
aaagctgaaaggcgaggagcaagattagaaggtttaaaaaggaaactagataactaaggaagaaaagtcccaccaagcccatatttctctctcactggagcttgtgaaagggccagattggcaggaatgaaaaggaaagtccttttttattaagctcacctgtatagtattatctcttcagaggtgtttatgaaaacattcacacacagtaaaacatgcctctgtagacccagtttttattgaatttcctcagctctccatcaaattttaaaatccttgtctattactccatctctacataaatcataccccatgtccattagattctggcttagctgcrattctctccagctcctggtaatttgatatagaattatgtatcacgctgaaaaggcacctctatcctggcctttcaaatcacttggggatgcatgacaattgtcttgtttcatttcatgggggaaaaacaaaaacagaatctagaggaaaagaaaaaaaatcgcttgcaattttattacctcagagtctcaattactttggtgctaatgacccatcctcctacttaaacaccatcttgatcct

SEQ ID NO: 746075 - DNA, 620 bp, Homo sapiens
gtggtactgggataaattagacatatcatcaatggagtagaatcacaagtccagaaataaacccttatatttattgtcaattgattttcaacagatataccaagacaattcaataggaaataatagacttttcaacaaatgatgctgagacatgcgaagagtgaagtcggatcccttcctcacrtatcatatatcataattaactagaaaatgatcatagatgtaaaagctatgattatgaaactccagaaggaaatacaggaatgagtctttctgactttggattaggcaaagccttagatgtgacaacaaaagtataagtggtaaagtaaaaatagagaaaattcatgaaaattaaaaaactttcctgcttcaaaggatatcatcaagaaaatgaaaaggcaatccagagaacaggagaagatattttcaaatcataaatctagtaagcaacttgtatctagaatatataaaggacttttgccattaattaaaagataactatccagttaaagaatggacagaggatctgactggacctttccttaaaaaagacatacgttgaaaaacacaccaaagatgctcaaaaccattagctagcagggaaatgcaaattaaaa

SEQ ID NO: 746076 - DNA, 480 bp, Homo sapiens
taatatctcttttgcttatccagtaagtaacctcagtattaaatagagaggaaaaaaaatcacttggtgaagatatccactcccaaacagcaatagatggaaaaggttataaatccagttacgattcaactaaagactaattggaccgctttcataagaayagatgagacttcctagcaaggcagacaattgatcgtgccctgtaattccagacagtccttctgtcagagatgctgagaaaggtcccactgagtcaggacctgccactggaaccctgcgcctggcagggaagggaccccagaggatgaagggcagggacttggggtactgacttggctatgcaatgacctaattctctaaaaaaatgcagattttgtcatgccttatgtcctgaatctgtgagtatctctgttctatgtgatagtgtagaccgtagatgctagaggagcagcaagttgtttaaacattttaaataaaaag

SEQ ID NO: 746077 - DNA, 480 bp, Homo sapiens
taatatctcttttgcttatccagtaagtaacctcagtattaaatagagaggaaaaaaaatcacttggtgaagatatccactcccaaacagcaatagatggaaaaggttataaatccagttacgattcaactaaagactaattggaccgctttcataagaacagatgagayttcctagcaaggcagacaattgatcgtgccctgtaattccagacagtccttctgtcagagatgctgagaaaggtcccactgagtcaggacctgccactggaaccctgcgcctggcagggaagggaccccagaggatgaagggcagggacttggggtactgacttggctatgcaatgacctaattctctaaaaaaatgcagattttgtcatgccttatgtcctgaatctgtgagtatctctgttctatgtgatagtgtagaccgtagatgctagaggagcagcaagttgtttaaacattttaaataaaaag

SEQ ID NO: 746078 - DNA, 621 bp, Homo sapiens
ctggctacatatactgattccttctccaaaaccttttcctactgcttttaaagttccgggaggacagtcagtctatctttttttgcaggtccagcttttaacagggaactttgcgcaaatttagtaactcctgattgtctgattcattatttggttgaattaaagaattgaataagtttccccattctctttgaagtactctatrttaggttttatgaacaagagagagggctgtgtaggagaaagcccataaattgcaatcagggatctgggtgtgagttctataacctcctcctaccttgcaaaacctaatagcttcatgatggcaaaatattctctaccgttaaaagcagataatcatcctacatcatgatgcagagacatctgacctagtgtctagcctgtgtcagagctcagcaagtactagttgctctttctatttcactctactctaatgttaaggcaggactctgaatatagttcactggtctgcattgggatgaacctcccagagacaactaaagcctcaggacaaacaaagcatttgcccgtgtagcctcagggcagcccagagccaagatactctggctgattttaatgtgtgcttcgctgtggtgcatc

SEQ ID NO: 746079 - DNA, 621 bp, Homo sapiens
ctggctacatatactgattccttctccaaaaccttttcctactgcttttaaagttccgggaggacagtcagtctatctttttttgcaggtccagcttttaacagggaactttgcgcaaatttagtaactcctgattgtctgattcattatttggttgaattaaagaattgaataagtttccccattctctttgaagtactctatattaggttttatgaacaagagagagggctgtgtaggagaaagcccataaattgcaatcagggatctgggtgtgagttctataacctcctcctaccttgcaaaacctaatagcttcatgatggcaaaatattctctaccgttaaaagcagataatcatcctacatcatgatgcagagacatctgacctagtgtctagcctgtgtcagagctcagcaagtactagttgctctttctatttcactctactctaatgttaaggcaggactctgaatatagttcactggtctgcwttgggatgaacctcccagagacaactaaagcctcaggacaaacaaagcatttgcccgtgtagcctcagggcagcccagagccaagatactctggctgattttaatgtgtgcttcgctgtggtgcatc

SEQ ID NO: 746080 - DNA, 621 bp, Homo sapiens
ctggctacatatactgattccttctccaaaaccttttcctactgcttttaaagttccgggaggacagtcagtctatctttttttgcaggtccagcttttaacagggaactttgcgcaaatttagtaactcctgattgtctgattcattatttggttgaattaaagaattgaataagtttccccattctctttgaagtactctatattaggttttatgaacaagagagagggctgtgtaggagaaagcccataaattgcaatcagggatctgggtgtgagttctataacctcctcctaccttgcaaaacctaatagcttcatgatggcaaaatattctctaccgttaaaagcagataatcatcctacatcatgatgcagagacatctgacctagtgtctagcctgtgtcagagctcagcaagtactagttgctctttctatttcactctactctaatgttaaggcaggactctgaatatagttcactggtctgcattgggatgaacctcccagagacaactaaagcctcaggacaaacaaagcatttgccygtgtagcctcagggcagcccagagccaagatactctggctgattttaatgtgtgcttcgctgtggtgcatc

SEQ ID NO: 746081 - DNA, 560 bp, Homo sapiens
atgcagagacatctgacctagtgtctagcctgtgtcagagctcagcaagtactagttgctctttctatttcactctactctaatgttaaggcaggactctgaatatagttcactggtctgcattgggatgaacctcccagagacaactaaagcctcaggacaaacaaagcatttgcccgtgtagcctcagggcagcccagagccaagatactctggctgattttaatgtgtgcttcgctgtggtgcatccacttggagtcattccggatcatttcttttyattctcacgcgggagccccctgaacaccctcatcggcatggtggctacacttgatgctaatttggctggattatctgcgctacaggcttgtcacggagttgggtggcaggagttgtgtaaattgcagtttatctaacacagactttgtgccagacatgttcaacactttacagatattaattcaattctgtgaggtacacactgttattattgccattttagggatgacagaaccgagacacagaggttaaataacatccccaagtggcatagctggtgg

SEQ ID NO: 746082 - DNA, 560 bp, Homo sapiens
atgcagagacatctgacctagtgtctagcctgtgtcagagctcagcaagtactagttgctctttctatttcactctactctaatgttaaggcaggactctgaatatagttcactggtctgcattgggatgaacctcccagagacaactaaagcctcaggacaaacaaagcatttgcccgtgtagcctcagggcagcccagagccaagatactctggctgattttaatgtgtgcttcgctgtggtgcatccacttggagtcattccggatcatttcttttcattctcacgcgggagccccctgaacrccctcatcggcatggtggctacacttgatgctaatttggctggattatctgcgctacaggcttgtcacggagttgggtggcaggagttgtgtaaattgcagtttatctaacacagactttgtgccagacatgttcaacactttacagatattaattcaattctgtgaggtacacactgttattattgccattttagggatgacagaaccgagacacagaggttaaataacatccccaagtggcatagctggtgg

SEQ ID NO: 746083 - DNA, 583 bp, Homo sapiens
ggtgccatcacaaagtgccaaaaatccagtggcttaaaacaacaggaatccattctctcatagttttggaggctggatggaggtgcaggcgggaccacgcttactccgagggcttcggggagaacgttccatgcccctccagctcctgggggctcccggcaatctctggcattccttggcttgcagcagcacggcccccgtcttcscctccatcttcacgtggacttcttttttctatgcgtgtctctgtgtctgctcttcctcttgcaaggacacccgtcattggagtcggggcccaccctcctccagtatgacctcatcctaactgattacatctacaaagactctatttctaaatcatgttgcacttgggtttctgggtggacataaatgcgggggcattatcaggccagtccacttgcacttgcttgttggtgtcagagcccgtccctaaaccagggctccatatgggctgcctgtctgccgcaacacagcctagcggggaaacagtagaaatgccacttctatgtatttatcatatttattttgaggtaagttatatgacatatataataaattagta

SEQ ID NO: 746084 - DNA, 615 bp, Homo sapiens
ctaacgtgacgactggcgtttgaatccatgaggaggaggaagggcgcgtacaaacattctggcctgatgcttcctcatcaggaataccaaatcagagagatcccagaggcaaaagcaaagccgttccttagttcatctgcagacaccagcctttttttttttctgtctacgaacactaagtttcctaaagtaactgaagactaaatttttaaaaaatgaaaaatttcctaaattagtaacttacaaaatatcctcagataatcaataatccttaaaaacattttctcacagaaagttgtattagttcaagcacttgctcttattaatwggttaaactctcactttctctgccttgtcctagccaagattctgaaacatgggcagaattatgtgtgggttttttgttttttgttttggcacacgatgagaagaggcatggcttacaacagcaataaaaaggacccagccctttaaaaaagtttagcatcttctgtatacattaaggtttttggtaaatgtttcaaatgaattaccgcaaaacaagggaaatcacatgctactcggggccttgaataatctctcaatgaaggaggttagttcattaatgatccccca

SEQ ID NO: 746085 - DNA, 624 bp, Homo sapiens
tccaccatctttagcaggaagctgctccctccttctttccccatcagctttcggtgagcaaatggtactcagcacctcctggaagccaccaagagcacctctcatacctgtgcacacaaggccagccccaccgcctgctgctcrggccgcggttccctccgttccttccagaaactcatgcaggcacctgggagaagctgcctccaatgctgcctgctctgttgaaggagaattccattttctctttcgtggctactgtcttatctcaggtccctttgcccaagtctctagttcctttttttcttccagccagtcatttaaagtttatggaccttttcctggcaaatccatagattttttttccccctatctaatcatgaccctaattttaaatctgacctaagcagggcacctgctgtggtcctcccatttacagttctcttgagcatttcattcatttattcatctgccattctctactctagaagtctctagtagcctttgtgcttaatcattatattgatgttgattttgaggactgtgaaatattttatgatctcaacgtgtctcatcaaagcaattgtttcatgcttttcaggtgcagagtttggaggtctggtaata

SEQ ID NO: 746086 - DNA, 624 bp, Homo sapiens
tccaccatctttagcaggaagctgctccctccttctttccccatcagctttcggtgagcaaatggtactcagcacctcctggaagccaccaagagcacctctcatacctgtgcacacaaggccagccccaccgcctgctgctcgggccgcggttccctccgttccttccagaaactcatgcaggcacctgggagaagctgcctycaatgctgcctgctctgttgaaggagaattccattttctctttcgtggctactgtcttatctcaggtccctttgcccaagtctctagttcctttttttcttccagccagtcatttaaagtttatggaccttttcctggcaaatccatagattttttttccccctatctaatcatgaccctaattttaaatctgacctaagcagggcacctgctgtggtcctcccatttacagttctcttgagcatttcattcatttattcatctgccattctctactctagaagtctctagtagcctttgtgcttaatcattatattgatgttgattttgaggactgtgaaatattttatgatctcaacgtgtctcatcaaagcaattgtttcatgcttttcaggtgcagagtttggaggtctggtaata

SEQ ID NO: 746087 - DNA, 571 bp, Homo sapiens
ccctttgttgacttcaagctattttttgtatttgttgtaaggattactttagagttttatagtatatatatttaccttattacccctctaattttaaagatattctattattttgtgtatattatgaaaacctttcaatgttatagctttctctcctgtctgcttctatgctatgtttctcatgaattttacttgttatacatcccataatatgttgctatttttctttaaagtcaattatatttaaagagatttaatggtaagtaaagcagcttgtatatttgcccatgtcattgccattttrttttatttctgcattttatttctgtttgtcaatccatgattgtatctagtatcataagccttcactgtaaaagtccttctttactattttctatagtgcagatctgctggtgaaaaagtgtttcagcttttgcatatctgaaaaagtaattattttttcttcattattaaaatacagtttgctgagtaagggattatatttttattttcctattgtaagggtatgttttcactatctgctagctccaattgtttctgacaaaaactg

SEQ ID NO: 746088 - DNA, 571 bp, Homo sapiens
ccctttgttgacttcaagctattttttgtatttgttgtaaggattactttagagttttatagtatatatatttaccttattacccctctaattttaaagatattctattattttgtgtatattatgaaaacctttcaatgttatagctttctctcctgtctgcttctatgctatgtttctcatgaattttacttgttatacatcccataatatgttgctatttttctttaaagtcaattatatttaaagagatttaatggtaagtaaagcagcttgtatatttgcccatgtcattgccattttgttttatttctgcattttatttctgtttgycaatccatgattgtatctagtatcataagccttcactgtaaaagtccttctttactattttctatagtgcagatctgctggtgaaaaagtgtttcagcttttgcatatctgaaaaagtaattattttttcttcattattaaaatacagtttgctgagtaagggattatatttttattttcctattgtaagggtatgttttcactatctgctagctccaattgtttctgacaaaaactg

SEQ ID NO: 746089 - DNA, 514 bp, Homo sapiens
tatatatgagtatatataaataaataaatttatatatatactcacatatatacacacacacacatatatatacacacactcattttatatatatattcactgtatatatatactcactatatatataattttagggtaggatcttgttactattatttgtaaatatatatacaaattatatatgtacattaattacttataattatattatatgtaactrtattttaatattcatatctatatatttataaacattcctcctcaaaacttgaccaaggaaacattgccaccatattttgtcaaggtgtttaacaaaagctagagtcaccaattattttctggaatcactagccgtattatatatatatatcataataaaaccaaatttatacaaaaactacgtgctgtaaagtttcgcaaaattttggaaagtatgcacagttctgcaaaatcagcaacaggaagcatccatttatcaatgtatcctatctatctggttcctccaataccagaa

SEQ ID NO: 746090 - DNA, 527 bp, Homo sapiens
cagagaaaacaatttgcagactcagaagtaactcagtgtgctcacatttcattgatcaacctctcccctaacgtcctccattactcttctactagctcactttgtcttttttcttagtagagtatggtccaatctcccttgtataaaaaatagttttgaatagttttgaataaagtcttccttatccatttgtttggcacatcgtttgctttatcagtgttccagaaaagcctacagatctcttaaatgaagagcatgagttcccagttatcttttttgttcaaaakcaccaactatcaccgaatttcaaagttgaatatagaaaagcccctgatgtattgaaaaaaatggcaactgtgaaactacatgatcttattttcctgcagctcttcttccctacctctttagataaaatcaaattgttcaccaatggctgttaatctgaaaaaacaattcctccctcttttgaaaatcattaaacaattattttagacaccagaaaagtaacaaaagaactcacctttctt

SEQ ID NO: 746091 - DNA, 577 bp, Homo sapiens
taaacaagcaaacaaaaatgtaaaaagaaaactaatagacactctacactttaacttcatccccatgctttttacctttttcttgtttccctttacatcttattattctgtgtcttgaaaagctgttgtagctattatttttgattgcttcatttagtctatttaagtcaagagaagtttacacaccacaattacagtgttataatattctgtgtttttctgtgtgcttactataaccagtgagttttgtactttcaaatgattttcttyttgcttattaacatccttttctttcagattgaagagcttccttgaacatttcttagaggacacgtctggtgttgatgaaatccctcagcttttgtttgtctaggaagctctttatttctccttcattgttaaaggatattttcagcagatatactattctagagtaaaagggttttttttttctttagcactttaaatatgtcctgccactctctcatggcctgtaaggtttccactgaaaagtctgctgccagacacattggagctccattctatgctgtttgttttttgctgctcttaggatcct

SEQ ID NO: 746092 - DNA, 568 bp, Homo sapiens
ctaaattggtaccttagtagctcatatatctaccagcagtgttcaaaagtgccatattttgtttctccagcctttccttcagggtgtatgcttgtgtatttttatcaatattatgtatgaatattggtatcttttcatgttttaattttcatttcttccttttcatagttactttattttctgtagttacttttttgtattgagatatcacttatagtaaactgcacaaatatgaggtgtagargtcaatgaagttttatatatgtgtttatacacacatatacacacatgtaaccacagcccagattaagatatagaacattttctagatgttccctcatgctccttttctgtcagtatttgcccccagaagtcaatgctattctgacttacataccataggctagctttatctattcttgaaaagattccgtttatatgaatataaatcttttgatgaaaggaaattattaattttaaataatgctgctgtgaacattgttatatgtatatcttttgatacacatgtatatgtatatctgtgggtatgtgcctaggagtgaaatta

SEQ ID NO: 746093 - DNA, 497 bp, Homo sapiens
aagataaggtttagtaaaaagatttaaaattacacagtcattctatataggttcttagccttatgtttctttatagtatatgtgaaaccttattatttatttgtatgttaattgctttcttctgtaaaatataagttctaaagagaagaaccttatcttgttaactgctgtaaacatagagcttagaatcatgctcagcttatggtaaagtaagcatttttcattgacttatcgagtagtgagtgggtaatgaactgatttaatagtgggtaattaagaaaattagaaaagacttcaaaatctttacttaaccaaacgcttaacactatcaagctgtctaaagagtgttgcttaaactaaartatttcccaaagaactccaagggtgtttttttgagtggctgctctatttaggattgaactattacagtattcccactgtctgctctgaactatcttatatctcctggactatagcatgaggcagagaaggaactg

SEQ ID NO: 746094 - DNA, 494 bp, Homo sapiens
tctcgtatccctcagtcttgaagaacatacactgacacagatgagtgggatgcacaaaatcatagggattcaagaaaggtaaccccaaagaaactcaaagacaatacaactcttaacagttatattatgaataaccagtctcaaacttagcatgttagttcttggaaatatttacctggcagagtaagaacccgctgggacaattacagggttcttcagccactgaatygattttaaatcagtttctgtctgggagaaatttggaatatctccttcattgagaaggggcacaataagcacagctataaaaatcaaggaaaccatgaaaatagtttcttatattaatacagcaaacatattcctgaagggattgataatttcattttgtttttaataataattaatctttgcaatatcctggtggagagatggagagataaaggatgattactaccactttagagggggaaagatagaaaggacatgacattaaa

SEQ ID NO: 746095 - DNA, 613 bp, Homo sapiens
ttacactttctggttcctgtaatccaaagaatgctgctaatatttttcatttctgattctatgaaaattttaaaagaattttaaggtttttattgacctaataactccgcagtgttccactgtaataatacatacacccttgtttaggggcttagcaggatttataaaagtctaactttttagctgtgatagaataaaaaacacccaatttaaaggcttttagtgtcataatgggaaaaacacactacacatcactatttacccaggggctactaggggaccaaatctctattttataggaagawttctggaggaagtttttattgtattaaaggctactgtgcacagaatgctgtacagatttctattctagttttacacaaaggtgatactcgcaatctattacacattattacctatgtcgatgaaaagagtcaaactctgtaaaatgcctgaagagatttattctgaggcagatgtaagtggccatggcccgtgacacagccctcacgaggtcctgagaacatgtgccgaaggtggttgcggtgcagcttggtttcatacattttagggaggcaggagccatcaaacaaatacatttgaaaaatacact

SEQ ID NO: 746096 - DNA, 642 bp, Homo sapiens
gccaatcccaccatcatggctctctgtgagaagaaagaatgaagagatgattgttggagaggtggccacacgcaccgcactctctgtgagggctttgcagcatttactcagaaagacagtaagacaataaggaccaccttgacaacacgttctaagggagaaagtactaaagacactaggattgtgtgaaaacccccacgcctcttggagagggttttcttggcaaaagacaactataaaatgtgccaggtttttttttccttcttctcttttttgagacagagtttagctttgtcgcccaggatggagtgcagaggcatgatctctgctcactgcaacctccgcctcctgggttcaagccattcttctgcctcagcctcctgagtagctgggaytacaggcacccaccaccacgcccagctaatttttgtatttttagtagagatggggttccaccatgttggtcaggctggcctcaaactcctgacctcaagtgatccgcctgccttggcctcctaaagtgctgggattacaggtatgagccacttcacccagctaaaatgtgccagttttacctgaaataatttattcagtaatatattcaccccctcccccaccaccacaagcactttactttctaca

SEQ ID NO: 746097 - DNA, 642 bp, Homo sapiens
gccaatcccaccatcatggctctctgtgagaagaaagaatgaagagatgattgttggagaggtggccacacgcaccgcactctctgtgagggctttgcagcatttactcagaaagacagtaagacaataaggaccaccttgacaacacgttctaagggagaaagtactaaagacactaggattgtgtgaaaacccccacgcctcttggagagggttttcttggcaaaagacaactataaaatgtgccaggtttttttttccttcttctcttttttgagacagagtttagctttgtcgcccaggatggagtgcagaggcatgatctctgctcactgcaacctccgcctcctgggttcaagccattcttctgcctcagcctcctgagtagctgggactacaggcacccaccaccacgcccagctaatttttgtawttttagtagagatggggttccaccatgttggtcaggctggcctcaaactcctgacctcaagtgatccgcctgccttggcctcctaaagtgctgggattacaggtatgagccacttcacccagctaaaatgtgccagttttacctgaaataatttattcagtaatatattcaccccctcccccaccaccacaagcactttactttctaca

SEQ ID NO: 746098 - DNA, 658 bp, Homo sapiens
tttcccttgggaaaagtaggcatagacctgcctctaaatcaaaggcttcaagtaccaaaggtaacctcatggctttttgtgggccagtgaaaacacacagtcattaccacaaattgaattctattctcagaagaaagatttacctattcccagcgatctgcttctagttataccagcctgtgttcagtgactttatatgagctaaaactggtcaatgggataggtccctaaagcatgtgcttctctggtagaaaattctatyatttctagtgatactacaaatttgaaataaaattggagtaaatattagaactgtgctttcctctaatgtacaaaaagggaaaggagatgtagaaatatatttctctgttttaaaagcattatttcattctttatttcaaaaagaagccatacaaatacagatttacaaaagaaaaaatatctataatctcaccaaccaggggagagagttaacatcttagttgttgttctttccaatttttatataaatatgatgtatgtgcttttctacgtatgtacccttttatttttaaataacaaaaatgtcatcatatacacaatctgtccccctcctagaatgaactcactttgggggcagggactgcctttctaatcttattatctgctctattctcat

SEQ ID NO: 746099 - DNA, 628 bp, Homo sapiens
cagctagaccgtaaaatatatgagggctggaaaaagtaggcaacgaggctggcatggggtagtcctaggtgactggaagatgaggctgtacataaaagctggttcttaattctctagatccttgaatgacatgcccagggttttgtactgaaatagaaaatgtgcactcacagaaggtttttacaactctgctttacttaaaagtactacagtctctcaaattcttgtaaaaaatctgaatgaaatacatgtcacgtgatttcattacaataaaagaatattctgaaaattgccatgggcaattagakggttttttttaaatttcaaaactgagagaagtttctgtttattacagtgacatttccaaaattatacacatcactatgaatcagaatcttttgaatgtatttatctcttttctgtcagtttttttgaactaaaaaagatacatttttattcagttatttttatagtcatcattagttaaatatattagtcaaattcaaaacaaaatgtcatacttactttaaagtcttactgagctatgatacattaattctaggaaactcactgaatagcactggttcagttgaaatgcaaatgccatacacatgcaattcacaaagca

SEQ ID NO: 746100 - DNA, 549 bp, Homo sapiens
ttaaatgggttttaagtaagagggtgacatctgatttacatcttccaaagatcaccataatttctgtgtggggaaggcattagaactgggtaagtgtggaagcatggagttcagggagccacgcaggagatgatggtgatttaaatggggctggggtgagggaggttagtgaagataaagagacatggcagatctgagatatayactgatatggaggaagcagaatttggtagtgggctgtatttcaggagggagggaaaagatgaatcacagatgattcctaggtttctgtcttaactaactgagcagatggtggtgttatttaccaaaacgaagaagactacaggaagaaaatgcttgtgggataaaaaaaaagaattcaaatttagacatgttaagtttgagatcctgtgaaacatctaagctgagaggatcaaacacatacatttaggaggtgaaagcaggtggacagatgaataatacttaaagcacagtaatgggtgtggccacctagagagaatgtgtgcacatacaagagagaggaatcag

SEQ ID NO: 746101 - DNA, 640 bp, Homo sapiens
tctcctctgcctgtgcgccacccatggagcgacaaagcccggatgacggcacctctgttcacagcatggtttaccgaaggttttaagcccaccattgagacttaactgctcataaaaagagccctttaataatattactgctcacggacaatgcacctggtcaccccacgcaggtacaaacactgtttttttagacacattgctggtgcacacttaacagactcagtacagtgtgagcgtcacttttatatgccctggaagccacacactccagcggctttcttttgccatactggctgtatcccagtggtctgaggctgaacctgcgacgtctctgaggtgtgcatgcaagggagccactgagtctgtggtctcgtgtgtggatttttcccagagcatgagggtttccaggttcacctgagtcctggsgtgctcagtactcattccttttggggatggataacactcgggtgaggataaaccccacctttcctctctcttccccacatgctgggcattgtggttgtttcagatgtttggctaaagaacgctgtgaaggacagtcatgtacaagcctttgtgtggatgtgtgcatctgtttccttgaatacatacctaggagtggaactgctgagtcaca

SEQ ID NO: 746102 - DNA, 565 bp, Homo sapiens
tgggcacctgtcctgatttaagtaccggggaaggggatgaggggctagcgagggtgcagggcggctccgtgcccttccaggccactactggacaaaccttggggaccacccagagatcacaccactcgctggcctggccttccatctcccggagttctgggggtctgccgatcccgagagccttgttaccctcagtgtcctgggatgtacgtcatccccaaacagggtgtctgcagccccaggatggagactgccctagtttgtctcgcacaatgacaatcccagcgcygggcctgggactcttatctgttttatccagctccatggtctctgctttacttccctgtcctgttgttgaggccacttgggggaaggatgggcctcttgaggcttagtcccaggcccaggcaggcaaggaggcatgagtgggcagggcgaggggccgcaggaaaggagacgcagttgcttcagctctctgccgagtagttgttggaaaaccttcatttgatctctacatcagctcccaatttggatacgtgattcccactaaacagtgtagaggggg

SEQ ID NO: 746103 - DNA, 565 bp, Homo sapiens
tgggcacctgtcctgatttaagtaccggggaaggggatgaggggctagcgagggtgcagggcggctccgtgcccttccaggccactactggacaaaccttggggaccacccagagatcacaccactcgctggcctggccttccatctcccggagttctgggggtctgccgatcccgagagccttgttaccctcagtgtcctgggatgtacgtcatccccaaacagggtgtctgcagccccaggatggagactgccctagtttgtctcgcacaatgacaatcccagcgctgggcctgggactcttatctgttttatccagctcyatggtctctgctttacttccctgtcctgttgttgaggccacttgggggaaggatgggcctcttgaggcttagtcccaggcccaggcaggcaaggaggcatgagtgggcagggcgaggggccgcaggaaaggagacgcagttgcttcagctctctgccgagtagttgttggaaaaccttcatttgatctctacatcagctcccaatttggatacgtgattcccactaaacagtgtagaggggg

SEQ ID NO: 746104 - DNA, 594 bp, Homo sapiens
agctcactatagcctcgactaccggggctcaagcgatcctcctacctcagtctcccaagtagctaggaccacagatgcatgccaccacagccggctaatttttttaatcattattttttgtagagaccaggtctccctatgctgcccaggctggtctcgaactcctggactcaagcaatcctcctacctcagcctcccagagtgctgggatgacaggcatgagccaccatgtctggcctatgaccttaagttaaatgaagacaacaggatgcaaaactgctaacacagggtgatcacayctgacttaacaatacaataggaaaaaagatgggaagaaatttgttagaaacacctgtgtggagtgggggagcagcggcagggaaagtatcaggaaaaatagctaacgcgtgctgggctgaattcttaggtgacgggttgatagctgcagcaaatcaccatagcatacatttacctatggaacaaacctgcacatcctgcacatataccctggaacttaaaataaacaaatactaaaatacctgaagaggaaaaaccaaaacagaacacctatccacatctaaaaagcaaacagga

SEQ ID NO: 746105 - DNA, 594 bp, Homo sapiens
agctcactatagcctcgactaccggggctcaagcgatcctcctacctcagtctcccaagtagctaggaccacagatgcatgccaccacagccggctaatttttttaatcattattttttgtagagaccaggtctccctatgctgcccaggctggtctcgaactcctggactcaagcaatcctcctacctcagcctcccagagtgctgggatgacaggcatgagccaccatgtctggcctatgaccttaagttaaatgaagacaacaggatgcaaaactgctaacacagggtgatcacacctgacttaacaatacaataggraaaaagatgggaagaaatttgttagaaacacctgtgtggagtgggggagcagcggcagggaaagtatcaggaaaaatagctaacgcgtgctgggctgaattcttaggtgacgggttgatagctgcagcaaatcaccatagcatacatttacctatggaacaaacctgcacatcctgcacatataccctggaacttaaaataaacaaatactaaaatacctgaagaggaaaaaccaaaacagaacacctatccacatctaaaaagcaaacagga

SEQ ID NO: 746106 - DNA, 594 bp, Homo sapiens
agctcactatagcctcgactaccggggctcaagcgatcctcctacctcagtctcccaagtagctaggaccacagatgcatgccaccacagccggctaatttttttaatcattattttttgtagagaccaggtctccctatgctgcccaggctggtctcgaactcctggactcaagcaatcctcctacctcagcctcccagagtgctgggatgacaggcatgagccaccatgtctggcctatgaccttaagttaaatgaagacaacaggatgcaaaactgctaacacagggtgatcacacctgacttaacaatacaataggaaaaaagatgggaagaaatttgttagaaacacctgtgtggagtgggggagcagcggcagggaaagyatcaggaaaaatagctaacgcgtgctgggctgaattcttaggtgacgggttgatagctgcagcaaatcaccatagcatacatttacctatggaacaaacctgcacatcctgcacatataccctggaacttaaaataaacaaatactaaaatacctgaagaggaaaaaccaaaacagaacacctatccacatctaaaaagcaaacagga

SEQ ID NO: 746107 - DNA, 578 bp, Homo sapiens
ttgaggtcaggagtctgagaccagcctggctaacacagcgaaaccctgtctccagtcaaatatataacaattagcagagtgtgatggtgtgcgcctgtaatcccatctactcgggtggctgaggcaggagaatcgcttgaacccaggaggtggaggctgcagtgacccaagatcrtgccactgcactccaacctaggcaacacagcaagattttgtttcaaaaaaaaaaaaaaaaaaaaaaaaaaaaattcaggggagttaaaagataacatgaagggattttaacaactttgctataattactctgtttttcttaaagaggttccttgtattgtaacaatcaagagaatattttgcaatctcttaaaacataagatggcgattaaggactgaaaaatgcttttccaatatctgccttccctttttgtagttgagataaaaataaaacgccgcagagcaaccaattaatttacccagggtccaagaaaatagaagtgtgacaagaaaatgtatcttctaatttctattcactcagaaaaatgtcaaattaagcaaagttgtggatttttaacggaaca

SEQ ID NO: 746108 - DNA, 567 bp, Homo sapiens
aattacatcagttaatctagtgaattggtttagtggaggttgattaagagagattcaactgctatttttttctctgacagcaagctctcaacgttaagaagattacctggaattaaactttaagacaaatcacattttaaatatcaaagtcaattatcatagattgagaactgtttgtgcaaaaattaagaaaatagtgttttragatacaaaaacaaaggatagaaggtaaaacttctggcatgactgaaggagaaagtcaccaaatcctcttcctgaaaacaactcaaaaactggacagtatcaccaaaatagccattcaggaccctggaaattgagcaaaggcttacaacaaactcagaagaatgtattcatgaaaaaccattgactttaaataagaacagaaatttgtagtgtatttgtctggggttgttcccatcagcctcccctcgtggtcccaaattaagttagcacagtagttctaacagaactacttgggacagcttgtgaataaccaacagcttcatcgccagaaaaggatgacttgacttggagctaaaggtaaac

SEQ ID NO: 746109 - DNA, 567 bp, Homo sapiens
aattacatcagttaatctagtgaattggtttagtggaggttgattaagagagattcaactgctatttttttctctgacagcaagctctcaacgttaagaagattacctggaattaaactttaagacaaatcacattttaaatatcaaagtcaattatcatagattgagaactgtttgtgcaaaaattaagaaaatagtgttttgagatacaaaaacaaaggatagaaggtaaaacttctggcatgactgaaggagaaagtcaccaaatcctcttcctgaaaacaacwcaaaaactggacagtatcaccaaaatagccattcaggaccctggaaattgagcaaaggcttacaacaaactcagaagaatgtattcatgaaaaaccattgactttaaataagaacagaaatttgtagtgtatttgtctggggttgttcccatcagcctcccctcgtggtcccaaattaagttagcacagtagttctaacagaactacttgggacagcttgtgaataaccaacagcttcatcgccagaaaaggatgacttgacttggagctaaaggtaaac

SEQ ID NO: 746110 - DNA, 651 bp, Homo sapiens
tagctacatattaatatgtccagtcttgcactattcatagcactgtattctcaaactggtgtctctcaatgacaaaaaacaatcactaaaaatggaaattagctggctgggtgtggtggctcatgcttgtaatcccagcacttttgtgagcccgaagtgggcggatcatgagrtcaagagatcgagaccatcctggccaacatggtgaaaccctgtctctacaaaaatacaaaaattagctcggcgtggtggtgcccgcctgcagtcccggatacttgggagactgaggcaggagaatcactttaactcgggaggtggaagttacagtgagctaatatcacaccattgcactctagcctgagcgacagtgtgagactctgtctcaaaataaaaaaaaaatttaaaaaaaaggaaattagctaagccacaaattggaaaccaatgaatttatctcaaataaaatccttaaaatccataaagctctatagatgatggatgttggagggcttttctgacaaagccaaatgtggtcgtgatgcaagatatttcctggaccccttcacaggacttgcaacaggggtgcctcatttactcaacccaccccgtgcaaacccttgcgggagggagcacacaggtgagcgagtgcgggat

SEQ ID NO: 746111 - DNA, 634 bp, Homo sapiens
gtattagtctgttcaggctgccataaaataccacaaattaagtagtttaaacaaaagaaatttattatctcacaattttgaaggctggaagttcaatgtcaagatgccaacagggtcagttcctagtgaggcctctcttcctggcttacagacaaccacctgctcactgtgtcctcacatggaccttcctctgtgcatgcacggaaagagagagatccctgatgtctcttcctctccattaaggacactagccctatgggattaggaccctacccttatgacttcatattaacttaattacactagttaagttccctcctccaaatatagtcacattaggggttaggattcaacttawgaatttaggaaggagggaaacaattcaatccagaacacctgtgtttgttcaaaatctacaaatgtagcaaatactaagataactgggtatttatagagttatttgccaattccctagaataggttattctagaggtaagctcctattacatatatggagaaaagtattcatttaccaagagtctggaaacgttaggatgccctaaaacagggcccccaaaccccaggccatggaccaatattggtccatggcctgttaggaaccaggctacacagc

SEQ ID NO: 746112 - DNA, 533 bp, Homo sapiens
ggcaccacctagtggagctgtgagaagagggccatcaccagaatggtagatccactgatggtttgcaccatgagcctggaaaagccgcagacactcaatgccagtctgtgtcaggagagaggctgtaccctgcaaagccacaggggtggagctgcccaagaccatggaaacccacctcttatatcagcatgacctggatgtgagacatggagtcaaagatcattttgragctttaagatatgactgccccactggatttcagacttgcatgggatctgtggcctctttgttttgcccaatttctcctatttgggacagctgtatttacccaatgcctgtacccccactgtatctaggaagtaactaacttgcttttgattttacaggctcataggcagaagggacttatcttgtctcagatgaggcattggactgtggacttttgagttaatactgaaataagttaagatttggtgggactattgggaaagaatgattggttttgaaatgtgaggatgtgagatttgggaggg

SEQ ID NO: 746113 - DNA, 599 bp, Homo sapiens
tcatacaaaaggcaaggagaaaaaaacaccatcaattgttaagagataaatgaattactagaagcagactcagaaatgacccagaggccgggcacagtggctcacgcctgtaatcccagcaatttgggaggccaaggcgggcagatcacctaaagtcaagagttcgagaccagcctggccaacatggtgaaaccccatctcyactaaaaatacaaaaattagaggggcgtggtgacagcttcctgtaatcccagctaaacaggagtctgaggcaggagaatcgcttgaacccgggaggtggatgttgcagtgagctgagattacaccattgcactccagcaagggtgacagagtgagactccatataaaaaaaaaaaaaaaaaaaagacccagatatgggaagtatcagagtcagggacttcaaaataactgcaaataataatgttaaaggatacacaggaaaagatggatgacctccttgaacacactggtatttcagcagagaaatgaaaacttttaaaaagagtccagtgaaaatgctagaattttttttttcagtaatagaggtaacttcctttgataaactgattagtagaatg

SEQ ID NO: 746114 - DNA, 617 bp, Homo sapiens
aataaaaatagtttttattattttgttttcatttgttaagagaggacagaataataggcattttactaatattatttttcttaattcccataataaccataaatgggagattctactgtcctcattttccacatgaaggagatgaagcttacaaaagagatttgcccccagccaatctagcagcttgttaatagcgggtggggtcagatttttaacctgagtctgtttgattycaaaatctctatgttcttctctataccatgggttgacaaactacagtccacatgtcaagtccaccatgccacctcacagtctgcaagctaagaatgtcttttacattttcaaatggttgaaaaaaagtcaaaagaaggatattattttgtgacatgtgaaaattacatgaaattcaaatgtcagtgttcataaaggaagtttcattggagcacagccacacccgttcatactatcaatggttgtttcatactacaatggcagttgagtaattgctacagagaccatctctcccacaagcctaaaatatttactgtttagcctttttaagctaaagcttgccaacctctgttttgcactaccttgtctcttaatttggtagtgga

SEQ ID NO: 746115 - DNA, 607 bp, Homo sapiens
gcacttactgctttctgtgtgggattatagttattccatgtatgtttctaatcttcttgcagagaaagaatctgaggccaagtccagatctgactgatcagtttcatctagtaggtgcctagtggctattttgttgatcagtgttgcaatgatggtgtctacaaacagtgctacctacaatttagtgtgtttcactaaaaatgtaacttaacacctggaggaatttaagtgcaaatgcaaatagaggtttttttgtgtgtgcgagacagagtctcgctctgtcgcccaggctggagagcagtagagcgatctcggctcactgcaacctccacctcccaggttcaaggaattctcctgcctcagcttcccgagtagctggcattacagacgtgcgtcamcacgcccagctaatttttgtatttttggtagagatggggcttcaccatgttggccaggctggtctcgaactcccgacctcaggtgatccgcccacctccacctcccaaagttctgggattataggcatgagtcactgcgcccggcctagagttctaataattgtgttgaaaataaatgccacttaagatcttaaaaacaccaattttta

SEQ ID NO: 746116 - DNA, 572 bp, Homo sapiens
tgctagaatcaggtggggggcaccttcatggtggaagacagaaaggcagggagaacaagagcaaaagaaagagggctgaatgcattcttttacaggaaccctctcctgcaaaaactaactcattcaaaccataatgctattaatccattcactagggcagagccctaataaaaktcttgcctctcaacactgttgcaatggggattcaatttccagcatatgaactctgggtgacacatttaagccataacagaatgtcacacagattttctcctatattttcttccagaagttttattctaatcagatttagcattaggtctgtaatctactgtgagtacatttgtgcatgtgctacaaggaatagattaaagtttcggtttgtttgttgcatttggatatcccattatttcagcatcaattattgaaaaaaatgatcctttctcctttgaattgtctatgcacctttgccaaaaaagaaaattggccatatatgtgtgggtctatttcttgactctctattttgttccatcaatccatttgtctatcttgatgtcaacactacattgtct

SEQ ID NO: 746117 - DNA, 644 bp, Homo sapiens
atacatgcctatctaatgcaggatattttcagtgccgctttgccagccagagaccttcatggctggtgatgcccctgctcactcaaaccaccaggctgtgcctggcttgcactccagcgcagatcccatggccacaaggacagcgcactcagcccatggcagaagtgggtgtgtgagcaagcaagtgtggggtccggctagctgctccaagtgccagcacaggagcaggctttgtgtggggcttgcatttggaccaggcatgtcatgaccgactgctgtggtggactctggcctccagatgaggggaatgcggtggcacccaaacrgggatgcccacaaccctgaagccccagagcaggtgttagagcatgctaacagctcctttagtccactgccctgctccagcctgcggatccagggctggcctgaccctgacactgcttcctgctgcatggggtggctgccctctgctgatggagaatgggagggttacagtgttacagctttcttcatacttaccttcagtgggtcccaagttcttgtcccacatccaagaagaatgagattacactgacagttgaagggtgagaagggcatataagagttttattaagctacaaaatagctctcagcagagaggggat

SEQ ID NO: 746118 - DNA, 618 bp, Homo sapiens
gatgcctatgaggtatgcatcctcatgcccatcttgtagatgggagtcctgagaaaaggacttgctcaaagtcatgcagaaggaaagaggtaggggtgagactcaagcccaagtttttcccctgctacctcctattacctctctaagctasaagactggagtttcaatgtatgtttatttttctaactttcagattacttttgcagctcagaaagcaaggacaacctggatatttcaccacagttccttaacagccatataactctttggagttagcctctccaactagttaactgtgaaatctcaatcaatcaatcaatctctctctctctctctctctctctctctctctcaccatttattacgacaatgaccataaaggctatggtcattcaggttgctttaatggtctaaaaatgagagcttatgtatttttgaatagttttaaaaatgatcattcctaacatttacaaaataatggaaaacataagttttacccagtaatcaatgctccacggaaggttaggtggccctgcagatgctaccacagcactctgctctgttgggacaccttttccaccatattggaatggactgtttccttgtctgactctcctt

SEQ ID NO: 746119 - DNA, 628 bp, Homo sapiens
atcacacgtaacacccaggtcaaatcctctgccatgtcaaacaagataatcccatggagtaaaagcaactcctttacaaaacagggtcaggtgctactttctgactccagggtcagagaggctggtggaactggcttctctggctctgccacttcytaactgcgtgctatgatttggatgttcattcccccaaatctcatgctgaaattggatcccagtggtggaggtaaggcctagtgggaggtgtttggatcatggggtggatccctcatgaatggcttggtaacctatccctcaagagctggttgtcaaaaggagcttggcacctcccctctctctcttgctccctctcacaccatgggatctctgaacatgccagctcctctttgccctctaccatgggtggaagcagcctgaagccctcaccagtagccagtgctagtaccatgtttcttgtataggctgcagaaccatgagccaaataaaccgcttttctgtataaattacccagcctcgcatattactttatagcaatacaaacagattaacacaccatgtaaccttggaaatgttgcttaatctctctgtgcttctgttttcagatgtacaaactgagataagaggtggt

SEQ ID NO: 746120 - DNA, 628 bp, Homo sapiens
atcacacgtaacacccaggtcaaatcctctgccatgtcaaacaagataatcccatggagtaaaagcaactcctttacaaaacagggtcaggtgctactttctgactccagggtcagagaggctggtggaactggcttctctggctctgccacttcctaactgcgtgctatgatttggatgttcattcccccaaatctcatgctgaaattggatcccagtggtggaggtaaggcctagtgggaggtgtttggatcatggggtggatccctcatgaatggcttggtaacctatccctcaagagctggttgtcaaaaggagcttggcacctcccctctctctcttgctccctctcacaccatgggatctctgaacatgccagctcctctttgccctctaccatgrgtggaagcagcctgaagccctcaccagtagccagtgctagtaccatgtttcttgtataggctgcagaaccatgagccaaataaaccgcttttctgtataaattacccagcctcgcatattactttatagcaatacaaacagattaacacaccatgtaaccttggaaatgttgcttaatctctctgtgcttctgttttcagatgtacaaactgagataagaggtggt

SEQ ID NO: 746121 - DNA, 628 bp, Homo sapiens
atcacacgtaacacccaggtcaaatcctctgccatgtcaaacaagataatcccatggagtaaaagcaactcctttacaaaacagggtcaggtgctactttctgactccagggtcagagaggctggtggaactggcttctctggctctgccacttcctaactgcgtgctatgatttggatgttcattcccccaaatctcatgctgaaattggatcccagtggtggaggtaaggcctagtgggaggtgtttggatcatggggtggatccctcatgaatggcttggtaacctatccctcaagagctggttgtcaaaaggagcttggcacctcccctctctctcttgctccctctcacaccatgggatctctgaacatgccagctcctctttgccctctaccatgggtggaagcagcctgaagccctcaccagtagccagtgctagtaccatgtttcttgtatagsctgcagaaccatgagccaaataaaccgcttttctgtataaattacccagcctcgcatattactttatagcaatacaaacagattaacacaccatgtaaccttggaaatgttgcttaatctctctgtgcttctgttttcagatgtacaaactgagataagaggtggt

SEQ ID NO: 746122 - DNA, 685 bp, Homo sapiens
gtgtttggatcatggggtggatccctcatgaatggcttggtaacctatccctcaagagctggttgtcaaaaggagcttggcacctcccctctctctcttgctccctctcacaccatgggatctctgaacatgccagctcctctttgccctctaccatgggtggaagcagcctgaagccctcaccagtagccagtgctagtaccatgtttcttgtataggctgcagaaccatgagccaaataaaccgcttttctgtataaattacccagcctcgcatattactttatagcaatacaaacagattaacacaccatgtaaccttggaaatgttgcttaatctctctgtgcttctgttttcagatgtacaaactgagataagaggtggtaaatctagtgcacagaatgtgaggattaaatgtgagtttcctttcttcttcctctaagagcaagagcaagyacctcccgccaaagatatgggagaatccttacgtaggaagctctttatctatctgtgagttcacccatcactctctgactacaaaaccttcagccactccctgtttcttaccactgcaaatctgcaggcctcaacaatgtggccccttcccatcaagccaactttatctccttggtccctaacacttgtcctagcatatcccatgctccctcatggccccatggacaag

SEQ ID NO: 746123 - DNA, 547 bp, Homo sapiens
catccgtttataggctctccacaagggtcacattccattcccagagatatgaacatctgcttttctgggataggaatcttggtgatgtgaaacctccctgactgcatgtccatttataggctctctgcagggggaagcacatcacatgctgttggcttattttggcagcccaacctggcattgtctttatacaatcckccatgcaattttgtatttacaataatcaggagcatttcatcttttattccatagcaatagtttcatggggtctccctacatctcccccttttctctgatttaaatgaaccatagcaatcatagcttggcactgatcacaattggattgaagaatattttttccaattttacacatgaacaataaaccaatagcacaaattatacacagaacaaaattaatgatagtggatcctcccaaagagtttacccattgaatggggttgagattaaataacccctcaaagatactgtctaaaacttcagcactgggtaaagcagttaagtgtgcttgagaggactcaaaaatctg

SEQ ID NO: 746124 - DNA, 512 bp, Homo sapiens
ttgggatgttgcgatcatgtaagttaatagttaataaactcccatttatatacatttatacacacacacacacacacacacacacacacacacaattagttctgtccctctaagggaaccctgactaatacagattttggtactattttggtactgggagtggttctagaggaacagaatattaaggatctacttyctttgttggttttgaggtttctggagttggctgcttaatatgattagtccccaaaatgctaaggactctacctctaatagtatgcagaacactgatagtccttggcagaaactgtttagagagttatgcaaaataaatgcatttgacactcctgattcactgcttgtgagaggcaaggagtttagtgactttatacattaatatctttgaccatatgtggagaaccaaggaacataatgaaggtggttggttgctactaacttcagtggacaaagtgatgaaagaaaatggtgaactcacggattctatctcctgg

SEQ ID NO: 746125 - DNA, 512 bp, Homo sapiens
ttgggatgttgcgatcatgtaagttaatagttaataaactcccatttatatacatttatacacacacacacacacacacacacacacacacacaattagttctgtccctctaagggaaccctgactaatacagattttggtactattttggtactgggagtggttctagaggaacagaatattaaggatctacttcctttgttggttttgaggtttctggagttggctgcttaatatgattagtccccaaaatgctaaggactctacctctaatagtatgcaraacactgatagtccttggcagaaactgtttagagagttatgcaaaataaatgcatttgacactcctgattcactgcttgtgagaggcaaggagtttagtgactttatacattaatatctttgaccatatgtggagaaccaaggaacataatgaaggtggttggttgctactaacttcagtggacaaagtgatgaaagaaaatggtgaactcacggattctatctcctgg

SEQ ID NO: 746126 - DNA, 534 bp, Homo sapiens
aaatttaaataaaatgggaataattcgatcccgaggtgggggggggggcaagtggcagcactcaaccatcaaaggcaagatgggcatagctacagtaatatacaggagaagcaaagcagctatcagaatagtttgacccatgtagagctctggcattggctacttaatcatggtgttcatagaagtgaaactgacaagaagcctactgcattcctacttaatttatataaraagaaaacttttaggttgaatggacaaaagactaatctgaattataaaaacagagagtcatggcccctcaatcaatttccagactggagctagtttacagacccagtaccccttgaatgaaggagaggccaagtttcccttaagaaggatcccaccacactccagacaatttttgcagtgaatctttcccccatccttccccaaggagacatccagccttttaccagggtaactgtgctttggagaaggggaagtgatcagacatttcagtgactactggacactggctctgagctgacactg

SEQ ID NO: 746127 - DNA, 534 bp, Homo sapiens
aaatttaaataaaatgggaataattcgatcccgaggtgggggggggggcaagtggcagcactcaaccatcaaaggcaagatgggcatagctacagtaatatacaggagaagcaaagcagctatcagaatagtttgacccatgtagagctctggcattggctacttaatcatggtgttcatagaagtgaaactgacaagaagcctactgcattcctacttaatttatataagaaraaaacttttaggttgaatggacaaaagactaatctgaattataaaaacagagagtcatggcccctcaatcaatttccagactggagctagtttacagacccagtaccccttgaatgaaggagaggccaagtttcccttaagaaggatcccaccacactccagacaatttttgcagtgaatctttcccccatccttccccaaggagacatccagccttttaccagggtaactgtgctttggagaaggggaagtgatcagacatttcagtgactactggacactggctctgagctgacactg

SEQ ID NO: 746128 - DNA, 534 bp, Homo sapiens
aaatttaaataaaatgggaataattcgatcccgaggtgggggggggggcaagtggcagcactcaaccatcaaaggcaagatgggcatagctacagtaatatacaggagaagcaaagcagctatcagaatagtttgacccatgtagagctctggcattggctacttaatcatggtgttcatagaagtgaaactgacaagaagcctactgcattcctacttaatttatataagaagaaaacttytaggttgaatggacaaaagactaatctgaattataaaaacagagagtcatggcccctcaatcaatttccagactggagctagtttacagacccagtaccccttgaatgaaggagaggccaagtttcccttaagaaggatcccaccacactccagacaatttttgcagtgaatctttcccccatccttccccaaggagacatccagccttttaccagggtaactgtgctttggagaaggggaagtgatcagacatttcagtgactactggacactggctctgagctgacactg

SEQ ID NO: 746129 - DNA, 627 bp, Homo sapiens
agatgcataaaaccaatatccttccaataagaatgaacaatctaaatattcctatatctacttcaaatttaattcataaagaactttccacaaaataatcagttctagaatgctttagtaatgattgtagtcaaatacttaagagagaaagaatatcaacattaaataagctttttcagaaaatagaggggcaagggcttctcaattcaycgtatgagacaaatacaagcctaatagcaaaatcagacgctgatattacccgtcctaaaaatgaaaattatgaaaaagtatttcttatgaaaacagatgcaaaagtcattaaaatattagcaaatcaaatctatcaatatgggaaaataaaaacacattaacatacgatggttttaccagggacataagaataatgtatcactcaaaaatgactatttttataacattgatatattgagatcttatttgataatttcaacagagtcaggagatgcatttgtcaaagtataatatccatttactattaaatatattagcaaagtataaatagaaggagacttcctcaacctgataaagcacatctatgaaaagtccacagatcacatcatacttaaaaataaaatacttaatgcttct

SEQ ID NO: 746130 - DNA, 627 bp, Homo sapiens
agatgcataaaaccaatatccttccaataagaatgaacaatctaaatattcctatatctacttcaaatttaattcataaagaactttccacaaaataatcagttctagaatgctttagtaatgattgtagtcaaatacttaagagagaaagaatatcaacattaaataagctttttcagaaaatagaggggcaagggcttctcaattcaccgtatgagacaaatacaagcctaatagcaaaatcagacgctgatattacccgtcctaaaaatgaaaattatgaaawagtatttcttatgaaaacagatgcaaaagtcattaaaatattagcaaatcaaatctatcaatatgggaaaataaaaacacattaacatacgatggttttaccagggacataagaataatgtatcactcaaaaatgactatttttataacattgatatattgagatcttatttgataatttcaacagagtcaggagatgcatttgtcaaagtataatatccatttactattaaatatattagcaaagtataaatagaaggagacttcctcaacctgataaagcacatctatgaaaagtccacagatcacatcatacttaaaaataaaatacttaatgcttct

SEQ ID NO: 746131 - DNA, 627 bp, Homo sapiens
agatgcataaaaccaatatccttccaataagaatgaacaatctaaatattcctatatctacttcaaatttaattcataaagaactttccacaaaataatcagttctagaatgctttagtaatgattgtagtcaaatacttaagagagaaagaatatcaacattaaataagctttttcagaaaatagaggggcaagggcttctcaattcaccgtatgagacaaatacaagcctaatagcaaaatcagacgctgatattacccgtcctaaaaatgaaaattatgaaaaagtatttcttatgaaaacagatgcaaaagtcattaaaatattagcaaatcaaatctatcaatatgggaaaataaaaacacattaacatacgatggttttaccagggacataagaataatgtatcaytcaaaaatgactatttttataacattgatatattgagatcttatttgataatttcaacagagtcaggagatgcatttgtcaaagtataatatccatttactattaaatatattagcaaagtataaatagaaggagacttcctcaacctgataaagcacatctatgaaaagtccacagatcacatcatacttaaaaataaaatacttaatgcttct

SEQ ID NO: 746132 - DNA, 498 bp, Homo sapiens
cttcatagcaacatagagtaagacagtgagccacacaatgtttttttggtgtcccagtacatataaaagttatatttatattatactatagtttattaagtgtgcaatagtataatatctaaaaaacaatgtgcatatgttaattttacaatactttattttaaaaagtgctaataattatctgtcctttaaatgagtcctagtctttttgctggtggagggtttcacctcactgttaatggccgctaacttaagagtagtgtttactgaaggttggggtggctgtggcaatttcttaaaataagacaaattttacccatagtagaaattcttttsaaattggagtcaatactttccaaaactgccactgctttataatttaagtttatgtaatattctaaatcctttattgtcatttcaacaatgttcacagactcttcaccagcagtagatttcatgtccagaaaccactttctttcctcatccttaagaagcaag

SEQ ID NO: 746133 - DNA, 498 bp, Homo sapiens
cttcatagcaacatagagtaagacagtgagccacacaatgtttttttggtgtcccagtacatataaaagttatatttatattatactatagtttattaagtgtgcaatagtataatatctaaaaaacaatgtgcatatgttaattttacaatactttattttaaaaagtgctaataattatctgtcctttaaatgagtcctagtctttttgctggtggagggtttcacctcactgttaatggccgctaacttaagagtagtgtttactgaaggttggggtggctgtggcaatttcttaaaataagacaaattttacccatagtagaaattcttttgaaattggagtcaataytttccaaaactgccactgctttataatttaagtttatgtaatattctaaatcctttattgtcatttcaacaatgttcacagactcttcaccagcagtagatttcatgtccagaaaccactttctttcctcatccttaagaagcaag

SEQ ID NO: 746134 - DNA, 470 bp, Homo sapiens
ctgagctgacactgattccagggcaaccaaaacatcactgcggtcttccagtttaagtatggacatatggaggtcaggtaattaatggagttttagctcaggtctgacttacagagggtccctggattcatcctatggtcatttccttagtgtcagaatgcataataggcgtcagtatacttagcagcttgcagaacccacacattggctccctgactgataggatgagggctattatggtgggaaaggcaaaatggaagccattatagcttcctctacctrgaaaaatagtaaatcaaaacaatatcatacccctcgagggattgcagagattagtgccacttgtcttgaaagacacaggggtggtgattcacaccataacacagttcaactctcctatttggcctgtgcagaagacagaaggatcttggagaatgacagtggattatcataagcttaaacaagtggta

SEQ ID NO: 746135 - DNA, 470 bp, Homo sapiens
ctgagctgacactgattccagggcaaccaaaacatcactgcggtcttccagtttaagtatggacatatggaggtcaggtaattaatggagttttagctcaggtctgacttacagagggtccctggattcatcctatggtcatttccttagtgtcagaatgcataataggcgtcagtatacttagcagcttgcagaacccacacattggctccctgactgataggatgagggctattatggtgggaaaggcaaaatggaagccattatagcttcctctacctagaaaaatagtaaatcaaaacaatatcatayccctcgagggattgcagagattagtgccacttgtcttgaaagacacaggggtggtgattcacaccataacacagttcaactctcctatttggcctgtgcagaagacagaaggatcttggagaatgacagtggattatcataagcttaaacaagtggta

SEQ ID NO: 746136 - DNA, 609 bp, Homo sapiens
aggaaaatatcttgaggcccaacatcactaagctaaagggaaaattcaagctgggaactgctcagggcaaatctgccttccattctattcaaagtcatccctcttctcactgagacagatgtacattctgattgccttctttggaaagacttaccagaaactcataagaatgtaaccatttgtctctcacctatctgtgacctggaagccccsctccctgcttcaagttgtctggatggaaccaatatacttcttacacatattaactgatgtctcatatctccctaaaatgtataaaaccaagcggtgccctgaccacctgggcacatgtcatcaggacttactgaggctgcgtcatgagcacgtcctcaaccttggcaaaaaaactttctaaattaactgagacctgtctcaaattttggggcttcacattttggtaaccactaaggggttctgagtggagatgcccctgacctttgacaaatcttgtgttggtgcttggtgccaacatgcgctaacttcatggcaaaaaccaataggacaatttgctgaggtctaagaacactgcctccagaggatccctaatttcccaaaatttagtcaagatct

SEQ ID NO: 746137 - DNA, 657 bp, Homo sapiens
gccttttctcccaaatttaatcttaatttggtttgtcagtgtgcattttcatgaggagctgaaatgttgttttcacatgttaatgagagactgagctttctcagctccaaagaggaagggcatttgttcctcccagccaaaaggtgtccctgggtgactgggggccccatcacagtgtctagggcattgatcccccatgccatgacatgtagtggcccttctgggaaacccccaacaaaaattaatttttaaaatggctcatccaggaaatacatataagggctgatcacccagcatttttagccctctctgaggtcatagacctctggagaaagaaactgaaagaaactctagagacagaaatgtaagagggtggatgtactcagtggtgacacattgtagagtcctgaccaaaagcagcatatatcaatcyaccacataaaaaccttaggcaagagctcagttcttccttttaagaaaaagaaaagcgggaaacaaataatctaagaaagaaaacaaggaaaatgaccccctttcaaggactccatgggtttcatggcacatctacttgccaaagtttatgtaaaatgaaaataatatggtctttgtaaacaattaccttaaggaaaaggagcccgaaggtcaacctgaaaacta

SEQ ID NO: 746138 - DNA, 449 bp, Homo sapiens
aaggactccatgggtttcatggcacatctacttgccaaagtttatgtaaaatgaaaataatatggtctttgtaaacaattaccttaaggaaaaggagcccgaaggtcaacctgaaaactatagagttcctaagtcctctttttctctatttttttcttttctgcctgctctaaatatgctgttatttttctattaagacaaaaaccgctgtttagatccaacaagccctttttgcaagccaatgatttcatgtttatctcatggttaaamgttctgaagtaaaagctataggatctttgtgtgtgtgtgtgtacatatttaaaaggcctttataatttccataattttatgtttaataggcaattaaaaccattttaatttccctccaacataccaaactttttctctctgcacattataatgtaaattttgctctttgacttttacct

SEQ ID NO: 746139 - DNA, 449 bp, Homo sapiens
aaggactccatgggtttcatggcacatctacttgccaaagtttatgtaaaatgaaaataatatggtctttgtaaacaattaccttaaggaaaaggagcccgaaggtcaacctgaaaactatagagttcctaagtcctctttttctctatttttttcttttctgcctgctctaaatatgctgttatttttctattaagacaaaaaccgctgtttagatccaacaagccctttttgcaagccaatgatttcatgtttatctcatggttaaacgttctgaagtaaaagctataggatctttgtgtgtgtgtgtgtacatatttaaaaggcctttataatttcyataattttatgtttaataggcaattaaaaccattttaatttccctccaacataccaaactttttctctctgcacattataatgtaaattttgctctttgacttttacct

SEQ ID NO: 746140 - DNA, 432 bp, Homo sapiens
gttgaggattatagttgttgaagaatcctgaactttgtctcgttaattttttaaaagtattgataatagcatgttaatctctttttaactgccagtatgcagcttgccaataatctagcattgttcatctactctcatccattttacaaacatttctagaaattattctgtattacacactattctatgaatattaacaagaacatgttagctttytaaaaaacacttttcaaatcattattttataacttgttaatttagtaagtcaatgtcacatttcagaagactggaccaggttatttttattagaggctttcacaaaaacatttatatcctgcagcattggagagttgagatttaattatatgataatacagattaatccaatgagtcattatctaatctttattaaaaatgaaattaaaaaacaat

SEQ ID NO: 746141 - DNA, 619 bp, Homo sapiens
caggtcatattataattctaagaagaatatttggtacccactgaatctgattgttttgaggatactgcccatggtatttgctgccattgggcatttgctgccatggcatttgccatggcatttgctgccattgcaatctcattttcttcttccgcatcggatttctaactcatttgcctctgaaggagtatctttaacattataattatattccagtatgtgaatttttaattttctgaaaaggtgtaaggcagtcaaagtggtataatggaacgtttcctagattggtagaggaggcctaagcctggctctgccattcctgatctgtaagaactctgggtttcagcccccttaactgtaagatgaaggggctaaactaatggcstacaaattcctttcaagctatgtgattcagtgatatgaaattggagcttttgctgtttaattttccactggtgtctgagattctcctttaggattccctgactctgaaataagtcaaatacaaaaatcatgatgattaagttactctggacactctcttttctttatataagtttaaactgcacaattctagctttttaaaatgaaatttgagggaaatccacagcaagaaagc

SEQ ID NO: 746142 - DNA, 642 bp, Homo sapiens
aacctggctatttcaaaaaggactttaaaccccatcatgttaccactgtccagggacccagtgatgggtctgccacatctatcatccttttaaagagaaaacttcattttacttgtggcattgaacatctacaaaaataatccaataaatgctgttaccatttgaaatcaaaggcaattctatactgtgttgaacttgtattactttgtgaaacaagacacattgccagagagtgaatctttgccaccattaactactttgtagctctagaaaagttactttatttcttccattcacgctatagaataaaaagacaatgtaacattttattaatgttactgtgcyattttgtaactttttattaatgttactgtgttatttccttttaataagttaaaagaaatacgtggttttaataccttgttttcttttaatataaaattaggctttgaaaacttaaaaaaaatagaaaggctaccttctcttctcagcaggaaattgcaaagactaatgtcactaaagttatgagttggaccaaaatgaaaagtttccctaagaatacttgacccacagattgagaaacaacgacctcttcaaagatactgcccactcttgtgcacccaaagttgaagatatggtata

SEQ ID NO: 746143 - DNA, 547 bp, Homo sapiens
tcctgcctaataacctcaatgatactcctacataattattccgaagcacggaattgttattgtcgcaaatgcatataaacatggctttgaggtagcttgaaaataacatatatctggtattcaagtcatagaaattgttcattggaagatgtcttctaaaaggagaggaaaatggagataaagggtatgtagctttcattaagaaccctaagaatgctamcagtgataatatattctattcaacgagatctggtgaagtgccgggcgaaagtcgctctcccgccaaaatgtaactttgccctttgttaagtacaagaaatgtctgacaaaaataagtgccatactatgaaaaaagcaacatttgcatgttggaaatgctaaggcaaatgcaaagaaatattcttgtcggtttctgttttctcctccctatgaaactacttctatgagattagaaaacaacacgctgaacatgaaaggtccatgctttaggaagctcagttgatctgtgagtgaaagcacatgtaaacaaacccacgtcaatatccac

SEQ ID NO: 746144 - DNA, 641 bp, Homo sapiens
tcccattacgttgtgatccggtatcagacacaacatcttggggggatgttgcagaacagagaaaagcagtctcagatgaaaccagattaagctctttttctgaactattgccaaatgcttgtgagtctaattcatgtttgggtattctagtactcacacagctgcaattccattctttcatcacaaacctaagtgatgtatagtggctttgtatggtgaactgactctataaagccaggattttttaaaatgttaatatggaaaaaaattctgaaccactataaaacttatgaatgcaaaatatatgtgtaggtatctaccagactttgtggcattaaatgcaaaatacacattgagtgaaattacaagttagatttgtttaaaataccttttatcacaacctaggtcatttctacatagctaattctgcacagaatcgggttttcaaagacactgctgaataagattcctaacagccatggggaagtttctgtaaatccctgtygaatagttgctgctgaatgtgccattctgaccacagaagggccattgctgacttactacagtagcaggaggggggcgataattttgctgctgttggcacttactctgcaacctagaatatatctcgcaccaaaggg

SEQ ID NO: 746145 - DNA, 631 bp, Homo sapiens
aagaataaacagtgccctacctatatgtgtgtgtacatacatagctgtgaggtactcttctggtataacctactgtaaaccccaaagcaaatattgtgatatagagacacagaatagacaatttacaagtaatcaatcaagcacaaaccagtgggaaaataaggaacttatgtatctcaatttattctttaaatgctacatatttgattgctttagggttgcaaaagttaattaatagatttgtataagacacacagaaatatacatacactaaaagagactttgctaagtgtaattcaatatactcacaaaaatatgtgttaattatgttagaaatttaatatttaatttaattccataaatccttgcattacaaataagtcctcatacaggtcagatagggcaataaaaactactgtgrccttgaaaactgacagaagctcacttctgtacaaatctttttaatgaacaactttccatcgagcagctaagaaatatctgttaaagtcagtatttaatactaaagtgtacttatgtatgtttcttactgatcctaaattgagcacgttagttttatcaatgccactcatcggctgactgtacccctcctcccccatacagatttggtgag

SEQ ID NO: 746146 - DNA, 574 bp, Homo sapiens
tcggctgtccaagctgctgttcctctctccgcagtaagagggtgtttctctccctgttcaagaggagcaccaacacttgaggtttggattccatcttttcctgccccttctgcaacattatcttctctgcccagtaktaacagcctctgccatagctaaagacagaccagaaagaactctcctgagaactcataccccttcataggtacatcccctcccctctccttccctttagggaccttcaaaagcagctattttgttctcctctttcactttgatcctttatttctagctctgtaatatactgtttttgtctccaccattccactacaaactagaagtttagactccagaaagttcttcaagagctttttatgttgattttatatattttttctattaatcaatctagacacacacacacacacactttttagccatttgcattcttgacgtcttatgttgattgccaatgctgatgcctctcaaatcgaaaactcataaccatacttttgtttcaagccctaggccagtatccaatttcttagtagacctgagcatctggatctagaca

SEQ ID NO: 746147 - DNA, 540 bp, Homo sapiens
tacaatctgcaattgctaactaaactgtctatagggacaatccatcatcagctgtcacaaagactgagcaggcttaggaggtgggagcagctaacagggcaatgatggagggcctttgaaaattaaataaacacgaagaaaaatttaaacagtcagctaaaataactcttgttgttcttaaatatttagagcttccagttttataactttttccacaaggttagaagaagaacactcaggatttaggaatctgtctaataataagtgtcttcaatgacttagggaggatgggcaggtaraaagtgatttgttttgagaccagcatcctaaactaggttcattcacaaccattgtctgagaggctgccattcacacagaatagatgccagggaggagcagctcctggaaactgcatccccttccttccatctgctcaccaagtcctgaccacattatggggaccaacagaatttaccctgccttgttcccttcaaatgtgatttgggaaatcaggaaatttttatctggagccagtaagag

SEQ ID NO: 746148 - DNA, 545 bp, Homo sapiens
caccacacccggctaatttttgtatttttgtaaagacgggttttaccatgttgggcggctggtcttgaactcctgacctcaagtgatccacccgccttggcctcccaaagtgctgggattacaggcgtgagccaccgcgcccagyaggttctgattatcttaagcactgtcctgcctcctgctgctttataacctcaacaagccacctccttgctgacagatggtgacagagcagtttggattacagaacaagtggtaacgagggcagtttgtagcaagtagagttgagtatagcaagtacagtgagttgtatgtagctcattttcaaaatagctctcagactattgatgagaaaatgtacatcaattttgatacctaagtttatttttgttgcaggaaaacagtcacaaaataatcaaattatctacaactttaagccaccatattattttagttaatctggaatgtcaaatggtttgctgagggtaaatattagcattcctactgactgtatgtttggagttttttcactataaaatttgaga

SEQ ID NO: 746149 - DNA, 605 bp, Homo sapiens
caaggagaacatacaatggctagtggacgagggagctgagaagcatcagtggggagaggagttgcagtggctgcagccatgattctttccactaaatctcttggttgtttcctcaggaagaagatagacaaaaacaccagaggagctgctcccagatggagtggacttgccatacaaagcaagagagtcccagcagggcagggatctgtagtggatggtgatgcagcacccaggaaacctcatcaggatgtagctactccttctcccactgcgrgtggtaccagctgctgaaggctcacagctgagactctctaaggaaaggggacacatagcccaggtgatgcccactctccagggacagcctgcaccagtgactagacgcaggaggaagatgcccactgcctggcttctatttgtgatggcctctgaagggctatctcagatccactgctgcctttgggggaatggaggtccttgtggagaccacattccacctgaaatgcctctgcccaatcctgctttcctgacttatggttgttgttcccaagaaaacaccctcataaatcatttccagggaacccaactgaagccataaatccctccag

SEQ ID NO: 746150 - DNA, 406 bp, Homo sapiens
atagtcaatttttcttacatgcaggataaattggatttatcttcaaagttagccagcaatgctaaatgctggttaaaaagcagttctctgctggggtagagaaagcaagttcccatgtgtctcaacccatgtgaaagagggaagagagaatgtttccatccagggtggttcattcacataagggtgacagcattcaggatatagggtacygaacagaagggtttttagttgtgttttttttttccgtgtgtttatgatataatttatgcaccatacaattcactcatttcaagtgtgcgatttaatgacttttaatgtattcatagagttgtgtatctatcattacagttcgcttgagaacatttgcattatgtcaaaacaaagaaccctccccctctttcccacc

SEQ ID NO: 746151 - DNA, 406 bp, Homo sapiens
atagtcaatttttcttacatgcaggataaattggatttatcttcaaagttagccagcaatgctaaatgctggttaaaaagcagttctctgctggggtagagaaagcaagttcccatgtgtctcaacccatgtgaaagagggaagagagaatgtttccatccagggtggttcattcacataagggtgacagcattcaggatatagggtactgaacasaagggtttttagttgtgttttttttttccgtgtgtttatgatataatttatgcaccatacaattcactcatttcaagtgtgcgatttaatgacttttaatgtattcatagagttgtgtatctatcattacagttcgcttgagaacatttgcattatgtcaaaacaaagaaccctccccctctttcccacc

SEQ ID NO: 746152 - DNA, 501 bp, Homo sapiens
atgctcgccgggatggcgtgcgcttaacagaaccaccagaaacaacccgggagactgtgtccacaaagtgtggtttagaatggggctcttcacattctttaaaacagtcatgtaaatctgtatttggtcatacagaaagctgtccgtatgtgcattaactggcacaagcaggtgacatgcagcggagtgtgayggcatctgtctctatctgtgtgtgcgtatagagctgtcggcagagatacagagagaactgcctgcgtggtaaacagctaagtgttttctctgtgctctgggaattttatttcttctctatactttttctgtattttctggatgtttgcaataggcatgcattacccttctaattacaaaaacacgaacaagcaatgttaaaagccctcccattcatccaagtgtcaagacaaatgactcaggaatatccaaagccaacttctgcacacagataatcccagcagccttgcaccccctatggcttacatt

SEQ ID NO: 746153 - DNA, 493 bp, Homo sapiens
gaacaagaagtcaataggcagaatttttttttttaacggagttttgctcttgtcacccaggctagagtgcaggggtaccatcggggctcactgcaacctctgcctctcacattcaagcaattctcctgcctcagcctcccaagtagctgggattacaggcacccgccaccacgctcggataatgttttttgytttttgttttttttttgagacggagtcttgctctgtcgtccaggctggagtgcagtggtgcaatctcggctcactgcaaactccgccacccgggttcacggattctcctgcctcagctcccgagtagctgggactacaggtgcccgccaccacacccggctaattttttgtattttcagtagagacagggtttcgccatgttgggcaggctggtctcgatctcctgacctcatgatccgcccgcctcggcctcccacagcgctgggatgacaggcctgagccactgcccggccaataggca

SEQ ID NO: 746154 - DNA, 576 bp, Homo sapiens
cacccctactctctcatggaagtaatgcaaggatgtaatagataatgttcttgatagtgatttctaaaccgtaggggctgatatgtacattagccaacatgcctgtgacccctatacgtgagtccaagaggtgaaggagggtggtagatcagatgacctctctgttctgtcaggctctccaagtctgtgttgtgtggccagattgcatactactgcgtgtcggtattcatttactcacccracctgccctgatgctctcagctcagtgaaaagcacagcagaaggccacccttgggtcgacccaagtcttcctgctggagagaccacagtgatacttctgaatgcccagccaagggatcctttcaccatagcacccaactctatctgtccccagttaacattacactcctgctcctgaaaccgtcaatcattctgggctgcaggaacacatagatcccaggtagtcagcagctacatcactctcaggatgtccgcagtactagagcttttggtaaaggccctgctctgtctgataaatttgttgtgatccccatgtattttgttccaaagagctct

SEQ ID NO: 746155 - DNA, 620 bp, Homo sapiens
atgctgcttttattattattttgatcctctcaatctacctaatgtataattcatggaactataaagaatgccagaaaaatagcttattagagagaaaagaatcacaggtataaaaatataaatgaccaaacaggcaggatagctcatgagtgctttgaaggaaagtgttcargaagcttcctgaagaaggtcctgtgataatggagagctatgaatgcccagaaaaggaatacaggaagtcactgaacatttgtgaccaggttcctaatacatttttttcccattttttaaaaaacataaatatagcacttactctatgccagggactgttctaagtgataataaatgttaactcatttaattatccaaataactctatgaggtaagtgctattatttgctccactttaaatagggaaactaaagcccagacaagttgattaacttgtccaagtcctatagatagtggcagagctaggacttaaaaccggcagcttggttctagagtctgtgtttttaaaccaatacactatacttctccataatgaaaggagaagtttcagaggactcagttgatgagaatattatgggtggagtggaaaaaaaaggagaagggaaacc

SEQ ID NO: 746156 - DNA, 620 bp, Homo sapiens
atgctgcttttattattattttgatcctctcaatctacctaatgtataattcatggaactataaagaatgccagaaaaatagcttattagagagaaaagaatcacaggtataaaaatataaatgaccaaacaggcaggatagctcatgagtgctttgaaggaaagtgttcaggaagcttcctgaagaaggtcctgtgataatggagagctatgaatgcccagaaaaggaatacaggaagtcactgaacatttgtgaccaggttcctaatacatttttttcccattttttaaaaaacataaatatagcacttactctatgccagggactgttctaagtgataataaatgttaactcatttaattatccaaataactctatgaggtaagtrctattatttgctccactttaaatagggaaactaaagcccagacaagttgattaacttgtccaagtcctatagatagtggcagagctaggacttaaaaccggcagcttggttctagagtctgtgtttttaaaccaatacactatacttctccataatgaaaggagaagtttcagaggactcagttgatgagaatattatgggtggagtggaaaaaaaaggagaagggaaacc

SEQ ID NO: 746157 - DNA, 562 bp, Homo sapiens
caatgtgttgtctcatttaatcctcacactagctgtgtgatgtgaatggccaggcagtgtttgtcctgatttggagagggagatgcggagaggtcgagtcgcttaccaaggcctcaccactagttgttggcagagatgacaaggctactgtcatgttaccagtgcgccatctggtagggaagtgctggcacgtatttccgagggccttttgggtcttttcttttttaagttattaggggtgggagccatgaaaatgatagtaaccaaaaatcttttatcatttctttaagcctgaacttggctttcatatttatcctgctgtctatatattaaggggaaccttttgcktatgtcaggaaacagatcaggtcagatcagctccccaacttaagaggtcattgagttcacctcctcattttacatgtaaggaaactgacctactaagtcactgatgctggccgactgtgcacggcttactgattttcatattgttgtgaataaaatgtgcagtttcacataaactttgtgcagggatccacatggattctttttttaataactg

SEQ ID NO: 746158 - DNA, 639 bp, Homo sapiens
acaattgttaaaatatttgtagtaaagaattgtttgctcacataaagttgtaaactctatttgtcataggagttgaatttgctccccaaccttattataattaacccatctgttattttttttttttttgcccaggctggaatgcagtgccatgacctcagctcactgtaacctccgcctcccaggttcaagcgattctcctgcctcagcctcccaagtagctgggattacaggcgcctgctaccacacccagctaagttttgtatttttagtagatacagggtttcaccctgttggccaggctggtctcaaactcctgaccttaagtgatytgcccacctcaacctcccaaagtgctgggattataggcgtgagccactgcgcctggcaacccatttactattaatcctgttctaattaactcaattagtcattttattttatttctttctatttttattatactttaagttttagggtacatgtacacaacgtgcaggtttgttacatatctatacatgtaccatgttggtgtgctgcaccccccccctcgtcatttaacattaggtatatctcctaatgctatccctccccactcccccgaccccacaacaggccccagtgtgtgatgttcccctt

SEQ ID NO: 746159 - DNA, 589 bp, Homo sapiens
gacatcaagtcaccaagtcagtttgagggagaggtaagaaggcctgtttaaacaatgagtcagtatcagagatctaaaacatcacaaaaagcgcagactcttcttctggctgttgaattcatgtaggataagggtatatatatatgagagattaaaaaaaaagatagcgataccatcataaccaccaaaaggcctggctttatccttccatctatatgttttcctccttaatcttacacttactcatgtaatctcaatatatatttgtgtgcttgatagaaacttaacctaagctcccacccctccttcagggaaaaacaaagaactagctgataatccagtacttcagatgctttattatagtgraggccagcaaaacattaaaccagagaagccagcagcatcccttctctgtcacagaccttaatggtcaagcagtagatggtgaccatctctaagaataatttcaagaagggaaagaccaagaaaatgccacttgctaaggggaatattcaccagagatagactaggaagaggctccaagtcagctcaggtataggtcacttacaggcaagaagggaaaaaagct

SEQ ID NO: 746160 - DNA, 672 bp, Homo sapiens
ttgtggcaattgtgaatgggattgcattcttgatttggctctcagcttgactgttgttggtgtataggaatgctagagatttttgtacactgattttgtatcctgatacttggctgaagttctttatcagctgaaggagcctttgagtcaagactatggggttttctagatatgattatgttgtctgcaaacagagatagtttgacttcctctcttcctatttggatgccctttatttctttctcttgcttaattactctggcaaggacttccaatgctgtgttgggcaggagkggtgagagagagcatccttctcttgtgctggttttcgaggggaatatttccagcttttgcccattcagtatgatattagttgtgagtttgtcatacgtggctcttattattttgagtcacattcctttaatacctagtttattgagagtttttaacatgaagaaatgttgaattttaccaaaaacattttctgcatctattgagatataatcatgtggcttttttctttagatccacttacatgacgaatcatatttattgatttgcatatgttgaaccaaccttgcatcctggggatgaagcatatttgatagtggtggataagttttttgatgtgctgctgaattcggtttgccagtattttgttgaggatttttg

SEQ ID NO: 746161 - DNA, 564 bp, Homo sapiens
tattactgaaaaaagagagtcatttttaataggatcaatgagaatcaaatcctctacataaaattttgcaccacctagtgtttgaaaaattctccctgttagcttctagctttcacttttaaaatattgtgttttctctgctacccacacattccttgtaccaagtactayagggagccttcataacaccatgagatctctgacattgcactctcctgacataaaacagagtgagttggcacaggggccagtagtagactggaagccattcccgcactgacaactagcaataatgtatctatactcagaagtgactaaaagctacataaatatctcaccaaacccaaaataaatgtgtctgcaactccatttgttcttagatttcaaaaatgctcataaggattccagtgccaatgacaaaagggtgacaaagggaaaattaattaaagaagaaagaggtgttaattaggttctaccccatcgctcttagaaggtacaattttgttttcaaattgtttataaacatacaaccatataattacattgctaaggctcattcattag

SEQ ID NO: 746162 - DNA, 516 bp, Homo sapiens
aacttatatatgtatataagataacaagtaacaatattattagaaacccagattttcaatgaaagataaaagagatactagtatcaaatcaattaagttagctataaattctgtaatctgattgagtcacatatttgagtaaacaaatctgtaatctgaaattagaattggcaatgttggtatgaatttatatatgyatatatacacatatacatacatatatatacacacacatatacatatatatatcccagttgtgtccactgaaaggccaagaagaatgacagtctaatggctgtgagcacctggatgtccaaatttgtagtttaaatgccatttcccactaaaaggaaccagtgaggctttaggaaatgattgatttcagaactagggcaggaattacacaaggtgggcctgtggcattttgttatgcctgaaagcaaggtagctattaaatactgctgaggtgatgtgaaaacaaaaacaaaaacaaaaacaacccaaggccctatagct

SEQ ID NO: 746163 - DNA, 568 bp, Homo sapiens
gctctagagatctgtggaactttgaacttgagagagatgatttagggtatctggtggaagaaatttctaagcagcaatgcattcaagagatgacttaggtgctgttaaaagcattcagttttatgtattcacaaagatatggtttggaattggaacttatatcaaaaagggaagcagagcatgaaagtctagaaaatttgcagcctgacaatgcaataaaaaagaaaaacccattttctgaggagaaattcaacctggctgcaggaatttgcataagtaacaaggatctaaatgtgaatctccaagacaatgagaaaatgtctccagggcatgtcagagatcttcatggcagcccctcccaccacaggcttggaggcttaggagtaaaaaatggtttcatgggccaggcycaaagccttgctgctttgtgcagtcttgggacttggtgccttgcatcccagccatggctaaaaggggccaatgtagagctcagaccattgcttgagagggtgcaagccccaaggcttgagggcttacacgtggtattggacctgtgggtgcacagaag

SEQ ID NO: 746164 - DNA, 609 bp, Homo sapiens
atttgggatctctagtgttgtgtgtgagatttcctggctagtaaactgtttgcgatacagagccacttaataagaaaaaccagagcagcctccagtggctgagatgtgaattcctcctctctttttctttcccccagccctttttcgttcctgcttttttttttttttttttttgagacagagtctcgctctgtcgcccaagccggcgtgcaatggcgcaatctcagctcactrcaacctctgcctcccgggttcaagcaattctcctgcctcagcctcccgactggctgggattataggcatgcgccaccacgtccagctaattttttttttaattaaaaagtatactttaatgtcgaaaatgcaaacttggggaaggcagaaagatcacacacaaggctgtcacttcacacttggagggttgcacagtggcagggcagaggcactcctcacttcccagacggggtggtggccgacgcccagctaatttttgtatttttagcagagatggggtttcaccatgttggccaggctggtctcatactcctgacctcaggtgatctgcccgcctcggcctcccaaagtgctgggattacgggcctttcttat

SEQ ID NO: 746165 - DNA, 598 bp, Homo sapiens
ctagatcaaggaaatggggcagggaaaatgatagtgaaatgtgtttcaagcagatggaagaataggaacagagggatttactcaatcaagagtgagctgtgtctagagttcctcgagtgtagcatagtggtggagaggtatgtctcacaagtttatgmcagctcttatgcacaatgttcaggtgttaggatttattgtgagtgacaagatgttttgaagaagaaaatacactactgttttgctaagtctttaatatgctttattccatttgatcctccttataggcatgcaatttgtcaaactttttatatgaggaaacagatattagtagtttgtagtagctacagatattatagggagtaaatggtagagcttggttgtgagcccagctctgtctaatgttaaacttgtgccattacatctctactctccctccaactaacagtcagttttggaacattgcgtctaaaaaacactttcaaatgtgtttgtattcttgatttctaaaacctttgcccatagccctgatactgtactgcatggttagaaaactaaagaagtatgttgatggtaatttagtgggaatagcattgaatct

SEQ ID NO: 746166 - DNA, 556 bp, Homo sapiens
cccacatgctgagggaaggacctggtgggaggtgattggatcgtggggctggtttcccctatgatgtttttgtgatagtgagtgagttctcatgagatctgatggtttaaaagttgcacttcccccttcgctctatttcctgcttacttgtgaagaaggygcttgcttctcctttgccttacaccatgactgcaagtttcctgaggactccccagtcatgtggaactgtgagtcaattaaatctcttctctttctaaattactctgtttggggtagttctttatacagtgcaaaaatggactaatacactgatattgcattcatttttatttatttgtgttcttgtttattgtctcatctcattgcatagaatgtaagctgcctaaaagactgtctttctatttaattctgataaccctgtcaccgcaatacagtcctttctctataacagtgggttccacatgtgtggattcaaagaactgcggatggaaaatatattttttaaattgcttctgtactgatcatgtaaggatatttttatcttgttacaactccc

SEQ ID NO: 746167 - DNA, 556 bp, Homo sapiens
cccacatgctgagggaaggacctggtgggaggtgattggatcgtggggctggtttcccctatgatgtttttgtgatagtgagtgagttctcatgagatctgatggtttaaaagttgcacttcccccttcgctctatttcctgcttacttgtgaagaaggtgcttgcttctcctttgccttayaccatgactgcaagtttcctgaggactccccagtcatgtggaactgtgagtcaattaaatctcttctctttctaaattactctgtttggggtagttctttatacagtgcaaaaatggactaatacactgatattgcattcatttttatttatttgtgttcttgtttattgtctcatctcattgcatagaatgtaagctgcctaaaagactgtctttctatttaattctgataaccctgtcaccgcaatacagtcctttctctataacagtgggttccacatgtgtggattcaaagaactgcggatggaaaatatattttttaaattgcttctgtactgatcatgtaaggatatttttatcttgttacaactccc

SEQ ID NO: 746168 - DNA, 599 bp, Homo sapiens
ctggttctaggccaaggctaaaaatggctgaacctaatttatagggtgttttcaggtctgcaggcctgcctctgtgagtacagatgggtttgtctccagtgtgtgggtacacctgcctgtggactgagctgatcagggttgaagctaggtcacagagatgcttcaggagttgaagttggaactgcagtcagccagcctgttacccaagagacaagcaggtaaggctcctccaaagtcccttagtagacaatgctgatagaggagccagaacaaatggggctgtggccaagcctaaataaagagagtgttatctctatgtgtgtagctagagccactgcaacttgggtgcaagcctgatgtctcaaaatggccctacttgatcttggactccactggtgttttgcagtctcctttctgtatctcaaagtccccmcaaaggtgtttctatccactgatggttgacaaattattgttgttatggggggatatgagtggaggttctcctattctgccatcttactgatgtcactcctgaatgtatttttatgattttcacttacacatggttttttgaagatgctttataatattaaaataat

SEQ ID NO: 746169 - DNA, 549 bp, Homo sapiens
acactagagttcccaatttcataaaacaattactactagacttaagaaatgagacagcaacacaataataatgcggggacttcaatactctacagacagcactagatagatcatcaagacagaaagttaacaaagaaacaatggatttaacagatatttacagaacattcttcccaacaattgcagaatatacattctcctcatcaccacatggaacactctcccacacagaccatatggtaagccacaaaacaagtctcaataaatttaagaaaatcaaaattatataaggtatcttctaaaatcacagtggaataaaactggaaatcaacaccaaaaggaaccgtcaaamctatagaaatacatggaaattaaatgatctgcttttgaatgatctttgggttaacaatgaaatcaagatggaagttttaaaaaattttgaaatgaataataatagtgacacaatttatcaaaacctttggaatacagcaaaagcagtgctaagagaagagttcataccattaaatgcctacatcaaaaaccctgaag

SEQ ID NO: 746170 - DNA, 497 bp, Homo sapiens
aaaggagatcttaggtcccagagatactcccctttgaaagattattgggtaaatatgactcattttgttgaaagtaaggcagtttggagaatgacttagaaggtaagcaatctctctgattctttttatttaattataygaactcaaagtgctgcaaaagccaagagattcacaagtcatttgcttcctttttggctttgaaggcaaaaaatgtagtatattcttttccaccccaatatttcctctcactgcatttttattatacctacactcagtgctaagagctcaagtcttcactcaacgtcactgttgggagacccaatagctagataagaatacatttaaagtctgctatgataggaatatttgtgtgcccacaaaactcatgtattgaaattctaactcccaaagtgatgatattaggaggtcggcccctggaaggagatttaggtcacatgagtggagttggtgcccttgtaaaagaggccctagagagc

SEQ ID NO: 746171 - DNA, 497 bp, Homo sapiens
aaaggagatcttaggtcccagagatactcccctttgaaagattattgggtaaatatgactcattttgttgaaagtaaggcagtttggagaatgacttagaaggtaagcaatctctctgattctttttatttaattatatgaactcaaagtgctgcaaaagccaagagattcacaagtcatttgcttcctttttggctttgaaggcaaaaaatgtagtatattcttttccaccccaatakttcctctcactgcatttttattatacctacactcagtgctaagagctcaagtcttcactcaacgtcactgttgggagacccaatagctagataagaatacatttaaagtctgctatgataggaatatttgtgtgcccacaaaactcatgtattgaaattctaactcccaaagtgatgatattaggaggtcggcccctggaaggagatttaggtcacatgagtggagttggtgcccttgtaaaagaggccctagagagc

SEQ ID NO: 746172 - DNA, 611 bp, Homo sapiens
aactcaggagcccagctggcttcgcctagtggatcccatgctggggccgtgggcggagctgcctgccagtcctgtgccacatgcctgcattcctcagcccttgggtggtcgatgggactgggaaccatggagcagggggcagtgcctggtggggaggctcgggccatgcaagagcccaccatggggggtgacttgggcatggcgggctgcaggtcccaagccctgccccatggggaggcagctaaggcccggcgagaattcaagcatggtaagggcagrccgtcagtgctgggggccaggcacatcctccgcagctgctggcccaggtgctgagcccctcactgcccggggccagtggctcttgccagccgctccaagtgtggggcccaccaagcccgcacccacccagaactcacactggcccatgagggccatgtgcagccttggttcctgcctgtgcctctccctccacacctccccacaagcagagggagctggctctagccttggccagcccagagagggattcccacagtgcagcagtgtgctgaagggctcctcaagcatggccccagtgggcgctgaggctgaggaggtgccaagagtgagcg

SEQ ID NO: 746173 - DNA, 619 bp, Homo sapiens
tcattctaacaattcgtaaacggccattagctgctaatttaacattcaggtataggagaccactatctcctcccttagtgtgatcgaagactgcgggtttgttatggactgaatggttgtattctctcgaaattgaaccygtcaacctgtacaagctctaaccttcaatgtgtctgtatttggtgatgggacctgtaaggaagtaattaaggttaaaagatatcataaggttggagccctgattcaataggtttggtgtccttataagatagctcacactctgtctttctccatgaacactcacagaagaagtgctatgtgaggacatagtgagaaagtagctgtctacaaaccaagaagggagccagaaaatgaccatactcatcccctgatcctggaagtctaggtcccagactgtgagaaaataaatttctgttgtttaagccacccagtctatggcattgtattatggcagcctgagctgactgataccaggccagaccccacaattgcagcagcacgagggtgtgggccaatagtcttaaatgccacctgaacattttacttattttaatattcttaacgtgcttgagcatagccattttctgtgcaactttac

SEQ ID NO: 746174 - DNA, 619 bp, Homo sapiens
tcattctaacaattcgtaaacggccattagctgctaatttaacattcaggtataggagaccactatctcctcccttagtgtgatcgaagactgcgggtttgttatggactgaatggttgtattctctcgaaattgaacctgtcaacctgtacaagctctaaccttcaatgtgtctgtatttggtgatgggacctgtaaggaagtaattaaggttaaaagatatcataaggttggagccctgattcaataggtttggtgtccttataagatagctcacactctgtctttctccatgaacactcacagaagaagtgctatgtgaggacatagtgagaaagtagctgtctacaaaccaagaagggagccagaaaatgaccatactcatcccctgatcctggaagtctaggtyccagactgtgagaaaataaatttctgttgtttaagccacccagtctatggcattgtattatggcagcctgagctgactgataccaggccagaccccacaattgcagcagcacgagggtgtgggccaatagtcttaaatgccacctgaacattttacttattttaatattcttaacgtgcttgagcatagccattttctgtgcaactttac

SEQ ID NO: 746175 - DNA, 489 bp, Homo sapiens
tggacagatggatggatggatggatggatggatggaccaatggatggataggaaaggggaagttggggagggtgtagaatttttcctatttttaagagcaaaggcctgaatcacttgagtacattggccagggtccctatctaattcccttcacaaaaggctggcctgtgtggtctcagccctggcctgagcctgggggtctgcaggagttgtctgtccccgctccttstccctcaactgggtgtctccaccctgtccttgaagagaagcagcagaatttctatgtgggggtctgggcctcccctcccacccagcattccaaccctcacacccttccccagtcagcatagcacaggctgccagctggcggcctccctcccagagcccaccccattgaccgcaccccacccccgcagactcccccagacacttctgggccactggtccagcctctgtaagaagggctcgagctgaaagcagggtgggaag

SEQ ID NO: 746176 - DNA, 590 bp, Homo sapiens
agctgttactatgcccattttacagatgaggacgctgaggctcagagagcctgaggccaggacccagctcaacatgaatggcccttctggctgtggggccacgtccctctccctctggctgccctgaagtcccctccctcctgccttcacaggcaacgtctcgctctccacagsccccgcccccaatttccttcattctgaaggtccccccactcaaccgggtgggtctggcacctctgagtaccacacccctcctgctgtggtttccaagggttcataatttccatcttcatccgtttcttattaattttcttacaaaatgtgttccatgatttcactgacatcattgctgcccactccgagtggaagcctcatggaaaatccccaggtgggcccaaggtgcgccagcctccagcagctcaggccccgcgggcagggccgcagcttcactgctcccctggaagctccccttccctccctggccaggcaggacaagtggggtatgactggtggtgcctacattcactacaatttcatcctcctagtatctggagaggtagatgtggcgcctccatttcacaacaaatatc

SEQ ID NO: 746177 - DNA, 590 bp, Homo sapiens
agctgttactatgcccattttacagatgaggacgctgaggctcagagagcctgaggccaggacccagctcaacatgaatggcccttctggctgtggggccacgtccctctccctctggctgccctgaagtcccctccctcctgccttcacaggcaacgtctcgctctccacaggccccgcccccaatttccttcattctgarggtccccccactcaaccgggtgggtctggcacctctgagtaccacacccctcctgctgtggtttccaagggttcataatttccatcttcatccgtttcttattaattttcttacaaaatgtgttccatgatttcactgacatcattgctgcccactccgagtggaagcctcatggaaaatccccaggtgggcccaaggtgcgccagcctccagcagctcaggccccgcgggcagggccgcagcttcactgctcccctggaagctccccttccctccctggccaggcaggacaagtggggtatgactggtggtgcctacattcactacaatttcatcctcctagtatctggagaggtagatgtggcgcctccatttcacaacaaatatc

SEQ ID NO: 746178 - DNA, 590 bp, Homo sapiens
agctgttactatgcccattttacagatgaggacgctgaggctcagagagcctgaggccaggacccagctcaacatgaatggcccttctggctgtggggccacgtccctctccctctggctgccctgaagtcccctccctcctgccttcacaggcaacgtctcgctctccacaggccccgcccccaatttccttcattctgaaggtccccccactcaaccgggtgggtctggcacctctgagtaccacacccctcctgctgtggtttccaagggttcataatttccatcttcatccrtttcttattaattttcttacaaaatgtgttccatgatttcactgacatcattgctgcccactccgagtggaagcctcatggaaaatccccaggtgggcccaaggtgcgccagcctccagcagctcaggccccgcgggcagggccgcagcttcactgctcccctggaagctccccttccctccctggccaggcaggacaagtggggtatgactggtggtgcctacattcactacaatttcatcctcctagtatctggagaggtagatgtggcgcctccatttcacaacaaatatc

SEQ ID NO: 746179 - DNA, 531 bp, Homo sapiens
ttgccgggtactttattattaataatacttttatttttctgagatggagtcttactctgttgcccaggctggagtgcggtggcgtgatctcagctcctgcaacctccacctcccaggttcaagaattctcctgcctcagcctcccaagtagctgggattacaggaatgcaccaccacgcccggctaaattttgtatttttaggagagacagggtttcatcatgttggtcaggctggtctcgaactgctgacctcgtgatccacccacctcggcctcccagcatgctaggattayaggtgtgagccactgcgcccagccccaggtactttaaaatgcagaaattgaactcccatttcatgtggaagcaataccaggagaagcctggctcactgctcccttaccaggctgaggatgggcagggctccaacccccgagctgccaaatgtttgtgtgactacgggcaagtcacttctctccaaccctcagtttcctcatctgtaaaatggacataatgatagcatagggctctta

SEQ ID NO: 746180 - DNA, 531 bp, Homo sapiens
ttgccgggtactttattattaataatacttttatttttctgagatggagtcttactctgttgcccaggctggagtgcggtggcgtgatctcagctcctgcaacctccacctcccaggttcaagaattctcctgcctcagcctcccaagtagctgggattacaggaatgcaccaccacgcccggctaaattttgtatttttaggagagacagggtttcatcatgttggtcaggctggtctcgaactgctgacctcgtgatccacccacctcggcctcccagcatgctaggattacaggtgtgagccactgcgcccagccccaggtactttaaaatgcagaaattgaactcccatytcatgtggaagcaataccaggagaagcctggctcactgctcccttaccaggctgaggatgggcagggctccaacccccgagctgccaaatgtttgtgtgactacgggcaagtcacttctctccaaccctcagtttcctcatctgtaaaatggacataatgatagcatagggctctta

SEQ ID NO: 746181 - DNA, 522 bp, Homo sapiens
cgggggctgctgtgggaggatgggagggtctgtctcctcccagccttgctgagcaaaaactgcataatccaagccagtttccagaaggagcagccaaggaggggccccaccagggctcagcctgaaggggaactggggacagggaaggaggaatgggctggaggccccggggctaggagatgatgctggaggtgtgccacgtacccagccaggggtgggaaatactcaggggagaagcatccagggmctcagtgagaaaggaaccagagggggttctctccatctttgagtctctggtgtgtttgagaattcggacgccttgctaggcagaggcaggtgctggctcagacgattgcaatgcatgtcctcctagcaacaagctatgggcctgaccctggccctctgcacagatactgttctatgcagtctcttttgttggatttgggtggaagaaagccaatcccagactgcccccatccttccctaggcaattgggtgggctctgccagtgtgctagcccca

SEQ ID NO: 746182 - DNA, 509 bp, Homo sapiens
ataagcttctctaccccattggagcattggggtaattgctctatggttctcccctatgcatattaataaattaatatgtcttttctcctattaatctgtcttttttttttttttttttttgagacgagtcttgctctgtcacccaggcttgagtgcaatggcacaatcccagctcactgcaacctctgyctcccaggatcaagtgattctcctgcctcagtctcccaagtagctaggattgcaggtacctgccaccatgcccggttaatttttgtatttttagtagagacggggtttcctcatgttggccaggctggtcttgaactgctgacctcaggtgatccacccacctcggcttcctaaagtcctgggattacaggcatgagccaccgtgcccagcctatatttttagtagagacagggtttcaccatgttggctaggctggtctcgaactcctggcctcaagtgatccccttccagagtgctgggattacaggcgtgagccacc

SEQ ID NO: 746183 - DNA, 559 bp, Homo sapiens
aagaagtgctccttcaacatttatttctggaagctatctaatcttccggaatgcccgaggctattgacctagaaagctaagcttcaagaccctcatgcctgatactactgccatctgttgtattcatttgtcaacctaaaataacaacagagaggctctcaaagaacaagtttatttgggaatgaatgatgggattacaatccaggatatgcatgccatagcaggccatgggcatatctggggaggttgaggcaagggggaacttctaaaggcaaaaaggagaagtacacataggttatttcgaaacaagttcattggttacaaggaattattgcaggcagtgacatgtgtactggccaytgctagaagagcgtcttcaaataagccaccctgactgcaaggctgccatttagtaaggttacttgcaaggctgcagttaggaaacactgctactggaaagacgtcctcatagaggtggccttaactgcaaggttgtggttttggtagagtcctctggggtagttattatcaggcagctctgtgtgaggatcctcccttc

SEQ ID NO: 746184 - DNA, 650 bp, Homo sapiens
acaagattaataagtatgagagctaccctgtaatcattttgaaaataacctggattcttaaatattgataaccagaaagtgagaagaatggttaaaagaattgttgtgttgatgtcttgattataaaaagtcttcaataaagctaatcccaaatcactgaaacagctgtcacatgggagaagaagtaaacacatttygcatgtgtggtagagcaccaaacaaggagcaatgggctggcagtaggagagggggagaatacaggagaggaacttggctcataataagaaagaatgcatacgtacaaaattggctgccctgtgaagaaatgaagaccaccttactgaaaggattaaatagagcccaaataacattttccaaaatgttatagagggaattcttgcttagggtgtggagttgcagactaagtgaactaaaaatttcctaccttctctagaattccatttatgttagagatcataagtacagccaaaattcaaagagaaggagaattccatcaaatggtcaactcaacaaaaagaaaacaatcatgccagttatagtcacactataagggaataaaaaagaggaaaggaatcaaacaagcatacagcacatatgcaaaccattaggatatttccttttatatctaa

SEQ ID NO: 746185 - DNA, 550 bp, Homo sapiens
tgtgtgtgtgtgtgtgtgtgtgtgtgagaaggagtgtgcatgtgcgcgtgtgtgtgtgtgtgtgtgtatcactccactcatgccatagaaatgtaactcaggctgcaccaaaaggactcaagttcaaaactgttttcagagcttttggagaaaaagtcttctttccgctgagatcaccaagctggtaggatataaaccaggagctactggtggccatttgccatttggccatctcttgggaagaagctttccttcctgagaataaaaccaaaacaaagagrctgagagagaaagtttccattgtgaaagtctgagagttggatcttttttctctcaaataaaacagtgatctcttcggggcctaagcacctggcctctcctggaaaagccagggttctctcaaggaaaaaactttcaatctctccgaaacattggcaagtgagattttactctaaaatcctctgtacaaaatattttgagaacctgtcatcagctaacaccttaatcacaaaagaacctcagtgaggccccactttaataacctgtttcc

SEQ ID NO: 746186 - DNA, 550 bp, Homo sapiens
tgtgtgtgtgtgtgtgtgtgtgtgtgagaaggagtgtgcatgtgcgcgtgtgtgtgtgtgtgtgtgtatcactccactcatgccatagaaatgtaactcaggctgcaccaaaaggactcaagttcaaaactgttttcagagcttttggagaaaaagtcttctttccgctgagatcaccaagctggtaggatataaaccaggagctactggtggccatttgccatttggccatctcttgggaagaagctttccttcctgagaataaaaccaaaacaaagagactgasagagaaagtttccattgtgaaagtctgagagttggatcttttttctctcaaataaaacagtgatctcttcggggcctaagcacctggcctctcctggaaaagccagggttctctcaaggaaaaaactttcaatctctccgaaacattggcaagtgagattttactctaaaatcctctgtacaaaatattttgagaacctgtcatcagctaacaccttaatcacaaaagaacctcagtgaggccccactttaataacctgtttcc

SEQ ID NO: 746187 - DNA, 591 bp, Homo sapiens
gaataagtctcatgagatctaatggttttaaaaagaggcattctcctgcacaagctctctcattttttgcctgctgctatccacgtaagatgggacttgctcctccttgccttctgccatgattgtgaggtttccccagtcacgtggaactgtaagtccagttaaacctctttcttttgtaaatagctcagtctcagatgtgtctttatcagcagtgtgaaaatggactaatataattacataaggtagcaccctcccatcwtctctcgtacttcagaaggggagagtctgaagaagctgccaaattatttttatctagaaaatgaattcatcacattatttccctttgcaaaaatcaccaaagtttcacaattccaacaaaaggaagcatcataaaaatgctttgtaatttagctttgagttctctttatcctttatctcttgttttttcaatgtgagtcttctgtccctgatttctgattactctacaattttctgcacatggatgagttagaaattctgtgtgtacctttgccttcaagtatgaattaggtgaacacaattgtgggggaaaacatgttaacttaggag

SEQ ID NO: 746188 - DNA, 698 bp, Homo sapiens
atcacagtttcttaaatagcatagcatttcagccctccaatactagaattcctgaggtcagcaatccaaggatggcatggcaacttccctttcatcaatgacccacaccctacttagaagtgacttccgggccgggcacggtgtctcacgcctgtaatcccagcactttggggggccaaggcgggtggattgcctgagctcaggagttcgagatcagcctggacaacatggtgaaaccccgtcactactaaaatacaaaaaaattagcmgggtgtggtggcgtgcgcctgtaatcccaactacttgggaggttgaggcaggagaatcacttgaaatcaggaggcagaggttgcagtgagctgagatcctgctattgcactccagcctgggtgacagagcgagacttcgtctcaaaaacaaaaaaaaaaaaaaaaaaagaagtgacttccatctctaagtgttcctcatgatctaagatggctgccagggttaaggcttaagacttaacaaaggagaaaaagacaaagaacggcccatgccagctgtttaccatacaaagtcttcctagaagtcctgcaaaccaactttctcttacatatctttcgcaacctctagctgcaaaagagggagggcagtgtgatctttcagctggttctgctactaaggaggaaagtgagaatggatccttagacgataat

SEQ ID NO: 746189 - DNA, 633 bp, Homo sapiens
actgggggaaaaacaagccaaactaaactttttaaaaatggagatatttatcctctttaaattgtaataagatctatctgtcattaattaccctcaatactaaagtttttttacagatctttctcattttggagaaatgtattacaaaaattatccagctaagctgagaaactacaaaaaaggttatatagaaaaaatatgtatgttatttcaactatcacatatgacatctaatcctattacaatggatagaaaaaggtttgcactgacaggcataatactggaggaaattgagtgacacacatytcctactttgaagggtgcagtagcctcagtactgcctaagtaaacatcaacacatacttttaatacaaccaacagaggtcaaaactgatgtaaaagttcacaaacctatgatgatttacatttgcagtaagaaaatattttcaattatattccattactcaagaatcttgagtaatgttttactcaaggttttttggctgcataaatgtcttcttttgagaagtgtctgttcatgtccttcgcccactttttggtggggttgtttgtttttttcttgtaaatttgtttgagttcattatagattctggatattagccctttgtcaga

SEQ ID NO: 746190 - DNA, 606 bp, Homo sapiens
acaaacacacaatgtaccagaatctctgggacacagctaaagcagggtttagatggaaatttatacaactgaatgcccataggagaaagcaggaaagatctaaaatcaacaccctaacatcacagttaaaagaactagaggactaagagcaaacaaattcaaaagctagcagaagacaagaaataactaagatcagagcataactgaaggagatagagacacaaaaaaacccttcaaaatatcaatgaatccaggagctggttttttgataagattaacgaatagatagactgctagccagactaataaagaagaaaagagagaagaatcaaatagacacagtaaaaaatgataaaggggatatcacaactgatcccacagaaatatgaactaccatcagagaatactataaacacctctatgcaaataaacyaggaaatctagaagaaatggataaatccctggatacatacacacccccaagatgaaaccaggaagaagtcgaatccctgaatagaccaacaacaagttctgaaattgaggcagtaattaatagcctaccaatcaaaaaaaaagcctaggaccagacacattcacagctgaatt

SEQ ID NO: 746191 - DNA, 534 bp, Homo sapiens
ttaattacataactattgtgtcatttagagcctgctggtcaggggccacagtgcctgactgacaacctcatggaacaagtgtaagcaactgcaaaacattgtcaggtgatgagggtgcacgggtggaacagagcagggactcagtgagatatggtgggagctgcagatacgctgttggagggacgagtggtccatcaggtgtttgctcctggaatggcccatctcaatcagatttttccaccaaagttttgtttctcttctggaaggttggcttataggcctacagagggctttgcagaggacaggrgcatccagagagactcttagtgttcaagaaggagttgtcacaatttggtcctcatccccaaagtctggcttgggcaagaataggaaaacttgtcatgggcagtaggatgaatgtagaagtcctcagtcttctggatttgcctctctttttcctattcagttgcagccattttttaattaagttattaatatgtcctaggcattgcacaaatgagatggtacatgcac

SEQ ID NO: 746192 - DNA, 629 bp, Homo sapiens
cctggacgttgcctacccatcatgatgtctttcttcgtggtttgtttctggtttcaagcataaagaccgtgtaggtggaaaagtattctacagatgcgggatggtgttgctgtcattcctattaccactaaggatttactargtcttcttgggagacagatgccagcctagccagcctccgacacaaggccaggaaagcaatcagaggctcctgggtgtgagaagaggttctgaggagagggcagggaatggcagtcagcacaggcaggttccagaggctccagcctctacccagcaaggagcccagcactgcaggctatgctcccctagagcatgctgctttcttctttccacactggtgggctcaatgccccaccacacagtagggtctttgctcattatcttccttacacacactcttgtttatggctcccctctctctatctattcaatcccacccaaccttcaaagcctggctcatgggagacagggtttctaatggaaaaagtttggatgcagatgggtccagattccaaatctcaacttaccagctgtgtggcttgggcctttgccatatgtgaaaatggggatagtcatccccacattccaagcctgctgaaggggaatga

SEQ ID NO: 746193 - DNA, 643 bp, Homo sapiens
caatttattgttttaaatgtttgcatttctcagtaaatttccctcatgcattttactgtgtttttcaatgcagaaacatgttgtcattattactttattgtatattacaacttttatcattgaattttgcttgttttcccatttagtatctggtcttaaattccacattatttttcacattatctgaatttattatgaccatcttcaatttagttyattatatgattatttatttttaatttgctaaagacatttgaaacacattttaatgttctgtgtttagtgattttggttctgacagatgcatgcaatgtgtttggtataggtgaataaaaatgtgataaaagaaggaaggaacaaaggacaaacttgccttactggaatatgaaaccaagtgtagcatgatgatagatgatagacagataggtgatagatggatatatacacatgtaaatacatacatacagacatacatacttagaatgtaaagatatattttacaaacatacacacatgcacacatactttacaggtatatccgatatgcaatgggtggtctgaagggatgaagagaaataaacatctacaggcactaatttccaactagttcataaaattatctgtgctaattatatatagcaaa

SEQ ID NO: 746194 - DNA, 615 bp, Homo sapiens
tttagatattaaaataagcacacattgattattgttaacatcattgtaatcttttggaaatgactgatgatttgtaagctaaagtaaattaaaaataatggaactctactggggaggctaagggggaaagactgcttgagcccaggagttagagagactagcctgggcaagaaagtggaatctaagtttccaaaaaagtaataataaataatgaaacagcattatagaaacctgatcttaaagtgaatggaattatttctaatacattttttataccttctcrtcgagatttacttgcaccaattgggagaataaaataaatacatgtataacattcatgcagtaggtgctgataaagtatatttttaacatgaatacaacatatatataatttatgtacaaaaataaatttaaagctactgcagaaaaacttatagcaaaaaaagcaaagatctatagcagataaacttgaaagctaatcaatttctaattgatttcactttacacattactctgttagaaaaaaattattagtaattttgataatggaaataaaaaagtatagagaaacccatatttcaaatagcatgacatgaaatataaaatgaaagttaa

SEQ ID NO: 746195 - DNA, 528 bp, Homo sapiens
tgatggattaaagcatacacaaaattaaaatatgcataacttagaaattaagtcaaaaatgttttagctgcccaaaactttatacactttgtttaactcaaagcagtttcatttgccaaagtttaaccacagcacaatggctagtctcaataatgtttacttatggcttgccyacagaattagtaataaagtgatatagtattagatatgtttcaaggtaactgtccatccataccatgttttgaagagttgtcaatctcctttttttggcataaataaaaaaattttgtataaattgtcctatgcctacttcagtgaccgctcattgaccggaaatggaaaactcattgaaattcaacaataggcctatatgcttcccaaatacccaggaaaggtgtgtcctggcttgccagcctaagcacagtccattactaatggtttaactaagaggcacagatgtaaagtgaatgccagcattaagaagttatctcaaaaatatgtcataaaatttccaggatgtagagctgg

SEQ ID NO: 746196 - DNA, 602 bp, Homo sapiens
gaaatcatagcaaatttacctgcataaggctgtgatttcatttgaggaaaacaagaatctgtgcagaaatttaaaaggaaatcctgatgacaatagggaaccctgaaaatctctgacatatttctggggatcccaggttaagttttttttttttttttttccagacagagtctcgctctgttgcccaggctggagtgcagtggcccgatcttggctcaccgcaagctccgcctcccaggttcacgccattctcctgcctcagcytcctgaatagctgggactacaggcgcccgccactacgcccagctaattttttgtatttttagtagagatggggtatcaccatgttaaccaggatggcctcgatctcctgacctcttgaatccacctacctcagcctcccaaagttctgggattacaggcgtgagccaccatgcctggccgttaagttgtattctcacccatataagacctgggaaaggaaaaggcaccactcactcacctctagttggcttgaaagtgttgcgaaaactgcaagtaaaagctaagactattttgtaaactgcctgaagtttgaagaggtatctttgcacatagatctc

SEQ ID NO: 746197 - DNA, 602 bp, Homo sapiens
gaaatcatagcaaatttacctgcataaggctgtgatttcatttgaggaaaacaagaatctgtgcagaaatttaaaaggaaatcctgatgacaatagggaaccctgaaaatctctgacatatttctggggatcccaggttaagttttttttttttttttttccagacagagtctcgctctgttgcccaggctggagtgcagtggcccgatcttggctcaccgcaagctccgcctcccaggttcacgccattctcctgcctcagcctcctgaatagctgggactacaggcgcccgccactacgcccrgctaattttttgtatttttagtagagatggggtatcaccatgttaaccaggatggcctcgatctcctgacctcttgaatccacctacctcagcctcccaaagttctgggattacaggcgtgagccaccatgcctggccgttaagttgtattctcacccatataagacctgggaaaggaaaaggcaccactcactcacctctagttggcttgaaagtgttgcgaaaactgcaagtaaaagctaagactattttgtaaactgcctgaagtttgaagaggtatctttgcacatagatctc

SEQ ID NO: 746198 - DNA, 602 bp, Homo sapiens
gaaatcatagcaaatttacctgcataaggctgtgatttcatttgaggaaaacaagaatctgtgcagaaatttaaaaggaaatcctgatgacaatagggaaccctgaaaatctctgacatatttctggggatcccaggttaagttttttttttttttttttccagacagagtctcgctctgttgcccaggctggagtgcagtggcccgatcttggctcaccgcaagctccgcctcccaggttcacgccattctcctgcctcagcctcctgaatagctgggactacaggcgcccgccactacgcccagctaattttttgtatttttagtagagatggggtatcaccatgttaaccaggatggcctcgatctcctgacctcttgaatccacctrcctcagcctcccaaagttctgggattacaggcgtgagccaccatgcctggccgttaagttgtattctcacccatataagacctgggaaaggaaaaggcaccactcactcacctctagttggcttgaaagtgttgcgaaaactgcaagtaaaagctaagactattttgtaaactgcctgaagtttgaagaggtatctttgcacatagatctc

SEQ ID NO: 746199 - DNA, 540 bp, Homo sapiens
cttttatatgttttctttatagcattttaaatagcacattaaaattatttgttcatatatccatgcctcaaaagcctatgaactccttgagatttatacttcttttaaactcagcataatataatgctgcattttgcagatttctaataaattaattttatttttctacttccatattcaggtagtattgaaatgttatataaaataagaatattagataagaatcagccacatatctcctacaagttttgtataaatgtacatctttagtagcctaatagaaataaattttagcttaagctactatctaccaactctcagtctgttagacacattttactgaaatgaatttttggaaagtttgtatcaaaagggcawgaataaatatcttcagagttaggaagaaaaagaaggaagactaataaagacaaaaattacctgagcctattctctggatacatataattatcctgcaagtcctttagagaaagggttactaataagttttttatactgcagccaattatatattttaagcac

SEQ ID NO: 746200 - DNA, 608 bp, Homo sapiens
attttgttgttttggggtggagagttcagtatatacctgtcaggtccacttgatccagagctgagttcaggccctgaatatctttgttaatgttctgtcttgatgatctgtttaatattgtcaatggggtgttaaagyctcccattattcttgtgtgggaatctaagtctctttctaggtctctaagaacttgctttatgaatctaggtccccttggattaggtgtgtatatatttaacatagttagctcttcttgtcatggaaccctttattattatgtaatacccttctttgcattttttttatctttgttggtttaaagtctgctttatcagagactaggcttgaaaactgttttttttttctgttttccatttgcttggtaaattttcttccatttctttctattcagcctatgtgtgtctttgaatgtgaaatgggtctcttgaagacagtataccaaagagtcttggctctttattcagcttgcctgcagtcttttaattgaggaacttagcccatttacatttaaggtttgtattgttatgtgtagatttgattctgtcatcatgttgccagttgtttattttgcaaacttgtttatgtgg

SEQ ID NO: 746201 - DNA, 583 bp, Homo sapiens
aaactctacctcctcctcagctgtggcatgctggtagtactgttggtacttggacacaagattgttcatgctgctcttggcctcagtgaactccatctcatccatgccctcactcatatagcagtgcaggaagaccttgcacctgaacatggctgtgaactgctccgagatgtggcctgaacagctcctggctggccgtgttgttgctgataaaggtgtcagacatttttagcccctggggtgggatgtcacagacagctgttttcacatggttggggagccaataagcaaagtagcagctgtttttgttttgaacatcgagcatttgctcatccacttcccatgtggacatgtggcctctgaaaatggcaggaactgttaggtagcagccataaygaggtgaggtgtcacaagcagctgtgatattcttggtgtcaaacatctgctgagtgagttcagccacggtcagggcctggtactgctgactgccctggctggtcagtggggcaaagccaggcatgaagaagtgcaggtaggggaatgggatgatgttcatggtcagcttccacaggtcagcattcag

SEQ ID NO: 746202 - DNA, 614 bp, Homo sapiens
agtacaagtcatatgctttatggtaaaataatacagaaacatgagaaaaagttaaaaatagtcttttccttcaatgttttttactacacaaattaacatttattcaccttttgacaattttctctatgattatgaaaaatataaatctactacagatataaatgctctatgttaatatatgaacataaatgactatatagatatacatatacatgtacatacatatataaaaagaagtttataccattgtaacgcctaaggttcttgcctagccatgctaaagaactggtgtggcctctgactgcattgagtgatagagacgaactgagagagagaaaaagctgtaggctttattgagcaaagtgaaaggacaaagcttccgcagcatggaagtgtgtcctgaattggttccttcyggtgggttcttggtctcactgacttcaagaatgaaggcgcggaccccacagtgagtgttacagttcttaaagatggtgtgtctggagtttgttccttcagatgttcagatgtgtctggagtttcttccttctggtgggttcatggtcttgctgacttcaggagtgaagccacagaccttctccgtgagtgttacacct

SEQ ID NO: 746203 - DNA, 610 bp, Homo sapiens
tacattaaatactttatttaattgtattactatgtatcataataacagagaactaaagatacctggcaatttaacagttataatttagttaactatttttcttaaacacaggactgtagagtctttcagattatacaaataagtccagttagaaaatttatagtctacctctgttattaaatatctgatttacattgacaaagtcaagtgaaaattttcatatattttaaaatatatgaactaaaaaacaatagtyatcctattgtcacttcagttataaagttcctcactttgtattgaacacagaatttttgatgacataaaatcttgatttttttttgtatagcatagtatttaacaaaagatggaaattccacaaacggtgaaagaaacaggaaaaaaggaaggacagagaaattgtgttactgaatcaaacataactttaagttcctttttccaacagaaagtaaactatatgttatataccccctttggaaggaaaccaaatgaaagacatgaaagaaattcatatgtgcttcatgttgaagtttaattggtgaaatgtgaattctcttttaatctgctctagtgaaatataaaaacatatgca

SEQ ID NO: 746204 - DNA, 527 bp, Homo sapiens
accaagatcaccctcttgaaaacaattatttgctctcttccagagaaccaaagtaacatccaatcgagtcttcaggcttaaagcctaggatctcatgatttccatcaagcccaattgcagctcctcttgatccaaagatctatgaacttagggggaaaatgtttttgtccccacacactcaacacacagtaataaattaggaggagaataaccacaataaatatttctgctcagaaacagaagaaatgggagacaccastccacagccattctgaaatctcaccaagcaaacattgccaatagaaaatgttccttgattaggccccacttctactccctgagagtgctacctgagtttattctccttctcacctcttgccttcactctctaggagttctgtcctcttttatgatcatccttggccatattggaaaagggcatcagaaaatctattcccctagtgtttaagcagcttcttacatctgtccctataaacttaggttattttgcaattcactcacagtct

SEQ ID NO: 746205 - DNA, 527 bp, Homo sapiens
accaagatcaccctcttgaaaacaattatttgctctcttccagagaaccaaagtaacatccaatcgagtcttcaggcttaaagcctaggatctcatgatttccatcaagcccaattgcagctcctcttgatccaaagatctatgaacttagggggaaaatgtttttgtccccacacactcaacacacagtaataaattaggaggagaataaccacaataaatatttctgctcagaaacagaagaaatgggagacaccagtccacagccattctgaaatctcaccaagcaaacattgccaatagaaaatgttccttgattaggccccacttctactccctgagagtgctacctgagtttattctccttctcayctcttgccttcactctctaggagttctgtcctcttttatgatcatccttggccatattggaaaagggcatcagaaaatctattcccctagtgtttaagcagcttcttacatctgtccctataaacttaggttattttgcaattcactcacagtct

SEQ ID NO: 746206 - DNA, 637 bp, Homo sapiens
aaatatttcttatggccagctcagaaagttccagaggcccctggtttttccagccaaatatgggattctctgggttcagaactatcatttaccttcacacttttactgcctggaatgcttcagggaaatgttgtgaggcaccatgagttctctgggctctggtgtatcactttaattccaacaaataagaaatacgtaattattaaaagggtatgcttaggattgagctagggaatatagaaaagaaagaaacagtctctacccaaaagaagtttgtaacctgaaatcaggcatgagacttacatagatgaaagaatttgtaagcaagacagtaataataataatartaataatattgatagctaatcttgatcacatatttactaatgaagggcattgttctaagagctgtacatgtattatttgaccactgtcttacaagacagatactagtatcatccccagttacacaagagaacacttaaataaaataggttgaagaccttgccgaagatcacccacctgaataaactcaggattcaaagccaaaactgaggttgctgggtatgcctgtaatcccaacactttgggaggctgaggcaggaggttcacttgagctcaggagtttgacatcagc

SEQ ID NO: 746207 - DNA, 569 bp, Homo sapiens
aggatccataatatctcctagctatgtagtctcacctccctacaaatctgagatatggtttctgacacaagggaagggtatctgttagactgtaaagatgtaccacttttattctcagctagaggccttctctttggggtgatgaccagctagtagctgcaggtgtgggaaagggttgccttttcttgatacttggccaccttttatgaaagaatgcaaaagtgagcctaaagacaataaatattagatagaagaatagattcctaagaatatattcctttctaatattcagaaagaggaatagattccttggccagtcagcctctgtatgtctgaaatcacccaaagagttctacttaaaaaawaatgtttagattgagttatccagttaaaatcaaactctccaggctgactgatatcaatggctcatatgtgcaattggctttcctcctggttgtaagcaagaggacaaggaccacatcttccctgtgcacccagcataacatggcccctagcaggtgctccataggcacttgttgtacacatgtacaacagtaattatggcttgt

SEQ ID NO: 746208 - DNA, 613 bp, Homo sapiens
ctgtggctaactcaaatgccattctgatgttctatgtatgtgacttagtactcactccctgctccctctggaaacttcatgattttctctttctctccagtatgctaaaattctatggtgatatcttgtaatgtgtatctattttcatccattatgctaggctcttggtgggctcattcaataagtaatgagaaatttcataaattgtttctctgattatttccacctcctctgttggtctattttctttttcaggaactcctattatttaaatatgggaaatcctggactgatcctctacaatttttaatcttttctatcttctattcttgtcaaattgttctactttattggaaatttccaccatttcttcttcctcytttgtgttttcatttctgcaatcatatatattttttgagatgggagtctcactctgtcgcccaggctggagtccagtggcacaatcacagctcactgcagccttgacctcccaggctcaagcgatcctcctatctcagcctcccaaataactgggtctacaggtgcatgccaccatgctcagctaatttttttaattttttgtagagatggggtctcactatgttgcccagtc

SEQ ID NO: 746209 - DNA, 613 bp, Homo sapiens
tatactttttccactgtaagctttcagttttcatgatctggaatttgtccattgcctttcaacttccaacattttgttgttgttgtctcccctcaaattctctttgtccttgagaatgtatgcccttaaaaacacctttactttcattttagtatggtgtcagtgaggaagctgtggtaatcatatatgttcagttcatcaactttagttgaaaagcccccattaaactgtgacgtaaatataatgactttcttggagtcatccatataatggaatttgaaagtgttggaaataagcttctatcataaaaattcattcaaacaacatcagtgacagagaagtgttcacataaaaatgatatttatgtatatgttgttctaaatctgctstaagtaacaggaaaaaagatattctctatagaggtaaaaaggcatttgtttatattgactagtagctaaggaaaaagtgaagtatcttccttttgtccatgtctactgagttttagttcagattttttcataactagatatagctggttttctatcactaccaaatggagaaagcccccgagagagagaaatatcaaccaaagctaggaacctgagtctccaca

SEQ ID NO: 746210 - DNA, 603 bp, Homo sapiens
ttagcctaccaggatgtcctttgaacctagcactattttaatgtcatgcgcttgacttatgtccttgtttctcttcttccctagttgagattctaaggtccatcattaaagtcattccctatgtaacattctaactctcacaccccttccctcctcatcaaacttgtctggaaaaccccagccctgggtaaatctaacacttaatcttcagggcacctgcaccttcctagctgaacatggctggagaaaaatataccactayggtgagtgatctcagtttaaattcagatgactaacttcaactttgctctcagtgttggcagccaattccactctaatttcctagtccattcactttgtctctggcctagacaactatttcacaccctcttctctttcctcaaatattcaatatcttccctcccatccatactcagagggaaattccataaacattataatcccatctacccacctctgtgcctttgtgctgtgtgctctacctttgatgtacaggttcctagataaggaaaaccccttcacatttgctgctagatactacaagcagccttgagtcttgctactcaaggacatcactctgca

SEQ ID NO: 746211 - DNA, 526 bp, Homo sapiens
atctccaagataggtcctttcagagtgactctcccaaggtcactcagtctgtaggcagcttaactgagattacatgctctccagcccatttgatcacattgctctcctaagattaataaagctcatagggtgtcagagctggagacaaacgtaggagttatccaggctaaccctttcattttctatcagataactaaagccaaaggggctaagtgtcttgccagagtcacggagcaagtggrccagagtacaactgcatttcagatctactgatttcaaggttcctgctccttttactgcacctgagagtgctctaaaatcaacacagttgattatacacagtaaatcagaggggaggagagagggtttctaaaggtatcaagaagaaaaatatgagaaagatcacaaaaagtaagaacacaagtcaaatagcacaacagtgtgtagtcacagtgtatgaacagtcttcaaagcactaaggggaccagggtgagctctgcatcccaaccagataaccagcagtcaa

SEQ ID NO: 746212 - DNA, 526 bp, Homo sapiens
atctccaagataggtcctttcagagtgactctcccaaggtcactcagtctgtaggcagcttaactgagattacatgctctccagcccatttgatcacattgctctcctaagattaataaagctcatagggtgtcagagctggagacaaacgtaggagttatccaggctaaccctttcattttctatcagataactaaagccaaaggggctaagtgtcttgccagagtcacggagcaagtgggccagagyacaactgcatttcagatctactgatttcaaggttcctgctccttttactgcacctgagagtgctctaaaatcaacacagttgattatacacagtaaatcagaggggaggagagagggtttctaaaggtatcaagaagaaaaatatgagaaagatcacaaaaagtaagaacacaagtcaaatagcacaacagtgtgtagtcacagtgtatgaacagtcttcaaagcactaaggggaccagggtgagctctgcatcccaaccagataaccagcagtcaa

SEQ ID NO: 746213 - DNA, 515 bp, Homo sapiens
ttaggcaccttatttaatattttcaccatcatttgatgtagaagttaatttaatttaaaaaatttttgtgtatactaatataaaatatcatatataagatctgatattgtatgatttataatgaatattgatttttttacaatgacagttttaaatatccagaaaaaaaagcttgacaatagaataatgagatacagcaargtcaaaaaaatttgaaagtggcaaaataaagttcagaacattttgaatcatataaaataataatattcattttaatagaaatatttagatacctagggaaaaacacaaaaggtaaaataattactatgatgcatcattatttttcttgagaaaatacacatcaaacatcatttggtaaaatggaatcaactacatgtaagacagagtgaaaaaaataatgaagacaatgctgcttatcatgcatgaggtagggatggtaatataagttagttcatgtcttatagctgttattagtttagtgtcacattatgctg

SEQ ID NO: 746214 - DNA, 547 bp, Homo sapiens
tcttgtgggcatttagtgctacaaatttctctctactcactgctttgaatgtgtcccagagattctggtatgttgtgtctttgttctcactggttcagtttgatctcagactgctgtgctagcaatgagcgaggctccgtgggcataggaccccccgagccagacgcgggatattatctcctggtatgccgtttgctaagaccgttggaaaagcgcagtattagggtgggagtgacccgattttccaggtgtcrtctgtcatctctttctttgactaggaaatggaattccctgaccgcttgagcttcctgggtgaggtgatgcctcgccctgcttcggttcatgcttggtgccctgcacccactgtcctgcacccactttccaacactcctcagtgagatgaacccagtacctcagttagaaatgcagaaatcacctgtgttctgcgttgctcatgctgggagctgtagactggagctgttcctattcggccatcttggatccaccccccttaaaggcattcttaagccataaacaatagcatgag

SEQ ID NO: 746215 - DNA, 686 bp, Homo sapiens
agattgcttttctgattgaatacttcttctctcttatttctcaaattattactctattgagtaagaatcttaactatgttcaacattttcaggcatgattattataaatattttgcaagttagcttcaggagctgaaaagatttcttgatgtcaggtgatacttttgttgaatcaacaagattgactggtctcatggctggtgtttagcaagtcaatcattttcactacacaatagataacagtgaactaaaattttcttttattcattgggaggctattctgtgatactaagaacaaagaaaatcaagtctctgtggaaccagagtcaatcttccaaaatgtaacacatccattaggagaaaaaaagagtgtcagacaagaaacaaattggctaaattggttgaaatatctctytaaaattaagtttacatattaaaggaaagataaaaggaatatgcacatcatttgctaagacacaaatatcatctgattttcagctatttcacatttctattttttcccccttactacattttcagcacttttggttttgaaaagcagaaaatgaagtcaaactggcttaaacagaaaagaagatgaatttattggtgcatataactaaactatccatgggtatctgacttcaggtgctgctggatccagttgctccaataatgtcagagtt

SEQ ID NO: 746216 - DNA, 550 bp, Homo sapiens
agagctgagttgaattcctggatatgcttgttaactttctgtcttgttgatctgtctaatgttgacagtggggtgttaaagtctccaattattattctgtggaagtctatgtctctttgtaggtcactaaggacttgctttatgaatctgggtgatcatgtattgggtgcatatatatttaggatagttagctcttcttcttgacttgatccctttaccattatgtaatggccttctttgtctcttttgatctttgttggtttaaagtctgctttatcagagactaggatwgcaacccctgcctttttttgttttccttttgcttggtagatcttcctccatccctttattttgagcctatgtgtgtctctgcacatgagaagtgtttcctgaatacagcacactgatgggtcttgactctttatccaatttgccagtctctgtcttttaattggaggatttagcccatttacatttaaggttaatattgttatgtgggaatttgatcctgtcattatgatgttagctgtttattttgctcattagttgg

SEQ ID NO: 746217 - DNA, 626 bp, Homo sapiens
ctaattttttcatgaacataaaactccaagtcatttatgtgaactatatctcaatgtagctgtaggaaaaataaaaacctgtgctaacctggactttggtctcatttaagatttggttctggaatgcaaatatggtttttgaaagcccaataaaattaattcttgtmtagtctgtatatattgtttacaaggactacaaacactgcatcacaaatcggaggctttggtaaataactaagtgtccaacatagaaaataactatttggtcaaaagtataaaaggtctgaccttatttgaaatacgaaaaagctgagtacttggaagatacgtgaaaatactcagcatagatattatgaaaagctgaataacaaagtaaccttttttctcaaattatttcaggccacagtatataacggaacttattgctatttgaagtttcattaaaaataggttcatatatagaagaaattgtgtcagtaatacctcttcactaatataaaatatgccccttttagaagacgtgttctctagatctcatttctaaaactctgtatttttctcatttctaaaacttaagtatccaatcaaactgaccttactaaaatcccacaaattataagtcaatt

SEQ ID NO: 746218 - DNA, 626 bp, Homo sapiens
ctaattttttcatgaacataaaactccaagtcatttatgtgaactatatctcaatgtagctgtaggaaaaataaaaacctgtgctaacctggactttggtctcatttaagatttggttctggaatgcaaatatggtttttgaaagcccaataaaattaattcttgtatagtctgtatatattgtttacaaggactacaaacactgcatcacaaatcggaggctttggyaaataactaagtgtccaacatagaaaataactatttggtcaaaagtataaaaggtctgaccttatttgaaatacgaaaaagctgagtacttggaagatacgtgaaaatactcagcatagatattatgaaaagctgaataacaaagtaaccttttttctcaaattatttcaggccacagtatataacggaacttattgctatttgaagtttcattaaaaataggttcatatatagaagaaattgtgtcagtaatacctcttcactaatataaaatatgccccttttagaagacgtgttctctagatctcatttctaaaactctgtatttttctcatttctaaaacttaagtatccaatcaaactgaccttactaaaatcccacaaattataagtcaatt

SEQ ID NO: 746219 - DNA, 643 bp, Homo sapiens
atggtattgcctcggtttttttctagggattttatagtttaagtctatgtttaagactttaatctatcttgagttaattttttttttataaggtgtaaggaaggggtccagtttcagttttctgcatatggctagccagttttcccaacaccatacattaaataaggaatcctttccccattgcttgtttttgtcaaagatcagatggttgtagacgtgtggtgttatttctgaggcctctgttctgttccattggtctatatatctgtttggtaccagtaccatgctgttttggttaytgtagccttgtagtatgtttgaagtcaggtagcgtgatgcctccagcttcgttcattttgcttaggattgtcttggctatacaggctcttttttagtttcatatgaaatttaaggtagttttttctatttctgtgaagaaattcaatgttagcttgatggggatatcattgaatctataaattactttgggcagtatggccactgattcttcctatgatatgatattgattcttcctatccatgagcatgaaatgtttttccatttgtttgtgtcctctcttatttccttgaggagtggtttgtagttctccttgaacaggtccttcacatcccttgtaagttg

SEQ ID NO: 746220 - DNA, 631 bp, Homo sapiens
ctgtaaaaatgaaaaaaagatccccatgcgccttagttaaaaataatcccagaagacgttttgttttagagaacaatcatgttattttacagttaatatgaacttcattccctagaatttatactaaaccaatttgagtacatagattataagttgtctactcacaatgaacaaagtacagtatcagttcacaagaaatgaaaataaacagtaattacaaatatacaaaaccaacagttacaactttctttcattcatcatagattcacagtatgttttctcttggtctaggttaraatgaaagggcagcattttatcatagtcaatcttttttattgcaaccatttttcataaggctagaaaaccaactggtgatgacatcttttaagaaattagttcatcaattcttaaacaatacttcctttatctcaaatttatatccacatcatatttataccatgatatgttttaaatatgtaaataaaaattaaaactgtatgtgaatacccctaaactcatttcctactgtttataaaaatatttttataaatctgacttatcatttaaaacatgcaatagattctatataaaatttagctaatggagaggtattgtttcaaatcatcacccc

SEQ ID NO: 746221 - DNA, 636 bp, Homo sapiens
tacatatacaatagaaaactattcggccattaaaaaaagaaggaaatcctgttatctgtaacaatatgaatgaaataagccaggtaaagacaaataaatactgcatgatctcactcatgtggaatcagaaaaagttaatctcatagaagcagagagcagaatactttgggagtcgggtatggtttgtgttaaaggacacacaatttcagcttgacatgaggaataagttcaagagctccactatacaacatgaagactacaattaataataatatattatattcttgaaaaatactaagagaatggatgtaaagtgttctcaccacagaaatcattaagtatgagatgtatcatgttaattagctagacttagtcactccacaatgtacatatacttcaaaacatcatgttgtacatgataaatacatgtaattctgtcaatttaaaaataaataaatgttttaagtcactgaattgtatactttagaaaagtgaatttatggcatgtgaattacatctcagtaaagctgctggctaggygcggtggctcacttctgtaatcccagcactttgggaggccaagatgggtggatcacctgatgtcaggagttcgagacaagcctgaccaatatggtg

SEQ ID NO: 746222 - DNA, 581 bp, Homo sapiens
acaggtcatgtgtgaaaatccggggggagttagtataaaatatgtggtggaaatttgggctgtaacatcaccaagttagttctgtgcagacttgagttggccatattcattccaaccagttttagccagttttgtgttatcttacaagtggagagattttcagtgtttcagcaagttgcttcttttttaatctgtcatcctgaaaacaagattttctcttagtcatttgttcctttcactctttggggccacagttttcactaacattttggaagtaacaagttaaaggacatccctgaccctatttttgaacagttttttttaacccatatttctgcagcatttctgatggcaaatcaagagttatgattgcctaatgagtctgacttaacaatacaatagtcctcccttatccacagtttcactctcyacagtttcagttacctgcggtcaatcatggtctgaactattaaatggaaaactccagaaacaaacaactcataagttttaaattgcacaccattctgagtagcatgataaaatctctcaacattctgtgccatcctgcccaggaggtgaat

SEQ ID NO: 746223 - DNA, 612 bp, Homo sapiens
tatgatgctggcctcataaaatgagttagagaagagtctctttttttccattgtttggaatagtttctgaaggaatggtaccagttcctccttctacctctggtagagtttggctgtgaatccatctggttctgtgctattttttttttttagtttgtaggctattaattattgcctcaatttcagaacttgttattggtagtattcagggaatcgacttcttcctggcttagtcttgggagagagtatgtgtccaggaatttacccatttcttctagattttctagtttatttgcatagaggtgtttatagtattctcttaaggtagtttgtatttctgtgggatcagtggtaatgtcccctttatcatttttattgtgtctatttgatcctwctctcttttcttcttttttagtctggctagcagtctattttgttaatcttctcaaaaaaccagctcctggattcattgatttttttaagggtttttcgtgtctctatctccttcagtcctgctctgatcttagttatttcttgtcttctgttagcgtttgaatttttttgctgttgcttctctggtttttttaattgtgaagttagggtgttgatttt

SEQ ID NO: 746224 - DNA, 605 bp, Homo sapiens
gatccaaactttattgataaatccagctcctggcattgtcaggtagggactggaccacttgcctcacggccacaagatgactgatgcaactttaatcatcatgtccacttttaaaggcaggaagatatgtgggttgaggaagctatagaaaaaaaaaaagcgttttcctgaagtggatctcttttcatccctctatcccataagacttttctgtatgttttacagatgaaaytggtacacgaatattcacagttgtaaaagaggtcaaataaggaaataaatggcattttccagtttctattgtaaaagactagcaagagagaaggaaattggtgatagctattgttctatttctctgtttatcacaaatatactaaggaagagaaatataaaacagttctggttatatttattaagaaaaaaagtcagccaacatttgccaagtttccctttccaagcagaatttatttattgatgggattctgggttgtgttacttgctgctttaatatttccatctattaagaaggagagcaattttttccatgctcttacagatgagacaagtcccttggaaactgagaaggcatgggatgattgacttct

SEQ ID NO: 746225 - DNA, 605 bp, Homo sapiens
gatccaaactttattgataaatccagctcctggcattgtcaggtagggactggaccacttgcctcacggccacaagatgactgatgcaactttaatcatcatgtccacttttaaaggcaggaagatatgtgggttgaggaagctatagaaaaaaaaaaagcgttttcctgaagtggatctcttttcatccctctatcccataagacttttctgtatgttttacagatgaaactggtacacgaatattcacagttgtaaaagaggtcaaataaggaaataaatggcattttccagtttctattgtaaaagactagcaagagagaaggaaattggtgatagctattgttctatttctctgtttatcacaaatatactaaggaagagaaatataaaacagttctggttatatttattaagaaawaaagtcagccaacatttgccaagtttccctttccaagcagaatttatttattgatgggattctgggttgtgttacttgctgctttaatatttccatctattaagaaggagagcaattttttccatgctcttacagatgagacaagtcccttggaaactgagaaggcatgggatgattgacttct

SEQ ID NO: 746226 - DNA, 539 bp, Homo sapiens
atcacttgaaccagggaggcagaggttgtggtgagccgagatcacgccactgcactccagcctgggtgacaagagcaaaactccgtaaaaaaaaaagaaagaaaaaaacctaaaattccttggggtcttccaagcctctacacctgcattttaatattgttttagaaaacaaatgcaaagaaaagctgtaacttggcaagaatctactcatctgtgtcctgctgtacactggmaagacttctaacttactacccctaacatttggctgactttattggtcttccccgatagttggtaaaccactaaaggacagggactgtatttaattttatatccctggagcctaggcactaaataaataaatgaaagaaacaggcagctgcaatgtttcagtatatactctcttttaatagtactcacaactgatttgcaaaatttactcaatgaacacccagaatacaaaggaaaaattttcaataaaaacttaaaaaacaagcaaacaaacaaaaaacttgaataatttggcacaggcaaagaca

SEQ ID NO: 746227 - DNA, 617 bp, Homo sapiens
tactctgtctgctaatccaaatgctggtctcttgcagaaatattttaccaggtatctgggcatccctcagcccactcaagttgacataaaattaaccatcacaacagtacttgatattaaaacctatggaaacaacccaaaccaggctcaagaaaattcaaagctttaaatgctttttccttttagccccacatccttaaagatataataaaataatgcatagatcataagcgtagatctccagcctggcgacagaacaagactccgtctcaaaaaaaaagaaactacctgggccatggtggcacatgcctgtggtcccagccattcaggaggctgaggtgggaggatggcttgagcctttgaagttgaggctacagtgagccatgatggtgccactgctctccagcctgggcgatagagcaacaccctgtcttaaaaaaaaaaaaawtttttttttctatcaccatttttctgtttctttcaccatagattagcttttgtctttcttgaacttcatgtcagtggaattatatagtatgtagtcttttatgtctggcttctgttattcaacgtaatgtttccaagatttatctatatgtgtgttaatcgtttattct

SEQ ID NO: 746228 - DNA, 570 bp, Homo sapiens
ccatctcaaaaaatatatataaataaattattatgggtacataatcaatgtggatattcacagggtacatgtgatgttttgatgcaggcatacaatgcgtaataatcgcatcagggtaattggggtatctgtcaccctaagcatttatcttttttttaaaccaattgtattctttgtgactgtaaaatatataaraaattattgtgaattttggtcaccctgttgtgctatcaaatactagatcttactcatcccttctaactatatttttgtacccattaaccatccccactccctccctccctgctgttggccttcccaccttctggtaaccaccattcttctctctgtcttcatgggttcagttgttttaattgttagctcccacatgagtgagaacgtgtgaaatgtgtctttctgtgcctggcttatttcacttaacataatgtcctccagttctatccatgttgcaaatgacaggatttcattctttcttataacggaataatattgtattgtgtatatgtaccacattttctttatcgttcacctggtgatggacacttaggt

SEQ ID NO: 746229 - DNA, 629 bp, Homo sapiens
cagaaacgctggccgacaaagcacggatccactgacagcctcactccacactcaggaaacaaactcctgtcctaggaggatttcatctggagtgcagcgtgctggtgacacgtgggaacaggcagcggcaaaggttgggtagccatgacatgccgagtcacactggaaaccacctccttcccragcagcagggtcctcagttacagcttcgctgtgccttcaaagcctgcttctccagggcacctcactccgctcactggtcctcattcaatattcccatgtgtttgtttgtgaggaagtccagaaaaggaatgttgcaaatggcctggtgaatattactcactgtaatttctttgggaatcctggtccaaaaaacaaagggtgttaccaggtgaaattctctcacgtatatctcatcatttattcacttaactcatcacagggaccatcccaggcagaggccccgtggagagggctcctgagccacagacatagcttagggccactctggggtgaggactgccttcctgtcataggcatgagaaggatgtcaacaagttggttgaataattaggaaaaaagattctgagaactgagaaaagagaaagaaaacaaagcggatggcagaa

SEQ ID NO: 746230 - DNA, 631 bp, Homo sapiens
ggaagaataattagagatgcagtgttgctggttttgaagatgaaggaaggggtacatggaccaaggaatgtatatgacctctagcagctggaaaagcatggaagtgaatctcattcctccagaaagaaaggcagctgtattgacaattagaacttagccaactgagacctacattggacttctaaatgaactcatcgaattttaaactaattgatgtgattttaaaggcatggaatttgtagtacttttacaacagcaatagaaaastaattcaatcctcaaagtaaagttctgtgtcctttgcttctttctatgatattaactcatctagtgcctatcatgttccaccaatgttacttttagtcaatttttactgtaaattctgcaatagtggttcttaaaacacctattttgtcatgcaaaaaaactctgttagactctaggaacatcaccatcaattaaacacaaagcctgctgtcaataggggtcaataagtgaaaataataagagtgaaacctgcaacatctcacatcttaatgttaaaaaataaacatagcaaagcctagaaagatgtttaattagacttctggtatattatagcagaaactgcatatgtccaggacaacttatc

SEQ ID NO: 746231 - DNA, 631 bp, Homo sapiens
ggaagaataattagagatgcagtgttgctggttttgaagatgaaggaaggggtacatggaccaaggaatgtatatgacctctagcagctggaaaagcatggaagtgaatctcattcctccagaaagaaaggcagctgtattgacaattagaacttagccaactgagacctacattggacttctaaatgaactcatcgaattttaaactaattgatgtgattttaaaggcatggaatttgtagtacttttacaacagcaatagaaaactaattcaatcctcaaagtaaagttctgtgtcctttgcttctttctatgatattaaytcatctagtgcctatcatgttccaccaatgttacttttagtcaatttttactgtaaattctgcaatagtggttcttaaaacacctattttgtcatgcaaaaaaactctgttagactctaggaacatcaccatcaattaaacacaaagcctgctgtcaataggggtcaataagtgaaaataataagagtgaaacctgcaacatctcacatcttaatgttaaaaaataaacatagcaaagcctagaaagatgtttaattagacttctggtatattatagcagaaactgcatatgtccaggacaacttatc

SEQ ID NO: 746232 - DNA, 631 bp, Homo sapiens
ggaagaataattagagatgcagtgttgctggttttgaagatgaaggaaggggtacatggaccaaggaatgtatatgacctctagcagctggaaaagcatggaagtgaatctcattcctccagaaagaaaggcagctgtattgacaattagaacttagccaactgagacctacattggacttctaaatgaactcatcgaattttaaactaattgatgtgattttaaaggcatggaatttgtagtacttttacaacagcaatagaaaactaattcaatcctcaaagtaaagttctgtgtcctttgcttctttctatgatattaactcatctagtgcctatcatgttccaccaatgttacttttagtcaattyttactgtaaattctgcaatagtggttcttaaaacacctattttgtcatgcaaaaaaactctgttagactctaggaacatcaccatcaattaaacacaaagcctgctgtcaataggggtcaataagtgaaaataataagagtgaaacctgcaacatctcacatcttaatgttaaaaaataaacatagcaaagcctagaaagatgtttaattagacttctggtatattatagcagaaactgcatatgtccaggacaacttatc

SEQ ID NO: 746233 - DNA, 663 bp, Homo sapiens
cactaacagatctaggttatttatttttgcagcacattggtgaaaatttggccaatacaatattatctcttttaaaaatgtttatcaataacttttatgatcagactaggtgccgtggctcaaacctgcaatcccagtattttgggaggggaaagcaggaggattgctacaagccaggagttcagaccagcctgggcaacaaagtgagaccttatctctacaaaaactatacaaattagccccacatcatggcacccacctgtagtcccagctattcaggaggcttgaggtgggaggattgcttgaccccgggaggtaaaggttgcagtgagctgtgatcacaccactgcactccagcctcggtgatggagtaagaccctgtctctctctctctctctctcagtatatctctctctctctctgagggtgtgtgtgtatatatatatatatatatatatatatatatatatacatatatgcgtgtgtgtgtgtgtgtgtgtgtaactttgtcttttttctttatatayatataaagaaaatatatatattataaattttacatatataaagaaaaaagacaaaatagtctgccatagggtttttaaagcattattttattattggtggggatggagagttgacagattaatacttattcatttt

SEQ ID NO: 746234 - DNA, 617 bp, Homo sapiens
tttacataagataaagtaagcatgtgaatagagggagtggagtagaggaaaactcaatgattcattcatctcaggataggcagagggatgatttctggtcctgaccttgtcccagaactatgaaaataagctggtaattgagattgtcagggtgaaattgagccgactcacttttagggatagtttacaggtgggatgtgcattctgaaagatttaggggttcacagcaaattgtgagggaggacatctgaggagacatgyggccttctgtcactgtgggaacctggcttatggatgaggctatgacacagggttgtgaagttatagctatgtgtttgagaacaaggaaggcagtattgcataactcagttcccaagcttaattttccctttgacacagtgagcttggggttggggtctctattctcttttctctcacaaaatcatatgggaacattccagaaaatgtgaggttctgtgctcactattaaataaaaatgaccaggagagccatgggtaagctccctcctcagtcatcaggaccccaacagagagttttcccctgtgtgaacagggtcctgaattctgcaggatcccatggggacacaagtgtcagga

SEQ ID NO: 746235 - DNA, 606 bp, Homo sapiens
aatttcacatttcgtttcacaaattgtactggtgcttaaaaggtatttttgcattaaaaaacatctaactgaaggaaaagttacaaatgagtgatcattcataaatacaatataatcctagggaccgctgtttttccattttgaacaccctccacaattagtcttaataattatgttgactgaatgcaaaataatgatttctcaagaggcaatagaaaatagagaataagtccattcttgagaaaatttataattagtgaaagtaattttttcatcctcttttcttatttaaatctcaagtactctctgccactctgtgctcttctttctggggtaaaatatgccagctatccacmgtcagggcattctctaaccactcctccttagagatgtctacagacttttactcagctagactgtcttgttgcctgtcttcatatcaacttcgcaagacgtgtggaccattctcttaggcccctgcatggcagtgcataatatattccatgctaattatctaatgaggttcactaaattaatcttttattataccacataaaatactcttagatctaacagtacaaacatttccaattatgggccgggcgc

SEQ ID NO: 746236 - DNA, 581 bp, Homo sapiens
ttcagtattactaagtattcagtcatggtggatatttgaagaataatttctctctttgggattattcctctaacactatgagcaagtatcactgtgttctttctctaaaggaaaatataaagcatagacaaattaaatgctgctcagattctaaaactatgaaaatataacaatggagaaacaaatagcaagtctgtagctactcagtgactttagcattgagtggatcctaaaatgcctattttgcacagaatgaaaaagatacrgcaggttcctttggaagatcaaagtgagaaaattgactacagctttaacagccttaaaataaatttttggcagaatggaaaagtatgcataattgagaaaagtacactaatctgtagaataaaatagatataaaaacaggctaaaccgtaatgctgctgcctgttcttttcacaacaatcttccacctgtccctgactgctgtgtttagggaatcaaagtttagagctgaaaaaaataggaggttggagagtttaggaggaaggcagtgtagggctgtgtaaattgcagagaagtcggagccagaagacttgagt

SEQ ID NO: 746237 - DNA, 631 bp, Homo sapiens
cttccttttgtaaaccaataagtgaatgaggcagatctcaagtgatttagagattttgctttgcaaggtggaggatacacctgggaaaaaggatcacaagtcacaagtaggtgatgtcctgtgctttttctaaagagggttttgggaacttcaatatttaaaggagaaagaggaagcaggcaggaaaytaaaacaggggaggaaaagaaggagagagggaaggcaagaaagctaatggctacattcttgtgaggctctgattagtgctcagtgaatctatatgttacatgtggcaaaaacaggaggaaggagtcagttgtgcattcatcttctctctcaggaaatctacattttacataagttaaagtaagcatatgaaattacagctgtttgggaacaaaaggatggcagtttttgcatgactcaagttccaagcttaattttcctttgtcatagtgagtttggggtcctgagattttattttcctttcacactttctaccaatataaagcttcctcatagatgccttcttttttcaaacattaacaaccctcgtgggttttctctcattttaagtacagaaaacataatactgtacaataattttatctgtcttaaatacaagactgct

SEQ ID NO: 746238 - DNA, 631 bp, Homo sapiens
cttccttttgtaaaccaataagtgaatgaggcagatctcaagtgatttagagattttgctttgcaaggtggaggatacacctgggaaaaaggatcacaagtcacaagtaggtgatgtcctgtgctttttctaaagagggttttgggaacttcaatatttaaaggagaaagaggaagcaggcaggaaactaaaacaggggaggaaaagaaggagagagggaaggcaagaaagctaatggctacattcttgtgaggctctgattagygctcagtgaatctatatgttacatgtggcaaaaacaggaggaaggagtcagttgtgcattcatcttctctctcaggaaatctacattttacataagttaaagtaagcatatgaaattacagctgtttgggaacaaaaggatggcagtttttgcatgactcaagttccaagcttaattttcctttgtcatagtgagtttggggtcctgagattttattttcctttcacactttctaccaatataaagcttcctcatagatgccttcttttttcaaacattaacaaccctcgtgggttttctctcattttaagtacagaaaacataatactgtacaataattttatctgtcttaaatacaagactgct

SEQ ID NO: 746239 - DNA, 631 bp, Homo sapiens
cttccttttgtaaaccaataagtgaatgaggcagatctcaagtgatttagagattttgctttgcaaggtggaggatacacctgggaaaaaggatcacaagtcacaagtaggtgatgtcctgtgctttttctaaagagggttttgggaacttcaatatttaaaggagaaagaggaagcaggcaggaaactaaaacaggggaggaaaagaaggagagagggaaggcaagaaagctaatggctacattcttgtgaggctctgattagtgctcagtgaatctatatgttacatgtggcaaaaacaggaggaaggagtcagttgtgcattcatcytctctctcaggaaatctacattttacataagttaaagtaagcatatgaaattacagctgtttgggaacaaaaggatggcagtttttgcatgactcaagttccaagcttaattttcctttgtcatagtgagtttggggtcctgagattttattttcctttcacactttctaccaatataaagcttcctcatagatgccttcttttttcaaacattaacaaccctcgtgggttttctctcattttaagtacagaaaacataatactgtacaataattttatctgtcttaaatacaagactgct

SEQ ID NO: 746240 - DNA, 584 bp, Homo sapiens
aaggggtcagcaagctatagcttcatgggtggactgcctgtttatgtgaacaaatttttactgagacacattcatgctcatttgtttatgtattatcaatgggtgctatagaattacaaaagcagaattaagtagttgtaacagagcctaatggcacacaagcctaaaatatttagcttttaaggaaagcatgtccggttctggtggctcatgcctgtaatcccagcattttgggaggccgagatgggcggatcacgaggtcaggaaattragaccatcctgcgcaacatgatgaaaccccgtatctactaaaaatacaaacattagctgggtgtggtggcatgtgcctctaatcccagctactcgggaggctgaggcaggacaatcgcttgaaccctggaggcagaggttgcagtgagctgagatggcactactgcactgcagcctggtacaaagctagactctgtctcaaaaaaaaaaaaaaaaagagagagaagaaaacaacattattaacctctaatttaaacaagaataataacaatttataatgagtttacaacatatataaaaataaattacatgac

SEQ ID NO: 746241 - DNA, 584 bp, Homo sapiens
aaggggtcagcaagctatagcttcatgggtggactgcctgtttatgtgaacaaatttttactgagacacattcatgctcatttgtttatgtattatcaatgggtgctatagaattacaaaagcagaattaagtagttgtaacagagcctaatggcacacaagcctaaaatatttagcttttaaggaaagcatgtccggttctggtggctcatgcctgtaatcccagcattttgggaggccgagatgggcggatcacgaggtcaggaaattgagaccatcctgsgcaacatgatgaaaccccgtatctactaaaaatacaaacattagctgggtgtggtggcatgtgcctctaatcccagctactcgggaggctgaggcaggacaatcgcttgaaccctggaggcagaggttgcagtgagctgagatggcactactgcactgcagcctggtacaaagctagactctgtctcaaaaaaaaaaaaaaaaagagagagaagaaaacaacattattaacctctaatttaaacaagaataataacaatttataatgagtttacaacatatataaaaataaattacatgac

SEQ ID NO: 746242 - DNA, 584 bp, Homo sapiens
aaggggtcagcaagctatagcttcatgggtggactgcctgtttatgtgaacaaatttttactgagacacattcatgctcatttgtttatgtattatcaatgggtgctatagaattacaaaagcagaattaagtagttgtaacagagcctaatggcacacaagcctaaaatatttagcttttaaggaaagcatgtccggttctggtggctcatgcctgtaatcccagcattttgggaggccgagatgggcggatcacgaggtcaggaaattgagaccatcctgcgcaacatgatgaaaccccgtatctactaaaaatacaaacattagctgggtgtggtggcatgtgcctstaatcccagctactcgggaggctgaggcaggacaatcgcttgaaccctggaggcagaggttgcagtgagctgagatggcactactgcactgcagcctggtacaaagctagactctgtctcaaaaaaaaaaaaaaaaagagagagaagaaaacaacattattaacctctaatttaaacaagaataataacaatttataatgagtttacaacatatataaaaataaattacatgac

SEQ ID NO: 746243 - DNA, 584 bp, Homo sapiens
aaggggtcagcaagctatagcttcatgggtggactgcctgtttatgtgaacaaatttttactgagacacattcatgctcatttgtttatgtattatcaatgggtgctatagaattacaaaagcagaattaagtagttgtaacagagcctaatggcacacaagcctaaaatatttagcttttaaggaaagcatgtccggttctggtggctcatgcctgtaatcccagcattttgggaggccgagatgggcggatcacgaggtcaggaaattgagaccatcctgcgcaacatgatgaaaccccgtatctactaaaaatacaaacattagctgggtgtggtggcatgtgcctctaatcccagctactcgggaggctgaggcaggacaatcgcttgaacccwggaggcagaggttgcagtgagctgagatggcactactgcactgcagcctggtacaaagctagactctgtctcaaaaaaaaaaaaaaaaagagagagaagaaaacaacattattaacctctaatttaaacaagaataataacaatttataatgagtttacaacatatataaaaataaattacatgac

SEQ ID NO: 746244 - DNA, 640 bp, Homo sapiens
tatttaaactgaattatattgtacatatccttttgtgacttaatcataccactgcatattatgtttgtgagagtaagccacattaacatatctaaataaagttatctatttttttctaaagtgtagtattccactgtatgaatctaccacattctactgttgtttaacctttgcattgcttatagtacttaactgagcctgtaaatattttggatcacatttcttaatggccraccatgtacatacaaaataaggagtgaaagccaattgctgattagaatatatggtcatcttcaatattactgggtaatacaagcctctttttaaaacggatataatttccatttccaagaaagcatatgaaattattattgctctatatgtttgccagaagtctgtcttgtcagactgtttttggtcaatctgttgtataagtaataatgtacatataaaacattttcatttgcatttttgtgttaaaaatatgttaaagtgattctaaatatgtatggtggacacatattttacattttataaagcacatgtgcaagccattttctttgttttactgtcgggttttctgtaatttttgcctggctttacatttaaatattgatcgccaaggaattgattgttacat

SEQ ID NO: 746245 - DNA, 558 bp, Homo sapiens
atttataaataaagtattactggaacactgtcatgctcattcattgacatactgtcaatttatgccacaacaatagaattgattagttgcaacaaaccatatagcccaaaaacctaaaatatttaccatctgatcctttccaaaaaacaaaaaaaattcttgacayctgatgtataattatttcctattttgattcctgagattgcatacttgtttcttctcttaattttatcaagccatttctccagagttttgttattgtatggctcctacaacaactaacaaattttggccatatttcttgacttttctttccctgtattcttaatcactatgcatgtattttttatttccttttatttctgttgatatttctaacttcttccaataaattcaaaacattttaaatattaatttgttgtcctcataaaataagaatttaaggttctacactttcctctaaaatgacacattttataatgtagtatacattttttaattaaaaatattttataatttccattatgatttgctcttgggtgttgagttactaagaag

SEQ ID NO: 746246 - DNA, 556 bp, Homo sapiens
gtatatatttacatatccatgcaaaaagggaatagattaaaagatgtttatgaatgtctaaaatcttaagtcagtttaaagtagtattataaatcaggtttgtgggtgatattttgtctgcttctagacttgtgagcaagttattaagttttaggttacttatatttaaaattcaaaaaggaaatgattgtgattgcattcaaagaaagagaggacattttgaagcttcttttttttactaatatcaaaacataatatcacatttgtaaaacrcgttgatggcttacaaccaagtaaaatacctcaataccccacttttgaagatcagtaatattggcctaagagtatcactctataggaattataaaaagttgtatttatgccctgagattataccctataatgtgcaaacattataggatagacaagtggatataaggtttctttctaggtttccttatatactccaaatggtaaaactagatggaagattaaaattctaaatgttgttaattttagaaccttcaatgtcagagttactttgtatgaatgagtt

SEQ ID NO: 746247 - DNA, 556 bp, Homo sapiens
gtatatatttacatatccatgcaaaaagggaatagattaaaagatgtttatgaatgtctaaaatcttaagtcagtttaaagtagtattataaatcaggtttgtgggtgatattttgtctgcttctagacttgtgagcaagttattaagttttaggttacttatatttaaaattcaaaaaggaaatgattgtgattgcattcaaagaaagagaggacattttgaagcttcttttttttactaatatcaaaacataatatcacatttgtaaaacgcgttgatggcttacaaccaagtaaaatacctcaataccccacttttsaagatcagtaatattggcctaagagtatcactctataggaattataaaaagttgtatttatgccctgagattataccctataatgtgcaaacattataggatagacaagtggatataaggtttctttctaggtttccttatatactccaaatggtaaaactagatggaagattaaaattctaaatgttgttaattttagaaccttcaatgtcagagttactttgtatgaatgagtt

SEQ ID NO: 746248 - DNA, 556 bp, Homo sapiens
gtatatatttacatatccatgcaaaaagggaatagattaaaagatgtttatgaatgtctaaaatcttaagtcagtttaaagtagtattataaatcaggtttgtgggtgatattttgtctgcttctagacttgtgagcaagttattaagttttaggttacttatatttaaaattcaaaaaggaaatgattgtgattgcattcaaagaaagagaggacattttgaagcttcttttttttactaatatcaaaacataatatcacatttgtaaaacgcgttgatggcttacaaccaagtaaaatacctcaataccccacttttgaagatcagtaatattggcctaagagtatcactctataggaattataaaaagttgtatttatgccctgagattataccctataatgtgcaaayattataggatagacaagtggatataaggtttctttctaggtttccttatatactccaaatggtaaaactagatggaagattaaaattctaaatgttgttaattttagaaccttcaatgtcagagttactttgtatgaatgagtt

SEQ ID NO: 746249 - DNA, 605 bp, Homo sapiens
tgaaatcagtgttaaaatatttcttttgacacagtcagctaacatctttctatttttgctgagtaactattaattatattttaagttcaactaactcttgacacagcaatggaatttgaagtgaatatactactttgaaaaataaatggtgtatttagagtgttgacatttaraaaatggtagttttgtgaaatttgcaatgtgttttagaattataaatgctaaagtaaatgaatgcatgattatatttaatagaataaaaacagaagaattttttaagtcttgacgacccaagcagggttctgttttaagtattcccctttcaatcaacgttacagctatcctaacttaaaactgcttcaactaataatgtgtatttatattaaaaatgtaatccatggctatgaaccctggcttcctagtagaatcacatggcaagattttaagtaatactcatttcttggctctactaaagtccaattaaaacagaacttcagtttttagaaagaggtgtgggtaagtttgaaatgttccacattattctaagatgtgggtgagattaagaaccagtaagcacaccagtcagaatggctagtattaaaaag

SEQ ID NO: 746250 - DNA, 480 bp, Homo sapiens
agtagccattaaattccttgtgcccttaaaacctaaaagttcacagggagaagacctcttactgacttgtagaatctcaatactacttatcttgaaatttcagtaagtgttaggtaaaagagttcatttgggataatcacactatgatagtctttagcttttgaattggaatccaaattttagtttagaacagcaaagtttgcgcctaaagatttcatgaagtaaaaatactaattgtgattatatatctaaatatttgcacatctaaagttgtcttttacycgtaaccagaataaatgataccttttttttaaaaaaaaaaaaaaaagaagagtaatctatctagaaaatgaaaaaattaggctaaaattgtgacaagtaatttaaatggatatagatttataaaattaaactatttctcaattttgagaggaaaaaatcaaggaaatcaaatataccttctctttcttttgtcaacag

SEQ ID NO: 746251 - DNA, 613 bp, Homo sapiens
aaaagtagcccataattaaaaggaatttcatattggaataactggacctaatttgcttattcattaaattgtgtccaagtgtagtctctgaattatatcaattagggaacgagaaggcatacttaaaaagagctgaattaacagtgcaaataaagtaaccactgtggatacttttgaaaattctagtgttaattttgttagtcaatgcaatggaaatacatcagtagcatagtaataaaaaatatttctttttatagcatctttgataattataaaattaataaagatttattatttaaaaaamagaataattcctacatcattaaaatcacaagtaactccactgtctaattacaacaactattgcggtttttatgtattttcttatcattttatttatttataattgataggtgagtattaaaatatagcctgacattattttatgattaataatttatttaaaatatattatatgattaagtgtctatttaaaattaagcctgttaaaaataaaactattgatctttcctatcctctaatcccaaatttgctccttccaaatttaaacccaggtgagtaattccaactctgttcctcccatagttcaggc

SEQ ID NO: 746252 - DNA, 621 bp, Homo sapiens
gtggtattaattactgtttttctcccaacactggaacaacagctctgtgaagccaagacattctgaatgttattttcactattttttccccagtccctacaaatgggcctagaatatacatagtagatgctcaataatttgttggggaacaaatgaaagttgatcctcaataatattttataatgaataggcttacaatttatgaaaaagccataacttatttagccatctccctaaatttgcatgcttttgtaagtaatatcatggttgtgaaaacaattatgtgtgtttatacrtatatgtatataggtattttatggcaatgatatacatacatgtatagtcttctgtaatatttacaggtgcttttgttttgcttgcattatgcagcatatatgattttatagctagtattctggatgtccatgaaacgtcaattaaaaagaaactaatattattaaatagcagacctgttaaagtggtagtcaaaatattctttccccatcatatacctcagagatttctgatgaacccttttgaaatctaatagtggctgtaatcataataaattttttctaggtagttttacaaacactttttaatcttcaaaattcaaggcta

SEQ ID NO: 746253 - DNA, 590 bp, Homo sapiens
atcataataaattttttctaggtagttttacaaacactttttaatcttcaaaattcaaggctaatgtatgcatgttgaatgattatggcattcatatataagctatgtttggaaccagaacttaccagtgcttatatttmtgtgtaggtatgatagacaaagcataggaataacaagatatcattagtttattattcattaaaaatatgagtagaactggttttgctctgtagtttttgctatgataaaccttagccatgaaaataacctgctattgagcatgtgtgtcatccatcttatgactcaccaaaaatggggaaatgagtctagaaccatcaaagcagttgacaacagaagtgagatttcagcttggatgcattttattataaaagtagtataattatattcaagaatttgttaaccttttatctcactaaataaatttcaatattcattataaataacaaattcaagcatttaaatattatttatatattcttaatttttgttgtttgttttaattacacatgtcaatcctgttatggaatgacatcaacatccccttgtcaagaggatatttttaaatttcc

SEQ ID NO: 746254 - DNA, 585 bp, Homo sapiens
tcatcttggtggtgagatgaagaactccaggtgatacctcacaagagagactgctacatgtggtgcattggcaagactgcaactttaagaagtgtgacttttattgttgctgaattattttatctcctacccaattgaaaataaaggatataaagtgcttaggttgaacacaaagtcctctgctctaggtaacatcttcagcagccacattagcagaggcatgggtggtaatggtggagtaratgtctctttgcttctgacagggtgtctgcttatgtgttaaacaaaatagtatggtatatatttcattaagaaatctgataaagaatgaagtaaaacaggttcgtgttcttaagaggcacaggatttgctacggcagcatgaccaaaaggcttaagtaacaaaaatgtgcatagtagttacaaacattttcatctaaacaaaacaatgtgagcatctgtatatgacaataactcatgcaaaaaatattttttaactgagattgcaatcattttatacataacaaatattatcactgtattctcaggtaatatatggtttttatatagatgttataaataataa

SEQ ID NO: 746255 - DNA, 618 bp, Homo sapiens
gggtaagagacagtcctgatagtacgcatcatgtctgtggactggagccacaacagccatgctgggaccgtgatcagaactagcaaaggaccaagctgaccctctgatactggcagaatggaaaaacgaacagaacctggagccacggagttaaccagcctggaggtgcccaaccatgacgtttttgttatgagagacaatatattttttctgtttttttgagccaatagaggcaggactttctagaacttgcaatcagaagttacctaagaataatacctgytaaggtgcatacgaggtaaaaagttcactagagcaggaacataaggtcagatccccacctgcccaacccaaacttgacctcactttatattgttttaggtcccacctctgaaaccgggagtgtaggaagtctttctcaaggttcagaggatgtattcacttcaggggaaagaacaaagacagtatctggaacaaggaatgaagggagaccctctcttccatgaccaaccacagatatttgcagcatccttataatgtcttcctgggcagccaacaggccctaccactggtgctaacccaggtggagaaattgtgaggtcagctcgctaagggaag

SEQ ID NO: 746256 - DNA, 618 bp, Homo sapiens
gggtaagagacagtcctgatagtacgcatcatgtctgtggactggagccacaacagccatgctgggaccgtgatcagaactagcaaaggaccaagctgaccctctgatactggcagaatggaaaaacgaacagaacctggagccacggagttaaccagcctggaggtgcccaaccatgacgtttttgttatgagagacaatatattttttctgtttttttgagccaatagaggcaggactttctagaacttgcaatcagaagttacctaagaataatacctgctaaggtgcatacgaggtaaaaagttcactagagcaggaacataaggtcagatccccacctgcccaacccaaacttgacctcactttatattgttttaggtcccacctctgaaaccgggagtgtaggaagtctttctcaaggttcagaggatgtattcacttcaggggaaagaacaaagacagtatytggaacaaggaatgaagggagaccctctcttccatgaccaaccacagatatttgcagcatccttataatgtcttcctgggcagccaacaggccctaccactggtgctaacccaggtggagaaattgtgaggtcagctcgctaagggaag

SEQ ID NO: 746257 - DNA, 646 bp, Homo sapiens
gtcaggagtttgagaccagcctgggtaacatagtgaaaacacgtctctactaaaaatacaaaaaaattagccgggcgtggtggcgggcgcctataatcccagctactcaaggggctgaggcaggagatagcttgaacccaggcggcggaggttacagtgagccgagatggcgccactgcactctagcctgagctacagtgcaagactccgtctcaaaaaaaaaaaaaaagaaagaaagraaaagaaaaaatagaaagaaggaaggaagagaaagtaagaaagaaagaaggatagaaagaaagaaagaaagaaaaagaaaggaggaaagaagaaagaaagaaagaaaagaaagaaagagaaaaagaaagaaagaaagagaaagaaagaaagaaaagaaagaaaaggaaaggaaggaaggaagggaggaaaggaaggaaggaagaaaggtttgacatggctgggaaagtggtgtgcttcatgggctgggaggaagatgggaatagaggtcaagagaggtgtaggtgggagatgctggtgacataatagtgtgaggagtgaaatgcaccttgttggacctaagcaaaaatgccatgtttcccatgttttctatgtcacccaaaaacatctctttattcttaatttttcc

SEQ ID NO: 746258 - DNA, 608 bp, Homo sapiens
attaagaacagattctgagagctgaatggggcattgtttcctggccagatcggtagccgctgcctgcttttagtgagcgagcagtccaagattggcagcccgacgcaggccgcgctgtggcttgctttgattacttgattccatccagctccaatcaggaactgatcacacacgttcagattttcatttgctttccccccgactcattctccatagttgcaggttaaargggtgggttttgggggatggcagccctgccatgatttttaaagacactgtattcagaagtctggacgagagggttgggggtgctggcctgtgatccccctggtcagaccttcaccgcaaagcagaggcctggaatctaagtgtcttctgctgatatgttcttttgcttgtaaccagtaaaggttctagaaacttccctcaaattgtgaacaatgagaaactcccattcttttcccagaacatgaaaatcccctgagattttgctcctctcacatttttaccagataagtctaaatatagagccaccccatctccttttaaaaggaacatttaggaaaacgttctactggtgactcagaaactctgactccaagtcttta

SEQ ID NO: 746259 - DNA, 603 bp, Homo sapiens
tatggatatctgttacttctcactctgtttttacccattagatgtgagttcccagaagccagggatcaggcttacccatctctgtgtcctaagtacctacctcagtgtgttgcacatagtaggcttatgctaaacgttgaatgaataaaaaaaaataaataacaattatgatccatgacaaaaatgtttaaaaaagtaaacatttccttaagggaataactggtgacatactcaccatggtgctttttaagaaaattacctgcacattattttgcaatctcattttataaagaagatagtgtgttataacaacagcagtaacaaatatttattgagcacttactataattrcacttaatcctctcaaaagacagttgatgaggaaagtcacttgtctccagtatctaaaaatggcagagccagaatttgaactccggtctttctgacagatccaggaccctatgcttttaaccgggaaccctctccaggatggcattttaaggacttcattgggaagcgtgatgaaagctctgtagcagctaaaccactgggcctcaatagcactctagagaagcctatggtagaggcgggtggttttgagat

SEQ ID NO: 746260 - DNA, 625 bp, Homo sapiens
gcacagcaacttcctgtctaaccttggaccggcaccacccttgttatggatccttatagctaacaataattatcacaaaacaattttataatcttcttcatttttcctttaaaaatatttgtcttcctttacctacctgagctgagcatgcatgtagtttgckatggtatgtatattgctgttacaatgcccatttttgaataaatatccttttctttcagagagcctctctctgttttctaatgtgacaaactcaattcttaagctaaagcttaaggaagtattttacagcttcctcaaacagtcatcggttctgttaaatattctgacttccaggtccagtgcagacatgctgaaggggtgttagattctactatacctaagaataagacacttgttgaaaatgcaatttttgggaccttatattcaaacaccgcttgtccacagattttggtgagttggtttagacagagaagtaatgtagcagtgatggggcaggtggcttaaaagagaggcactccctgggccctctgcagaggttaggaattgaacaagaaaacaggcttgggaaggcattaaagggcatttaagcaggagaataaggtagatttgtatgtaagcattt

SEQ ID NO: 746261 - DNA, 567 bp, Homo sapiens
gtaaccgtcctgctcactatctctgtgggttcgattgttttgatttataggtcccataaataagtgagaacatgcgatgtttgtctttctgtgcctggcttatatcatgtaacaaaacgacctttagtttcatctgtgttattgcaaaagcctgagtcttgttctttttttaatggctgaatagaactcattgtgtataagtaccacattttcttttttcattcatytgttgatggatatttaggttgcttctaaatcttggctattttgaacagggctgccataaacatgggagtgcagctatctcttcaatatattgatttcttttctttttggtatatattctgcaaggatcatataattagctctctttttagatttttgaggaacctccacactcttctccttagtggttgtactaatttacattcccaccaacaatgtaggagagttcccttttctctagatcctcaccagcatttattattgcttatcttttgagaaaaggcattttgactagggtgaggtgatatctcattgtagctttgatttgcatttctctgatga

SEQ ID NO: 746262 - DNA, 630 bp, Homo sapiens
catatatatatatccctgtcatataaaatacacagtaataacccccaaatgaaaaaccatttttttcaagtctgttttacctataagctttgtcagtgagaattatttggtagtactaccaagaatacaaaaacattttaccagttgaattttctgaatgctgctgcttgaaatgtagaagtgattgttggagttccaggagtccacttggtatcgtgatgaaaagacgatgggaatcaccaaaaacytgacctgatatccttgagccactaactcatgccaatggccaaattctcattgcagtgaaaaaaaattaactcatgcatttaaataaaatatgccctttagcagtaaaccaaaccaaatcctgatatattttaattgagaatttcaattgcatttctctaattactaataaagttaattgaaatatgttaaatataaaacttaatagaaatcatatttaaaaaacctgtaaaaatgttgaaaccattgcctttaaaatcaataagaagtctcacaatctcttctatccaacattgtactggaagtccaaaatagtgcaattacacaagagaaagataaaacatttctgcctactgaaaagaaagaaaaaaattggttaaatta

SEQ ID NO: 746263 - DNA, 638 bp, Homo sapiens
aaactcagaagaaccactgcaggttaaggaatgaggagcaaatcttggaatgataactagagaaagggatctcttgtttttatgcataaattcacagaagtcacagcctaacttgagagacatgcatgagtaggactgatacaagccatgtagtaaaaatacagaaaaagaaactaagayttggatcaccgtacaaagaaggtaagacagaatttacattctgaaccttattgatatgattgaatgctaaaacaaatttgcctggaggatcaaaacagcacccagagtctggacaaccagcagtaaaaagtttaggacacaacccatacttactcaaagagcaaggaaaatgtgaacaacttatgttaaagtttatctcctgaagtgaggcaaaataatgaaagaagaaaggttgcataagatgttgcttatgacttcctgccaaatgataaaaaatctgcatagttgccttaattatcttgcatatctgatttttatgttggaaaacattattttattgtcactgcaaatatagatgtgacatcaataatctttccacagttttgccttttatagaatatcatataataagaattatatagtgtgtagccttccagactgatttctttcactctaag

SEQ ID NO: 746264 - DNA, 615 bp, Homo sapiens
atcccgggggatgtcagcaattttcagtcgtgatttatgcactgctctgcttcatccagtaacgccattcctcacccaaattcttcaacttcctgtaccagcctcacagctccttcctctggatctgattgccttgccaatttggcttaagtcacattttcttcacttacttatcaataaattcagtgtgttttcagactgttgtagctgaaatgcatgtgtgtgattggtgagtactcatgatcttcttaaatggaggaccctccagctggcctacaggaccttaacaggcagggccaagaagtgaaatgattaccgcatcctgcttgcctctgtatacacaatacccaccatcctccctgtgcttaggacagtttgaaaatgcctttgaaaattaaaactgcaatttagtgtgaaaaaatgagcataactctatttcyctttaccaatccacagtccttcttgcctgccaggatagaccaatgttgtgtccccagtttttagcacagagcccagatggcacatgttgggatctcagtacatgtttatccttgaatggatgagtttttttttttttttccccacagcctaatcgcttaactttacagaatgcta

SEQ ID NO: 746265 - DNA, 628 bp, Homo sapiens
cataaattgctccacagttggatccaattaaatgtggatctcttttcagggatggtttttgaggccagtctttggagtttgttcttcccccaggagtgctgttattaactgtctcttttccagattttctctgggaaactagctggttctggtgtagcttttctttctcaygaagctaccagcctcctcttaattgcttaccaccaagacctccgttgtttttgagagtatccttaggcttcaacttccccaccggctagtttttaaaaagtcagtctatttggggaaagcttcagagctctgttttatagcctgtctctcctctttggcaaaatctctgaacaatgactccagagctgacggcaggggcaatggtgtgcttctgagtgaccctctgctttagggatgggctgctgggcctggttgggggtgtgagcctctggtcttcttagtttgcctttttggtgtggacctctgacccatgagcaaattggggtgaaggagagtgggactcttatgttctcagcctgctgcaattaaggtagagcctctgccctgcctatgaagtgtggcctggtggagaaaaggagctcaggaactctcagccatgcttggaattcaggctctg

SEQ ID NO: 746266 - DNA, 615 bp, Homo sapiens
ttggaataaagctggtgattccagctgagtcatctgaaatagcataattatacctcaaaacaaaactattcctgggtattttgtcctttacacaaagaatgatatgctagaagacttaaataccaacagttcttattgcaaacactgcctcagatctatctgtggaayggtggtcatggtgaatgtgtctaccacccatgcctcttatctcccaaggttttaattccctttgtgggcctttggttatagttcccttattgtctgcttcctctctctgtccaagtgccttcctcccagccagtagggtttttaatgtcttccttaagctctgtggctaatgtttgtaaacatgtttccaaggaaagttcttttggaattcagagcaaaattacttttctataagaaatctgtttctttccaattaaaagtgttttattcacagaaaattgtgtctactgtgtcttgggacatttacatattgtaacacttttacattttattattttatgcgacatccactttttctccccaaagcaaaagatgatactgatctgaggaggaagaatggtagagcaacaagaatacttttagagaaagaaaataccacttttaaca

SEQ ID NO: 746267 - DNA, 565 bp, Homo sapiens
actgtatccaaactattccatctcagactttgtcttattcctaaaagtactctatggaagaaaatatttgaaaatgtaatgggaaataatccaatctaaaacacagcacccaaaatttaaccttatcaataaaaaagcaaatcagtattttggtactatgatactactaaatattccacaaataacacactcagaagaraaaaaataaaattctatattcctgattattgcaaggtttaaaaaatcacttaaatctaaatactggagggaaatgtagtttgcagaaaatcatggaagcacactcatgctacagacaaaattgccctgaaatttgcccagttcagagcctcaatgcatacttacatattctccttattaaaatgctggaaattaatttctcgcccaagaggaattcatagtcccatgtttaaagcacaaagattacaaggggagcatttagattatctagagatgccatcatgtgaatttagcctattattattgaacattcgtagtttatggacaaaaaatagtaaatcagttcagcaggataggctgcttaaga

SEQ ID NO: 746268 - DNA, 565 bp, Homo sapiens
actgtatccaaactattccatctcagactttgtcttattcctaaaagtactctatggaagaaaatatttgaaaatgtaatgggaaataatccaatctaaaacacagcacccaaaatttaaccttatcaataaaaaagcaaatcagtattttggtactatgatactactaaatattccacaaataacacactcagaagaaaaaaaataaaattctatattcctgattattgcaaggtttaaaaaatcacttaaatctaaatactggagggaaatgtagttkgcagaaaatcatggaagcacactcatgctacagacaaaattgccctgaaatttgcccagttcagagcctcaatgcatacttacatattctccttattaaaatgctggaaattaatttctcgcccaagaggaattcatagtcccatgtttaaagcacaaagattacaaggggagcatttagattatctagagatgccatcatgtgaatttagcctattattattgaacattcgtagtttatggacaaaaaatagtaaatcagttcagcaggataggctgcttaaga

SEQ ID NO: 746269 - DNA, 642 bp, Homo sapiens
gcccagacattgttgctcgtttctcttttctcagtggaatcactttgcttaccactgccaccatcgtgtcagcatccaaaagtggaaacacactcctcttcacttccccctggtaaagctaaaaaactgtttgcctcttcaaaaagattttgtgaacaaccgtgataaaacacaggtgaatcaaagaaaattcacagaacattaaaataggcctcattacaagccaggggtttcaattctgatcttagttagcttgtgtaagagcttgtaagtttcatcttttctcagaaaagcagcagccctctaggtctgggtcatagagttaaaaatgtatasaatccacactgggtatataaatgagagaagaaggtctggtgaaaaccataaggagtagtaatgagtatggtaaatagatgatttacctatttatctatctaaagacatcacacttgaaatttttttaaacactctacaataattgccaatggggtaaccaagaaaaatcttccctctcagttttgaggctataggttttcaattcactaaaatgagagttaagttaagaaacaacagaaaataaatacatagggaaagaaggtgttaagaaaaaagaatacagagggaaagaaggtgttagaaaga

SEQ ID NO: 746270 - DNA, 605 bp, Homo sapiens
taaataacattgaaaatttggctgaaaagtgcacttaaaaagcagttattgatggcacaataccaacctggaaaagtatagcatgtgtaagtccaagagatcacggtgaatgatgaattgcaaacatctctcttggcaattttaacaataacataatgtttaaaatatggagcaggaggatatagctatgaggaggaaaatcasctgagaaagggtacaggaaaggacttcatttaagtaatatgacctttctcaatttcattcaacccagaatttctctgctaaaatccagtaatacatcttgtaattgattggcatgcacattaggatgtaaacaaactttgccaatatctctgacaagagttctgaggactgttttgcaaatcaaatatatgtgaaatgttataaggaataaaaaacattatgtttgtactaataattgtaactataataataatgttggtattattcctactcagactagtatgaagtgttcacagcttcaagacccccggcatgaaaagcattggtaatcatgtcattatctgtctgatttatttgtttaagttccataggaatacatttttttccagaaacaaccctca

SEQ ID NO: 746271 - DNA, 675 bp, Homo sapiens
ttgctgggtcaaatggtagccctgttttaagttctttgaaaaatctctaaactgctttccatggtggctgaactaatttacattcccatcagcagtgtatgagttctctttttctctacagcctcactagcatctgcttttttaaaagagccattctgactggtgtaagataatatctaattatggttttgatttgcacttctctgataattagtgatgttgagcattttctcatatgtttcttggccacttgtatgttttcttttgagaagtgtctgttcatgtcctttggtcctttgtccaattttctttttctttttcttttctttttgtttttgagacggaggctcgctctgtcgcccaggctggagtgcagtggtgcgatctcggttcactgcaagctccgcctcctgggttcatgccattctcctgtctcagcctcccaagtagctgggactataggcgcctgccaccacgctcggctaatttttttgtatttttagtagagacggggtttcactgtgttagccagratggtctcgatctcctgacctcgtgatccgcccgcctcggccttccaaagtgccctttgcccaatttttatggggttgtttttttgctcatttagttgtttaagtttcttatagattctagtattagatctttgtctaatgc

SEQ ID NO: 746272 - DNA, 638 bp, Homo sapiens
gttgctttttgttggatgaataaataaatcaacaaatgtcaagtttgggcaaggatgtggagcagctggaacatttgtttacatactacaggtagaaatgttgttgtgacacaggaattccacccctagtaaataccatctagttaagtgcttcctatgcacatcaggagacaagtacaagaatagtcaaagttccactgttccactgtttgttatagcaaagmactggacacaaccaaaatgtccatcaacaatagaatagatatgtggaaacacatttccacttatttatatcatatagcaaggaaaatgagttaatcataactatagccaagccatgtgggtgaatttcaagaactaaattttgagcaatatatgcagcattatttcacttacgtaaatttgaaaaacaaaaaaccaaataatacatttttctgtgatactaagatatgcaataaaagtatagtgaaaagcaaggtaatcagggacacaaaatttaggacagtaattactgcagcggtggacacgatgggatggaatcccagaggagtaaagagcaattctgaaatataaaggtcatgttatttctctttgactgtatgaggagcatatagatatttgttgtatgtttttatatt

SEQ ID NO: 746273 - DNA, 619 bp, Homo sapiens
gaagggtgctatcttattcagatgaacctgtatttgaacaatgcttatgatgttgaaagcacatgcatcatgctaatttcatttgatcatctatcctatttttgaagtccttattggaaaagagattttatcatcttgcaatgaaaacatttccaaagctgaataatcctggatgcttcctgatatactctaatgcagattaagtctgtttctctataaagaatacacagacataatttttatgtaaatgattcataattatagttaaacatattttgaatgcttgaaaaatagattttcctttaatttccctctttatttccacagttctttccaaagttcttatcttgaaccataattatttaatggaggtcctaatttcttaggatgttttcctcccctaactagaaatcacgtatctgccttgtgtctgagccttgcagtggactttaggaaagtgctttaatgatttaacagaataatycgtaaaagtaagtcattcgttatcttctctaatcaccccatgttctgtatttcaaaggatacaaaggctccaagtataaaaagagcattaaagatatgattctggaacgtgaacagtgccaggcccatgtaacag

SEQ ID NO: 746274 - DNA, 618 bp, Homo sapiens
ataactacatacacagagaaattaggaggtgactttgcaagcccaaggaaaggcatggacttagaaaagacctgaggagaccttatgtttctatctcaggctgattcccagaacagagacagtctacaacaacaaaatyaacaagaataaacaaacaaacaaacaaaaacccaaatccagaaaaccctgggaaaggggaaatttgctttccagagttaccataatattagactcaaatgtcaagtttttaacaaaaaatcacaaggtatacagagaaacaggatagtatggccattcaaagtaaaaaaaataacagaaactatccctgaaaaagacgtgatggcagatatactagacaaagacttttaagcggacttcaaaacaactgtcttaaagatgcttgaagaactaaaaagaatatgttgagaaagttaaaaaaaaagatatatgaacaaaaaggaaataccaataaagagagagacatgaatataaacacccaagaagcttcatgaactccaagtagatgaactcaaagagatgcggactgaaacactttcaaagtttttaaagaatgttgaaagtaccaagagagaagggactcacacatataagggatcc

SEQ ID NO: 746275 - DNA, 637 bp, Homo sapiens
atttgcctctgtgacttgcaaacaccctaagtatttttatccatgtgtttattcattcaacaatatcttttaacatctaccaagtgccagaaattagaccaggagttggtggtaccattgtgaataaaacatgatccctgctctaaaattagaattccaaagtagagaaagatataaataaatcaggaagtatgaaaataatgtgattaatgctatgacagaggaagtgcatagtgctatgagagttgatcagagagtcagctaacctgttctcacacagtaagaaagtgaaccctgaaatgtgagagagaagaggccatgaatccagtgacaggtggggtaagtgtcctgggcaggaggagtagtatacgaaaatgtcttcrggcaagtaagaatggggtcatttcctgtaattacaagatgtttcttataacttaatgatctcatcttttttcaggttgtggtaaacgagttgttccattaaacgtcaacagaatagcatctggagtcattgcacccaaggcggcctggccttggcaagcttcccttcagtatgataacatccatcagtgtggggccaccttgattagtaacacatggcttgtcactgcagcacactgcttccagaagtaagtta

SEQ ID NO: 746276 - DNA, 637 bp, Homo sapiens
atttgcctctgtgacttgcaaacaccctaagtatttttatccatgtgtttattcattcaacaatatcttttaacatctaccaagtgccagaaattagaccaggagttggtggtaccattgtgaataaaacatgatccctgctctaaaattagaattccaaagtagagaaagatataaataaatcaggaagtatgaaaataatgtgattaatgctatgacagaggaagtgcatagtgctatgagagttgatcagagagtcagctaacctgttctcacacagtaagaaagtgaaccctgaaatgtgagagagaagaggccatgaatccagtgacaggtggggtaagtgtcctgggcaggaggagtagtatacgaaaatgtcttcaggcaagtaagaatggggtcatttcytgtaattacaagatgtttcttataacttaatgatctcatcttttttcaggttgtggtaaacgagttgttccattaaacgtcaacagaatagcatctggagtcattgcacccaaggcggcctggccttggcaagcttcccttcagtatgataacatccatcagtgtggggccaccttgattagtaacacatggcttgtcactgcagcacactgcttccagaagtaagtta

SEQ ID NO: 746277 - DNA, 569 bp, Homo sapiens
gaaaaggtaggagaaacagtcctgaatcactggcaccatgcctcccccgtaccctggaagcagtgatgtggtgcaaagaatattttggcgtgctaggcagagagagatgacagtatttttgaggcactaaactcagtgctgccctattataacagaaaacaaacayagactaaactcagctgacacccacccatggagcgagtatgtaaaccagccacaaccagaggagaataatctaccccagtggtccagccttgtgttcctgcgagcctcaccaccacgggctaaagtgcactgcggttccaaataaacttgacaggcaggctaggcaacaaggattgaaacacttaggtgtgtcccagtgctgaactgggcccagagagagtggattggagaggacatgtaacctactgagaccagctgagagagtgcttgcatcacctctcccctaagcccaggctgcacaactcatggccccaaaagagaatcattccctccatttgaggagagaggacagaatagtggggaggactttgtcttgcatcttggatacaagctcagccacagca

SEQ ID NO: 746278 - DNA, 609 bp, Homo sapiens
ttagaaagtaaagacggtatttttctactttttatatagttgtagaattattttcaagaaagttcttgctaacatttaagagaaaataatctctctctggttttctttttagttaatgaataagtattttcctatactttcacataaagaaagaaaaaagttgtgagataatcaagtcacacgttaacatctcaaaacaatgaaataattatgtaacttggtatgtttatgtgtgcacttaagtgtatatattatgcatattatttttctatgactacaggaaaacatgatactgataagtcatgctgaaaggatcaacaaaagcatgaacaatgtgttagctataataagtgcagctgaatttattttaaatctcctgaacattggaaaattcaatcmaaagtcaaaccattttaagtaataaaaatatatatacagttatatgcacttgaatatatatatatgagtgaaaagtggatagctgtctaagcttccaatgatagaagaaataaaatcatttcatattcatgtaatagatacaagaaatgtattaaagtagcttaaaaacctatgaagtaatttacatactgagtttgttcttattttatg

SEQ ID NO: 746279 - DNA, 453 bp, Homo sapiens
gtggggtttacgacatacaaaagtaaaatgagcagtaacagtagcacaatggaagggaagtggatcagtggaatattcttgtatcatattcacttctcataagtcaaaaatattaatgcaaggtaggctatgataaattaagaatgtatattatagtttttagagcaacctgtatcaacaacagcaacaaaaaaatttactctctcaggaagtgataggtcaagtaggctaaaaaaatctattagatttgagaagatatgaattaggtcaactaacttaacattattggcatttacagaacacaataaccawcaactccagaacatacattattttcaagggcacatcagatattaaccaaaatagaccatgtgctgagccataaggtaagtctcaatgcatttgaaaaagacttaaattacacagacagtactctctctacatggaagtaaa

SEQ ID NO: 746280 - DNA, 572 bp, Homo sapiens
aactgttttaaataataacatatactttcttagtctccttttgagatcatttattttgctcacaaaacccagtccaaaaaaaaagaataccaaacaaacaaaaagacttcatttaagctgaattcttttctctgtcttagaacaccatatagacttctaccattcagacctggggccttttatgaatacatgggcttctgtcctataacactgtcacacccagtctactttcgttttcttcatcttcagcttccaccactgactctgaccctagtattgcctctcttctagagcacagtcctgcctatggagtgggatatcatcttcctgactcctcatacctcctaccaaatgctatccctgaagataaaggcacctgggtcccgtttrctttattatgatagtgaatatctgtcaagcacttaactatatgccaaatactactaagtgtttacctccattaatacatttaacttcacaacaaccctgtgaaatagatattaatatttatgcccattttttcagatgaggaaattaaggttaagagaaactgactgggtctgctctgtctg

SEQ ID NO: 746281 - DNA, 631 bp, Homo sapiens
gtctcggcctcccaaagtgctcggattacaggtgtgagccaccgcacccggccatattttcagatcttaatgttgatgccccaacaagattttctactagaaagtgtgattgcctatttgggttttcatccaaatcagtctgatgtgagttggaccctgtacatcagctacaactcagtctctgacacattactgggcaaatcaagctaggaaaccacacactggggtgccgagggacaacaaccacracgtcagccattaacagcatggctgtgggcttcctgctgtactaaaactgaggtgaaggcaagggagtacggactgatgtctggaaaagtacagaattggtaactgtcacattatatgcatgtgattgtgtcagacgtcaaaggcagctgatctttgcctaaagaagaaaggatagaaaggaacaaccttataccattctcaaaaaatttcttaattagagaaaatgattattactttttttccagagttgtgctgtatttcccaagctatatgtttttcattttaccattgcacaagtaaaacttaggaagctgtgaatttattgttgagttaggaattcaaacaatccatgtcaaaaaagaagcaagcctgaacaaaggag

SEQ ID NO: 746282 - DNA, 536 bp, Homo sapiens
acttggaaaatcagaacagtaagaacaatttttcaaccaccatgattccagcaaaaaggattttctaatcacaagaaatcctccaaatggagacacaaaattcttcacttaaacaagattgtgctttatagagtggaggagataaatgtgtcatgtaaacccctgtaaaatatttctgttggtaaagtatgttagatatacaattgttatcagtaagtattttataacaatgaattgcattgtaaatgcgacatctagaaggcttttaaactattccttttaaaaaatttacatcttcctcgttccaaaaacgtttaaggtgggggaaaatcctattactagttgtacrtggtagtttccttccatgtcacactctcagagtttagcatagcactagatctgttgttcacattgcattgatggttggcccttaaacaacacagttttaaactttgaggatccacttacaggtggatttcctcctactttgctgcccctgaaacagcaagaccaaccctcctctttctcttcctcct

SEQ ID NO: 746283 - DNA, 496 bp, Homo sapiens
cttttcactagtatttaattattctgattttccattccaaccatatatttctgtaaagaagtaccagattttcttctttttttttttcaatccatagttacccctgagagagcagggaaagaaaaataaaagcacaaattaataaaaaatagcatgctatctccggtcaagtgaaactatctattgtctccagacctaagagcctagcaaggtcattgccaatgtgcaagataagaaaacccatctctccatgggtgagcacccataagtgatgtctcaggattacaaccwcggcgagtgcctcctaccagactgactcttcgctccctcccctgcactgcccaccctgtattccagctctacttgggcaagaaactgctgtgtagggtactgatggggacagagcttcttcatgcttcactctcttccctaactgccccaccacagatttcctccactgctccttcaacagacacccccttctttccagggactc

SEQ ID NO: 746284 - DNA, 636 bp, Homo sapiens
catatgtgtgtacgtatgtgtatatgtgtgtgaaattgaaaggcctttctattaaaaagacctagtaataaaattcccctcattaatagactaaaaaataaaaacaatacaatcaaacttggaattcagaaaaggcctatgaatatgttaaactcctgtcatgactagaaaaataatattaacccatttatgctggaggttgcaattttttgaatttttgcacaagtgaaaaaatcagaccttggtgatraccttgagtagtaggatataaataactcccacatgcttagggttccaataatggaacactgggcataagtgggttaatgaggaaatggaagggaactcctttaacctgaaaaagagcaccaaaacttacagcaaacataataataagccatggagtgttaaaagtctcccttaaaagtcaagaataagacttatcgggctattatcactacttacatgcaccacttctatatattggatatagtgacattgtacaagacaagaaaataaagttataaggattagaaaagaaaaacaaattctcattgttctcatgtaatatatggaagttttaatagaatttatacatcaaatatgaccactaatagaagagtccaaaaagattgt

SEQ ID NO: 746285 - DNA, 636 bp, Homo sapiens
catatgtgtgtacgtatgtgtatatgtgtgtgaaattgaaaggcctttctattaaaaagacctagtaataaaattcccctcattaatagactaaaaaataaaaacaatacaatcaaacttggaattcagaaaaggcctatgaatatgttaaactcctgtcatgactagaaaaataatattaacccatttatgctggaggttgcaattttttgaatttttgcacaagtgaaaaaatcagaccttggtgataaccttgagtagtaggatataaataactcccacatgcttagggttccaataatggaacactgggcataagtgggttaatgaggaaatggaagggaactcctttaacctgaaaaagagcaccaaaacttacagcaaacataataataagccatggagtgttaaaagtctcccttaaaagtcaagaataagacttatygggctattatcactacttacatgcaccacttctatatattggatatagtgacattgtacaagacaagaaaataaagttataaggattagaaaagaaaaacaaattctcattgttctcatgtaatatatggaagttttaatagaatttatacatcaaatatgaccactaatagaagagtccaaaaagattgt

SEQ ID NO: 746286 - DNA, 539 bp, Homo sapiens
acagctgatcagattgtgcccacccatattaaggttgggtctgcctttcccagcccactgattcaaatgttaatctcctttggcaacaccttcacagacacacccrggatcagtacttcgcatccttcaatccaatcaagttgacactcagtattaaccatcacatgcctttttcaagtattttctttcagtctgtgacttgtcttctcattcttttttcagctttaataaggttcaataatgtggtattttaatatctgtatagactgtgaaatgattaaatcaaactaacatacttatctactcagacacttattttttttgatgagaacatttaagatctactctctcagcaatttttaagtatacagtacattattattaactatagttactttgctgtaggactgtttgtagaaatgtaaattagtacagccattatggaaaacagtagagaggttcctcaaaaattaaaaaatataactaatgtgtgatccagcaatttcacttctgggtatatatcttaagaaaatgaaatc

SEQ ID NO: 746287 - DNA, 539 bp, Homo sapiens
acagctgatcagattgtgcccacccatattaaggttgggtctgcctttcccagcccactgattcaaatgttaatctcctttggcaacaccttcacagacacacccaggatcagtacttcgcatccttcaatccaatcaagttgacactcagtattaaccatcacatgcctttttcaagtattttctttcagtctgtgacttgtcttctcattcttttttcagctttaataaggttcaataatgtggtattttaatatctgtatagactgtgaaatgattaaatcaaactaacatacttrtctactcagacacttattttttttgatgagaacatttaagatctactctctcagcaatttttaagtatacagtacattattattaactatagttactttgctgtaggactgtttgtagaaatgtaaattagtacagccattatggaaaacagtagagaggttcctcaaaaattaaaaaatataactaatgtgtgatccagcaatttcacttctgggtatatatcttaagaaaatgaaatc

SEQ ID NO: 746288 - DNA, 646 bp, Homo sapiens
cattttccattttcacaacaagattgataattcagacatgctgggtaaacctataacatgtggctatcttgtactttctatccccaaataatagcaataatatttgtacattttcttttggatctttcatattgcctcagttaaaaaacaaacaaaaaaggcattatcagcaggaacaatgtgggtgcawtaggcaatgctgaaatggaaacttgctgaaggatagcttatatgagcagagcttgcagaatagttcccaagagtagtatcatagaagatagaaactcaggtaaattcttctataaatattttaatactaatgaaaaaaatcttgaaatttgtcccatatttctcaggcagtagccgtaagtacagagagcataagggaacataattcaagaaactgtgaatacaaattttgttattctaactctaaactcatgatttggcagtaatctagtcttaaatttcaaaggaaatagctatgattttatataatttaaccctcccttgaaaggtaaattcaagttaatgctatgaatcagtagattacaatttcacaaatgaataacagttttgtaaactgcaaaacacaataaaatcagagatttactgctttcaaagtctttacaaattattattaatt

SEQ ID NO: 746289 - DNA, 527 bp, Homo sapiens
acttgaaacccttagaatgttaaaacatgtgagagctayatctatataaaactaaaaatgtgactaaagttatcaatacatcaattttgatgacggtttgagttttttcttgataatactttcttatcccaatgtttggaaatgtgtaattcaaggatcaattgtttctagacctaaaggttttgtgcagtgcataaaagttctgctatcatgaatttgatgtatgtagacatagtccatgataagctttggctctgtgtccccactcaaacctcatcttgtggctcccacaattcccatgtgttgtgggagggacccggtaggagatgagtgaatcatggtggagggtctttcccatgctgttctcatgatagtgaatgggtgtcacgaaatctgatgggtttaaaaaatgggagtttctctgcacaagccctctctttgcctgctgcaatccacgtaagatatgacttgctcctccttgccttcagccatgattgtgaggcttcccagccacatggaactatgag

SEQ ID NO: 746290 - DNA, 527 bp, Homo sapiens
acttgaaacccttagaatgttaaaacatgtgagagctacatctatataaaactaaaaatgtgactaaagttatcaatacatcaattttgatgacggtttgagttttttcttgataatactttcttatcccaatgtttggaaatgtgtaattcaaggatcaattgtttctagacctaaaggttttstgcagtgcataaaagttctgctatcatgaatttgatgtatgtagacatagtccatgataagctttggctctgtgtccccactcaaacctcatcttgtggctcccacaattcccatgtgttgtgggagggacccggtaggagatgagtgaatcatggtggagggtctttcccatgctgttctcatgatagtgaatgggtgtcacgaaatctgatgggtttaaaaaatgggagtttctctgcacaagccctctctttgcctgctgcaatccacgtaagatatgacttgctcctccttgccttcagccatgattgtgaggcttcccagccacatggaactatgag

SEQ ID NO: 746291 - DNA, 527 bp, Homo sapiens
acttgaaacccttagaatgttaaaacatgtgagagctacatctatataaaactaaaaatgtgactaaagttatcaatacatcaattttgatgacggtttgagttttttcttgataatactttcttatcccaatgtttggaaatgtgtaattcaaggatcaattgtttctagacctaaaggttttgtgcagtgcataaaagttctgctatcatgaatttgatgtatgtagacatagtccatgatawgctttggctctgtgtccccactcaaacctcatcttgtggctcccacaattcccatgtgttgtgggagggacccggtaggagatgagtgaatcatggtggagggtctttcccatgctgttctcatgatagtgaatgggtgtcacgaaatctgatgggtttaaaaaatgggagtttctctgcacaagccctctctttgcctgctgcaatccacgtaagatatgacttgctcctccttgccttcagccatgattgtgaggcttcccagccacatggaactatgag

SEQ ID NO: 746292 - DNA, 630 bp, Homo sapiens
ctgaggacacaaaggtgggtgagtgccctgagcggcccctcgttcccaggccctgcagccagactcagacacagaggactagcgggcgaaaccccagcagaccaggcagaggcatagacacatccagggacacacacagaggtgtatgcacccaggcaccctagtggctctctccctgtgtccagggagtgactgactccaggtgaccagagcagggtgggctcctggggagggaggtaagtgcagggcctctggaccccaggcaacactgctcagccccgaaaaaaggacactgcgagggggtggggtaagacctgcgccaggtccccacacgagggagaaggttgtgcccatcatgcctgggctcactggcaggaggctgccagggcctcttcccagcagtggctctggcgtccatctgacctgctgctggatggctgccyggtggctgcagcgcggctaacgggaactgtctagggtgagtcatcgtgcccgggtggctcacctgggcccgctagctgtgcgtggtctccaaatgagcccaggaatgcgtgtgcccctgtgtgtatgtatacacgtgcatgggtctgtatcctggtgtgggtgttcatgcatgcaggcctgagtgta

SEQ ID NO: 746293 - DNA, 606 bp, Homo sapiens
ctgaaggaagtctaaaaatgacaataggaatatactaagaaagtagaaggatgaagataaaggtgaaacataaataaatgaaaaacaaaacaaaactagaactaaaaatatctaaaactaaattagaactaaaagcagaactaacatatataaatttgatttcttgaaaaaattaatgaaatggccacaagatctctgaagggaaagaccggcaagaggcacaaaaccctactgagaaatgagaggagggctgctctacaatgcagcagagggcaacatgagtgatctcacagcaaggcaacttggaaaattacacaaaatggaccatttctagaaaaacattatttgccaagtttgattcatagagaaacagaaagcccaaagagtcctataatcctagaagaaattaagaagttaaaatcttcccacaaaratgtcaaaaatctaagacaattttacatgttctgccaaaattaaaaagaatattttatcccattttacaaacttcaaaatgtaggcaaaagtgggcacatgacctagttcactgtaggactctatcataatctcaatacaaagacaggacaagtgtgtaccacaaaagaaaaa

SEQ ID NO: 746294 - DNA, 595 bp, Homo sapiens
aggatcacctgaggttaggagttcaagaccagcctggccaacatgatgaaaccccatttctactaaaaatacaaaaattcgccaggcatggtggcacatgcctgtaatcccagctacaccagaggctgaggtgggagaatcgctggaacctgggaggtggaggttgcagtgggcygagatcacaccactgcactccaggctgggcaacagagcaagacttcatctcaaaaaaaaaaaagaaaaaaaagagttatctaaagacctggaatcaatagaagggggctaggttaagataacggttgtagagaccagggttcttactatgcagatgaagccttccaggtagcagacttcagagagaatggattgcagatgtttcttatcagacttcaatagtctgttctatcagtcctaattttaatctttctgttgaaatgttaatgctggtcagctgtgccagaattccaaagggaagagggtataatgaagcatctgacccctaattcgcatcatggcctgagctagtcttttaggttaactttggaatgccctttgctgagggggggatccatcagtcagtcgggagcttaggttt

SEQ ID NO: 746295 - DNA, 520 bp, Homo sapiens
ggaactgagatgcaaatacctagatactcactgagtgggagaccctgaaaggggagacacagaaagccggggcatgtggctaggcacagacgcccgcccgcccctcgtgcttggcccaggctcagccctggggaccgccttaacagcagtccttccrgcttggccagggggacaggacaggtgacatgtggccggctgtgggctccaacacccacacggcttgtcctcgtggaaagcacacccccaacatccagggcgtgacctcgggcatgagtggggggcttttgggggcttatgtgggtgtctgtgcaggggtgtccccagtgcccagctgcccaggcactgaggggcagttctgggcagagctggagctgctggtgatgccaggctgccctgtgcagatgctgaagcctctttggaaagcagcagtggcccccacatggccacgctccatgccgccccgccgcccgtgggacagagaggctggcacggtaggactggggggccccaggggggaggt

SEQ ID NO: 746296 - DNA, 520 bp, Homo sapiens
ggaactgagatgcaaatacctagatactcactgagtgggagaccctgaaaggggagacacagaaagccggggcatgtggctaggcacagacgcccgcccgcccctcgtgcttggcccaggctcagccctggggaccgccttaacagcagtccttccagcttggccagggggacaggacaggtgacatgtggccggctgygggctccaacacccacacggcttgtcctcgtggaaagcacacccccaacatccagggcgtgacctcgggcatgagtggggggcttttgggggcttatgtgggtgtctgtgcaggggtgtccccagtgcccagctgcccaggcactgaggggcagttctgggcagagctggagctgctggtgatgccaggctgccctgtgcagatgctgaagcctctttggaaagcagcagtggcccccacatggccacgctccatgccgccccgccgcccgtgggacagagaggctggcacggtaggactggggggccccaggggggaggt

SEQ ID NO: 746297 - DNA, 465 bp, Homo sapiens
gtggggatctcgaagtagctgggctcccgccggaacgagcagccctgaggctcagcaggggcgcggaagccgtggagctccccgtcctgctgcactggtcccttggggcgctctggtgtgggaagatgtcttcagaccgggcctcagggtaaccacctgccaccaccctcctcagccaggaccatccactccacccaagagggggagacaggccccatgtcccccggagtgggctcctcaagcccaggccatccccttcacacmccaccctctgggagccctcagggtctcaccagcctggccccaagaccaacctgggtagggctctccctggcgctgggcgtcaggcagcgtgctaccatcgtcctcaccccaccaggagggctgcccatacaggggtgtgcggtaagaggctgcctctgtggagggagcgagaggtcagaccctgtgttgctggggccccca

SEQ ID NO: 746298 - DNA, 702 bp, Homo sapiens
cacgtgcaggccaccctggcagctggccatcactgccccaccacagggcaccgtcatgaaacaccagtgtggggccttccccagcacccctgggcaagggctagaaaccctcagggcagggcctccttcctaactcagagaggagatcacacagcaggggctagttgggggcaagggctctgatggcccagcttgactgaggcctctgcagaggtgccagggcagggaagctgcagckgggtggggctcgtggtggccagcaggcctgagagccagcctcacgctagtgccactgccacccagcagtgggcactcagaagccctgggtgcctggctcaagccacggtggtggcgctgcagtggaggaccgggggtgggggttggggggtactgcagtggaggaccagggggaggactgcagtggaggactgaggggaggactgcagtggaggaccgggggcagggactacagtggagggtggcgaggagcccacccctcctgtcaggaccctgggtccccccaggaagtgggcaggggtgccagggaggtttaaaggggagagtagggtcctgggtgcagccatccctgagctgcctgcccagacacagcccgtggtttcccagaaaccaggtgagcggctcctcctgccccacatgccctccctgggaaggcggatcctggtggggctcctggtgccagct

SEQ ID NO: 746299 - DNA, 702 bp, Homo sapiens
cacgtgcaggccaccctggcagctggccatcactgccccaccacagggcaccgtcatgaaacaccagtgtggggccttccccagcacccctgggcaagggctagaaaccctcagggcagggcctccttcctaactcagagaggagatcacacagcaggggctagttgggggcaagggctctgatggcccagcttgactgaggcctctgcagaggtgccagggcagggaagctgcagctgggtggggctcgtggtggccagcaggcctgagagccagcctcacgctagtgccactgccacccagcagtgggcactcagaagccctgggtgcctggctcaagccacggtggtggcgctgcagkggaggaccgggggtgggggttggggggtactgcagtggaggaccagggggaggactgcagtggaggactgaggggaggactgcagtggaggaccgggggcagggactacagtggagggtggcgaggagcccacccctcctgtcaggaccctgggtccccccaggaagtgggcaggggtgccagggaggtttaaaggggagagtagggtcctgggtgcagccatccctgagctgcctgcccagacacagcccgtggtttcccagaaaccaggtgagcggctcctcctgccccacatgccctccctgggaaggcggatcctggtggggctcctggtgccagct

SEQ ID NO: 746300 - DNA, 671 bp, Homo sapiens
tgcccagttggaattgattactctgttccttattcccaaagcactttgttcctttaaggctttctatcccactagaactgttttcaaggtcatatgagagacatgtgtgctctttctaagtactgtgaacttccagagagagrgagtgttatatgtttgttcatggaagagagaaagagtacgcactcaaaacattagtttaaaagtttaggctggctcagtggctcatgcctgtaatcccagcactttgggaagctgaggcgggtggatcacgaggtcaagagatcaagaccatcctggccaacatggtgaaaccccgtctctactaaaaatacaaaaattagctaggcatagtggtgtgcgcctgtagtcccagctattcaggaggctgagtcaggagaattgcttgaacccaggaggtggaggttgcagtgaggcaagatcacgccactgcactctagcctggcaacagagtgagactcggtctcaaaaaaaaaaaaaaaaaagtttaacagattgtgattgtatcttgattacaaaatgcttgccaataccatcacaaagaaagaaagataatttcttagaggaagggtagtctttgccgaaaatgatgctgaagaaattggacacccataggcaaaaagaaaaaaaaaaaaccatagacacagtat

SEQ ID NO: 746301 - DNA, 638 bp, Homo sapiens
gtagcctgaaattggttctgccattgacaagactatagcatatggcaagctactctgcatagcttataaaaggtaacccttctccataggatgtaacaaaatgatatgaaacaggaactcacatttgtcttgtatactcacatcacaggattcagagatggaagatctgttttgctctgttatgtccatgttatttccagctgttggggaatgtggttagagtgtcaartcacatgtgtgtgtgtgcttgtattcttcttttaggtttacaatggcattgcttttaggtttgctgtcattccccacacttcacaaattaggaaatggaggctcacagaaattaacgaattggccaaaccttatattgcttgtaagtagaaaaagaggttcaagcatgggatgtctggcccagagttggttgtttttcccaggaaactgtaccccaccacccagtaacaattctaagtagtgacttttatatattaatacaggatctttcttggaggtcacactaatatctgagtagtgattgttttctatattaacacaggatctttcttggaggttacgctgaagtagatacaatggaatgtcacctgagacttgccacagttgggaattctctgtgggtctgctct

SEQ ID NO: 746302 - DNA, 622 bp, Homo sapiens
aaatttactctccattcttggaatatttctttccagattaccagtcaatgatttaaaacaagagtggaatctacctaagagataaatgttatcaagtggtttcagctgtcatcaaaagtgccactgctttgtgaaaggtaaattacagcatgattgaataattgcaatttttttttttaatctgtctgtggtcagtttgaatgatctggattgrcatcctgggattttacctaatttctttaacctcacacttcacaataatttgcatatgtggctaaaccaatccattatatgttgcttcttttaactttcaatccagaatataaactttttctgacattctcaaatgttatcagagttaaagacaggagttcgtcctcttctcaatctttagtgttcctaagaatcacacaggaattgagtgaaaacacagttttctcaggtcccatctctagaaattctggtttttagatctgagtgtgggaaccaaggaattgcacttttaatgaacaacccctcccctacccgccatcctggaaaaaaaaaaattctgtgcagagtctgtgaatcacactttttaagcatttttaattttgtaatgctttatattgaaatcatttta

SEQ ID NO: 746303 - DNA, 559 bp, Homo sapiens
aaaaggtggtaggtgagttagtggaggactggcatgcttctcagctgggaatgttcctagcatggctatctctagctaaggcccgataagcccccttccgggctggaggagcccaaccacagggccaaagtagccagcatagccactgtmtttttgctgattgtcagtgggcagtgctttcaggacttcttttcccaggggctcccttgcctgttcatttctggctatccccctattctaaccggggcacgtaaggaatcaagcttgattcaggacatccatcttgctggctcagttacagtggtggtttctgtcttggggtatctgccagaagttgccagaaagcagagtcccgggagcagtgcaaatcacagcctcttgtcctgggcagaggcactgctacaaggtgaattgtgttcctcaaaattcatatgttggagccccagtccccggtatctcagaatgtgactgtatttggagataggctgtttaagggggtgattaacttaaggtgaggccattagggtggacctttatccaatctgatattatatggaaa

SEQ ID NO: 746304 - DNA, 534 bp, Homo sapiens
ccacagtaggtgggcatcagccaatctgtgagggcctgaataccttcccccatctccactccccaccagcactacccatccccaggctcatgtcttcagactcagactgaaccacaacacctgctttcctggatcaccagcttgcagatatcagacagtgggacctctcagcctccataatcacatgagctaatttccatactaaatcctcttttatctgtctacctacctacctacctatccaactatctcctattggttctattttgctgaggaactctagtacagatagaaaaatgatgtattatgaaaacarttatatgaaggctggagtaactatattaacatcagataaaatatgcttcaagacaaaaagtagtaacagagataaaaagggacatttcattatgaaaaaagtttaattcattagcaagatatcacaatcataaatatgtatgtggttagcacaaagttaaaaatgcatgaagcaaaaactaatagaagtaaaagaaggaatagacaatttcacaacaa

SEQ ID NO: 746305 - DNA, 543 bp, Homo sapiens
gtcagggtccagtaatccccaaaatgtctgatcatttccctttcccagtgcacagttaccctggtaaaaggctggaggtctcctatttccctttcccaatgcacagttaccctggtgaaaggctggaggtctccttggggaagggcggggaaaaaattcactgcctaaattgtcagtgatgtagtggggtccttcctcaaggggacccagcctccccttcattcaaggggttctgggtttgtaaaactggctcaaatctggaaattgwttgagaggccatgattctctgtttttataattcaaattagtctttggtccattcaacctagaatttttctccttatagaaattaagaaggaatgcagtaggcttcctatcaatttcacttctacgaacactgtgattaattagccaatgccagagctctacacaagtcagactattccgattgccgctttgcctctgctgtccattatggtagctacgcccaccttgcctttgacagttgagtgttgccacttggcccctgcctccctgggatcc

SEQ ID NO: 746306 - DNA, 543 bp, Homo sapiens
gtcagggtccagtaatccccaaaatgtctgatcatttccctttcccagtgcacagttaccctggtaaaaggctggaggtctcctatttccctttcccaatgcacagttaccctggtgaaaggctggaggtctccttggggaagggcggggaaaaaattcactgcctaaattgtcagtgatgtagtggggtccttcctcaaggggacccagcctccccttcattcaaggggttctgggtttgtaaaactggctcaaatctggaaattgattgagaggccrtgattctctgtttttataattcaaattagtctttggtccattcaacctagaatttttctccttatagaaattaagaaggaatgcagtaggcttcctatcaatttcacttctacgaacactgtgattaattagccaatgccagagctctacacaagtcagactattccgattgccgctttgcctctgctgtccattatggtagctacgcccaccttgcctttgacagttgagtgttgccacttggcccctgcctccctgggatcc

SEQ ID NO: 746307 - DNA, 645 bp, Homo sapiens
aattacctgacctccataagcccctactttaactggaggaccacaatgacattttgggtccgctgcaatcaacatcagctcagagtcagggtccagtaatccccaaaatgtctgatcatttccctttcccagtgcacagttaccctggtaaaaggctggaggtctcctatttccctttcccaatgcacagttaccctggtgaaaggctggaggtctccttggggaagggcggggaaaaaattcactgcctaaattgtcagtgatgtagtggggtccttcctcaaggggacccagcctccccttcattcaaggggttctgggtttgtaaaactggctcaaatctggaaattgattgagaggccatgattctctgtttttataattcaaattagtctttggtccattcaacctagaatttttctccttatagaaattaagaaggaatgcagtaggcttcctatcaatttcacttctasgaacactgtgattaattagccaatgccagagctctacacaagtcagactattccgattgccgctttgcctctgctgtccattatggtagctacgcccaccttgcctttgacagttgagtgttgccacttggcccctgcctccctgggatccaattatgcccgttgtatt

SEQ ID NO: 746308 - DNA, 584 bp, Homo sapiens
ggttaagggagactgcactatcccaataggaccccaggaggcctgtcatcctgccattgagttaccatttgttccctggctgataagaaactgcattgaagtactagtagaattttcagagtcctaaagaactgggagagwattcccctcaactctgtaacacatcagtgagaggggtgggtataaatagagtttggagttctaaagaccttgattgaaaactgactcagcacttttagttgggtgaccttggggaagtcattctttttgaacattggtttaaattattttgtagtgtggtagaggaaagggagagacaaattaaacaaatgaatgagtaagatttctgagcttcagtttccccaaatcaacaaaataatatacatattacagaactcttgtgaattcaaatgcatctataaagtgcctagaacaaagcctaaatcacaactcagtaaattatagtttttatgttatatactttaattcctgaatgaatgtagaaacatgaattctgtaacttcttgaagtctgatatggttaggctttgtgtccccacccaaatctcatcttgaattatattc

SEQ ID NO: 746309 - DNA, 459 bp, Homo sapiens
gattttaatagtaaaaccgtgaaactaatctaagtgtctaaaactagagaacgatttaataatgttttaacagcctccaaaattatgttgaggaagaataagatatatcataacataaaaattgtgatacagattatagatgaaaaatttaggttacyaacaagaatgtataaaatattccattaattatatatacatatatacacatattttactattttatatattaaaagatatacagcattatactatgttggttatctctggggatcagattacaggttgtttttacttgcttccttgagatttttttctgtaatatctgaattttattcctttctttccaaatttggggaaaaaaataaggtttctgaaaattaaaaaaaatagataatatatcaagtttggactgcaaaccagagctttcagcagaacatagttgagtctttgccatagaca

SEQ ID NO: 746310 - DNA, 581 bp, Homo sapiens
agaggctctgacatgggctgccagaccaggcagatcgggaaatgctggcaaggtagctggtaggaccaggcatgtctgggctcagcacaaagatgttagcttagcctcctgatatttttcttggacaataatgaaagtcttgctggatgtatctttctattccctgtcatgctaaaactctccttttgactctcctagttttccaaaaggaagagaggcaaagttgctgttttctgaccttttctgggaaaactaatgcagagtcctggtmattttcaggatctgacagtagtttcactcattgattcaatcaaggtctatttattggcaatctacagcaatgtaagtgttagatgtaaagtaataataaagatgtggtatttactctcatagagcttactctctattttgggagaaagatagtaaataagtacacatatatcttcactaattgtgataagtgttttgcagaaaatgagtatggtgtgtgtgtagaaaattacaaaccatgctggtagcttaaaggcttttagaaaaacactaagacctgaaggaaagagggatctggccagaagagcagc

SEQ ID NO: 746311 - DNA, 581 bp, Homo sapiens
agaggctctgacatgggctgccagaccaggcagatcgggaaatgctggcaaggtagctggtaggaccaggcatgtctgggctcagcacaaagatgttagcttagcctcctgatatttttcttggacaataatgaaagtcttgctggatgtatctttctattccctgtcatgctaaaactctccttttgactctcctagttttccaaaaggaagagaggcaaagttgctgttttctgaccttttctgggaaaactaatgcagagtcctggtcattttcaggatctgacagtagtttcactcattgattcaatcaaggtctatttattggcaatctacagcaatgtaagtgttagatgtaaagtaataataaagatgtggtatttactctcatagagcttactctctattttgggagaaagayagtaaataagtacacatatatcttcactaattgtgataagtgttttgcagaaaatgagtatggtgtgtgtgtagaaaattacaaaccatgctggtagcttaaaggcttttagaaaaacactaagacctgaaggaaagagggatctggccagaagagcagc

SEQ ID NO: 746312 - DNA, 529 bp, Homo sapiens
aataaaaatgcaggctaatactccattttttacactccgtttttatgaaaattaattatttcagatagtgttgccattgttaatttgcttgataagtttgctttgctggttctcttctgttaaagcaaagtgaagtttagaatacagttatttacagtacttggcaattagtaagtacccaataaacacttaagttaatgaataaatcaacaatgaataaatggaaagttacccatcctctaacacaaaagttggcaaacyataccctgtaggccaaatccagctcactcactaattgtgtaagtaaatatgcattgactcgttcatttgtttacaaatcatctctttcggagttcaatgtctgctgctttcaaaattgaagagttgcaacagggaccatatggctcacaaaacaaaaatatttgctatccagtcatttacaggaagtgtgccaacccctgctctaaaacacaaagtttgatgaatagctagagagtagccagaaggtacccacactgagtatgcaaat

SEQ ID NO: 746313 - DNA, 607 bp, Homo sapiens
gagccgagattataccactgctctccagcctgggtgacagagtgcgactctgtctcaaaagaaaaaaaataattacaaaacactatttaaagaaaccagagataacacaaacaagtggagaaacattccatgctcatggataggaagaattgatatcattaaaagggccattctgcccaaagtaatttatagatttaatgcaattcctatcartctaccaatgacattcttcacaaaactagaaaaaaactattttaaaattcacatggaaccaaaaaagagcccaaataaccaaggcaatcttaataaaaaagaacaaactggaagtatcaacttcagtgttgaatcatacccaacttcaaactatactacagggctacagtaaccaaaacagcatgataatggtacaaagacagacacatagaccaatgaaacagaatagagagctcagaaattaggctgcacactgacaactatctgatcttttactaagctgacaaaaacaagcaatggagaaaggactccctacaataaatggtgctggggtaactggctagctatatgcagaagacttgagactggaccccttccctacaccatatacaaa

SEQ ID NO: 746314 - DNA, 607 bp, Homo sapiens
gagccgagattataccactgctctccagcctgggtgacagagtgcgactctgtctcaaaagaaaaaaaataattacaaaacactatttaaagaaaccagagataacacaaacaagtggagaaacattccatgctcatggataggaagaattgatatcattaaaagggccattctgcccaaagtaatttatagatttaatgcaattcctatcaatctaccaatgacattcttcacaaaactagaaaaaaactattttaaaattcacatggaaccaaaaaagagcccaaataaccaaggcaatcttaataaaaaagaacaawctggaagtatcaacttcagtgttgaatcatacccaacttcaaactatactacagggctacagtaaccaaaacagcatgataatggtacaaagacagacacatagaccaatgaaacagaatagagagctcagaaattaggctgcacactgacaactatctgatcttttactaagctgacaaaaacaagcaatggagaaaggactccctacaataaatggtgctggggtaactggctagctatatgcagaagacttgagactggaccccttccctacaccatatacaaa

SEQ ID NO: 746315 - DNA, 632 bp, Homo sapiens
accaatttctaaagccaaaagtattatttttcctagatgcatcccaaatttaattgatgtaaattgatatccaacaattttatatgtttagcaacttggacaattttacagaatgtcatttaaaagtggaattctctagaaaagctccagtggaaatggcatggtgttttattatttgatgacgctatttttgtatatgatcctattccccgttgtgctttggattctggttgagatttcagygttgatttatcaactttctggtaccctctgctcgacatgttctgtttgctcctctggatccactgcctccccttccccgttcttcctctgctcctggagacagatgggtctgtgtaaataatatcaatggctcgcactccctttggcttccagttctctttgggcaaatgggaagatgcagcaggagatgagaaagaggaaagagagtgaattcagagaatgtgtttccccagtccttccccgtgaggtcacctccggctagttgtgcgtctcaacagagacctgtggtcctctcaaggcagtgtgctctacaggactctctcttcagggttccagaccccaccctcctcaggcctagaagtaatatctcttaaaggtctcctacaatc

SEQ ID NO: 746316 - DNA, 632 bp, Homo sapiens
accaatttctaaagccaaaagtattatttttcctagatgcatcccaaatttaattgatgtaaattgatatccaacaattttatatgtttagcaacttggacaattttacagaatgtcatttaaaagtggaattctctagaaaagctccagtggaaatggcatggtgttttattatttgatgacgctatttttgtatatgatcctattccccgttgtgctttggattctggttgagatttcagcgttgatttatcaactttctggtaccctctgctcgacatgttctgtttgctcctctggatccactgcctccccttccccgttcttcctctgctcctggagacagatgggtctgtgtaaataatatcaatggctcgcactccctttggcttccagttctctttgggcaaatgggaagatgcagcaggagatgagaaagaggaaagagagtgaattcrgagaatgtgtttccccagtccttccccgtgaggtcacctccggctagttgtgcgtctcaacagagacctgtggtcctctcaaggcagtgtgctctacaggactctctcttcagggttccagaccccaccctcctcaggcctagaagtaatatctcttaaaggtctcctacaatc

SEQ ID NO: 746317 - DNA, 615 bp, Homo sapiens
gcacataacaagggctcaagatatgttagctgtgatcatcatagttatacgcttggtttagctataaattcttattttgaaactgcattcgtttcagtgtaagtgaaatatcaggaaacaatttgagcataatgtaaatgccaagtttactctctgcaattttatctgcaaaaagtattagatgaacccaggaaactgcactcagctgaattgagctatgtgggatccacaaaatccacacattcacaaacctgagacgcctaccagytagtgtagttcaccatgtgtgtgatgggccacacccatccacaaccatcgttataacttttgatcgatttcagataatctcctcaccattttgcaataatttatcaaccgcaacccttcagatacccacttccacaaacaaatttctatctttttttctatgagtgttcattgtcaaccttcagggtttgagacacactgtcaggaagaagtcctggaaagcgagcacagtaaacaggaaagacagaacttctgttggtcctcatttcaagatggtgcctgcatgtttcaaaggtcaccaagcagaacgccaacccactgaaaatattgcataatgcataagggcag

SEQ ID NO: 746318 - DNA, 615 bp, Homo sapiens
gcacataacaagggctcaagatatgttagctgtgatcatcatagttatacgcttggtttagctataaattcttattttgaaactgcattcgtttcagtgtaagtgaaatatcaggaaacaatttgagcataatgtaaatgccaagtttactctctgcaattttatctgcaaaaagtattagatgaacccaggaaactgcactcagctgaattgagctatgtgggatccacaaaatccacacattcacaaacctgagacgcctaccagctagtgtagttcaccatgtgtgtgatgggccacacccatccacaaccatcgttataacttttgatcgatttcagataatctcctcaccattttgcaataatttatcaaccgcaacmcttcagatacccacttccacaaacaaatttctatctttttttctatgagtgttcattgtcaaccttcagggtttgagacacactgtcaggaagaagtcctggaaagcgagcacagtaaacaggaaagacagaacttctgttggtcctcatttcaagatggtgcctgcatgtttcaaaggtcaccaagcagaacgccaacccactgaaaatattgcataatgcataagggcag

SEQ ID NO: 746319 - DNA, 664 bp, Homo sapiens
gcaggcatgtatctttataatattaatagaatgatttaggcccagcatgggggctcatgcttgtaatctcagcactttgggaggccaacacgggtgttttgcttgagcacaggagtttgagaccagcctgtgcaacatgacaaaatcccatctttacaaaaaaatacaaaaattacccagatgtggagacacatgcctatagtctcagctacttgggaggctgaggtgggaggattgcttcagcctgggagaccgaggttgcagcaagccaaaatcatgccactgcactcaagcctcggtgacagagccagaccctttctcaaaataataatagtaataataataataatagaacaatttctttttatttatttttttttttgcagttgcaagatttaatagagtgaaatagagtgaaaacagagctcccatacaaaggcaggggacccaaagggggttgccrttgccggctcgaatgcctgggtttatatcccgatccttgtccctcccgctgtgctcccaggcaatagatgattggctacttctttacctcctgtttttgcctaattagcattttagtgagctctctgattggttgggtgtgagctaagttgcaagccccatgtttaaaggtggatgtggtcaccttcccagctaggcttag

SEQ ID NO: 746320 - DNA, 645 bp, Homo sapiens
acagcagtatttagaatatattacggatataagtatattttccatctattttctttagcaagttacaacaacaccaacgagaatcagagagaggagaaaactaagttatcttttaatgccttcctcccattccacttggtagaaaatttgaagcatttttctctgaaagattaaaacaatcagttagtctgaagatgacaaaatcaactgtcagtataatacattattgctttatatttgtatacaaatattttttataaagwgaatctataatccttcttcaagtctattaatgtctatttttattttactttagagtctcaatacaactctcaccttgctttttttcttttacttacatataagatagaggtcctcagataaaatatggcttgaatttcaatttcaggtgcagagtaagaatgtgcaactactacatttagatccgtatcttgagttttgtgttctgtgctctaaacaattgaattaccattaacctctgcgtccctcactgaaaatagatattgaatcaggaaagtgtggacatttatcattgtgaaaaaatatgtgtaaggtaagcaattcagataacattagaaaactacaacaaaacaggtgtgcttattatttatagggtgcttttga

SEQ ID NO: 746321 - DNA, 645 bp, Homo sapiens
acagcagtatttagaatatattacggatataagtatattttccatctattttctttagcaagttacaacaacaccaacgagaatcagagagaggagaaaactaagttatcttttaatgccttcctcccattccacttggtagaaaatttgaagcatttttctctgaaagattaaaacaatcagttagtctgaagatgacaaaatcaactgtcagtataatacattattgctttatatttgtatacaaatattttttataaagtgaatctataatccttcttcaagtctattaaygtctatttttattttactttagagtctcaatacaactctcaccttgctttttttcttttacttacatataagatagaggtcctcagataaaatatggcttgaatttcaatttcaggtgcagagtaagaatgtgcaactactacatttagatccgtatcttgagttttgtgttctgtgctctaaacaattgaattaccattaacctctgcgtccctcactgaaaatagatattgaatcaggaaagtgtggacatttatcattgtgaaaaaatatgtgtaaggtaagcaattcagataacattagaaaactacaacaaaacaggtgtgcttattatttatagggtgcttttga

SEQ ID NO: 746322 - DNA, 623 bp, Homo sapiens
tagatccgtatcttgagttttgtgttctgtgctctaaacaattgaattaccattaacctctgcgtccctcactgaaaatagatattgaatcaggaaagtgtggacatttatcattgtgaaaaaatatgtgtaaggtaagcaattcagataacattagaaaactacaacaaaacaggtgtgcttattatttatagggtgcttttgagaacataaagaagggacagcccttgtccactgggaccatggttgaaggacaaaagaggaaacaggctaaataagcaaatcaaaaacacgagtctgaaggaaggcgagcttcccggatgagatattactgacattcagtttcatttatcttcttccttgagccatctgtcatgccttctcctagggggagaattttattaggggactgcattgaaaagatttggtgaaacataattctgaaaacaaatttgcaagcgagggattttgctgagaaaagcytaagagaaatatgtttttcacacatagggagcagcctacgaaaatttatagggagaaagggaatatcaagatctagagaaaaatgaagaaaataaaatatataaacaagagagaaaaaaacttactaagacaaggtaagg

SEQ ID NO: 746323 - DNA, 574 bp, Homo sapiens
agcctgtcctgtaaggtctacacagcaagaccttacacacatttcacacactgctgaattctttgatgcttctctcgactctccattttccagcttgtgctcctctttctgttttgttcttttgaccttgcaggctgtaagcaattcacatccagctatttgacattcagaccagacactttttttttttaawttatttattttttattgataattcttgggtgtttctcacagaggaggatttggcagggtcataggacaatagtggagggaaggtcagcagataaacaagtgaacaaaggtctctggttttcctaggcagaggaccctgcggccttccgcagtgtttgtgtccctgggtacttgagattagggcgtggtgatgactcttaagagcatgctgccttcaagcatctgtttaacaaagcacatcttgcaccgcccttaatccatttaaccctgagtggacacaacacatgtttcagagagcacagggttgggggtaaggtcacagatcaacaggatcccaaggcagaagaagttttcttagtacagaacaaaatgaaaagtctcc

SEQ ID NO: 746324 - DNA, 669 bp, Homo sapiens
  misc_feature 650: n = A,T,C or G
atgaggatccagtttcgttctcctgcacatggctagccagttatcccagcaccatttgttgaaaagggtgtgctttctccactttatgtttttgtttgctttgtcagggatcaggtggctgtaagtatttggctttatttctgggttgtctattctgttccattagtctatgtgcctatttttgtgctagcactatgctgtttttgtgactatggccttatagtatagtttgaaatcaggtaatgtgatgcttctagatttgttctttttgcttagtcttgctttggctatgcgggctcttttttggttctatatgaatttcagaattgctttttctaattctgtgaagaatgatggtagtatcgtwgtgaattgtgttgaatttgtagattgcttttggcagtatggtcattttcacaatattgattgtatccatgcatgagcatgggatgtgtttccatttgtttgtgtcatctatggtttctttcagcaatgttttgtagttttccttgtagaggtctttcacctccttggttaggtagattcgtaagtattttattttattttttgcaaccattgtgaaagggttgagttcctgatttgattctctgcttggttgctgttgatgtatagaagagctactaatttgngtacatttaatttgtatct

SEQ ID NO: 746325 - DNA, 574 bp, Homo sapiens
caataccataaggaggccatcatcatcctcattttgcacaggaaataaaatatgtatttgcccaaagtcatcctgttgttagtgagaaagctgggacccagtttcacccccatctggtgcagaaactgtgctcttgccaggacacaatatggcctttcccatgtgatggatagggtagagggaaaaaacrgcatgggaagctgaaaataaccgggttttccagagaagagaaggcatggagaagaatgactatctccatccagaatgagcaagagggcatggcctcatggactctgatagagaatgacttagaaaaccccaagcattctgtccttcttcccaatctaagtgtgatataagctggtgttacactgacctcactcaagttccccatgtcatgtattaggaaatgttctgctctctggcagcctctaggcagaaacctgatttgacctccctggcttcctaaccacccaagccttgtagctggccctggttctggggcccactgaattggagcatcaccttacctggctgggggcaggcatggagttggcaggtgctgaggaatgag

SEQ ID NO: 746326 - DNA, 594 bp, Homo sapiens
atgagatgctatatgggttgccctatttacacttcactgctgacattcctaaacaaaagatcagtttatacttcatctatcttcttctttctctccactcagaactaatggtcttttagaataggtgccacccctagatttcctagcacaccagtatcagcctggggattacatcctcctcaaaaactggaaagaaggaaaatttgaacmtgcttgggaaggacccgacctagtgcttctaaccatcaagactgcagtctgaacagcagaaagaggatggactcatcatacctgagtcaagaaggcgtcaccacctccagtcgtgggacattgttccagggaagagtcctaccaaactaaagctaagaaaaatttaacccttttatacctcctttatcccttccatacccaatgaccacttggatggtcttccaggcacctgggcatgagctgtatggtagttctcttctaaggccccagagcctggggtaatgaattctgctgaggtctctttctctgctattccctgaaatctgacaccctgcaagtcagcccccaagggccatccagcctccatctcacaatgccaatttt

SEQ ID NO: 746327 - DNA, 594 bp, Homo sapiens
atgagatgctatatgggttgccctatttacacttcactgctgacattcctaaacaaaagatcagtttatacttcatctatcttcttctttctctccactcagaactaatggtcttttagaataggtgccacccctagatttcctagcacaccagtatcagcctggggattacatcctcctcaaaaactggaaagaaggaaaatttgaacatgcttgggaaggacccgacctagtgcttctaaccatcaagactgcagtctgaacagcagaaagaggatggactcatcatacctgagtcaagaaggygtcaccacctccagtcgtgggacattgttccagggaagagtcctaccaaactaaagctaagaaaaatttaacccttttatacctcctttatcccttccatacccaatgaccacttggatggtcttccaggcacctgggcatgagctgtatggtagttctcttctaaggccccagagcctggggtaatgaattctgctgaggtctctttctctgctattccctgaaatctgacaccctgcaagtcagcccccaagggccatccagcctccatctcacaatgccaatttt

SEQ ID NO: 746328 - DNA, 635 bp, Homo sapiens
tccccatttacttattcctttcaccagaaatataacaccactttaaacttattattctattaagcctgcaattcaggtcagaaaattgctattttagtataaattcagagatcgactctcagaatttgaagctacacagtgtatttttacagtaatgtttgcaaatctgcaatatatgaatttacttattgacatatgctaatggaaaaagtgattgcatcagtaccctgaattttttacctttccctatattcttgacatttttcatgtaactctgcctttccatctgctttcttgttcttctgcctttaccacgagggcattccagtgatagccagatcaatactgaggtaaatgaaggagacaaacctacccagtgatcccacaaaaggccaatctggagctgatcatcagacaaatgagtgagtctaggygaatccagactaaactgtcaagctatagactcgtgagctgaatgaatacttactgatttaaggcacatgatttattgactataattgtagcaatagataattgatccacacaacttttttgagtttagctttaagcttgaatttaaaacatattgccaaactaggctacatgtaaattaaagttaaaacttcgattttata

SEQ ID NO: 746329 - DNA, 593 bp, Homo sapiens
cctgacagcctgctggtgcctgtcggtttgctcttacaccggtgcattactcttgacatacagctgttgtgtgttctcacacttgtgtgttctgtcaacattcagccacttgtatctgtgtccactaggatctcagggtttttacaggcacacgatggggtgtggtaggccagggtggtctcaagaaatgcaacatttgggtgcaaaggcaggagtgcctgccctcacctaggtccatgggcagaagcctggggrtggagccctcaccagggacccacccttctcctcccagcactttactgcccccttctgtatcactatgatacataaatattatgaaactgtgtaatacaattataagaaatgtaaacaaagaatattaactaggccaggagtggtggcttgtgtctgggtgaggcaggaggctgaggcagtaagacagtaagatcacttgaggctaggagttcaagaccaacctttgcaacataccaatagccctcttctgtacatttttttttttttaattattggcaaggtctatagtctcagctatgtggtaagccaagatgggaggatggcttgagcccaggatc

SEQ ID NO: 746330 - DNA, 527 bp, Homo sapiens
ttaccctgaacccatgagcccttcattctccctttaccaaaattctctaccatttattatgtacaggattgtttaacacatgtcttaaaaacacatcctgtgctatcagttcgaaatctccacctttgagagttaggcttgtcttattcatatttgcattgtttgcagtgcattgaatctagtggtggctcaagaaaatattatgttcaatttaaaaatmggtgttctatttctagttttgcagcatcttactgaacaccagcacacactgaaaatagatcacatatttccctggcaaacaatttacgatttgaattttcaatgagtccagcgttgatggacttgtgacaggacatgtgattatttggtggattcagaatgaacctattaatagcttttcagataattcatctaacgtggctgtaggagcttcacaaagtaataaagaagtcgagatttcagttaagagagtatcagacaatatgactcctgatggactgggcataccaacttctaggaagctttag

SEQ ID NO: 746331 - DNA, 527 bp, Homo sapiens
ttaccctgaacccatgagcccttcattctccctttaccaaaattctctaccatttattatgtacaggattgtttaacacatgtcttaaaaacacatcctgtgctatcagttcgaaatctccacctttgagagttaggcttgtcttattcatatttgcattgtttgcagtgcattgaatctagtggtggctcaagaaaatattatgttcaatttaaaaataggtgttctatttctagttttgcagcatcttactgaacaccagcacacactgaaaatagatcacatatttccctggcaaacaatttacgatttgaattttcaatgagtccagcgttgatggacttgtgacaggacrtgtgattatttggtggattcagaatgaacctattaatagcttttcagataattcatctaacgtggctgtaggagcttcacaaagtaataaagaagtcgagatttcagttaagagagtatcagacaatatgactcctgatggactgggcataccaacttctaggaagctttag

SEQ ID NO: 746332 - DNA, 612 bp, Homo sapiens
tgccttacttaagaagcaatacagtgctttctttttaaatttttaaatgtttcttttctatatttactattattatattttaaaaaacatgaaactgacaaatagattcatatcctgggtggtttgataaatgttacttatacattgtaatagagagattaaaaatatgacatttaatgagtagaaatggcaccaaataatgcaaagctttgagcgtagtttattgagataagtcatattatatcaacttcagcaaacacgggtttcttaaaatgaataatgacaatcytctgttgggaaaaccgttctgttcagtaacaaagcacaggttttgaaatcaagagcattgttttgaaaatatttgcaggagccagtcattagctcctatatgtgttatgatatggatacagggcataccttatgattttctatgtctcagtatgcattttttggttaaaataagattttctactttttagtatgaaagaaaactgaagcatccgaatatgggaaacctccaggacttacataagtgaatgaaagaaaccagcaggcctctgatttgtatttgtcactattcttatctagttggcattttatgttggtaatcac

SEQ ID NO: 746333 - DNA, 653 bp, Homo sapiens
gtgctttacatccacccttctcagaacacaagaccctccctagatccctgaggattgtgggcattcctagcacactccagagttttacttttttgttttgttggtgaggaggcagttatgcaaaggtgggagagaagtgagctcgggtaacaccaccaccatgataactgtcatgaaatttcatcaattctttcactgctttctgtttgctcacccctccccgactctctctgttgtactttcattgtaagagaagaagccatgtctctgttcccaccaccattcctgacctggagcgaacattcaacaaacgtttgtggactgaatgaatgatgggactttactccatttcatcacttcccattttccattctctatttttcctccttttttgctgatggttcactctttatttttttggaaagccagttctaagataaacagtagcaaaagcaatagctgaaataaagacaaaagamttagtttctttgaactgtttttattttacaatttgatattacattattaaattatgttactgtttcctaacacattttcctttgtgtaactcacttatcaccatttggctccttgtaggtgcataaaataattttctctttgattgtaatgaactagagtaagggtacaactgt

SEQ ID NO: 746334 - DNA, 629 bp, Homo sapiens
ttatatttatagttgagtatactttatatataaatttcttaactaaacttgttaaccccccactataattatgaactaaagtttctactaattcttccatattttatccatttcctaaagaaaatatgatctcaacaaactggacagagaagaaacatacctcaacacaatgaaaatcatacattgtagatccacagctgacatatgctgaatggggaaaagttgaatgctttctaagttctataacaagacaagaatacctattttcaccattttgttcaacataatactgaaagttttaacaagagcaactagtcaaaataaaaaaaattaagggcatgtaaattggaaaggaggaagtaaaattgcccccatttgcaaatgacatgatcatatgtatagaaaactctaaagactccagttaaaaaaaactattagagaaataataaatgaattcagtaaagctgcagaatacaaaatcagcwtaccaaagttagtggcatttctatgcactaatagtgaaccatttaaaaaaaaatcaagaaagtaacaatacgtacaaaaaaagaatatgcaaataggtgaaagatctttagaatgaaaactataaaccattgatgaaagaaact

SEQ ID NO: 746335 - DNA, 593 bp, Homo sapiens
gagattggttccttccatttagcatagtgttcacaagattcatcaatgttgtaacatgtatcagcacatttcttcttattggcaaaaaatagcacatcatatggatgtaacatatttgttttacctatttatcaatggawggacatttgtattgcttccatgtttttactatcataaataatgacactataaacattcacatgcaatttttgtgtggatatatgtgtttattactcttaggtatatatttggaggggaattactgtatcttatgtcactgcataaacatttgaggaacagctagactgctttctaaagcatagtagaatagaatattaaaaattagttaaggaacgcatgaagaaaaaaatggaagcagaagatgtagaacattaatgaaaactagaaaaaatgagaaaaaacaatttggagcaagaatagagaggagaactggataaaatgaagttttggttttcaagtaagagtgcactcactcttaaagttttggtggctgcactattttgcattcccaccatcagtgtataagaattccaactactctacatactgtcaatacttgtttttatctgtct

SEQ ID NO: 746336 - DNA, 512 bp, Homo sapiens
tctgggttttatcagaccctccaggtaaatcagatgtgcacttaagtttaagaaccactgtgtaagaagaagaacacaaccagaaccatggtgaagcagaaagggagaataataaatgctttaaaatatttttcctccacacatcctstcatctgctagtgcctcatcttggcaaaactaactgaaagtcataggcaagggagcccaggtgatgtcattcatatgcagcttcccagggcacagagcaaggcagaaaaatgcagagtttgaaaagggtaggagagcgactagggaataatcagtagacccgtcactcaaagtaacgtgcctttaaaactatattatttttgttagtcaaaattaatgttttcattaacaccctaaaattttgaaattctgggtgagtgaataagaggatttaagttttctcaaggtttctctggctgggcgcagtggctcaagcttgtaatcccagcactttgggaggctgaggttcgtgaatcacctgaggt

SEQ ID NO: 746337 - DNA, 546 bp, Homo sapiens
atttttccaacttttattttagattcagggagtatatatatgtacagatttgttagctgagtatgttgtgtgattatgaggtttgggatatgaatgattctgttacccaggtactgagcatagtccctaatagttaatttttcagctcttatccctctttcccctctagcgtcccccatttccccattttttattgttgtcacctttatgtctatgagtacccaatgtttagctcccatttataagtgagaatatgcagtatttcgttttaagtttctgcactaatttkttttgattaatggtctccagctacatccatgttgctgcaaaggacatgatttcattctttttttatgactggatagtattcgacagtgtgtatgtaccacattttcttaatctaattcaccattgattggcacctaggttgattccatctctttccaattgtgaatactgctttgatgaacatgcaagtgcatgtgtctttgtggtagaaagatttggatatacacacacactcagtaatgggattgataggtcaaa

SEQ ID NO: 746338 - DNA, 624 bp, Homo sapiens
aaaagaaaatcccattttctgaggagaaattcaagctggctgcagaaatttgcataagaaatgaggatcaaaattataattcccaagataatagggaaaatgtcttcagagcatgtcataggccttcatggcagttcctcccattacaggcccagaggcctaggaataaaaagtggtttctagggccggrcccttgtgctgtgtccccatgctgtgtgcagcctagggacctggtgccctgcatcccagctgctccagccatggctgaaaggggtcaatatagagatcgagccatggcttcagagggtgcaagtcccaagccttggcagcttccatgtggtgttgaacctgtgagtgaacagaagtcaagaactggggtttggaaacctctgcctaaatttcagaagacgtatggagatgtctggattcccaggcagaagttttctgtgggggcagggccctcatggagaacctctgttagggcagtgcagaagggaaatgttgggtcagagctcccacacatagtctctactggggtactgcctagtggagctgcgagaagagggccacagtcctccagaccccaaaatggtagatccactgacagcttgcagcgtgcacctg

SEQ ID NO: 746339 - DNA, 644 bp, Homo sapiens
catttgtagaaatgcttgtttcatgtctattttacctcactagactgtaagccttgggagagtagggtctgggcttattcatccatataccagttcctgacaaaaggatgtagatatatatcttgaataaatgattatttattgctttatttatgttcttatttctttgtacttaatactcttgtaaactttgctaaaacctttcaagaaacattttctcttcatttaataggtaaaaattaaggctgtgacaattgcatccctgttttaatgatacagtttagtattttcatcgactattttccccaagtactttcaccagatatccagttttatggtgcagggatggattaatacaatgaagtgatttttatcacacaatctcttgctgtgataatttttttccttttttattggtcctcatcttgaatccttttaattttcacagcagatagtggttgaatggggtagggaagataaaatttttcactattgrcaggattcaacaccaaacctataaaacacttccatttccagtggtgtggcttctctcttgttgtcttctggcatccccttgccacctggatactttagttgtactgttggagatgtctgtgttatttaactttttctagcacatacaa

SEQ ID NO: 746340 - DNA, 456 bp, Homo sapiens
atccatcttgagttgatttttgtgtaaggtgagagttgaggatccagtttcattcttatatatgtggcttgccaattatcccagcaccatttgttgaatagggtgctcttccctgctttatgtatttatttgctttgtagaagatcagctggctgtaagtatttggctttatttctgggttctctrttctgttccattggtctatgtgcctatttttacaccagtaccatgctgatttgatgactatagccttatagtatagtttgaagttggataatgtgatgcctccagatttgtttttttgtttgtttgtttgttttttgctgactcttgctttggctgtatgggctcttttttggttctatatgaattttacgattgctttttccaattctgtgaggaatgatggtggtattttgatgggaattgcattgaatttgtagattgcttttggcc

SEQ ID NO: 746341 - DNA, 458 bp, Homo sapiens
ttgaggatccagtttcattcttatatatgtggcttgccaattatcccagcaccatttgttgaatagggtgctcttccctgctttatgtatttatttgctttgtagaagatcagctggctgtaagtatttggctttatttctgggttctctgttctgttccattggtctatgtgcctatttttacaccagtaccatgctgatttgatgactatagccttatagtatagtttgaagttggataatgtgatgcctccagatttgtttttttgtttgtttgtttgttttttgctgactcttgctytggctgtatgggctcttttttggttctatatgaattttacgattgctttttccaattctgtgaggaatgatggtggtattttgatgggaattgcattgaatttgtagattgcttttggccacacggtcattttcacaataatgattctacatgaatt

SEQ ID NO: 746342 - DNA, 672 bp, Homo sapiens
gaggattccctctttctccatcttttgaaatagtgtcgataggattgatatcaattcttctttgaatgtctgatagaattcagctgtgaatgcatccatctggtcctggaatttttttgttggcaatttttttattaccatttctatctcactgcttgttattggtctgttcagaatttctatttcttcctggtttaatctaaaatagttgtatattcctaggaatttatccatctcctctaggttttctagtttgtgtgcataaaggtattcatagtagccttgaatgatcttttgtatttctgtggtatcagttgtaacatctcctgtttcatttctaacttagcttatttggatcttctctcttctyttcttaattaatctcactaatggtttatcaattttgtttatcttttcaaagaaccagctttttgtttcatttatcttctgtaatttttttgtttcaatttcatttagttctgctctgatcttggttatttattttcttctgttgagtttgggtttggtttgttcttgtttatctagttccttgaggtgtgatcttagattatctatttgtgctctctcagaccttctgctgtgggcattcaatgctaggaactttccttttggcaccacttttgctggatcccagaagttttgtcacgatta

SEQ ID NO: 746343 - DNA, 551 bp, Homo sapiens
aaaaaaaacacacacaaataacaatggaacttgacaaccggtaacagagaaaaggacaccattgtcagagaggattccatgtttcccagcttgggtaaagaatcatcataacttaagcagaagcagaggaatctagaaaaagtacattttggagactagatgactaaggaaatgtaaataaagctctaattctttacttttccttttggtctttccatcttgaaaacatgaaggccagtatgattatatgcaagacaataaacatccagtatctttttctttatwcaattgtaattttaaaactcacaataaaaagaaaaaactcataataaaaaggaaataaaggaaccaataatatagtattgatgccataatcatttgagctatactcacaaaagaagatagtgattctaagagcttcaaatggagtgatatggttggttgattttgtcaccatttttatggattgaaattatacagggtaatcttgaaaagatgcacaagtttcctgggagactcatctgtcaaaattcaaaagagaggatgggcaa

SEQ ID NO: 746344 - DNA, 619 bp, Homo sapiens
gaaattggaataaagctggtgattccagctgagtcatctgaaatagcataattatacctcaaaacaaaactattcctgggtattttgtcctttacacaaagaatgatatgctagaagacttaaataccaacagttcttattgcaaacactgcctcagatctatctgtggaayggtggtcatggtgaatgtgtctaccacccatgcctcttatctcccaaggttttaattccctttgtgggcctttggttatagttcccttattgtctgcttcctctctctgtccaagtgccttcctcccagccagtagggtttttaatgtcttccttaagctctgtggctaatgtttgtaaacatgtttccaaggaaagttcttttggaattcagagcaaaattacttttctataagaaatctgtttctttccaattaaaagtgttttattcacagaaaattgtgtctactgtgtcttgggacatttacatattgtaacacttttacattttattattttatgcgacatccactttttctccccaaagcaaaagatgatactgatctgaggaggaagaatggtagagcaacaagaatacttttagagaaagaaaataccacttttaaca

SEQ ID NO: 746345 - DNA, 483 bp, Homo sapiens
gcatcaaggattagtaggaggaatgggggaggcatctcaccaaggggctcataatgctgtgtagtgaagatgggatcattttgtccgtgggctttggacgagtcactttaccatacctttctttctttctttttctttttctttttttcagaaggagtcttgctctgtcacccgggctggagcgcagtgatgtgatcttggctcactgcaacctctgcctcccgggttcaagtgattctcccgcctcagcttcctgagtagctgggattacaggtgccsgccaccacacccagctgatttttgtatttttaatagagatggggtttcaccatgttggccaggctggtcttgaactcctaacctcaggcgatctgcccgcctcagcctcctaaagtgctgggattacaggcgtgagccaccatgcccggctcgctttacctttccatctctgagtttcctcatttggaaaatgggaataggaac

SEQ ID NO: 746346 - DNA, 605 bp, Homo sapiens
tttgatagcattttacacatggtagaagtgggatcaatcctctctaaatgctgctgatttattaaccatgtttatgatgtattttgaatattttgttgccatttcaacattgttcacagcatcttcaccaggagtcgtttccatgtcaaaaaatgaccctctttgcacatcaataagaaaaactttctttcaagttttatcctgrgattgcagcaagttagtcatatctttaggctccacttctaattctatttttcttgctatttctaccatacctgcagctattttctccactgaagttttgaagtcaaagtcttctatgagagtgagaatcaacttcttccaaactcctgttaaggttcatattttgccttcatctcatgcatcatgaatgttctgaatggcatctagattgataaattctttccaggaagctttcactttactttgcccagacccataagaaaaattgctgtcagtgccagctatagtcttattaaatatattttttaaataataagacttgaaagtcaaaaatactcattgattcatgggctgcagaataggtctggtgttagcaggcatgaaaacattaatctctttat

SEQ ID NO: 746347 - DNA, 605 bp, Homo sapiens
tttgatagcattttacacatggtagaagtgggatcaatcctctctaaatgctgctgatttattaaccatgtttatgatgtattttgaatattttgttgccatttcaacattgttcacagcatcttcaccaggagtcgtttccatgtcaaaaaatgaccctctttgcacatcaataagaaaaactttctttcaagttttatcctgggattgcagcaagttagtcatatctttaggctccacttctaattctatttttcttgctatttctaccataccygcagctattttctccactgaagttttgaagtcaaagtcttctatgagagtgagaatcaacttcttccaaactcctgttaaggttcatattttgccttcatctcatgcatcatgaatgttctgaatggcatctagattgataaattctttccaggaagctttcactttactttgcccagacccataagaaaaattgctgtcagtgccagctatagtcttattaaatatattttttaaataataagacttgaaagtcaaaaatactcattgattcatgggctgcagaataggtctggtgttagcaggcatgaaaacattaatctctttat

SEQ ID NO: 746348 - DNA, 533 bp, Homo sapiens
atgaggccttgtagatcattaataagattttggctttaacactttaggtaataaaaagctattcctttcttcaaaaaaaggattctgaagaaaggaattacaaaaatatgacttactttttaagaggaacattggatactgtattaaatatagactgaaagggaagagcagaagyggtatgaccagtaaagagtatattcaataatccaaacaagaagagattgtaacctagattgggagaagagcagtacaggtgatgagatatatccaacagtattgagtaaagcattagatgtgttgtgaaataaaaagaagaggatcaggaatgactccaggttcttttggcttaggcaattttgaagaaaaacttgccattaactgaaataagaaagactgaagcaggagaaggactgcggagcagagatcaagagctcaaattgcctgtgtgtgtgtgtgtgtgtgtgtgtgtgtgtgtgtgtgtgtagattaaaatgtttattacacatgcacatggggctttcctcaaattcagg

SEQ ID NO: 746349 - DNA, 500 bp, Homo sapiens
caggaaattgcctgggaggctggaaatagtgtctctttctgtaacagatagtagatttatttcctaaccagtatcattatatatagagaatgcctgctttccacccttgattatattcccaggttataaaaatatttatctttggaggagaggatgggcatgtttgatagaagacctcttattagattggaaagtttctaacctcagtgattgtcaacaataaagcagaccctcatgtgtacaaataaaactaagattgcctcagtattggccccaggagacctgggaraggtatagaacagatgcagacataaagctcacactactttgcattgagtaacaaactgtctaaatccactggagctaattattttcttaccaactgaaactatgggagtgtggtgagtgtcttagggagtacttgactgcttgatgctaaccaagccaaaagaccaaacctgaaaatatacaagctgtaaatttatctacaaatgccagta

SEQ ID NO: 746350 - DNA, 500 bp, Homo sapiens
caggaaattgcctgggaggctggaaatagtgtctctttctgtaacagatagtagatttatttcctaaccagtatcattatatatagagaatgcctgctttccacccttgattatattcccaggttataaaaatatttatctttggaggagaggatgggcatgtttgatagaagacctcttattagattggaaagtttctaacctcagtgattgtcaacaataaagcagaccctcatgtgtacaaataaaactaagattgcctcagtattggccccaggagacctgggaaaggtatagaacagatgcagacataaagctcacactactttgcattgagtaacaaactgtctaaatccaytggagctaattattttcttaccaactgaaactatgggagtgtggtgagtgtcttagggagtacttgactgcttgatgctaaccaagccaaaagaccaaacctgaaaatatacaagctgtaaatttatctacaaatgccagta

SEQ ID NO: 746351 - DNA, 561 bp, Homo sapiens
tatttgggtgtgtcacaagacatcgatttctctctcttgttggaggaggactcaattccaaagtttcaccttagcgtttggcttataataaagagtccatgcaaccaccgccgccccctcccccctccccacaagacacatttttgtcgcaaactcacttccaagcttcaggtcaaagcccttggaaggaaaagtggatctgagggatccagaggcagataataacggaagttaaaaggcactacgaaggtgagygtggctgattcctgctgatcaagccaatcccaagcttcctgtttcatgaataaaggccacgttagtatccatggcataaatgaggtctagttaatccaaggctactgacagcaggggaaacagggcatacgtgggtaagagcaaatgattcccaccccctaggccctcctgcttcatgggtgaatgaatatgatatatttaataatatcactaggaattatgggtggcttacattgtatccaatattgtactatatactttgaaaatattatctaatttcattttcacaataacctcataaagtat

SEQ ID NO: 746352 - DNA, 625 bp, Homo sapiens
ccctatatattaccatataccatttacattaatcaagtacaaatggattgaagacttaaatctaagacctcaaactatgaaactactaaaaaacaaaaaaaatcagaaaaactctccaggacattggtttttgcagaaatttattgagttaaccactcttgtgttgttgtgctgatgaagtattataatgagaagattgtccactttttttctaccatcttaattgtggctggattcacacttgtcagaggtgcaggtgcctctatatttctttctggatctctcacaaatggaattggtccatatagtaatgttgaaataggtgtattcatggggaaaaagaagggtagatattctgccttcttgctgatgtcatttctctatcaaagaattttttatcrtagtaataactgagagagcttatgtgaaacatttctacattcttattgccttgaacaaatacggggtatataaggctacagcaacagtacagttttagggaaattgaattatgaatagttgcagagaaattcagctatgccagccttaatcttattgagttgtttaatcactccaagcagctgccctctttagactttccattatttatttaaaaaagcataga

SEQ ID NO: 746353 - DNA, 625 bp, Homo sapiens
ccctatatattaccatataccatttacattaatcaagtacaaatggattgaagacttaaatctaagacctcaaactatgaaactactaaaaaacaaaaaaaatcagaaaaactctccaggacattggtttttgcagaaatttattgagttaaccactcttgtgttgttgtgctgatgaagtattataatgagaagattgtccactttttttctaccatcttaattgtggctggattcacacttgtcagaggtgcaggtgcctctatatttctttctggatctctcacaaatggaattggtccatatagtaatgttgaaataggtgtattcatggggaaaaagaagggtagatattctgccttcttgctgatgtcatttctctatcaaagaattttttatcatagtaataactgagagagcttatgtgaaacatttctacattcttattgccttgaacaaatacggkgtatataaggctacagcaacagtacagttttagggaaattgaattatgaatagttgcagagaaattcagctatgccagccttaatcttattgagttgtttaatcactccaagcagctgccctctttagactttccattatttatttaaaaaagcataga

SEQ ID NO: 746354 - DNA, 601 bp, Homo sapiens
agttaataggggaaggtatgtgaagggggagcaaaggtcacagacacagtggctcctttgggcactctgacctggaacccaaggatatgggtcttccattgcccactgaatgtggaccttcatgccttatgtcttgatagttcgatgggagaggcctcgatgatcctctgatcatcatacttctattacatttatcaaaaatgtaattcacaatgtttcaggactgatgccgttttctcactttgttgataattttgtccataaattctacccaataaatatttattgtgcacaaaaacctataaaatttcacaagtcyacttgttataatttaattaaattataaaaattggaatactgatctatgatactctaaatttttaaagaaaattttcctcatttagaagaataatttgatatgtaaatatgtgtggtttgcttaataattaaactaattttgtaaaatatagaactaaattctcatgttgaataatatgaaggtaaagaagaaaacactaattggcaaactaataactgacaaaacataatgtaatgcgaactgtaaaatattgagactttgaatcaatcaaaaagataacac

SEQ ID NO: 746355 - DNA, 526 bp, Homo sapiens
cctagagacttagagggctcagaagaaagatgtgggtaagcttggaacttcctagagacttgttgaatagcttacaccaaaatgctcatagtgatactgacaatgaagtccaggctgaggtggtctcagatggagttttggaacttattgggaacttgattaaaggtcactgttgctatgcaatgagactggcaacagttcatgcctcccctagagatctgtggaactttgaacttgagagatgatttagggtatctggcagaaaaaaatttctaagcrgcaaagtgttcaagaggaggcaaagcatacaattttggaaaatttgcagcctgatgatgcaatagaaaaataaaaatccattttctgagtagaaattcaagcctgctgcataaatttgcataagtaaagaagagccaaatgttaattgccaagacaatggagaaaatgtttccagggcatgtcagaggtcttcacagcagcacctcctatcacaggcctggagacctaggagggaaaatggttttct

SEQ ID NO: 746356 - DNA, 491 bp, Homo sapiens
catttttctcagtgtctcaaagtgatattgaccttattactttatgtttctcatctttatgtgaatttaattgtcccgaatttaaggcagatgctatattttctaattttatagtaactacttatgcatgtgtatgtgtgtatatgtgtgagtgtacgtgtgtgtctgtgtgtgtgtgtaatgaaaaatattaattmattctctgagattttatgggtgtttccctctaccacttttatctggatttcctctttaattcgactttattttccctgcaatgctaagtttttatttgtttgtttgtttgtttgtttgtttgagacggagtctagctctgtcgcccaggctggagtgcagtggctcgatctgggctcactgcaagctccgccttctgggttcccgccattctcctgcctcatcctcccaagtagctgggaccacaggcacctgccaccacgcctggctaattttttgtattttttagtagagac

SEQ ID NO: 746357 - DNA, 608 bp, Homo sapiens
tgttcaggaaagcatttttatatttattcttcatcgatctgtgggtaacctggtcacatgactgaattaatgaagtaacattttggggaaggtacatgaaattgatattaatttttatgaggatttcagctggaggatgagcagcagagttgtcaaggaataagaaaatcttgcagttgtcattcagtttagctttcctgcagtgagcacaagccactggttcaaaatattgtgaaaccraacagaaaacattttcttggtgatccaagcctttctgttagcataataatgaaccgataagaaatttatttcttgaaaacagcaagaaagaaagttttgcttatcaaagagagttaagttatacttaacgcatgcttgctgcattagaacattccaacagaattgttctgtctttgatatctttgattcctgtaggggatggcttatcaactgtagtcagtgtctttctggggcaataataccaaaacactgacatttcttcagccttatagacatgctctggcatcagatttttcttaacataggccttgaaaaatttgtcagcatatttctttgctgtttcatcagcacatgctttattatgcaaa

SEQ ID NO: 746358 - DNA, 615 bp, Homo sapiens
cactgattttgtagaatctgtgaaatgatatctgctagtgtgttgaggcccatggttaaaaaagtaatatcttcagataaaaactagaaagaagctttctgagaaactgctttgtgatgtgtgcattcatctcacagagtcaaacctttctttggattcagcagtgtggaaacattgttttagaatgtgcgaagaaatattaaggagctcattgaggccaatggtgaaaaaataaatatcccaggataaaaactagaagaaagctatttgagaaaccactttctgatttgcacaaccatctcactgagttaaacatttcttttcattcagcagttggaaaacaccgtttttgtggaattctgtrgagggttatctgggagtgcattgaggcctagggagaaaaattaaaaatcttcagataaaaaccagaaagaagcttcttcagaaactcctttgtcatgtgagcattcacctcacagagttattcctttctgtggattcagcagtttgcaagccctgttttcatccattctgcatatggacattttggagctcattgtggccattggtggaaaagcgaatgtctcatgataaaaactagaaggaagctatctg

SEQ ID NO: 746359 - DNA, 600 bp, Homo sapiens
gtgatgtgtgcattcatctcgaagagttaaacctttcttttcattcgacagtttggcaatactgtttttgtagaatctatgaagggatacttgggatcacattgaggcctgtggtgaaaaaggaaatatcttcagataaaaactagaaagaagctttctgagaaactgctttgtgatgtgtgccttcatctcacattgttaaacttttctttggactcaggagtttggagacgctgtttttgtagaatctgctaagggatatttgatggctcaatgaggccataagggacaaaacaaatatcccagtatataaactagaaggaagctatctgagaaaccactttgtgatgtgtgcrttcatctcatagagctaaacctttcttttctttcagcagtttggaaacactgtttttgtagaatctgaaaagagatatttgtgaacgtattgaggctgatggtgaaaagaggaaatatcttcagataataactagaaagaagctttctgaaaaacagctttgtgatgtgtgcattcataagacagagttaaaccattctttggattcagcagtttggaaagtctgtttttgttctttctgcaat

SEQ ID NO: 746360 - DNA, 604 bp, Homo sapiens
tttctccattggcctcaaatagctcccaaatgacaatttgcagagttgtgaaaaactgtgtcagcaaactgctgaatccaaagaaaggtttaattctgtgagatgaatgcacacattccaaagcagtttctctttaaaattgtttcttgtatttatctgaagatatttcccattcaccatagtcctcaaatcactaccaaatatctcttcacagattctaagaaaacagtgtttccaaactactgaatgaaaagaaaggtttaactctgtgagatgaatgcaaacatcacaaagtggcttctcagataacttctttctagtttttgtcctgggatattcaatttttctccattggcctcaatgaggacccaaatgtacattcaggatggrcaataagtgctaaatccaacgaaagttttaattccctgaggtgaaagcacacatcacaaatcagtttctcagaaagcttctctctggtttctttctgaagatattttctttttccccataggctccaatgtactccccaatatctcttcacagattctcccaaaacagtttccaaactactgcaaaaaaagaaaggtttaactgcgagatgact

SEQ ID NO: 746361 - DNA, 632 bp, Homo sapiens
ctcacgtgcctcaggctgcttcaaaagctgatcatcttgtctttggacatatggacattattccttttgtgtattttgaagtccgttgctgttttttttccttttttttttttaataatgtggacccttgcagtaacagtgacagtcacttttcaatatctttgtgaatttaactctggcaacaatttgatgaagttgacacgtggttctcattttataggtgaggaaactgacacttggagaggtagagtagctttatttacttcacacaagcttttgatgaaatcaagtctcaacctagaagtcttcctctaaggtatgactgtggcatattctttgtgtttctctgccagtgtcccaaaggggtccacatcccatctggactccgttttcttcttaatgacaggaaacttgcagaaagaggscttcggttggggagagcacttgctggcacttggccttccctgtcctccaccttccccttggcagggcttaggtgatttgagggagctggatcagcagtaggtcctgaccagcactcacctggaatgcttgttgttatgtgaagataacacccactcactttttgcagtgtgatttttttgttctaattattccctgggatttctctt

SEQ ID NO: 746362 - DNA, 709 bp, Homo sapiens
atttataaagttatatgtgggagcacataaaggtctatggtgaaaaaggaaatattttcagataaaaactagaaaggagttttctgagaaaatgctttgtgatgtgtgcattcatttcacagatttaaacatttctttgggttcagcagtttggaaacactgttgtagtagaatctgtgaagggatatttcaaagctcattgaggccaaagacaaaaaagcgaatatccagggaaaaaaactagacagaagttatctgagaaagtgcttcatgatatttacattcacctcggacagataaaccttacttttcattccacggtttttttaaacactgcttttgtacaatctgtgaagttatatttgggagcacattgtggyctgtggtgaaaaactaaacatctttacatgaaaactggaaagaaggtttctgaaaaactgctttgtgatgtgggcattcacttcacaaagtttaacatttatgtggattcatcagtttgcaaactctgtttttgtccattctgcaaatggacatttggagctcattgagcccaattccaaaaaagcgactatgccaggataaaaactagaaggaaggtatttgagaaaccactttgtgatttgtgcattcatctcagagtattaaacctttcctttcattcggcagtttggaaacactgttttgtcagaatccacaaagaaatatttgg

SEQ ID NO: 746363 - DNA, 709 bp, Homo sapiens
atttataaagttatatgtgggagcacataaaggtctatggtgaaaaaggaaatattttcagataaaaactagaaaggagttttctgagaaaatgctttgtgatgtgtgcattcatttcacagatttaaacatttctttgggttcagcagtttggaaacactgttgtagtagaatctgtgaagggatatttcaaagctcattgaggccaaagacaaaaaagcgaatatccagggaaaaaaactagacagaagttatctgagaaagtgcttcatgatatttacattcacctcggacagataaaccttacttttcattccacggtttttttaaacactgcttttgtacaatctgtgaagttatatttgggagcacattgtggtctgtggtgaaaaactaaacatctttacatgaaaactggaaagaaggtttctgaaaaactgctttgtgatgtgggcattcacttcacaaagtttaacatttatgtggattcatcagtttgcaaactctgtttttgtccattctgcaaatggacatttggagctcattgagcccaattccaaaaaagcgastatgccaggataaaaactagaaggaaggtatttgagaaaccactttgtgatttgtgcattcatctcagagtattaaacctttcctttcattcggcagtttggaaacactgttttgtcagaatccacaaagaaatatttgg

SEQ ID NO: 746364 - DNA, 551 bp, Homo sapiens
ttttaccctaaaatgatgatcctatagatttttgtggttgtaaattttcctttttgtaacatccaaaatttggggagctattgatatggattagaaatgcctacaggccccagtgctgagtgattccctttgacatttgaaccaagggtcaacaatatttcagagtaggtttgaaataaytttttttaaataaaaacattacaatttagtatattatatttaaagagaaaagcaggtagtagctattcctgtgcaaggtgtctggaggtatttggagatgcttactaccttggttgaggcttgatttttattcatttttattgcatttgtctgagttgtaaatcgccattgctttaaaggctgatttttaatgtgaaaggttttgtgtcctcggacaaatacaactatggttcactaggtcaagtttctaaagccctacactcagagttgaatggtgataggaagggttcacaactattatgtagagccgcacatctggtgtggctggagaatttcagaggccaggggtatgttgggaaacatttgcccac

SEQ ID NO: 746365 - DNA, 481 bp, Homo sapiens
aaatattttctcacagttgatccagtgatactacagttgaaataaaaccatatataaatgaaataccactttctactaaaatgtaagtgtagattttttaattattgttttaatgaggacaacaacgattccatgtattcagtggaacatcttataaatctttarcatgtttactctcatgtgcattctaagactcaccataaaactacctatcctaattacagatatgcatattcattttattacattatctaactagacattttatattgctaattttcctgcaaatattattaacttttaaaactataagcaattgtttgatttctcatttatgttgttctcctaaaaacgtacatacacatatcagtatacatattttaagtatattatttgaaatatgggctatgtagaccatatgtaatactccaggacacaacaagcaaaatgatgatactcaccatagcaatgtttggccatt

SEQ ID NO: 746366 - DNA, 616 bp, Homo sapiens
cattttatttgacccctttaatagtttaaaaatttttagttagttgcaacggttaaaattatagaaatgtgaaataaatattgagacttttaacttctttgggaaaaccgggaaatctgacaacactgggcttgcattcctccatgtcaccaatcagttggggtttgaatttccaactcctgcccttctgctaaagtcctgattatgattaatgtacaaaatgatgactgaatcatgtagtaagagctacatcagtcagaaaatactaagtgatatttgctaaccatatctaattgcaagccacacacacatagctatttcctaaattagaaaaattgattgttataaggaataaaaataaaggtgactgtagtatttaaagggtaactagaatttaaccagaaaatctatktaaagagatgagcccactccctacagttcagttacataaggaaccaatgtatttttcttttatgggaaaatactggttcaataactttgattcatatgttaaataaaaacaaatgacacaactttatttggaatattttttcccttaatttaaatatagcccttacgatctgcaaacattttagttagtctgcttttgacctga

SEQ ID NO: 746367 - DNA, 576 bp, Homo sapiens
aacatttgagtcaatggactaggagaagcagaatcacaccctcagtctggatgggcacaatctaatcagctgccagtgtggccagaagaaaagcaggcagaacgtggaaagaccagactggtttagtcttctggtctacatctttctcccatgctggatgttttctgcccttgaatattggactccaaagttcttcarctttgggattcaactggcttccttgctcctcagcttgcagagagcctattgtgcgacctcaccttgtgatcgtgtgagttaatacaccttaaaaaactcccctttatatatacatctatcctattttttctgtccctctagagaaccccaactaatacgcccgtagactggacatgtctaataggatacttgcatccagaatatgttaaaaaaattctgaaaacccaacaatataaaaacaaacagccaacttaaaaaatgggcaaacatttgaacaaacactttattagaaaagatctataaaagacaaataaggataaagtaatatgctcaacaatcattagttttcaagagaatgcaatataagataacaatgag

SEQ ID NO: 746368 - DNA, 610 bp, Homo sapiens
aagagtatgaaagtcaaatttcagtgtccataaataaagttttattggaacacgtcaagctcattcatttatgtattgtctagggctgcttttgcactagaacagcagagttgagtagttgcgacagagaccatatggctggcaaagcctaaaatatttattacctggccctttacagagtaagtttgccaacccctgatataaagcattatgacaagcgagtgagatgaaaactagttttatggtcgtctaaatagcaagtgcatggcaaaaataaattctggaccaattcaagttacacaaactgctcgtttttataatcagagaaggagctgcagtatatggcaataagaatttagtttcagaatcaaatcaatgwcagcagtgacctttgaaagttatttaattggctccattagcctccatttcatcatttataaaataaatacataagaatatatataagttgttatgatccagtttgtcaatctgttgctgaaataaaaataaaataaagagttgttatgaaacctaaacaaaataaaagcacttagcacagagcccagcacaaggacacaataaatatagccaacattgttgttacaagaaa

SEQ ID NO: 746369 - DNA, 579 bp, Homo sapiens
caacctgatgttctttctaaaatgcaattttcagccgggcacggaggctcacacctgtaatcccagtactttgggaggccaaagcaggcagatcacctaaggtcagttcaagaccagcctagccaacatggcaaaaccccgtctctactaaaaattcaaaaattagtcaggcatggtggcatgcgcctgtaatcccagctactagggaggctgaggcaggagaatcgcttgtacccgggaggcagaggttgcagtgagccaagattgtgccactgcactccagcctggatgacagagcgagacaatttwcaatcacatcaactccttccttaaaattgcagtgcctcccccaccccacatagcatagcaccctcaccacgtggccctgacctacttttcagcttctcctttcaccctcctccttttttttttcttttaagaacaaccctatgaagtagatataatctctttccacaaaggaggactttactgcttagaaaaggtgaccagccaactctaggtcaacaactaataaggatggagtcaagatacactgtatatttttttaaaagaaaagcc

SEQ ID NO: 746370 - DNA, 602 bp, Homo sapiens
agcgagactttgtctaaaataaaataaaataaaatggtgaacttaattgataaatgtgatgtgtgttctgactgctccacggactggcctttcccacttctctctccctctcctcaggcctccctaatccctaagacaacaatattgaaattaggccaatgaataaccctacaaytccctcttagtgttcaagaaaggacagtcacacatctctcactttaaagcaaaagctagaaatgatgaagcttagtaaggaagacctgttgagagctgagataggtggaaagtgaggcctcttttgccaaacagttattagcaaattgtgaatgcaaaagaaaagttcttgaaggaaattaaaagggctactccagtgaacctacaaatgataagaaagtaaaatagtgttattgctgacaggagaaagttttagttgcctggatagatcaaaccagccataacactctcttaagccaaagcctaatccagagcaaggccctaactctcttcaattctatgaagctgagagaagtgaggaagctgcagaagaaaagtttgaagctaacagaggtttgttcatgaggcttaagggaagaagccatctc

SEQ ID NO: 746371 - DNA, 534 bp, Homo sapiens
attgtcagtgttctgaagtccaggatccttccatttccaggcaagaattcacccttggtgtcacctcagtcaaggagtcaattggagaattggttaggacactctctggggacagctggtgctaggtgacacacactcttcacactcttctccattcactctcattatctcagagtgctaggagccaactcagtcagtatttaggcaacagtctgtatactcatttatcttttatagcaacacacacgactcaggagttgaccccaaagcccatgtatgtgcattctggctgggaagctgtgttggtggttcgggaaggcatctttttgcttctgtgtattcaaagccttaagaacacaacctgaagttccccrtcttccatgctcagcatgcccttcaggagtactggtgcttgtgtgggtacacttttgcctgtctgagaatggctctgtccctgcttccgggtggtaggtggacacaaagtgggctctgaggattccccatggaaggacacagtgggtcattggctgtggt

SEQ ID NO: 746372 - DNA, 569 bp, Homo sapiens
atagcttcttagagcatcattcatgttctttgggataacacacccctggaccaagcctactgcttgtccctccaaactcttgcacattaagcatgcaccccaccatggtattgagcaccctttccaccaagtgaccctgcagtgacctctaataactatgaatgccccaccagcttggctctgctcttctacccatggtgtctcccggctgcagccccagagactcagggaccccatctgaccagaggaatcaccatcacaaaccaccacaaactgttatcttccttttcagctgttttggctccagctgtcctcactccccatagtggctctgagactccccggggtacccacccagggaccggccaccggaatcggactatcttctccccaagccargcagaggcactggagaaaggtgctgggctgggacagatggagggtcagagagtcctcagtgtgacacagggacagtggccctgaggcctgtgggcaaaggctgagaggtgcaggctgtgagtggccctgccttgaggaggaaggtagtttggggttgtagcaggtgggga

SEQ ID NO: 746373 - DNA, 570 bp, Homo sapiens
aattgtccaacccactactggaattccattactgtgtacatttttacttggcattagtgtgtttagatggtaatgggaataagatgtactctattttttctttcagtgactgaatctgtatttttggttatactgtctagacagtttttaagttctaaactcatgaatatgtttttgtgattgggctggcattaaggggctgtttggtttggggtagctagccctgaccttggtcctggtgtgatcactcatcctgcctttgattaccattaatcttcatgtttttctggcaagatgaattttgggttctggctctctgggttttagtgtttarcctatgattctcagatctgtcaaaaaggttataggagaatggttatggttatttgaagttgtcgttttcctgttttcagggttgtaagttaattttaagtatagtagaaaattaaaaatttctcctgatctactcagttctttcttagaactttcattacttttctgattgctgggctgttcttctctacactgctttcattgcttacagtggtaaaacccagggataccttccca

SEQ ID NO: 746374 - DNA, 625 bp, Homo sapiens
acaaagttgcttgacaagggctagtgcggctcatgcctgtaatcccagcactttgggaggccaggcgggcagatcacttgaggtcagaagtttgagaccagtctgaccgacatggcaaaactctgtctctactaaaaatgcaaaattagccgggcaggcatggtagtgtgcactggtaatcaagctactcrggaggctgaggcaggagaatcactagatcctgggaggcaaaggttgtagtgagctgagatctccagcctgggtgacagaacaagactcttactcaaaaaacaacaaaacaaaacagaacaaaaaacagcaaaataaagttgcttgacagggattctcactggtttatagaaataacattgattagtgattggctataactgttgaactatagggtatgagttatggtgtccagtgtatggcattttatggctacttggcatcagtgagtctagagcccatgtagcaagtggcttcgagagctaagtatttagctcaagggggtggtgaaatgtaactgctgtcatatggtgccacatttcagtgcctcattgggcctgataattaaagggggctcacatccctctgataaaaagtttgtttgttttctttttcc

SEQ ID NO: 746375 - DNA, 591 bp, Homo sapiens
tcatgatagcaatggacagccctggctggcatttgctttttacccttgcccttcttcctttgtcttacccaaacagagttgggtttcttagacaagaagcagccatcttgtgaccatgaggctgaagaccataccctaagggggcagagcaagaagaaggattctggcactgtggagctgtggcagggccctggactgtctactgcctgagaaaaacaaacccttctttggttaaggcactggaactaattttctgtcgcctgcagcaaaacatgatcctaactgattgaagagccgaagctgtggaaactgatctgggttagagatagagatttgggtcagcctctagackgtaacagtgctagggtagatacaagaaaaccagacatccacctatgcacagatagaaattatgagttaaagaaaagagagggcttggcttataggcaatgcggaaaggaaggaattcctgttcacagggcaagcatctttagggtactttaaaaattgttgatgtttccataacctcattcaaaacaaaacaatcaaattagagctattcaattaatactcaacttcatcaaatttatt

SEQ ID NO: 746376 - DNA, 600 bp, Homo sapiens
aaccacacatccaccagaatgactaaaatttgaaaaattgacactaaatgttgacaaggatgtggatcaaatgctctgtgtgtaaaatggtacaaccactttgggaaaaggtctagcagtatctaataaaactaaacatacacatactctatgacccaattattccaatcctaagcatttacctatgagaaacgaaaatatatatccacaaaawgatctgcccaagaatgtttatagcagctttacttataattgtccacacctaaaaacagccatgtgtccatcaacaggaaaatgggttaataaactggtatattcatacagtggaatcctaccacatagcaatatggatgaatctcaaaaacatgctgaacaaaagaagccttacccgaaatagtaaatactagacaagtccatttctatgcagttctagaacaggcaaacctaatctatggtagggaaaaaaaaaaaatcagaacagtggttgtgctggaaagaaggggtaagatggaggtggggattaacagagaaggggcatgagggaactttcctggctgatggtaaagttccacatcttgatagaggttgttacataggtgt

SEQ ID NO: 746377 - DNA, 537 bp, Homo sapiens
actccctcattccccttgccaaatctcacactaatcccagattctttgtctggaaaatcagaattaggactcaaataaaaatgatacttttttggatacttatagtgaaggtagtgtaaagctaaagctgaggcttccatatttaggccaagtatataaggaatgagagaaagctgttctatagaggaagaagaaaaaggcagatgaggcagatagtagcagacattaaacaccatggtagtgtcagaggcatttgaaccagggcaactccatcttgaatastggctggataaaatgaggctgaaatctgctgagctgcattctcaggagattaggcattcataatcacggaacaagacaggaggtcagcaggatgggattttggctgataaagaagccagccaaaatccatcaaaaccaagatggcaaaaaaagtgacctctggccctggcactgctaatcatatgctaattataatgcattagcatgcgaaaagacactcccaccagtgccacgacagtttgcaaatgtcatggc

SEQ ID NO: 746378 - DNA, 542 bp, Homo sapiens
ggtacacattggttcagtccagaagggtgggacatctttatcgggggtggcagggagggcttacaggtcataggtgaatttaaagattttctgattgacaattggttgaaagagttgaggttttcctaaagagttgaagtagacagaaagaaatgcttaagataaggggggttgggcagagtgcagtagctcacgcctgtaatcccagcactttgtggggctggggcagggtcgcaggtggggatcacttaaggtcaggagttcgagactagcctggccaacatggtgaaacctcgtctctactaaaaatacaaaaatcagctgggtttggtggtgtgtgcccctaatcctagctacttgggagactgaggcacgagaatcacttgaacccacgaggcygaggttgcagtgagccaaaattgcaccactgcactccaacctgggtgacagagcgagacttcatctcgaaataaaaataaaaataagggtattggaagccaataacaagttcttgttatgtttttatcatatagatgaagtcc

SEQ ID NO: 746379 - DNA, 576 bp, Homo sapiens
ttagatttggaatcactgaaacaaaataaggtttttaagttttggatacaaaaacaattttttaggaacaatttttaaaaattttcttctacttggctttaaagagatcaaggacatttacaataaaacatgactaactgtctgaagacaagaaatcagattttacagttcatatccaattcacctgaaaccattactttacttaaaagtatataaaaaagcatacatatcaccatggaaagtaaaattstattaagaaataagatcagaaaaacaatgaaatattaacaagtatacttcattagtaatgaaaggttaggaagtatacttcattagtctccttcaaaatatttgtccaatctggataaataggaacgagtatgatcacctgccttcaacactcagtattccactataaacctgttaagatacagctaggcatgaaagtcattgctgtttgcttttcataagcaccccacaaaagatctgtcactcaaggagttatacacccagtcctcatagtgagggcagttatctggatgccatttgccttgtgtgacatgaaccagaaataag

SEQ ID NO: 746380 - DNA, 554 bp, Homo sapiens
caggggacagtgcgagattccatctcaaaaaaaaaaaaaaaaaaaaaacaaccaataaggatatgagggaaaaaataagaatgcagactatgaccaatgaatctaactatattacaaatgaaccatataaccaaactgaaggagacagggaagaaataagctgacataaataactgaaaaacagttttttgactggatacactaaggctaaagacaaaaagaaccatatacaacactgtactccsattgctcaatttgtttcccacaggagtatggtttagtaatgagtttgagactgctacttcatttgtaaactagggctaaacaaataagcaaatatagataatgagagctgaatttctcactgttagagaataaaataatcaagaaagggaaaaggctagaattcacttctggtactggatcaaagtcaaagtattagtatgggccaggtgtggtggctcacacctataatcccagcattttggaaggcagagacaggtggatcacttgagcccaggagttcgagaccagcctgggcaccagctgaaacc

SEQ ID NO: 746381 - DNA, 585 bp, Homo sapiens
attctgaaaaaggcaaactatataaacagtaaaaaagatcagtggttgtgaggacagagggagagataaaaaggtggagcacaaggaatttttaggacagtgaaactattctgtattagaccgtaagggcagataaatggcattatatatttgtcgaaactatacaacactaaaagtaaatcctaatgtaaactatggacttcatttaataataatgtatcactactggttcatcaattgtagtaaaagtaccaagctactgcaagacaataatagaggaatctttaaatggggaaagagagagtatatgggaactctctgtactatctgctcaattttttatacagtaaaacygtcagaagtgtttaaaccaaagagattccatcttgtatataggctgggtgaaacgaggctgagacccactgggctgcattcccagacggttagggattctaagtcacaggataagataggaggtcagcacaagatacagatcataaagaccttgctgataaaacgggttgcagtaaagaagccggctaaaacccaccaataccaagatggtgacaagagtgacttctggtt

SEQ ID NO: 746382 - DNA, 584 bp, Homo sapiens
ctctcacagaacattaggttgctacttatgtttcagaatttgcatcactgattcctgtagccatcatattttatgttctatcatgtctctgttatttaaaaatgtgtgtttgtatgttatgtttatacacaccactagaatatcatgacatcatagtgggatactaaaagtttgtggtaaaacagatgcagattatggtccctgcccccaggtgtctaactaaaaatgtaagatgatagtagcattgataaatctagtatgtaatacaaaatcaagaagcagaatagctcatctcagtccaatatatgttgattcttctcttacaaaagagtaaacaaaactaacaggtccatttcatgtcctctaccaaaacatagatggccagattcattccacgttgcctttcttcaacaccagcccctccctgaytccctcacatcttttctactttagtaggcaattccatgataagaacattctggacctgtttgccctctcatcctttccctgccttccccttgctctgcatcaagggacaccaacctctgcggctatgtttcccaggctcagtggcttcaaataga

SEQ ID NO: 746383 - DNA, 555 bp, Homo sapiens
atgatgatacacataatttccttactacatatgaaataacctttctgacttttgtgactttaaaaaaaaatctctgtaaagactagaaattattccatcactcacagagggcaaagccaaaaatataactgccagggagaagcccaagaatgtgccactttttaattcactctgatacatctgttgccttgctgtatttaggatgtaatatatttatttaaaataaatatttccttgacaaagttggttatagttaaggaatctctgctttaataaagctcaagaagaggaaatactgctttttacttgatattttttctaattagactttactggtttttagaatttttwaaaatatttttaaaaatgtttacaaagaattatttcagtcatttgtgaaacagaaaaaaatcaagcaacatacaacattttgcattatttttctctggctaactagtacaaaatacaaaactagtaacaataaatatagcttcccaagtttcccacttcatttcaaatgaatcaatgacttagagtagagtcctttaaactttg

SEQ ID NO: 746384 - DNA, 628 bp, Homo sapiens
aacttaaaagttgaaggaaaaacaaaaaacaaaaacaaaagagaaatgtatcttaatccagctaaatattaaatcactttagaaggtatcagcaaaagtttggtgtttgaatattgtattaggccattcttgcattcctataaagaaatacttgagattgggtgatttataaagaaaataggcttaattggctcatggttctgcaggctctacaggaagcatggtaccaacatctgctaagcttctggggaggcctcaggaaattaagaatcatagcagaagctagcaggggaagcagctgcatcaggaagcaaaagcaggagcaagacagagtgtgtggagtggggaggtgacacacacttttaaacaaccagtctcgtgtgaacttgaagtgagagctcacttatcaccaaggagatagtccaagscattcatgagggatcatcccccatcatccaaacacctcccacccggccccatcttcaacactggagaatacaattcaacatgagatttgggtgaggacaaatatccaaactatatcaaatacgttcagttaggagaaatgcaatgtaattaattagactctcttgaattctaataggatccaaggaacataattaggcct

SEQ ID NO: 746385 - DNA, 560 bp, Homo sapiens
ctgctttcctttgttggaaatcaatgattggcaatcaatgaaggctctggagaaactgccaaaaagtcattcttgttggactgaggcccctcagcacacccagccctgtcccatccccctctccctgaagctctaccaccaatcaaggatgtctgcgaatgccaggaatgaaatgcaagatgcttattttaattgtcccaatagcccactcctggaagaacttctgagatcctgccttttcctaactctaactggctgcgttacctagtcaactctaccctgcctcctcactcatgkggtgagtaggaaatctcaagactcagccctctacccctttcacgcctcttggaaatgtgctgcaacccactcgttttccttcctttgcatttgtgatttttctaaaaatttacaaaatggtcttttgagtgaagagtgtgtttgacgccaatgtgccttgccaagccagagcaaggttctctgacccacagtgagctcattggtccccaccccaaggacataagcatggaagtctcagagttactcctttggccaaggccaac

SEQ ID NO: 746386 - DNA, 502 bp, Homo sapiens
tagaaagctttataaaaatctcatcttcttttttagaattcttgactttaaattatgaagctgtctcttcaggtgaatcactgaaagaaattttgacttaagttgaatgaacaggtattcccacacagcaaatgtagccttcaaaggaatggataaagatggaagaaattaagaaggagaaatagaracttttgtttctcagcctattgagtacttggaaccaaagacctacatataaattttattttatttttaattaattttaaccaaaattgccacaaattattagtggctaccacagacaatgcacaacactataatatagcttcacttatttatccatctaatccctcacttaatctaccctacactgagccaaacaggactttttactgttcccagagcatagctaatgctttcttgcccctgtgatttcattaaatgtttcctttacctgacaataccttttcctgataatactcaccttaaggccggctgtact

SEQ ID NO: 746387 - DNA, 502 bp, Homo sapiens
gatttggctccttcttactcctttatgtttcctaattgatatagattggatatctgtcccctccaaatctcatgttgaaatttattctccaacattagagttggggccaaatggaaggtgtggtcatgggggcagatccctcatgaatggcttggtacatccccacagtaacgaataagttctcgctctatcagttcatacaaaagctggctgtttaaaagaatgtagcaccttctctctttctcactccctctctcgctatgtgatatgccagctctccttccccttctgctataattggaagttacctgaagccctcaccagaagcagatgctagtgccatggttcttgcacaccctgcagaactgtgagccaaataaawtacccagcctcaggtattcttctataggaacccaaacagactaacacaccagtctttaaaaatctgtagatggcacccatttttcttcagttaccaatataaaaaacactgcatttgcat

SEQ ID NO: 746388 - DNA, 617 bp, Homo sapiens
tttcataatgtgcttttattggcaggaagattaatggacatcaggtgtttataacactcttttctcttagttgtgcttaaaattttctttataaaagatattaaaagaaagctaacaaaatattatttatatagagagagcatattaaattgttcttagcaccatctacactaacgagtctttggacagataactatcagcctgatttgaagttgaaatgtattgattattaatattgtggaaaagtctgtgttttcatagcttcaaaccattttagcacaagttggaaggatttacaacattgtctccatctcttaccatctcatctgatcaaactttgttcactyctttctcacccagatatctcatcctgttactttaatgctcaaatttcagaaagagcagagcaaacctctcaaagtttgaacccataactattctaactcacagctctattgacggctgggttaactctggaaaaatttgtcactcatcttctttaatcttgtcatccatctacaaccaacactagcaacgttctcccattttaatggtctctcatacatttccagaactgataatatttctaggaaatgtgcagcaatgcctctcctaat

SEQ ID NO: 746389 - DNA, 657 bp, Homo sapiens
actcagaatgtaaccgtatttggagatatggtctttacagaggtaattaagatagaatgaggttattatggtgttctaatccaatatgactactgtccttataaaaaaaggaaatttgaatacagatatgtatagagggaagacaatgtgaaggcaggaagaagacagacaatgacaagtcaaaaagaaaggcctggaactggtccttccctcataaccctcagaaggaaccaaccctgccaaaaccttgatctcaaagttctagcctcccattctgtgaaagaatacatttcagttttttaatccacccacagtctatggtacactttgttatggcagcccttgcaaatgaatatgccayacaagtcatccgtttaaagtgtctaattcagtagttttaggatattcacaaataggtgcaaccatcaccattagtcaattttagaacgttttcatcactcaagagaaaactctgtgcctttagctatcaacatcctatcaccccatcctccccagcactaatctagtttattttctttctagatttgcctattctggatgtttcatataaatggaatcatataacgtgtggtgtattcttggctttcttcattagcgtgattttaagattcctcattgttgtcctatgtattgttc

SEQ ID NO: 746390 - DNA, 657 bp, Homo sapiens
actcagaatgtaaccgtatttggagatatggtctttacagaggtaattaagatagaatgaggttattatggtgttctaatccaatatgactactgtccttataaaaaaaggaaatttgaatacagatatgtatagagggaagacaatgtgaaggcaggaagaagacagacaatgacaagtcaaaaagaaaggcctggaactggtccttccctcataaccctcagaaggaaccaaccctgccaaaaccttgatctcaaagttctagcctcccattctgtgaaagaatacatttcagttttttaatccacccacagtctatggtacactttgttatggcagcccttgcaaatgaatatgccatacaagtcatccgtttaaagtgtctaattcagtagttttaggatattcacaaataggtgcaaccatcaccattagtcaattttagaacgttttcatcactcaagagaaaactctgtgmctttagctatcaacatcctatcaccccatcctccccagcactaatctagtttattttctttctagatttgcctattctggatgtttcatataaatggaatcatataacgtgtggtgtattcttggctttcttcattagcgtgattttaagattcctcattgttgtcctatgtattgttc

SEQ ID NO: 746391 - DNA, 651 bp, Homo sapiens
aaattacagagtgtcacacggagtctccaatcacaatcataattacactgcgaggcatgacaggaggtggagagatggcacgtgcagagacaaggccagcacacatgatggagcggaagccagtgtggagcacaaccgcgtacacagaagggttaaaacccgaaggacagttcaactcagtagcaaactaaaaataaatagataatactttaaaaaaaaaaacccacacccacacaaaacacggaaagataaggacaaaaaatcaacaccactcaagatgaaaaatgagcagcctccagattaatgcttaaaagaaagaaacaagaatgcaactggagaataccaaggcagggcaaaccccaaacytagagcttaaagaagtgggtggcattctggttagaagggacaggcaatttactcccactcattctgtcaggattcctgagagcatggatgtatccacgcaaccctctgccatgcaaaacacatatggtggaatttgaataattacaaaacaagtcacacaattgatcactacaccaaagaaatataatttaaaagctcaaaagtaaaatatgtattattaatttctaagtttaagcttacagcttggaaattcaaatgacaaaaaggcctatgaagtgttctgtg

SEQ ID NO: 746392 - DNA, 529 bp, Homo sapiens
ttttactttcttgatgatattctttgaaacacaaaattttttatttaaagaagtctaatttatttttattgttgttgttgcttatatcttgagtgttgtatgtaagaagggtttgcctacaccaaagtcacaaagatttactcctatattttctcctaagagttttatagttttagctcttaaatttagatctctggtccgttttaataaatttttataaatggtatgaggaagggtccaactttgttcttttacacgtaggtacccagcagttccagcatcaatttttgaaaagattattctttctctcattgaattgtcttgactcccttattgaaaatcaattgaccataattataagggkttatatctggattctcgattctgaactattgatttataagtctatctttatgccagcaccacactgtcttaattactatagttctgtagtacattttaaaatcaggaagtggggatcctataactttttcctttttttcaagattattttggctattctggatgc

SEQ ID NO: 746393 - DNA, 601 bp, Homo sapiens
accaacttaagaccatcttggcaatgtaataataacaaggctccctccctgaaattgctgaaatgctggcagtctgcatgtgcacatacgctgggaaaggcatggataagcagtcacccatcttattggaagcctgggatagtacggagttaattctagaactgtcatgattttcatttatgtatgtaaaactttaataatcctcaataattcactgagtggatatatcattcaacatatctttattgaatgcatgctgtgcgccaagaactcattttagaagctgagaatccatcagtgagcaaaatagataaaattccttgcaatcatagagtatccatttcatcayggatggggagaggatgtagacaaacaacaaactaaataagtaaaggacatagtatgagaggatgacaagagctgtggtgaaaacataaagccagcaaggggcacagggaacagggatgtgttggagtgtgtatggaataggtgctatgcttcccctcctcctttggtcacaactgacagccagactgtttcaccattaaaaaaaatgtataggtttgtgtcactccacactccataagtatatttgagcttc

SEQ ID NO: 746394 - DNA, 633 bp, Homo sapiens
ttctgaatacttgcttttccttttaaaaattccacagataattctcccatttctcctgtcaccccaatcctcttccattaaactttcttctccctgcacctgtccccaccttctccctctgtgttgttacccagaggaagacattagggttttatgccaccaactctgcaaactctcactcaccacctttagacgggacgccgggcatactttcggcgatgctgctcgtccactcgctccaggtaccaagtacctgggaaaaggctgtttgtgtcaccaggtggggagaaattcactgtggaatgaggagaagaggcagtactcacaaagarttatatgagtttttggaagagaaaatagtaatgaagatgtctgccccttcacagtgaagctctcttggctgggctgtaaggggctgcaaggtcacccttagtccaccaaatagaacactggacccacagaacaagaggggcagccatcttgaatctagcacttaaggccttaataaaaggctattaagacttttattataagagtacaacattttcctacagtaaacatagccttcctccattgaaatcttcatcccatccttttgccaatagttcctactttgagacgtaattcccagct

SEQ ID NO: 746395 - DNA, 570 bp, Homo sapiens
cctgtaggtctcatttaatttgaaggtggctggttgaccctaagctctttctcagtacatcacgccttccagtagaactgaaccaaaactctaagacaccctgtttatgctcccttgggaatttagggcccttaccatgtatagcttctctggggtggtttctgatgctcatcaattctctgacatcaactgggtatgttaccagtggaagatatcctggttatcggtggcaaattcatatgtgtctgcagcaacctcaattcttgcctcctcagaagaaagaaytcaactgaggggcataaggcagaaaaaagactgaggcaagtttcattgtaggagtggaagtttattaaaaagctttagagcaggaaaggaaagtgctttcggaagggacgcaagtgggcactgagaaggtcaagtgcctggtttaaccatcatcctaggactttataggctggcaaactctggcgtcttgcgccccctttccatgattcttcccttagggtgtgttgcctgcatgcacagtgccctccttacccttgggaattgagcacatgcagtgtgtttagg

SEQ ID NO: 746396 - DNA, 587 bp, Homo sapiens
catgcttcctgttaagcataactatgagtcaattaaccctcttttcctcataaatcatccagtctcaggtagttctttatagtagtgtgaaagtggactattacagtaaattggtaccaggagtgggacactgctataaagatacctgaaaatgtggaagagactttggaacttggtaagaggcagaggttggaacagtttggagggctcaaaaaaagacaagaagatgtgggaaagtttggaacttcctagagacttgttgaataattttgaccaaaatgctgatagtaatatggataatgaagtccaggctgaggtggtctcagatggagatgaggaccttgttaggaattggaataaaggtgacccttgctatgttttagcaaagagactgcccctgccctagagatctgtggaattttgaacttaagagaaaagatttagggcrtctggtggaagaaatttctaagcattcaagaggtgacttgactgctgttaaaagcattcagttttatgtattcacaaagatatggtttggaattggaacttatatttaaaagggaaacagagcataaaagttccaaaaa

SEQ ID NO: 746397 - DNA, 621 bp, Homo sapiens
agactatataaactctagccctgggctgtagggaatttggtcatggctgcttacagtgtcctttcatgagatacttctttatcctggcagatgcttttgttgctgtctgatctgtgtccagtttattcctaccaagatggccactgtctaggagatccctggctagtaaaaaagttagatttgggtgtgtcagtcaggtgagccatgtaagaggcagcacaacaaaatgcatgaagtagcagaagcagcgtattactcacaggtcctagagggaggagggcagcacaccaataggaattgagagccacctggtacaaaaaagcccaactagtatttaaaatggatgccgagacaacataaaatgacaakaattcactaccatcccttacaaactatgatttgtaaatattttctcccattacctaagctatctttttactttcttgatgatattctttgaaacacaaaattttttatttaaagaagtctaatttatttttattgttgttgttgcttatatcttgagtgttgtatgtaagaagggtttgcctacaccaaagtcacaaagatttactcctatattttctcctaagagttttatagttttagctcttaaattta

SEQ ID NO: 746398 - DNA, 606 bp, Homo sapiens
aataaacccctgtcaaacaaacaactatgaaaaccaggaagtacctcatacagaaatgttgacattaaccatggaataatcagaaagaaccttgaggtcatgtttatcactttcttaatttatagatgagtttgtgcattacaagagaggttgtattagtctgttttcacaccgctaataaggaaatacccaggactgggtaatttataaaggaaagaggtttaatggactcacaattcacatggctgtggaggactcacaatcatggcagaacgtgaatgaggagcaaagtcacaccttacgtgggagcagccaagaggcttgtgcagggggactcccatttataaaaccatcagatatcgtgagacttattcagtaccatgagaacagtatgggggagactggccycataattcaattatctccacctggtcccacccttgacaaatggggattattacaattcaaggtgagatttggattgggacacagccaaaccatatcagaggtagattgatttgtcagagctttcaattatgcttagtggctaagtgttgaccaaagttcaggtctccagaattgtttcattatggctcaccatttgtg

SEQ ID NO: 746399 - DNA, 615 bp, Homo sapiens
tgtaagttatgcattggttatactgccagctgtcacttactatgaatagccacagggcaattataccttctttctaattcttattttatatatttgtaaaattataatagttaacaaatatccatggtgggctgttacatgcagtaaatgttacagtacaaataaaatactatgttgttcagtaaaggtttacttatgctactattcatattttaaattttagtatctctttgtcccaggacrttttttaaagagagcatggttggttgaacctgaaaacaataggatatctgattaaggcaggggccagctcttagtgtgtcaggaacatcaacgtccatcagtctttcctattgctgatcagtggtggcccacgaccactccacatttttaataagtttgaggtgtcagtcgttcatccccagaaggcagccagatgctcctctaactttcagtgccatagatgtctttacattttaaatacagggtgttatgtctcattaattatgggtttaataatcacttcctattgaagtcatagacaactaattctgctaataagtttaaattggataagtgtttagtgaacctcagcattttacagttggcatggtt

SEQ ID NO: 746400 - DNA, 629 bp, Homo sapiens
ttctaataatgattaacatctgttttgccaatccctttagctgtcgaagagtcaaaatctgtagatgtcccttgagaccacttcacatcctgaaagtatatggacctgtgatttactgagttttccctactttccctcaaaaaaatgcgcaagacaaaaaagaatgtttaagatttgattacttcccataatgagcaactttaaaatattgatgtgaagatacaatcagacatttttgcttgtcctctattatttttacttgcacatatttaacattaaataaggcacaatatttccttactgcctttcttttcccttatcttggtagcataaaatatattgcattaacatttagactcatgcatataataaacactcaggggtggtctgacatgtggtaatgcctttgtacaaacacagtctaacttacaatgattcttttatacaaacacacacacaraaacagagtaacgcatcattgcatgattccagtcacatccatatatatagttaaacatatgtagctctttaacagagtatagcactctttccttcctgttctatctcatcgttattactcttgttttgtcaatgtctttctcatcatttactctcacatttttgacatt

SEQ ID NO: 746401 - DNA, 618 bp, Homo sapiens
ccagaactgtctcacaagttaaaacttcagtgtacacacaatttagtagccaaaaccttgagctttggcataagaagttcctggattcaaatattaactctgataccgactagctatgtgactaatgataagttacgcagcttctccctgagcctacttctctgaggataaacagcattcctatgtcacaaggctttaacaaggtaagctagcattatgttttggagaaatagataaaataaatgtgtgaaacacactgcttggcacacaataaaatactyaatcatattaattatttttttaaattaacacaattgtgtacatcatttatttcattttatacttataattaaagttgaagagtgtctgatatggtttggctgtgtccccacccaaatcttatcttgaattgtagttcccataatccccacatatcaagagagggacctggtgggaggtgtgagttaattaaacctctttcctttataaattacccagtcttgggccgttctttatagcagcatgagaatggactaatacagtaaattggtaccacagagagtacagtactactataaagatacccagaaatgtggaagtgactatgaaacttggtaa

SEQ ID NO: 746402 - DNA, 634 bp, Homo sapiens
agcataagattaactaatgaattacgtgacttcaagagcaaggatactttcaaaggtgtgtggagagataaaaaatggagacccattcaatctctgtatttttctttaggcaagtcaaagctttggtgtttttttttgtttatctcttttttgttgttgttgtttgtttgttttgtctgaccttcttacatgggaggggagaggccagatggtgccagatggggttgtaacagtgttacacaaaacccagcctctggggacacccccacacatatcccacatcatgagacagccaccagacttttttcaaagggtccatcccattctccacttgagtgycacagctgaaagggattagtgacatcttagggaagaggaattttggattgtgaagggtgtttttttgctccacttttttatttcccccttcactagttaaatctaagggacacttaaacttagagcctgctattatttttccttgaccactgtgtgaccttcatttcctggagctgattcagatgaagaattctagaacagcattagagtttgttgatcttttaccctctcctgcctcattacaaatgctgtgaaatttatcttgggttatctttttccaatgtataaagccttt

SEQ ID NO: 746403 - DNA, 632 bp, Homo sapiens
cataaatgcaaatatcaagacagtggttatttttgaagggaggcaattagtaatttaatttcaaaaaggcataaatagaactttaaagtcaacagttatatttttaactggatggcttgttttacaatgatttttataactttaatgcattttatatatttaccatggtatctccttcttatttataaatatataattaaaagcaaaagaaggagaaagaagtagtaagaaaaaaatcaagtatcaagttgcccttatacttgttatattgccctatttatctatttttctttgttgaccctctgtgaatcttaattcatttatttctctaaactatctttaatttatttttatcactttatgccattacaatgtaatatcttttatttctgattttagagattacagaagaatttargtagattagctagtctttggttgcaaaataatgatatagggaatcaatctgaccattaatacactttgtttagcccataaagtgtttaaaaatgaagtggggtgttatcagaataaacatatatcctttagttagctgtgaacccacaccctattgtcttgggccagtcggctttgctcatttacttttctctgataatggttggttatgtata

SEQ ID NO: 746404 - DNA, 629 bp, Homo sapiens
cactcacaccccatctcaatccgtgctgctgatggtagctgtgtgcacaagcagtggccctgatgccttaaggaaggcggccttgacagctgtggctccggcaggagaggagtctagtggagcaggtggggctgggagaccccctccccggatctggcttatgaatccccttggtcttcgctgcagccccctgctcagggccacgctcttgaccccacgcttctccgtcccctgctccctgctcccatctctgagaagccctgtacatggtgcccgtgtgcgtctggcagcttcccaggacctgctgcaattcccattctcacaacaagcccttatggtcttagaggcagctgggtgccccatggaacccattcacatgccaggtttagaaaataccctgtaggccagactgccstgtggtgccaggtgctggtggcagctgccctctgacctcagtgccttcttgtgctcccctccccagccacccgaggagagacacctgtgcgggatccactgtgtgttggaaactccctccacactccgcccgtgcctcattgagtgatgacgggagctcagcaaaacagctttccagactgttcagtgggacctttctttgaggggcaggtcag

SEQ ID NO: 746405 - DNA, 467 bp, Homo sapiens
caatatatattatctttacaaaaattacctagactactgtgtttctgaaaaataaatcttacaatttattttacttccatgatggtattaaacttgaatggttagcatatcagccagtagtgtgtctggggctggacaacagagagtgtttggggtccattcctgaagggtgtgtgtgtgctcagagctggcatcatccacctattctgactcctrccctctgctaagtcctcacagctgtgaacttccaaacccctgggacaacacagctccactcctgctcattcccctgatccccaaaggcacagggccctgaccctgacccaaacacagagtgggatcaaaaagctgagaggttgtcacttgcataggtggatttttttcctcaaagagtataaagagagggagaaagattgggagaagctctgcggtagctgtaggcacagaaggcaggaatcaggccaatc

SEQ ID NO: 746406 - DNA, 467 bp, Homo sapiens
caatatatattatctttacaaaaattacctagactactgtgtttctgaaaaataaatcttacaatttattttacttccatgatggtattaaacttgaatggttagcatatcagccagtagtgtgtctggggctggacaacagagagtgtttggggtccattcctgaagggtgtgtgtgtgctcagagctggcatcatccacctattctgactcctaccctctgctaagtcctcacagctgtgaacttccaaacccctgggacaacacagctccactcctgctcattcccctgatccccaaaggcacagggccctgaycctgacccaaacacagagtgggatcaaaaagctgagaggttgtcacttgcataggtggatttttttcctcaaagagtataaagagagggagaaagattgggagaagctctgcggtagctgtaggcacagaaggcaggaatcaggccaatc

SEQ ID NO: 746407 - DNA, 643 bp, Homo sapiens
aatgcccctcatagggggctcccctagtaaaaatccttggatgtttttccatcttggtatctgcttctagcaggactttgatggagtttaggatgtgccttcccaaaatacagcaacttggcatactgaatattttaagctgaaggaatttgagaaatggcatgggcaggcaggattttctgaccttcccctgtagtaggtataagaccctcctgtgagaggtactccccctatacaggaaggaaaggcatatccttatttccaaagatgaacgcttgccaagagggatctgaacacacaggcccgctgttccgccattttattacacttggctcatactctcatacttcttttgtcttatcattatttctccatgactaatcaaaatttttttctctctctmtatataaacatatatatataatatatgtgtgtgtgtgtgtgtgtgagagagagagagagagagaaagacagagagacagagagagacagagaaagaaagagagagggaaagagaggagctgtatcatgggtatttttgttgatgtctgaattagaaacaagcatgcacactatcaacattgtttgggaaagttgtagccggtgcagtaagacacataacaatagggttgtctagggcaat

SEQ ID NO: 746408 - DNA, 605 bp, Homo sapiens
ttactcctcatgtcttacatgatattaattttttcttaagggcaatctttaaagatgtaaaaagaaaaataattttttttaattttttggtcagccaccaatcccctccagtctatagactatagtctttaaagtataaagtagtcctcaggtttccatggtagcaaactgtatttccagaacccatcattcattcatcctttccacaaatatcgggtgcagcatatgctatgttctgggcactacagctctggggacacggtcacatgctggacaaaatccctatactcatgagcacacattctaatggcagaaatacacaaattttaataaacaaatatatggtatatttgcacatcgtgacaaaaacatggctaggcaaggagataaaaacatgtttgagctgtccacaggatagggagggatakggagaagggaagatttctaaggaatgtcacattgagcaaaatctggatgaaatgaagaaggaccaagactccagattctctaatagaattcatcacccatcactctgtacctcatgtttctatcccactttttatctttattcattcattcattcttgaatgcctaccacatccctg

SEQ ID NO: 746409 - DNA, 611 bp, Homo sapiens
gtggtgacatccctttctgaaccatgtggactgaagttcaggtacatcagagtgctggagaaggggaattgaggactgcattcagaagaaaggggattagataccgggccggcaagaaaactaaggcaccattactgttcccattggccaggcttggttggtagtggctgtaacaaacaacccccacatctcagtaaaatacaraataaacggtttttttttttccttccctttgccacggtccagtgcaggtggggccgccttccacaagccttcctcagtgtggtgactcaggtgtggtcctgctgtactggagtccttcacttccagggcatcaataggaggaaaagagtataaaacaggccgttatagcgacactcatgtggtgtagagaattcctgcacacttcccattaactggaacccagttcctgttcttgatcttaccagaagagatactgggaaacttcgtgttcttatgtgcccagaaagaaagtgaatgtggtttggggagcacacagcattgttatggccatagccaggctgtttggatacataattggatgacaagcagctggtactaaaccaatataaagttaacgctgggtattt

SEQ ID NO: 746410 - DNA, 497 bp, Homo sapiens
ttttattggaacacaaccatgcttacttgtttacgtattgtctatggctactttcacactacattggcagagatgaggagtagcaacagagaccatatggcctacaccgaaaatacttactgtttgaccctttccagaaaaatttgctgacccctggtctagaacgtggaagcagcatgaaatgaagaggaatttaaggagacagcattgtttttagaattttctttacgttgtctacaggtaagagcaaarcggcctcacagtggaggtgttgatcttgtggaaagcgggtggaaaaagttgtgcttccatcaaccagtgcatggtgctgtgtcagctccacccctcatttgtggttcttaaagtctgctgttattttatgccacctgcataacctgatttgcatcttaaattaatatctaactaccacttggacttttttcagaataaggagaatggcttttatgaagccatctgtagatgaaaaataaatagca

SEQ ID NO: 746411 - DNA, 513 bp, Homo sapiens
aacatactaattttaatgacagatgaatttgagaaatacatcttttgaaaactttctttcttttagaaaacttgacaactttcttatgatctttctcttagatcatattagtgtttaagacaattaaattgaatatgttgctccctaattcctccactcactgttctatatatttctccacatataaaactcactgtattatcctcatgaaaactttatagactatattaagatctatgttagagttaccttaattttctctccaactactttctctctccacaactcataactaaagcacttctcataagtaatggcatacactgaaagtcccaaattaagaaraaagaaaaagatcaacactggctaaacacaactgaattgcattttagagccacaaatttaaaacattatgacaacacatagcatggctgctaaagggccccaggatcagagaatctggcaagtcatatatcacagggtgttgaagaaaacatttttaaaagaaacaca

SEQ ID NO: 746412 - DNA, 562 bp, Homo sapiens
aaactttgctgctgccaaactgttggtgcctctccggcctctaaacggggtctccaaggacttggccttcccctcaggtcactactcttccttggtgcctactcaagacaagtgaggggcacaagcttcttggctagaagactcatccttgtcaatgtggaagagaaaaaaaaaatgacctaaaaaaataaatgggaatgacaacctctaataatttktgcagtccagttgaggagaaaatgagtacacactgcataactaaggttacaaacaagtaacgactgaaatcttcatgttactgctttgcagccaataaaatatgttttatagatgcctcaggagttcaatgttcattcctctttaccgcgaaggtcagcatggcaagaggaaaatgctctagcattcagaaagtacacattcacgcaaaggtcatgacgtgccaacccagatgtcagcccaccctcgggcggagcactggagcatcaccagatggttcacatcctccccgcataaatcacccttacaaacagacacctgtctggcaagtgccgatttataatct

SEQ ID NO: 746413 - DNA, 580 bp, Homo sapiens
aagtcgtaataataataaagcaaagctaggttttctggattattgtggcagaactgttcttgctgtcactaatacagagggataacatgctagaataaatgtggggactgaaactgaggacctaagtcacaaagtatcctggacctttactgttaacccggttctttaaatcatagagagctattatataaatttatacacattctctcatttaacagggtattctagatgttggtatattaaaataaagaaaataaagaccttttttatttgaaatattcaaataatttataatatattttattaatgtttgtatattgtgtataaatgtaataaataccatgtttatataatgttatatgtatattaataattgtattcaaatagaaacatttgagtaaaaatgmtggcagtatagacatagtcattaatagaaagtattaataaatgttgggtcccgagcactgcacctcatttaaacgtttcctcttaatggcttcgggcgttgtcacccgtgcgtgcctgggaactgttctcaggttccctggggtggctggagcggctcctgccgctgtggaag

SEQ ID NO: 746414 - DNA, 379 bp, Homo sapiens
ataaaagatggcatttcaaatcagtaggggtgggaggtagagtgttggcagctaggggtcatctggagaaaaacataagccagaggtagatagaggcgtcatagccgcattcaaggcaggtcagagatttaaatataaaaragaccccaaggcaaatttgatagcctcatactggggaggctttgtaagtttgtttccaaatccagaagccatttatgagaaaagattcagaaatatgaaagattgctaagtataaaaatgacagtttttacatttcatgaaacaaccataaagttgaaaaactgtggaaaaatggaaattatatcagcgataaaaggttaatttctttaatataaaaatacttccggcctggcacggt

SEQ ID NO: 746415 - DNA, 632 bp, Homo sapiens
ctaggagccagctaatctctcaggacgagcacatgttaactaagttcatgaggcaggtgtatgaaactgtgatgccagtttattcatttgcattacaaatgcagttttcacgggaacttgctccctgctggcagagcctctctcctgcctggaggacaagaaatactcaaagccaatttcctaagccgattaccctgagcaaggtcaaggtgagcatcactcacgtttcttcaatgattctcgttgttgtaagcttccctaccccaacagctctaacaatgcaataaaccctaaactaacatgaaaaagactgacagtgccaagtgctggtgaggaagtgaatcagctggagctggcacacgctgctgggggagtgcagattggcaaaaggacttcgagaaactgtgtggcagtatctataaagctgaacaaatgcctatctatgacaagcaaaccagttcctacatttctggctaacaaaaatgtcacatgttcaccaaagaacatggactagaacgttcacagcagcttcatttgtgatagccaaatgctgggaaytgccaaaagcccatcagcaggagaatggaaaaatataacaaaatactattcatcagcgaagcaccaaaatgata

SEQ ID NO: 746416 - DNA, 587 bp, Homo sapiens
ggatttgttggatgatattgaagctgggagaaaatggacactctctgtgtagcatcttggggacactaagtgtcacttggtggaccctagtttcctccacggggtggatggggtctcaagccccctccagctacgccattttctgcatttgcagagtcagattttctctcctgagaatccgttcggacagcatgtgttttagggttcttttactccacttggggtttttgcaacacaacaaaacatacaaatgagcttcttgttcattttgttgtcaccagaacctaagtattgaatggcagccttaattgkaaaagggcacgattagaagaaagggagagagtgtgtgtttgtgcatgtgttcttgtcctgtgtgtgtgtttgtgagtgtgtgtgtgaatgaaggtgaaaaaggggaggggacccaaccaacccctagtttttctgaaagcctgttgatttattttcttcctcccctgtggatatatttctcccccaaaggaattatgtagctcatgatttcagattttggctcagtggtgctttctggagataaaacgcagccgttgctttattcatcacagatt

SEQ ID NO: 746417 - DNA, 587 bp, Homo sapiens
ggatttgttggatgatattgaagctgggagaaaatggacactctctgtgtagcatcttggggacactaagtgtcacttggtggaccctagtttcctccacggggtggatggggtctcaagccccctccagctacgccattttctgcatttgcagagtcagattttctctcctgagaatccgttcggacagcatgtgttttagggttcttttactccacttggggtttttgcaacacaacaaaacatacaaatgagcttcttgttcattttgttgtcaccagaacctaagtattgaatggcagccttaattggaaaagggcacrattagaagaaagggagagagtgtgtgtttgtgcatgtgttcttgtcctgtgtgtgtgtttgtgagtgtgtgtgtgaatgaaggtgaaaaaggggaggggacccaaccaacccctagtttttctgaaagcctgttgatttattttcttcctcccctgtggatatatttctcccccaaaggaattatgtagctcatgatttcagattttggctcagtggtgctttctggagataaaacgcagccgttgctttattcatcacagatt

SEQ ID NO: 746418 - DNA, 582 bp, Homo sapiens
tctttgtcagggaaattgaatttagaagttgaggtttgatgagctactctagatctttgcacttagcatcaagtaaggagatggaaaatattcctggaagcatgaatttaaagcaaatagaattcttctcttctcactctcgattgtgctctcgctctcttctttctgccctcccctcccgtctgtttaggattaaggagttgtacagtcctaacgtgaatacaggcgccctttctgaagccgtgttaccttgtayttgtagagcgcttgcaggctttgcacaagctgtccttcagagggtttcagggcaggggccaggggaggaggggtgctacagaaagctcttatgtaatgtggtaaacaaacagcaaacggcgtttcattttccattagccagagaggcattttatttccactagaaatgggagcagacgtgaaagcaattagtgttagtgggtttatagtgacgtccctggagccagcaaaatcctggggccagatgtctgtactttactggttccttgttccgagaacatttgtgggttctttccacccctgcccatctccacctcctgccaaaag

SEQ ID NO: 746419 - DNA, 582 bp, Homo sapiens
tctttgtcagggaaattgaatttagaagttgaggtttgatgagctactctagatctttgcacttagcatcaagtaaggagatggaaaatattcctggaagcatgaatttaaagcaaatagaattcttctcttctcactctcgattgtgctctcgctctcttctttctgccctcccctcccgtctgtttaggattaaggagttgtacagtcctaacgtgaatacaggcgccctttctgaagccgtgttaccttgtatttgtagagcgcttgcaggctttgcacaagctgtccttcagagggtttcagggcaggggccasgggaggaggggtgctacagaaagctcttatgtaatgtggtaaacaaacagcaaacggcgtttcattttccattagccagagaggcattttatttccactagaaatgggagcagacgtgaaagcaattagtgttagtgggtttatagtgacgtccctggagccagcaaaatcctggggccagatgtctgtactttactggttccttgttccgagaacatttgtgggttctttccacccctgcccatctccacctcctgccaaaag

SEQ ID NO: 746420 - DNA, 567 bp, Homo sapiens
aaaaaccatgtctttacagtgaactaaaaatatcaagagacgcacttacctccccgcacagagggggtcactagggagacctgaactaggatggctcaattggagcctctcactgtttggcccagtgggtctccgtttttctgcccagctgctggacagcctgaaacatgcctgcctttccttactgtggccggttcctggattttaaaattgggtatgattgaaataaggtctgtctgggtgtgcatgttacacgcaagttaaatttccctgttcgwgttttgtcctacaaaaggcagtcagccctgtgtgttctttctggtcttcttattttaaaaaaataattgtaactaaatttttgatggaaaaggaacatgtgccaatagaggggaaaggcagccaggacaaaagggtctacagtgaccggtggctgttctccgtgtcccagccccaaagacccttcctcagcaccaactcctggagtctaacaatgagcgtgttatttcaggtacttttctaggaagaaagaggggatttgtcctgcctgctttggggctgtcatcacca

SEQ ID NO: 746421 - DNA, 616 bp, Homo sapiens
gtctaattaagtctgaagaacttcttattgataccctttgaaggtctaagcttttggctaatgtcttcccctctccacccctcacaattccccaggattgtattttgagcattatcatgcttgtttattttgcattctggattagggctggcagtggtcacagatgtgttcgtttaacrtttttcttttcctacaaagagcggatatcacctaaatctgaggagttggcagtgcctgcttccttcccgacccccatctgcttcagggtggggtatgttgcttttggccagtggaggtcaggccaaataagatttagtcttatgtgatgactgtgatgtgtgtataaattacacagagaccaaaatgcctctctgagccctttaggagactaagtggttctgggtctggggaaaacaaaggatcaaaggaaaggagagtggcagggaatgagaaagggatttatttcatggaagccaagagtcagggaagaagaaaaacaactcagctggacctggagaaacagccaactggagggcaagaaaaaaaaaaaaagaatgacacagatttgttagcaagtcagataaaacagacgctaggcaaaaagacttgggagtca

SEQ ID NO: 746422 - DNA, 641 bp, Homo sapiens
cggtgagccactgaggccagcagagggcagaggtgtggcaggcagcccaccctctcctgtcccagctcttggcatggagaaccacctacctttcgggttagcctcctcttgatctctctcttctcctcctgttcctcttgttcattccgagctaaaaaaaatatttaagatgtttttttatttcagtaaacagtgttgtgtacaggtgcatcctttggaccttggcaggctctaggccaagcatctcattttaataaagggaagagagtactcctgtcccctcccccagctgcccttctccttatggggattgctttccaaactacctgcgttgtttcaaattgctactgagcaggctgaccttgtcattttgccttctttacatcacrtggggtttcaggtctccaggcagagatgctgggttgagaaatgtggctacaaggcaggaaggtaggttttttttttttttttgacacggtctcgttctgtctcccaggctaaagtgcagtggcacaatcatagcttactgtagcctggaactcctgggctcaagtgattctcctacttcggcctcccaagtagctaggactacacatgcacgccaccacacctgactaattttaaaaatgttttgttgagat

SEQ ID NO: 746423 - DNA, 597 bp, Homo sapiens
aggttggaagagttcttaatgggcaggaaagctagccccctgggatactagccactgcactgagcaacatgactgcagtagaatccttagcaggccagaagtttagatagatagacagatgatagatagatagatagatagatagatagatagatagatagatagatagatataacaaaaggctaaaagcacgagaaatatctcaccacagcaaaaagctaaaataaaccrtcccatctccatagtatggaagattatgcagccattaaaataataatgtaggccaacttgggtaatcatgacacacaggccaattcttgcacattttctgtttgtgtcaataaagttttattggaatacagccacaccattttttttaactattgtctgtggctgcttttaccatacaatggccaacttgagcagttgtgacagagactatctaggcaacaaatcctaaaatatttgctatcttgctctttacaaaaaaaactttttttggctctgggtaagaaatgtatacttgacactaagatattctcatgagttagtactaagtgaaaaatgaagttataaaactatatatgctaagctcat

SEQ ID NO: 746424 - DNA, 615 bp, Homo sapiens
tctctttttggtattttagtcttcaaatgcgattatttttgtggatgattttatgagaaattatgtttaataacatataatattttttaaagaaataattggtttatttcagaactgctaaaattgtaccatgtggctgggcatggtggctcatgcctgtaatcccagcactttgggaggccgaggtggttggatcacctraggtcaggatttcgagatcagcctggcaaacatggtgaaaccccatctctgctaaaaataaaaaataaaaaaaaaatagccaggagtggtggcaggcacctgtaatcccagctagtcgggaggctgggccagaagaatcacttgaaaccaggatgcggaggttacaccgagctgagatcgtgccacggcactccagcctgggtgacagagtgagactccatctcaaaaaaaaaaaaaaaaaaaaaaaagtaccatgtactacataaatatattatatatttttattttttagaaaaagaagagaaaacaaaaaatacagtctacttattacaacaggtgtgaaaatttgagattaatacaattctaaaggatgctttaaagtgattttttgatcattttaaggatatcagaaat

SEQ ID NO: 746425 - DNA, 597 bp, Homo sapiens
tgtgaatagtaacgggcaaagtcacactgcaaacccagtaagtttaatttcaaaattacacccttaaccgctatgtgatatatcacttcccttgttctgcacctttaggcattttaattaattatagcaatgaaaattgtgccataagctgtatctgaagtaatagaagatattctgagcaatgcaattaacattaaagttagctcctttgcatttgttttctataactattataacaaagtctcacaaactcaatggcttaaaacaacacaaatttattctcttacatttctgtagttttgaagtcaaactcagatcccactaggctaaaatcaagttgtgagtaagtccacatttcttcgggakgctctaggggacaatctgatttatttccttttccggcttctagaggctgcccacattccttgggtcatggccccattttacctccaaagccagccatggtgtatttctctctgcttttcttccatatttacattttcccctgacttctgttcccatatgtgattattatattgggctcacccaagtgattcaggataatctcgctacttaatggcagctgattattttcat

SEQ ID NO: 746426 - DNA, 544 bp, Homo sapiens
tgcaggacccacagccagaccaggcgcaagcaagcaagtgagagacctggaagccccagatggggtgttacagtgctcctttagttccaccttctgcagtccgatagatggtggtgtattagcagcttagttggcccctagcctcatctcatgggttggctgccctctgccagtgaggacaagggcctatatgacagccttttctgggtacccatattcagtgggtcctgagctcttgtctggygtccaagaagaatgaggtcacatggacagttgaagggttgtgaaggcgaagaattttattgactgatgaaaatggctgtcagcggagaggggacctgcagagggtatgacaagggcagattgtcttctctgaagtcaggttgtctcttcaccgaagtcaggctttctcttccctgaaatcaggctgtctctccctctaccgactgagcctggggtcttcataggactcagaatggggattgcatgctgattggtttttgaatatgcaaaaaagcttaaagcaaagacacaactctaaagt

SEQ ID NO: 746427 - DNA, 550 bp, Homo sapiens
taaaatgtgctgtggggctcaaactagagaagaaggcccaggaaagcttttggtaaagttggttgaatgtgaaataaaccagagaagagagataggattttgacaggtggagaggggatggtattccaagatgagaaagccatcaaatgaagctgtatgctctgacattcagaaaatgttcaggaaactgttaattattctgttttattaaagcgctatacatttctgggggatgaagtcatgatttgactttttgtgagtgtcaatatgaggaatctctcaattatgaaaggtaacatttgaagtttttgagcaggggaatggtttgaggagtggcagccatattasgatacactaaaccaaaaagaagtaaggggcaggaagctagttttgagattgttttattggtataaataagaaataacaagggcctgaaataactgaaatctccagctactccctaaaatcaaaagatcaaatgtaatgtccagtctcttagaacactatgtaagtgtcctaaaaccaaaatggtgactgacttggagggatg

SEQ ID NO: 746428 - DNA, 619 bp, Homo sapiens
ctgagaacgtcttgttccttacagagggagcgatccatctctcacagactgtaatgtacccattaccacttaacacagcatatagatatatgcatatacggatagattatatttatttattacaaataaactgtagtttcacatctctcaaaaatggacccagttttcacatggatgttcaggttctgaatgtacaagaaaaggtcaatgtgcttatttaattcgtccatgcaaagcttatacgtgtatcactaagtactttaaaaaatagaatggtctccttttgagcaaatctgtttagactyaggattagtaaaacagtatgaaataatgagatacactgatagaaattaggaagtgacatactgatgattctgggtatgtaaagggtgaggggtacaatcttcccttaagacctgccaggaaaggagagacttggaaccaggagtggcagggccacccaagctggaggaggtgggtctgctcagtcctatgcagcgcaggctcagagcaccaccgaagacctttctgccaaagatctcatcctacccatgagaaccatcatactccagagactaaaaaacgccagtcccagctggagacggggaaggaggtccat

SEQ ID NO: 746429 - DNA, 604 bp, Homo sapiens
agaacccacctggtgtcctggctacactcatccctaaggaaagaagggctccatggccaaggaaggcatttgattttgcagaccacaaagcagcagactacaaaaatcccagtgggtgaactccctaccccaaatcccaggtctgccccagacarggaaggccatgcagatgaacctgggtcttgcaggacaatgtattagggtcaacttgacgcaagctggctataattctacgatgtctcagtgggtgacggagaccccagaagcccaggctgtggcctcagtatgctgtgtcattctcaggaggctgaactgcaagttctttagatccggctgtgctagaaagacctgtgtatttatagcagaggggttgcttggctgagttgcaaccacgttttggggatcagggcaggatgcctcacagcaataaggcagaaactggaaagggaggctcagctttggagctggtttccccagccagtgcggcacctaacagagtgtaaaaccccgctgatccggtgttactgcaacttcacgctccaacagcatcaaacccaggacctgacggcagcaggatcccgacttctcccagcctggcaggagg

SEQ ID NO: 746430 - DNA, 549 bp, Homo sapiens
aatttgtccctgtgataaaaattatacagcagacaaatccctgagctgagtctggcaattggcataataagctacatgctaattaaggaggatatttaaaattgtatgtttttcctcaactttcaaagtatatttactttttcttttgtttgctgatttaaaaaaattccatcttgcatcctggttggttttagcctacttttgttttacagctgaattgtgtgctgccctcctcaattatatggtgaagtcctaaccccccagtacccaagaatgtgacagtatttggagacagtgccttcaattcaaagaaaaattagccrggcttggtggtgggcacctgtaatcccagctactcgtgaggctcagaagaatcgcttgaacccaggaggcagagattgcagtgagccaagatcacgccactgaactccagcctgggcaacagaccaagattccctctaaaaaaaaaaaaaaaaaaaaaaaagcagctcagcaaacctcaagcagtataaatatgaagaaaataatagctaggcatatcaatgccaa

SEQ ID NO: 746431 - DNA, 558 bp, Homo sapiens
ttattaattttcttcttgtagctgggaacagtagctcataatctttaatcccagcttgagcccaggggaccagcctcagcaacatagtatgaccccatctttgcaagaaagaaaaaaataaaagaaaaagaaaaaatatatatatgcgcgcgcrcacacacacacacacacacacacacacacacacacatataaaattatgtgagccaggtgaggtggctcacatctgtggtcccaactacttggcaagctgaggcaggaagatcgtttgagcccgggaggtctaggctgcagcgagctgtgattgtgccactgtattccagaaagaaaccctatctcaaaaaaaaaaaagaaagaaaaaattcttcttgtaaataattgcctcttccagtgcataaaggtaaagccaaattgatccaacaattaagcttatctttagtgatactcaaacctatagtccagttacttacatgtacatgcccagcaattattactccaagttattacactatacaattaccaaatttagtactcaaattacatactagcaattcaaga

SEQ ID NO: 746432 - DNA, 536 bp, Homo sapiens
gcttcctcttctaaccatgaccctgttccctgaatgcgcaatgttttatcacactgtagtttatgacacttggaaatacctgaggatttaacgaaaaggaaaactttccgccattttccttaatgtcagtttgtagctttttcttctgctgctgaggtaagtacttcactttcaaacagaagatacaatttgcaaagattcccatcaccatcctgtaggaaamaaagtttttaaggaccctctcttaagtcaatatgacagtgaatttagaattattatacaagcaaactgtgggaaaattgggcattatcttaagaaagatattgcaatcatgttatcaatagaacattgcaaaaattgaataatatcctagcttgcaatatgtgtgttggtttaagaatcgtttctagcttttatggttgatattacaccaccaaaaatccctttgtacaggctcatgatatacatcttaataaaaacatgacagatttaagttacagatcaagtgtgtgactccagaacatggaaccatttat

SEQ ID NO: 746433 - DNA, 615 bp, Homo sapiens
agaattctgaaattggctttaataaaataaaatcaaggtatctacagagtggcattctttgtagatgttctaaaagatcattcttttccttgactgctccagtttctagaggccaccggcattccttggcttgtgtcctctccttcatcttcaaagccagcaatattgcatcttcaaatctctctgaatctctgcttctgtcttccacttttagcccattgtgattacattgcatcagtatctattactatatggacatattttggatgctgttattctgcctaccacaagcagtatttaaggaaatattagacttataaatgatatattagaaggtaagaaagactgtaaattagtgaattgagtttctaatctgagaaatattagaaaaagtcttcagaataaatccaaacacwttagtagatatgaatttctagtaaaaaatcatggataaaaaaattgtaacagaaatccagcaaagttcaataaagatcaacatttctttaagtacactaataaaaatggttaatcatctgtcaagatttatcaggaaaatagacaatattagaaataaaaggatgaacatattaaattgctggagcttatgccagtaag

SEQ ID NO: 746434 - DNA, 564 bp, Homo sapiens
gaatggcagataaatatatttccaactagttacactgtcacgaatttcaaacgcaggaaggcttaaagtaaatttattatctcactctcctgtttccacgaactttcccgaaattttcttctttcccggccttgtgaatcccttccatttctcagttaaaggacagcaccatccacccacctctctcaaagccgagctttgtattaatcctcattgacaaaatccctcctgaaatatgaaactgaaagccctgaaccctccggctgatcttggaagagaaaccccgccagaggccrgggacccgctccccacctggcggacccgattccgggcgcgttccggctatcgtccctgcttgggacgctgcgcccgcctggtgcggggcggggttccggcgcagtggcgcccgcccagccccgggggcagggagagcctagattacggaagtaccgcgagcaaggagcgcggaatcggggagcgtccggagctagctggatcctctaggcaggtgcgtgggcgctgcggggtggggggctgcaaaggtccctgtagtcctagccagga

SEQ ID NO: 746435 - DNA, 564 bp, Homo sapiens
gaatggcagataaatatatttccaactagttacactgtcacgaatttcaaacgcaggaaggcttaaagtaaatttattatctcactctcctgtttccacgaactttcccgaaattttcttctttcccggccttgtgaatcccttccatttctcagttaaaggacagcaccatccacccacctctctcaaagccgagctttgtattaatcctcattgacaaaatccctcctgaaatatgaaactgaaagccctgaaccctccggctgatcttggaagagaaaccccgccagaggccggggacccgctccccacctggcggacccgattccgggcgcgttccggctatcgtccctgcttgggacgctgcgcccgcctgrtgcggggcggggttccggcgcagtggcgcccgcccagccccgggggcagggagagcctagattacggaagtaccgcgagcaaggagcgcggaatcggggagcgtccggagctagctggatcctctaggcaggtgcgtgggcgctgcggggtggggggctgcaaaggtccctgtagtcctagccagga

SEQ ID NO: 746436 - DNA, 631 bp, Homo sapiens
aaataccttgccctaaaaagtaaatgctagctttttgctaaaaaattagatgatgtgctattttctgtaactgaactcgttccatatgcttcaaagaaaatgctaaactgacacagctatagatcaaacacttgatgcaycactttctttcgacccccatgtcctcaccgcctgcttctttgtttgatcaccaataaatagtgtgggctcccagagctcggggccttcacagcctccatactagtgtcagccccctggacccactttatgcaccgttaacttatcttgtcttattcatttgactccgctggacttcgtagcccccacagtctgggattgggcctgatcaccccaacaaataatgagttgatgggcgcagcaaacaaacatggcacatgtatacctatgtatcaaacctgcacgttgtgcacatgtaccctagaacgtaaagtgtaatagaaaagtaagaaaaaagaaaatgggtctctaaaaagtgaccaacgtagaaacatgttgagttcagttacagaaaatagcatgataaaacgtgtttttgaaaagtgatcaatgacaaattatggctgggtgcagtagctcagatctgtaatcccagcactttgggaggccaagg

SEQ ID NO: 746437 - DNA, 519 bp, Homo sapiens
gtaaatgatttatttttacattaattgcagtaataatgggcttgattgctgttactgtgactgctgctactgctggagttgcatgacatcaatctattcaatctgctcattttgtggataaatggcaaaaaaaattctactcagatgtggaattcccagtcaggtattgatcaaaaatttgccaatcaaattaatgatctaagacaaactgttatatggatggcagatagaattataagtttagaacatcgattacwaatgcaatgtgattggaatacttctgatttttgtataactccattctaatataatgagtctgttcacaattgggaatcagtaaaacgccatttacaaggaagtgaagataaattaagtttagatataagcaagctaaaagaacagacatttgaggcctctcaagcacacttaactgctttacctagtgctgaagttttagatggtatctctgaggggttatctaatctcaaccccattcaatgggtaaaatctttgggagga

SEQ ID NO: 746438 - DNA, 562 bp, Homo sapiens
acatttcataagttatcctaattactgtatctaatttttcttaggcattgctttattttaaattgtatgtttgtaaaatttctcactatcataaccagactgcaggccaaactaacttcaggtttggtggagcaaggacattcccttgaattttctcctcttcttttccctctagtttctgcttttctccctagaatcctcttcattccttgccttaggggagtttcccaagacaacaccttgagatgcaagagtttaggagttttaaatttcaaaagcccaaacattgggtagaggcttaaagtttaagacacagataatagaatggttagaatatgcagagtccatctctgtattctctaatcaagcaaacatctcagattgcaagagggagaagatattytcagagaatgaggttagatactgctgtttcccatgaggcatcctcagctttcaatcaagttggggagtgaaagtcagtaaaccagtggctgagcaaacctccgccccgacctttctcacagggccacagatgaatgggagagccagccgagaaatctaa

SEQ ID NO: 746439 - DNA, 658 bp, Homo sapiens
cgaaaaatagaggcaaaggcagagagatagaggcagaaagcttattcaaagcaataatggttaaaaatttcttaaattgggggagacatatggatatttgggtacacaaatctcaatctccaattaggcacaaggaagactttaccaagatatattacaataaagctgtcaaaataaaagacaaagagaaaatcttgaaagsaacaagaaaagagaagtttcttatatataaaggaaccctcataaggctatcaggggatttcttagcagtaaatttttagaccagcagagggtgggatgatatattcagagtgctaaaaaaaaccccaaaagtgtcaatgaataacagtttatccagaaatgctatccttcagaaatgaagtactttcccagacaaacaaaagctgaaggagtttatctccactagacttgctttataagaaatgctaaagggagttcaagttgaatacaagatttctacttagtaacatgaaatatatgaaagtagaaaactcaccagtaaaagaaagtacactgtaaaattcagaatactttaatattgtaatgatggtgtatagatcacataattctagcataaagtttaaaagacaaaaatattaaaaactaactatagctaaaataatttgttaatggaaac

SEQ ID NO: 746440 - DNA, 632 bp, Homo sapiens
tgagtggtgctaaactattaatgagaaatccattcccatgttccaatcacctccaaccaggccttactttcaacattggggattacaattcaacatgggatttggctgcagacatgtatccaaactttatcagtatttatacaagagaaaagaaatcattataccaaagaaaagaaatcagtataccaaggaggtatctgtagtcgcatgtttattgcggcactgtttacaatagccaagatagaaatcaacctgtttaatcatcaatgaataaacagctgaagaaaatgtagcatatatacagaatggaatcctattcagccttaaaatasaacaaaattccatcatttgcagcaggatggatggtactggaagtcattatattaagtgaaataagcaaggcatggaaagacaaatattgcatgttctcactcatagatgggagctaaaaatgtgtatatcataaaggtagagagtagaatggtggttaccagagactgggaagggaagggaagataaagagaagttttttaaggggtgcaaaaatatagttagatagaaggaataagttctagtgtttcatagtacagctggaaaattatagtaaaaaataatttatcgtatatttcaaa

SEQ ID NO: 746441 - DNA, 512 bp, Homo sapiens
atatccccttggaaccaccactcagatcaagatatgaagcctgatagatgccctgaagtccccctcctatgtgcctcctgtcattatcccctaagaaagggaaccgctatttgtactgcagttgctgtatattagttttgctcatttttggattttatataaatgaaaccatagagtargctgtcttttatatctggcttccttcattcaacaatgtgcgtgcaagactcctccctgtagccgtgtatagtagtcatgtgctctttcttcttgctgccctgtattccattgtatggatatgccacagcttgtttatttcttctccagttgaatggcatgtggtttgcttccggttttggctatcatgatttatgctgctatacacacataaatataaatatttagagttttcctagttatgttattattgatttctagcttaatttcactatgatcagagagtataactgtatgatgataaacctttcaaactcattgagattggctgggca

SEQ ID NO: 746442 - DNA, 552 bp, Homo sapiens
aattttgaaaattattccattttccccaccctgctaacttattcgttatgcattctgtattattcctgtacctgttcccgtagagcagcggtccccaatcttttccgcaccagggaccagtttaatggaagacaatttttttcatggatcgggggcaggggaatggttttgggatgaaactgttccagctcaggtcatcaggcattgttagattctcataaagagcctgcaacctagatccctggaatgtgcagctcacgatagggttggcgctcctatgagaatctaatgcagctgctgatctgacaggaggcggasgtcaggcggcaatgctcgctcacccctcactcacctcctgctgtgcggcctggttcctaacaggccacagactgctacctgtccatggcccagaggttgggaacccctgccctagagagtagaatactcattgttggcttgttacattctgtttagttttggatgttaccatggcaagtgttgttagtacaacaccattagtccatttctctccttctgctttttgtgctacgt

SEQ ID NO: 746443 - DNA, 552 bp, Homo sapiens
aattttgaaaattattccattttccccaccctgctaacttattcgttatgcattctgtattattcctgtacctgttcccgtagagcagcggtccccaatcttttccgcaccagggaccagtttaatggaagacaatttttttcatggatcgggggcaggggaatggttttgggatgaaactgttccagctcaggtcatcaggcattgttagattctcataaagagcctgcaacctagatccctggaatgtgcagctcacgatagggttggcgctcctatgagaatctaatgcagctgctgatctgacaggaggcggacstcaggcggcaatgctcgctcacccctcactcacctcctgctgtgcggcctggttcctaacaggccacagactgctacctgtccatggcccagaggttgggaacccctgccctagagagtagaatactcattgttggcttgttacattctgtttagttttggatgttaccatggcaagtgttgttagtacaacaccattagtccatttctctccttctgctttttgtgctacgt

SEQ ID NO: 746444 - DNA, 611 bp, Homo sapiens
ggatactcaaagcacagtcctactgaaagtgtatcgcttctgcaccattataaaggttaaaaattgtaagctgggctgggcgcggtggctcaagcctgtaatcccacctctctgggaggccgaggcgggcggatcacgaggtcaggatatcaagaccatcctggctaacacggtgaaaccccgtctctaccagaaatacaaaaaattagccaagcgtggtggcgggtgcctgtggtcccagctactcgggaggctgaggcaggagaatggyttgaacccaggaggcggagcttgcactgagcccagaacgcgccactgcactctagcctgggcgacagagcgagaccccatctcaaaacaaaacaaaacaaaacaaaacaaaacaaaaaaaattgtaagctggccagtgcggtggctcacgcctgtaatcccaacactttcggaagctgaggtaggtggatcatttgaggtcaagagttcgagaccagcctggccaacatggtgaaaccctgcctctactaaaaatacaaaaactagccaggtgtggtggtgggttcctgtagacccagctatttgggaggctgaggcaggagaattgcttgaacccagga

SEQ ID NO: 746445 - DNA, 635 bp, Homo sapiens
gcgatcacggctcactgcagcctcaaactctcaggctcaagcgatcctcccacctcagcctctcaaatagctgggactaatttttgttttgttttgttttgtttttttgtagagaccgggtcttactaagttgcccaggctggcctcaaactcctgggctcaagtaatcctcctgcctcagcttcccaaagtgctaggattacaggcatgagccaccttgcctggcagatttcatattatttatttattttttattttkttatttttttagatggagtcttagtctgttgcccagactggagtgcagtgactcgatctcagctcactgcaaccctctgcctcccaggttcaagcaattctcctgcctcagcctcctgagtagctgggactacaggtgcctgccaccaggcctggctaatttttgtatttttagtagaaacggggttttaccatgttggccaggctggtctagaactcctggcctcaagtgatccacccgcctcggcctcccaaagtgctggaattacaggtgtgagccaccatgcctggccaaatttcatacttttaaaatgatgtctgaggaagtgttattatccttatactacagtacaagcattttagtaacatttcaactt

SEQ ID NO: 746446 - DNA, 635 bp, Homo sapiens
gcgatcacggctcactgcagcctcaaactctcaggctcaagcgatcctcccacctcagcctctcaaatagctgggactaatttttgttttgttttgttttgtttttttgtagagaccgggtcttactaagttgcccaggctggcctcaaactcctgggctcaagtaatcctcctgcctcagcttcccaaagtgctaggattacaggcatgagccaccttgcctggcagatttcatattatttatttattttttattttgttatttttttagatggagtcttagtctgttgyccagactggagtgcagtgactcgatctcagctcactgcaaccctctgcctcccaggttcaagcaattctcctgcctcagcctcctgagtagctgggactacaggtgcctgccaccaggcctggctaatttttgtatttttagtagaaacggggttttaccatgttggccaggctggtctagaactcctggcctcaagtgatccacccgcctcggcctcccaaagtgctggaattacaggtgtgagccaccatgcctggccaaatttcatacttttaaaatgatgtctgaggaagtgttattatccttatactacagtacaagcattttagtaacatttcaactt

SEQ ID NO: 746447 - DNA, 641 bp, Homo sapiens
tattttcttgaccacttttggttcattgcttttgactaaatgtttaaaaatattctgcagcatatctatagtactcacaagcagcgaatcaggagaagaaatgcagtttctgagaaggcttcaaagaaataatggtctttatcttttccccagccttttccgctgaaacccaccagtctttttctgagcactcttgttataaataaagcagcagctctccttgggcagcccaagatcgcagactctcatccgccctcagaaagattgtgcgtgtgcgtgtgtgtgcgtgtgtgtaagtatgtggtgcagtgagttgtgttttaattttgcttttcttttatgtatgagatgtgtagcaggagatgcaagaaaaaatactccagcatctgtcctttaaagataacttataacttttctgggttttggsttgttggttttgtcttttttttttttcccatttagggaagagatggaagtgattgctttccccacaaaggtaaggaagatgaatggggggccaggagagacgtcttcacagtgaggcctttgaggtcaacagagaaagggtctcgtggtatatgtttcaggcttccatggatggcattgttctgtgcagatgtatttgaaatgagtttcatcca

SEQ ID NO: 746448 - DNA, 488 bp, Homo sapiens
gtgtttctttgtgtgtgtctgtgtgtttcttgtgcaaataggcacctcggggatggggcaggtggagggaccagcagtgcgaagaccttgggatggggacaccacgtggagtgtgcaaagtggtggaagggccagggtggctgatggaggccagagcaagaggacaccagaggggaccagcgtggctggggggggccagagcgagaggacaccagaggggaccagggtggctggggggggcagacgagaggactccagaggggaccagggtggctgggggggggagggtgccagagtgagaggactccagaggggaccagggtggctggyagaggccagagtgagaggacaccagaggggagcagggtggctggggggggggccagagcgagaggacaccagaggggaccagggtggctgaggggggcagcagagtgagaggactccagaggggaccagggtggctggcagaggccagagtgagagga

SEQ ID NO: 746449 - DNA, 576 bp, Homo sapiens
aacaataggtcctcaactttagcttgagagtttatcaggaaacatgattaaatgtgttatgcactttggtatcccacttttgtctcaaatttatttgttcaactaatacttatttagtgtcaggtaatggcacttgtaactggagatgtaccgatgaacaacaaagtcattgttcacgtggaggttacaatttagaggggaagatatatgtgaatgaaataattatacaaccagaaatagaattgcgcttttaaaagtgttacactgggccaaatagaatcaggctacgagatcttataaaggcgaataggttgacacctggtgtcagactcagtgaaggataatggaatgaagtaatgggatcctgaaggtgagaaagaatgtarggaaggatgtgtttattacatttgagtggcaaggaagttacaggaagagcactttaggcaggggagaaatgcagcatcgcacaggtaaaggtagtgcagtgggaaagcctccgaggacgggaggaagacgaatggggtgggattagggtacagtgagggcgagcagagtggaaggcaaccccaggttgcc

SEQ ID NO: 746450 - DNA, 612 bp, Homo sapiens
agacaccttcccccataagtgctcacttcattcgcattgggttagaactctcccgctccaacttcccgtttcttcacagccccactaacactggccatttagttcaataaactaattggagggggatgctaatgaccggtaatgacttaaggcactcacactttgtaaagaacctcagcaatttaatataaaaacagggtaagtaacgcaggcactttgcaggctggtggaggaacacgttttcrgaacagagccctgagctttcttcagtttataccttgtccagagaattaaatacacagcaccaggggaacaaatccaatgccaaaccactatcagaacatttccaactgttgaccgtatattttcattcaccaattaaatgttgtttgagattgagtctccctctgtcgtccaggctggagtgcagtcacgcaatctcagctcactgcaacctcctcctcccaggctcaagcagttctcctgcctcaacctcccaagtagctgagatcacaggcgtgcttcaccatgcctggctaatttttgtatttttagtagagacagggtttcgtcatgttggccatgctggtctcgaactcctggcctcaaatg

SEQ ID NO: 746451 - DNA, 608 bp, Homo sapiens
catgtattgtacctaaagacagggacagtaaactattgaaagactatctaaagttctaaactatctgtcagaataaaagttatattagaatgcagtttaaaatttggcttctttttgtttacacactcagatataacaatattttcagcatgtttccttttcactacattactaagctatgtaacaatttcaaacaatgttactgtcttggaacctatcactacttggtaaagaatacaacacaatgcatagaacaacaataacaaaggcaattataataactaacatttactaaaaatgttctgtgtgttaggtcctgttctaagcaattttacatataatagcacatttaatgctygtaattacacaaagaggtaagcataattagtatctccattttatagatgaaaaaaaattgaagtacaaagaatttaaatgatcaagatcgcatggctaattagcagaataaccaaggtttgcacatagaaatttaccttcggggcccatgctcttaggtaatcaatatataatacatcaaagtaaaatataaaaattttagaagcctatgtttcttgttgtactcacatttcaaatatgggcaactgcca

SEQ ID NO: 746452 - DNA, 635 bp, Homo sapiens
tgatcaaataaaatttcttggttaaaaaaaagaaactgcttgagaatattttagtattattcaattttgtatatcaaaccagcactgtgtccaatatgaaaggctgaatttccctcattcaattcaggaaccagaactgtgacactgctaacattaccagaacttaacatttctctaaaatgctagccaatgcaatcgaataagaaaattaaacaagaaaaataagcattggaaaagaggaggcaaatttaccatttcaggaggtgctatgattttcttgattaaaaacctaaggaaataaactgaaactgaaagttcatggaggagtttagtaagactrttcgaaagcactagcttttcttcacacaaacaacacatcggaaatacaaagaaaaataaaaccataactcctggtatcaacaagacaaaaggaaaaatatgccaagacaaatataataacaatattcctaggcctataagaaaaaacaaactaaaaaccttcttgaggaaaagaaaaaaaaagtagaatgaacaaaaaacaagcataagattgtgattaagaagagggactgttaagacaaactgcctggtttcaaatcccagttctaccacctatgaattggttggatgtaggc

SEQ ID NO: 746453 - DNA, 635 bp, Homo sapiens
tgatcaaataaaatttcttggttaaaaaaaagaaactgcttgagaatattttagtattattcaattttgtatatcaaaccagcactgtgtccaatatgaaaggctgaatttccctcattcaattcaggaaccagaactgtgacactgctaacattaccagaacttaacatttctctaaaatgctagccaatgcaatcgaataagaaaattaaacaagaaaaataagcattggaaaagaggaggcaaatttaccatttcaggaggtgctatgattttcttgattaaaaacctaaggaaataaactgaaactgaaagttcatggaggagtttagtaagactgttcgaaagcactagcttttcttcacacaaacaacacrtcggaaatacaaagaaaaataaaaccataactcctggtatcaacaagacaaaaggaaaaatatgccaagacaaatataataacaatattcctaggcctataagaaaaaacaaactaaaaaccttcttgaggaaaagaaaaaaaaagtagaatgaacaaaaaacaagcataagattgtgattaagaagagggactgttaagacaaactgcctggtttcaaatcccagttctaccacctatgaattggttggatgtaggc

SEQ ID NO: 746454 - DNA, 617 bp, Homo sapiens
ttatcctaatgtaatagacttttatgctcatgggtcttttattaatcaacctagcatacttctctgcacgaaaaatatacataaattgactttcataaaatttcccatgacctggagttgctaagtatttaaaaaaattacttctgaattgaaaaagctgtacagtcattgctggggcrcagttggtcaaaaactataaatatattacagatttttagaaatggaaaaggggagctgttactggagctgcctctctgagtgagaaggcagtgggtgtttttggtgttttaattgaagccctagttgcattagcccttttgttttggtatcaggagggcccttcacctggagctgcaccaccccctcaccagcttccgggggatagctatgcctttcttatgtaaaagagcctcagggatgttagggaggggaggtgggcaggggatccaaggcctttctccactgagcaatttcaggaaagacttggctaccctttagactgagctgggtctacgtggaaagggtccttgcacctcagtttgaagccccctgcaagggagatcttagttcacaagattacacctgtactcaaggtcctgcaggtgattcttacctgg

SEQ ID NO: 746455 - DNA, 617 bp, Homo sapiens
ttatcctaatgtaatagacttttatgctcatgggtcttttattaatcaacctagcatacttctctgcacgaaaaatatacataaattgactttcataaaatttcccatgacctggagttgctaagtatttaaaaaaattacttctgaattgaaaaagctgtacagtcattgctggggcgcagttggtcaaaaactataaatatattacagatttttagaaatggaaaaggggagctgttactggagctgcctctctgagtgagaaggcagtgggtgtttttggtgttttaattgaagccctagttgcattagcccttttgttttggtatcaggagggcccttcacctggagctgcaccaccccctcaccagcttccgggggatagctatgcctttyttatgtaaaagagcctcagggatgttagggaggggaggtgggcaggggatccaaggcctttctccactgagcaatttcaggaaagacttggctaccctttagactgagctgggtctacgtggaaagggtccttgcacctcagtttgaagccccctgcaagggagatcttagttcacaagattacacctgtactcaaggtcctgcaggtgattcttacctgg

SEQ ID NO: 746456 - DNA, 667 bp, Homo sapiens
gttcaagctgcgactgatccccgtgggctgagatgtgtctccccacaattcctatgttgatatcctaaccccagcacctcagcatgtgactgtatttggagaccggacctttgttttgattatttatttgttttttgagacagaaatctctgtgtaacctgggctggagtgcagtggtgcaatcatggttcaatgcagcctcgacctcctgggctcaagggatcctcacacctcagcctcacaggaagctagggctacaagcgcgcaccaccagcccagccgacttttttattttttgtagaaacgaagtcttgccatgttgctcaggctgatctcaaattcctgggctcaagtgatcctcccgccttggcctcccaagtagctgagaccacaggcatgtaccaccatgcctggctaatttttttaaaaatatgtttttaagagacaggttctcactatattgcccaggcttgtgtcaaactcctgggctcaaacaatcctcytgcctcagcctcccaaagtgctgggattacaggcatgagccatcgtgcctggtggagatagggtctttatagaggtgattattttaaaatgaagtcacatgggtgggccctaaacccatctgactggtgtccttatcaaaagaggagatgagggcacagacatg

SEQ ID NO: 746457 - DNA, 555 bp, Homo sapiens
tcaatagaaaaactaaaataccagtggtttgaactgcatgacattttatttatctctcatgaaaaataattcagcaaatagacaggcgggactagactggtggttccatggctgtctgggatccaggatatttctgtcttctctagcattggcttctgctctcactgtcccttagagctgctggagctcyagccatcacgtctgtactccaggccaggggaaagaggaagggggaatgaatgaatagaccacagttttcagatgagtgtgtagcatttttaaaacagctttattggtatataattcaaatactgtataattcacatatatgagtgaccatcaccacaattaattttagaaccacttcatcacctcaaaaggaattcccctaccctttagctccccagacctaaccaaccactaagctacgtcctgtctctatggatttcccttctttgtatattttatggaatcctacactatgtgacctcttgtgactggcttcttttgcttgcattatgttttcaagggtcgctatggtggattttgcccccc

SEQ ID NO: 746458 - DNA, 539 bp, Homo sapiens
tggtgcaacttcattttacataatgccatttgtgggaaatgaatgactctatatacaaaggctggaggtgcacagaaggcagaggtcagggatgataacaaaggtcctggcaccttttcttcccccttaactgtcaacctcttctgctctgtttttttttttttttttttttggtctcctgacctggtctgggatctcctgaattgctgtcaacagctagcaatttcatgtgtgttatgccatgaattctattctgaatacagctatagcaggttccactaattaattaaattgtacttcatagacttggagtcaggtctcttgaatacaaratgcaaatttatgcaacatatgcaaatcactcatgttctcaaattccatgaacaaaatctggtagccttgagataaaaaagcccctgccaagcatcatctctcctaattattgcttaatttcctcctccccccaccctttaacattgaacactttcaggcttggcagaaactggaagaaaacacaatgagagctggttaataaacag

SEQ ID NO: 746459 - DNA, 634 bp, Homo sapiens
tctcttttatttcttttcttttctttttttttttgagacggaatcttgctctttcatccaggctagtgtgcagtggcatgatctcggctcactacaacctccacctcctgggttcaaacgattctcctgtctcagcctcctgagtagctggactacaggcgcctgccaccatgcccggctagtttttgtatttttagtagagacgggatttcaccatgtttgtcaggctggtctcgaactcctgaccttgtgatctgcccgcctgggtgtcccaaagtgctgggattacaggcrtgagccaccgtgcccagcccatctctttattttcttgaccacagtggcatatcacagaagagagaggacgtgttcctattcctctggatttcttttatcttagcagtaaaacatattggtaacatgtttgacaagaagcagacttccacagcggctgtgcagggagacaagagacctgggttctcaccatgccatgtcatgcttttcccatgtgaccatggctccttctcaaaagtcaggctgcatcttctccatctatgagcgttggtttgtaacagtacctacagcactccttttcctgccacattgcttttaggaaatgctaataggagtgccagaa

SEQ ID NO: 746460 - DNA, 618 bp, Homo sapiens
tgcaccaatcagcactctgtaaaatgcaccaatcagcaggattctaaaagtagccaatcggggggaggattgaaaaaagggcattcttataggacagaaatagaacaggggaggggacaaatgaggcaataaaagctggccaccccagccagcagctgcaacctgcttgggtcagtttycaagctgtagaagctttgatcttttgctcttcacaataaatcatgctgctgctcactctctgggcagtgccgcctttaagagctgtaacactcaccaggaaggtcttcaaggcctgtggctttattcttgaagttagccagaccacgaacccactggcaggagccaactccggacacagtatgtctgaaatttattaagagtagattttaacgctcttgccacaaaacaataagcatgtgaggtcatgaatatgtcaactgctgtatttagctgttctacagtgtgcacatatataaaaacatcacgttgtattcccgaaatatatacgggttttctttgtcaatttatgaaaacgaattattttttcaaatgtgcataaaaaatttgggacaatacttgatgatttgtgaatatttaataatgtcaactattattttt

SEQ ID NO: 746461 - DNA, 364 bp, Homo sapiens
cttctgtttgaactggaatgtaaattagtccttaatcccaagtgagtagttaaaaatttgaatattagctttgttttaaaagaagacttgaatcagcatcgtttgggagagcaggaggaggaacagataggccgtatggcagatattttcaaaacaaacttctcattcccttaaggacacatttggaggtgtcaaaacaggacaastaaggtgctgaacttaagccttgtatttcctgactctgcctaagctagccatctgatgtttttatttacatttgttttattgcattttggtttaggcttttttattaaagcaggaaactgagagatttacaatagatatgcctcaataattcattcaa

SEQ ID NO: 746462 - DNA, 635 bp, Homo sapiens
tattccaagtgtctttaaaacatagtaatttgactacacctccctagtagtgtacactctatgaacaaaaaaaaaaattgcaggactatcttaagtgggtttcagtaattatacttttgattggcagcattggtgttgttactctattgtgtctacataatgcaggataaagcaaatgagtaatgatgttgttatagttaggaatcaggactttaagggtaggagaaaagagacaatgtgaaaagcttaggcctgcacttgaattggaagtatcagcataatcctatgatacattttttctttaaaaacaaaacaaamaaacccaacatattttctagctctgttctttgaaaaacctaagtaacaaggtacacataggggaagttttagcaatgatgttgcttagttctcaaattgaggtctctaataccactatccagtaaaaggaaccaggaccctctgatgatgagcttgattccatatctcaagcatgaaatgttcaagatgaacctggaatatcttgccattccagaaagcagggaagctatcagacagctgagtgaatgtcaaaagaactcagaagtcaagatgaaggggctcccattggtctaaaaatccaaaatgtgacaatttga

SEQ ID NO: 746463 - DNA, 344 bp, Homo sapiens
tgaatcaaaacaaaacaaaaaaagtcgtgtatgcatttatgttgtttcttactatttacctttcaatcctttgcactgacgccaatgaattgacatcagaaatctgtgctggagtcaacaatgaaaggtgatgtcataatakatattggagatgggaggaattcaggtttttgaaattcagtctcagaattattcatgggaaaatagttttctggacactgattctaaaattctttctaaaaagttaggtcttaagtaagctaattcatatttaccatattttttagatcaaggaattttgttgttcacataaattggtcatatcattgctccatgtggcaaat

SEQ ID NO: 746464 - DNA, 607 bp, Homo sapiens
gaccttctttttttgagggatcagtatgaaaacagtctatattattataacatgggttctccatcatgaaaaatgccgagagtcatactatttttgtttacctaaagtgacaaagatttgttgttgttgtttttcccactaggtagtgggacaactgttggcacatcttggtagctccagtgagtttatggttcctttatatgtattttatatattagaaagtcctccctggcaacttgccatacctccccagtgtttctttataagcttctctctgacaaggagacaagactcagattggataagcttttaagggagtgctatttcctctgtgtgttttttttgaaggagctaaagtgaaagctgaatttaagcattgtttgtgccctacatagggtgaatgaatagctagaactragcaaacttaccagaatcttccctaggagaggattagtgaagagtaaggacgctgatctctcttaggctcttctgcactggcagctgaaaagtctttgcagggatccttgaccctggtctgtatgctgtgttttgccatagaataagtacagttttcatagacctagagtttttgtattagagtgcttta

SEQ ID NO: 746465 - DNA, 610 bp, Homo sapiens
ttctctacttgactccagagttaaataggcatccagttgctttttgtgtttacttttatattcactgcttttgcctgcagcagtgtttctgtttctaagtaaatataacatatgctactggttactcatatgtcttaggcaacatatgtttcattcactgtattgttagttctgttttgttttgtcactgctttagtcccagtaccaataactgtgccaggcacaaagtaggtgtttagttaatattgttaaatgaasaaatacaaatatttgattttatcacttgaatcctcatttattagtactgcactatcttttcttagctgtttttgtgaacatatgtgtactgctcttttatcctaactagattggaagtacattgtgggtagaaacttggtttcatttgtttttcctatattctcctttacagcagtttagacctgatgggaagtaggtatttcccaaacatgtgattgaattgaaatacattggtagatttcattttatcaggagactgccaaaagtatagtcataaataaggaatttggaagagaatcaaaaagctagtatgcactcatctgtcagcttgaaggcctgtatgactccacag

SEQ ID NO: 746466 - DNA, 585 bp, Homo sapiens
cttataataaattcttggtatactgacataccaagcaatagtgtgtctgaacaaaaccagtatgggcatcagaaaaccctggttctagcttcagcaatgcctttacctacataagggataatggacaaatcacttgactatttcttcatgtgtattatgaaaggttcgtattaaaaaagactttgacctaccttgtatctttaatgttttaagcacgtaattgttaaactatttagaaataaaacttttaaataaatttattgtgatttatatttcttccaaaaaagtatattttaaaactctgagaatattagttattmatattttactgtacactacactactttgcattatagtgaaagccatcattaccattaaaccaattttcatatgaacttgaatcttttttgttaagagtcaacgatcctcctagcttaccacttactatctcatttctgttgctttttaagaaaaaaaaattggcaaagggtttaaaaagatttaaataagaccttctcatttggttagttttcacaaaaaacttttcacctctcaaatgtttaaaaatatagtatgaattaatct

SEQ ID NO: 746467 - DNA, 639 bp, Homo sapiens
ttttaaataatgcttatgtttaaaaccagaatagttttataacatgtgtcagtaaataacatttatggcaaaataatgaaataaacaaccataggtaactgctatatacttatcaaatccagtgttactaggatgagagaagcaacccgttaaatctctgaggagggagaaagaaaacagagaaaatgtcgctgtatgtttctccactgaatgtatatttctctgagattacttttataacttgtatactatttttattattttgacacttaattagtgtcactaattaagacatttcatgttcttgtcattataatttctggtcaatttttttatatttgacgttttagaattttttttgatcagaaatactatgaaatttktgtgtacgtggctatcacatgtgtcttccaaaatatgtgttgcctaattaaagtagaagtttttacataacaatatctagttttctacacattaattgaaataactataaccttcttaactaaaaatacaaagtgataaaagggtgtattttaagtttactacatattaaattggggaaaaagatgttaaataatcatgaagttaatataaatacatttaaaaaggagtatatttttcactgttgataacttactg

SEQ ID NO: 746468 - DNA, 641 bp, Homo sapiens
gatttatgtgtctgtgttcgctattctgttccactagcctatgtatctgtttttatgccattaccatgctgatttggtaactacagccttgtgatatattttgaagtcatgtagtgtgattcccaacttcgttctttctgctcaggattgctttggctatctgagttcttttgtgattccatataaattttagggttgtgttctctatttttctgaaaaacgtcattggtattttgatagggattacattrgctataaattgctttgggtagtattgttattttaagaatattaattcttccaattcatgcacatgaaatatcttttcattttcttgtgccctcttcaatttctctcatcagtgttttatagttttccttgaatagatatttcacttctttgattaaatcaattcctagatatgttatattctgtgtagctgttacaaatgggattgctttcttgatttctttttcagactattcactgtttgcatatataaatgctactgatttttgtgtgttgaatttgtatcttgaaacactattgaattcatttatcagttctaacagttttttgggtgaagcctttagtttttctaggtataaaatcatgtctgaaaacaagactaattttactac

SEQ ID NO: 746469 - DNA, 608 bp, Homo sapiens
gtgtagctgttacaaatgggattgctttcttgatttctttttcagactattcactgtttgcatatataaatgctactgatttttgtgtgttgaatttgtatcttgaaacactattgaattcatttatcagttctaacagttttttgggtgaagcctttagtttttctaggtataaaatcatgtctgaaaacaagacwaattttactacttcccttccaattttgatgccctttttaactttctcttgcctaattactggccataacttccagtaagtattatgttgaataaatgtggtgaaagtggacatccttgttttgttctagatcttagaggaaaggctttccattttttacttatttaatacaatgttagctgtgggtttgtcacatatggtctttattattttgaggcatgttccttctatacccaatttgttaatggtttttattataaagggatattgagttttattgaatgttttttcagcatctattgaaaagatcatgtggtttttgttcttggttcagttaatgtgatttatcacatttattgatttgtgaatgttgaacgacccttacatccctgggataaattccacttgatca

SEQ ID NO: 746470 - DNA, 498 bp, Homo sapiens
tctatgctttgccatatatattgcatttttccctatttgacaattaatatttaagtttttatggtgtttggagagacaaaaaatattgtatgtgtatgtggttgaaatagtttctgagtttcctttcactgaatttatgcttagaaagtccatggccatttcaaatgastttaatgtatgtgatggttaccttcatgtgtcagcttgcctggccatggggtgcccaggtatttggttaaacattatttggggtgtacctctgagtgtgtttctgaatgagtttaacatttgagtaaagcagattatcctttccaatgttagtgggtctcacccaaccctctgaaagcctgaatagagaagatggtggggtaaggaagaagttgcactttctacctgattgtcttcaaactggaatataggtcttctcttgccttcagacttagactggaactataccatcagctctcctgggtctccagcttgctgactgcagatttt

SEQ ID NO: 746471 - DNA, 607 bp, Homo sapiens
agctgcataggtgggctgggtgtgctttttcagtaggagagaggccggggacgtgaggtggtgagggccttggccaggacagggatctgggtcttctgccagggtcctgcgctgttacaggacagggaactagaccaaagaaagcagttgaccaaggaaaggtcccgaggaggacaagcaaaacrcagcttgaattttgtgcgagtttgaggcctccccctgcagctgtaagcgctttgtgcctcaggctctgtggagcactaagagggttagggaagacggagggggatgagggtatctggaaatcagcccaccaccatcggccagcattccaggcacctacctggaaactgagaagagtttggtagcagataaaatcctcctaaaaaacaagcctgaaaatccgaagtgcgtcctggacttaggtgactgagtgttctctgtccttgtctggtgtgcctgagagcccagaggtgagaaaggtgagaaagaagagaagtccagggaaagaatgggagagaacagagccgcttggaggagcaggggcagctccaccactctgcttacggtgtgtaggggaccgtccccctgcagaccctggccttat

SEQ ID NO: 746472 - DNA, 562 bp, Homo sapiens
gaattgctcaaatttgtctcttgtaccacacctgatgccaacaaagagctgcttaagtgtgttcggttgaaaaattgatccagaccttggcattttattattatgtccttagttctcaggttgggtcttgagttattgctgcagagcagtagtggttaaaataagatcttggaatttatcaaaagggaggtgagctggatgtggtcatccacgaggtcatggatgtggtgtgtatgcytgtggtcccagttactcatggaatgcccaagcgggaggatcacataagcccaggagtttgaggccagcctggccaacatagtgagacctcgtctctgaaacaacttaaaaaggttttttgttgttgttgttgttgtcattcagcatttcagataaggacttaagatgtaaagatattgttacaggatgatgcattgtattttctgcattgcatgaaagaatttttattgaaaatgaagtgacatttcaaaggaagttctattctaattatgtttctgcctaaagtaaacttcccagattttagaaaatgtaatcttttaaattt

SEQ ID NO: 746473 - DNA, 667 bp, Homo sapiens
tggttctcaatcacaaaatacattaataacaataaaactatggaataaagggtcttaataactcttatcagtcctctttgtttgcttcaaaatattttatgcatcatattgttagctattagtatcaactaatcaaacatcttgcgaaaagtttattttcctttttttctgtgagtgggtgtgtgcacatgcatgcagcacacagaactgaatttttgatcaaccatttaatgttataatacatgaatgaagacagctattgttcttttttaacctttatcctccattcccagtcctctttccttctattccataccatctactatatttaatgtgtatctacacaattccatctccataccttcaattatgcttaatattaataagcaatatataccattgtttttatatactatttagattttatagaagtgttactatactatatacctcagtcctcaatttgcattttttcactgaacatgatgttgakatctattattgttgattaacacagttcttaataagtcctgttaattgctgccactcaacgaatataccacattttacttgttcagtatgactttgatggacatttcggtttttaactatttcaaaccaaaatttaatgaatattctttctgctaagtttttccacaatttggtt

SEQ ID NO: 746474 - DNA, 598 bp, Homo sapiens
gtactccttccctgtattgtgcaactgcttagcctcgtccttatctgcaaatggcaacattcacagaatgtttctttgtactcttttttttttatttatagctttacacacacacagagagacacgcaaagcatatattttctagtttgcctgttaccgaagttaataaaaaatttccttctatttaaaaaaaaaaggtggaagatttttttttaattttctgcaaaagattgtgtaatactggcattatttactttttaaggcttttgtagaattcaacagtgaaaatatctgggctctggagtcttcttttgaggaagacttttaatagaaaatgtatttacttwacagatataaggttatttctatttttatttcttatgtcacttttggaaggttgaattattttagaaaattttccatttaatttagtttgttgaatgtattagcccaaaattgttatttgttcataatatcttttcaatatctatagggtttatagagatattcccttttatccctaatattggacttcatttttttgcttgttttcttcaacagtcttgctaggggtttgtaaatttcattaatcatgtca

SEQ ID NO: 746475 - DNA, 597 bp, Homo sapiens
tcatcattcatattcactgttttcctgtatgcaaatgctccttgacttacagggtcccaataaactcactgtatatcgaaaatatcataagtggaaaatgcatttaatgctggcaacacagccaacggtcctcaatttacaagtggtttgacttgtgattttttgattttacaatagtgcaaacatgatatgcatttagtagaaatcatcagtttgctatgggattttgccctgataaacccatcataaagtaaaaaaaatcktaagtataggactgtctgtatatcatatctttgtttcatggttccttttaagattttctctttatctttggtttctggcttttgaggatatgcctacctttggttctctttgcatttaccatgtttgctgttcagtaagcctcttgaatctgtaatgttctttaccagctttggaaaatgccttcctcttacatctgtaaatattttttctgcccatttatcactctccactccctctgagacatatattccatttatgatagccttcttgatattttcccacaagttgttaagactgttcctttttaccagttgcttttctctctattcttca

SEQ ID NO: 746476 - DNA, 607 bp, Homo sapiens
tatttgaccacaatatttttcactgcttctacaatccaatagattttgtttttccaagaacacaatcatatatgcaaataattatttcattttatccttttctattttattctatttctatgtcatgtcttattgccctgaatcaggctagcaaaattatgttaactaatagtggtaatggagtcatttttgccgtatctttgatattactgaagatgctgatgtttggtgttgatttaaatcattaacctggtaatgtattgtggatggtgttgttgctgctgttgctgctgctgctgctgctgctgagaggtggagaagtggggaaagaagagggggatgctgcagtttagtctaagtgatacatttctaggtttagatatatttgcttaaagctttggcagccagaatctactggtacaaagaactaaatttttttctcaggatagcatcaggcaatamtctgtgctttgggagtaacaaagggttttcaggggagacaattctgaagttagcagcatctcagtcacttaattatccctggtcctgaatacttagtccaaagtctgactcacagcaagtgaagggttgtaaaaattgggagcag

SEQ ID NO: 746477 - DNA, 667 bp, Homo sapiens
tggttctcaatcacaaaatacattaataacaataaaactatggaataaagggtcttaataactcttatcagtcctctttgtttgcttcaaaatattttatgcatcatattgttagctattagtatcaactaatcaaacatcttgygaaaagtttattttcctttttttctgtgagtgggtgtgtgcacatgcatgcagcacacagaactgaatttttgatcaaccatttaatgttataatacatgaatgaagacagctattgttcttttttaacctttatcctccattcccagtcctctttccttctattccataccatctactatatttaatgtgtatctacacaattccatctccataccttcaattatgcttaatattaataagcaatatataccattgtttttatatactatttagattttatagaagtgttactatactatatacctcagtcctcaatttgcattttttcactgaacatgatgttgatatctattattgttgattaacacagttcttaataagtcctgttaattgctgccactcaacgaatataccacattttacttgttcagtatgactttgatggacatttcggtttttaactatttcaaaccaaaatttaatgaatattctttctgctaagtttttccacaatttggtt

SEQ ID NO: 746478 - DNA, 529 bp, Homo sapiens
aaagtacatgctattattgagagaaagctataagagctaatggattaaatgttggggtatattcccaattccaccaatgactgagatgttacccttatgccttcctgggcctcactttgctcctctctaaaataaagaaatttaattttgtctattattccttccaaaagcaaaattctactgcatttctgagacatgtgtgatacttacggctgcgttcagttttccactttcattcatactactcaccttaatcagggaatgtattaattacaaattaaagataattatttgactcattaggtttagggtatatacatgtmaaataccctcaaccctccctccaggtatatcaaacaaaacctcgagctcctactgctgaaattcacattttcctcttacttgatatcaacatgttctatttttatgtctcataaatttaattatctgctaaaatgaagactgaagcccaatgccccaaacactaatttccacaaatacggattcagaataggtttctaaaaatttc

SEQ ID NO: 746479 - DNA, 686 bp, Homo sapiens
tgtggagtcagcctcagaaatgagctttgttcaacaagtgcccttgcagaaacacagctgtcacactgtctttctattatctatgctcttgaagtttatcagtaaatcagttaattgccaaatccgattgtctccatcttcactgatggttcattccttctgcaaattgttttcctgttttctgcaactacattatttccgttctccttctgtctgatttatcagtctgtgccaataatttagcacacagtcattccacaaatatttctgcacagcaattatgggtgaggtgctasataaaactatttaaataatttcttaagttgttataattttctttcagcctttccaactatggtggaagttggaattaagggcaagggccatgtctcatattcctgagtcattcccagaagttatctcagcacagaatcacttggttaggtaattatgtgttagtgtttttgattgattatatctgcctgtatataaataacacctgatgaagaagagaaggctggcaattttggtatgaggatacaaatagtgtgcagctagtttggtggaatcaaatctaatgagaaatatgtcaaacgcatttcaaacaatttcattcatcatcatcttgactaccatgattatgatcatttatttaactcttgcttgatagcaggtactgctctaga

SEQ ID NO: 746480 - DNA, 510 bp, Homo sapiens
catttgatgggtcctttatgaaaatgacaaactgggtaggatgaagatgagaggtcaggaaaagattcgttcttcccaaaagcattaatttcaaaatttgggcatacatgtttcattttacatgctcaaagttccttttgttaaaaaaattatacaaatattttctctctcctaatttatgtacagagaaaaacaaggcaatgggyattaatgaaccaaaaggggaaacccagaagtgacaatggaaataattacaatggcatacatttatctatttaaaactaggaaaggcacacaaggaaaagaagtaggaagtaggaagaagggtgccgggtgaggcttggaggcagcttagagaagaacgtggggaggatggtagagaaactcaatccactggtctgattagaaaccagcactgagaaatgcaacagtaaatctacacccatgataaaggctttggtccaagcttatgagaatttattctttttgggggatgtggagtcgtcattc

SEQ ID NO: 746481 - DNA, 621 bp, Homo sapiens
catttatattcctgcctggtttcggctaatgtagtttcccattgaccttcatctcagggaatggtaatactaagagatgccctaatggatctcctgtattccctgcatactcttccttatctctattgtggagaagtagactgatttcatcttgatagtctgggtcaatcacccaggccaacactgaaactcccttcttagtctattgacataaaggtaggaaaaacccaaagtatccaggtggcaattttttttttttaagacgcgttcttgctatgtcgcccaggctggagtgcagtgtcatgatctcggctcactgcaagctcaggtggcaatcttaacttccagtttaatggaatcattgttgtgtctcctggtggcagtgttcctccctctggaactaaaacctstaagccagccgaatgtaatgttgcaggaacaggaagcaaaaattttgttagtggatcactaggggggatgatgagtagtgccacttccactttaacctcttgaatcccggacccgtgaatcctggctatgggagaaagagtaccatatattggatacttattcagagtatacatggccttctggagaacttttccccagccctaaaaagta

SEQ ID NO: 746482 - DNA, 527 bp, Homo sapiens
ttgaaagggaactaatccatcaacaatttcaaggaaatctgagtttataaggaaatacagcaatgaaaatacaacgttaactacatgtggaaacataaatatttttgtcaacctgtgcattacaagttagcttgtgtaaagccatatgaggctgattccacacgtgtaactaaacatctacttagataggtrtaactaacacaagttttataaaaatctaggttgattatacttgaaaacattttaagagaaggtttatcatgatatactttgaaataaaaggccagaagaagttagtctttccatagttgtgatttatgctggaaggagtaataaatagaaaatattttatcaacaacaaaaacaagtaattatactagtatatagaaatgcaaaaattgctaacatttaactttgccacacagactagatttactaatgaaagacagacttaggttatttatataacttaaaggaaaggtcaatataaccttcagaaataaaattagaaaagtacttttgaattt

SEQ ID NO: 746483 - DNA, 636 bp, Homo sapiens
gctttgtaaatctcttcaattttatggagtatagaaagaaaactaattgctaagtgaggtcacagcatttctctctctgaagcactaaacattcataagcttagtatatttttttcaagagaaaagtaaactacatttgtaaatgagatattattatgatgtaattattattcyagctttttataagacatgtttactgggcaactatcaaacaaatttcattactgtccttttcagccaaataaaatggatttattaaaaaattacaatgatcaaccattttagtaatgcaatgtaaattagtttttatataaatgaggactttcacaaggccagaattaaactctttataaaatttatgtaaagtgatttggtaatgtaaaaattgtatcatcttaattttttaaaatgtggaattaatttgaattttacaaattatatttcttttggaagataatttttctatttactagttttatcagtacatgcagatatactttacaatgaagtaaataacatcgcatacagtttttgacataaggaaataaaaagctgtttccattgctccctaattattattgttgtgattctaactccaagtatggtcaacaagaacattgtcataatattttagga

SEQ ID NO: 746484 - DNA, 621 bp, Homo sapiens
gattattttgaacagtttggaaatattgaagtgactgaaatcataactgaccaaggcagtgacaaaaaaaaggggctttgcctttgtaacctttgatgaccatgactccatggataagactgtcattcagaaataccatactgtgaatggccacaactgtgaagttaggaaagccctgtcaaagtgagagatggctagtgttcatccagccaaagaggtcgaagttgttccggaaactttggtggtggtcatggaggtcttttcagtgggaatgacaactttggtcatggargaaacttcaatggttgtggtggctttggtggcagccatagtggtagtggatacggtggcagtggggatggctataatggatttggtaatgatggaagcaattttggaggtggtggaagctacaatgattttggcaattgcaacaatcactcttcaaattttggacccatgaagggaggaaactttggatgcagaagctctggcccttatggtggtggaggccaatactttgccaaaccatgaaacaaaggtggtgatggcggttccagtagaagcagtagctatggcagtggcagaaaattttaattaggaaacaaagcttagcaagag

SEQ ID NO: 746485 - DNA, 667 bp, Homo sapiens
ctttctggatctatgatatattcatttattgtgtttctttccccacatttttctatgtttgtttaatgttttctttgctgtattttagatttccttttaaatcctgtcagaggcatttgcaaaagaatcaaacaaatgtctgtataaaataaacagaatattttcaaatataaacaagtgtcgcatctgggaaatataagatctgagaaatttttacctttggtttgaccaaggcacctgggaaattgagaagaagaagaagaagaagtaaggattgctcagaacgagcttatggatattaatttattttgagtccttctacctgatgccccctaacaaaatagagaaaaagcaaaacacaaagatagaagaaaagrgtgggagactgaaagggaggacatgaaggaaacaaggaagaaaatgaataaaggaaggaggaaaggaaggagagaaagaagagaaagaagaaaattatgatcagtaacgaaggccaaataaataccaatcctgggaagacgtattctatcatatgactactaaaaaaagaattatagaagtagaaatttgaattaatgattgaatgggtcactcctgttgctatgtgacactctgtaaaggttatagacttcaacattccttttctttgtatatggggtccagtaatttt

SEQ ID NO: 746486 - DNA, 635 bp, Homo sapiens
cctaggctataaacctgtatagtatgttactatactgaatactatatgcagctggaatataatggtaattatttgtgtttctaaacatagaaaaggtaatgcattgtgcaaagacattagaacagttacatcactagatgatagaaaattgtcagctccattatcatcttatgggactaccatcatatatgcaacccaccattgaccaaaatgtcactatgtggtgcatcactgtatttatagtagagaaccattagaaattatataaagccccttcccccgaacagtggacttattaaataaataatagtataggcttacgatgcagccattaaaaataacatttttggctgggcatsgtggctcacacctgtaatcccagccctttgggaggccgaagtgggaggataacttgagcctagcaagttgaagctgcagtgagccatgatggcacgactgcactccagcctgggggacagagtgagaccctgtctcaaaaacaaacaaacaaaataaacttttgctgggttccctgtcacatcagaaggtaagtataaaagacttctaagtcatgtcaaaagagactcaggaataaacctgaagatgcttccatcgatcaaagaggtgaggaagag

SEQ ID NO: 746487 - DNA, 697 bp, Homo sapiens; identical to SEQ ID NO: 741699

SEQ ID NO: 746488 - DNA, 550 bp, Homo sapiens
tagattttttgcgcttttcttatttatcttagggaattgttaatatagttaccatttgtctactatatattctgaaatattttctccccactttattatttgttcagtagcattgtgttatttttcccatacacaaattttatattcaaatctatctctttttttttggtagagtaccatggtgacttaactgttgtaactttacaacataatgttttgttatctggcttggcaagcccctcaccaaaacttcctaacaggtctcccggtctccagttccacccttctccaatccattttccatgctgtgatcagagatacttttattgaaagaaaatcttaccatgtgtgaaattccttggggtgaagtttgaaccctttaatttatcataacgatgtccacctaccactwtggtctcttctctgcctcctttcctataatttattcctgattctcttcctttttgctgatgactcttcctcctgtctagaaacctctcctttgctttcccatcagtcatctcttacacccctaaaaactcagatcaag

SEQ ID NO: 746489 - DNA, 563 bp, Homo sapiens
ctattcaacaaatggtgttggaacagtggctcatcatacacacacacacaaaaaaacttcaatccatacgtcacaccatattacaaaattaactcaaaatggatcacagacctacatgtgaaagaaaatcttaaaagttctaaaagtaaggccgtgtgcagtggctggcacccgtaatcccagcactttggaagcccatggtgggagaatcctctgagcccaggagttcaagaccagtctgggcaacatggcaagaccccatctctacaataaataagaaaataaaaattagccaggctcattcctgtagtcccagctactcaggaagctgaggtgggaggattgcttgagcctggatggtcgaggctgcagtgagacatgatcatgccattgcactccagcctgagcaacagagcaaaaccyggtctcaaaaaaacgttctacaagtagacataagaaaaaacatttgtgaccaattaaggaaagatttcttagatacaacaccaaaagcacaatccataaaagaataacctgataaactgaacttcaccaaaattagaaac

SEQ ID NO: 746490 - DNA, 626 bp, Homo sapiens
ttttttgtgtatatacacacacacacacacacaaatacatgtgtatgtttttctgtattctataatttagtccattgatctcttgtttttatgtaatatcatactttcttgattcttgaagctttgtaatcttgaaatcagtttgtatagtcttccagatttgtttttttttttttcaaagttattttggctattctaggtcctctgcattttcatataaatgtcagtactrttgtgtcagtttctaccaaaagtctccagaatttttattgtaattccataaaatttatagatcaatttggggagaattgacatcgtaatagggttttctgatccatgtagatgctgtagcattccatttatttaggttgtttttagcctttctcagcagtgttttgtagttttcactgtataggtctcaacatatattgtcagatatatctctgtttcatacttgatactgttatatatggcattgttttaaaaattcaatttctgattaatttttagaatatagaaatacaattttatatagcgacattgtatactgtgcagactaaactcactaattctggtactttctgtagattccattccatgggataatcttcataaatggtcatgta

SEQ ID NO: 746491 - DNA, 601 bp, Homo sapiens
aaaattaaagctttcctctaagattgagaaaaagacaagtatgtctgctctcaccacctccattaaacatttaactggaggttgtaagcaagaaaaagaaattaaaggcatccagatggaaaagaaagaagtagaactgtcattatttgaagacracatgaccatctatgtaggaaatcctaaagaatctacaaaacaggtactagaactaataatgagtttagcaagcatgcaggatacaaaattaatgtattaaaaaatcaattgtatttctatttaccactaatgaacaagtgaaaataaaaaaaaattaaaacaatatcatttataataacaccaaaaactagaaaacatttagggataaatctgaccaaagatgtaagaatcctgcatactggaaacaacaaaacattactgacactgattaaagaaaatctgaataaatgaagagatatacctttttcatgcttcaggaggctcaatatggttaagatgtcaattcttcccaatttgagctgtacattcatttccatctcaagcaggccttttggcagaatttgacaggctgataataaaattcatgtggaaatgcaaaggatct

SEQ ID NO: 746492 - DNA, 619 bp, Homo sapiens
tccttttcatggctgagtagtattccattgtgtgtgtgtgtgtgtgtgtgtgtgtgtgtgtgtgtgtgtgtgtatacatatatatatatatatatatatgccatggaatatatataagttgtgatatatatcacactttatttactcattgattgacaagcatttgggttggttccatatttttgcaacagcaaattgtgctgctataaacatgcatgcgcaagtacctttttgctataatgacttcttttcctccgggtagatacctagtagtgggattgctggatcaaatggtagatctacttttacttctttaaggaatctccaaactgttttccatagtgattgtactagtttacattcccaccaacagtgtaagtgttcctttttaaccacacccatgccaacatctattattttttcattttttgattatggccatyattgcaggagtgaggtggtattgcattgtggttttgatttgcatttccctgataattagtgatgttgagaatttttccatatgcttgttggccatttgtatatcttcttttgagaattgtctattcatgtccttagcccactttttaattggattgcttgttttttttcttgctga

SEQ ID NO: 746493 - DNA, 503 bp, Homo sapiens
cacactagctctccagcaatggatccaaaccaagatgaaatctctgaactgacagatgaagaattcagaaggttgattattaagctactcaaggagccaccagagaaaggtgaaaaccaacttaaagaaattaaaaacaaaaaggaggatatgaatgaaaaattccatagaaagatagatatcrtaaagaaaagacaattacaacgtctggaaatgaaagacacacttagagaaatgcaaaatacactggaaggtttcaacaatagaattgaacaagtagaagaatgaacttcagagctcaaagacaaggccttcgaattaacctgatctgacaaagaaaaaaataattttttaaaaaatgaacaaaggctctccctctccctctccctctccccctccccatggtctccctctccctctctttccacggtctccctctgatgccgagccgaagctggactgtactgctgccatctcggctcactgcaacctccctgcctgat

SEQ ID NO: 746494 - DNA, 614 bp, Homo sapiens
tcaagggtagaccatatgttaggccacaaaacaagtccttaaaaattgaaaaaaaaaacatgaaattatatcaataatcttctctgaccacaatggaataaaactgacaatcaataacaagaggaaactatacacacatggaaattaaacaaaatgctcctgaatgacccatgggttaataaaaaaaaaaaagaatttaaaaattgcttgaagcaaataatagaaacacaacataccaagacccgtggcctatggtgaaatcagtactaagargaaagtgtatagcaataagcacctacctaaaaaagtagaaaaacttcaagtaaacaactatattaaagaacaagagaagcaagagaaagcaaaacccaaaatcagtacagtaaaacaaatagtcagagcagaaataaatgaaatagaattttttaaaaaaagaccaatgaaatgaaaagttggttttttaaaaaaagataaacaaaatcaacaaacctttagcaagactaagaaaaaaatatatccaaataaataaaatgagagatgaaaaaggagacattacaactgatactgcagaaattcaaaggatcattaaaggctgctgtgaggaactatatgcc

SEQ ID NO: 746495 - DNA, 617 bp, Homo sapiens
gtattttttagtgtttgattcttggaaaactagtaatgactgtctgaagtacataagtggctttgtgttaaccagaagaggtgacttatcaagcatttattgaatatctcttatattattattaggcaagacagtgagaatttgaaggtataagttggaggtgattataatgtcactgtgaagaaaaaattaaatgagacacttgaaaataacacagagtatgtaactaaatttcatatagttgtagraatttaaagaggtagatagagatcagagaagactagagtagcagtggaagttacagaggagaacaacttgagccaagccctaaagatggatagggggataggaaggggaaggaagatcattcttttgggggaaggaaatataaacaagaggaggtgttagatcaatttttaacatgtattcccagtggaaagagaagatctttgatgcatattttaccatagagttgggcttcatatatttgttttatgatgttatttttttttcttttctttgcagcatattttcgttctttatgttggtaacagctaggagtaatattttatttcctttattataccatgttatatcatagggcccaactctatggt

SEQ ID NO: 746496 - DNA, 550 bp, Homo sapiens
tttttttctatctattgggagactgcctttccctggtgcctgctgcaaccaattcttattttagagaaacagtgtaacaactgcctgaccatcacctgagggtcgcctgacattcctggttgctggggagccctctccagccccactggagcctggctagctacttactgtaacacatccatattttttttgttacgacagtaaacataagatttgtgtatcygaggcagactgattatttacctgcagaatatcttgtattagtttcccatgctccatttttttcccatggtgctgtgataaatgcagatgtcacctgcatgtatgaggaggggcctctagtacatgagagaaaccccaaattcttagtcttgaagcttatatagaagctgcttacataactgcaccttctcccctccaggacggaaagagagaacacagagagaaactgagaccttgtcttcctaatgtaaacaaatcctctctgaagagaaaagtcaaaggtgttttggccaataatcttttggaatataaacaaatggctccacat

SEQ ID NO: 746497 - DNA, 623 bp, Homo sapiens
actccggaagatacaaccctgctagcttaaatcaggaagaattagataccatgagtagaccaataacaagcagtgagattgaaatggtaatttaaaaattaccaatgaaaaaaagtccaggaccagatggattcacagctgaattctaccagatattcaaagaagaattggtaccaatcctactcacactattctacaagatacagaaagaggagatccttcctaaattatccaatgaagccagtatcaccctccaggaaagtacataaccaaaataaataaatawatatataaataaaagaccaatatcgctaatgaatatagatgcaaaaaattcttaacaaaatactagccaatcaaatccaataacgtatccaaaatacaatccaccatgatcaagtgggtttcaaaccagggatgcaggaatggtttaacatatgcaagtcaataaatgtgatacaccacataaacagaattaaaaacaaaaattacatgatcatctcaatagacacagaaaaagcattcaacaaaattcagcatccctttatgattaaaactctcagcaaaatcagcacacgagggacatacctcaatgtaataaaagccatctcacagccaaaata

SEQ ID NO: 746498 - DNA, 613 bp, Homo sapiens
ttattctgatacaaagaaattggttataaatcctctcccagtccctatcagtcctgaaaattgaggcttcattaggatggtgacttgttgtaatgaatataagcaaactgaccactggtgcagtataggtttcagcaagaataagctacaatttatattcttgtattattagaaagtgaaaactaagaaagaatgaggacgaaaccaggagactaaagaggaaagactaggtccatttggacttttaaataaacatgaatgttaaatkctctctttaataaacacatatagaatagagtaattgacatatttcacccatctaggacattcaaaatggaacacaggcttcctgtttcattcaaaatatctgtaaaatataatactacaaaaatgattattctctaataataaaacagtaacaacccggttttaaaatctgggcctgagttaaaaacatttgccaaacctttcttacaccttttcaaacaccttgaaaaaaatatctcattgatttctcactgagtgccaatcaaggtcagcttccattaacatctccgtcaagaggagaacaatgaagacagagcttttcaaagtacctggctatttgaaaaca

SEQ ID NO: 746499 - DNA, 613 bp, Homo sapiens
ttattctgatacaaagaaattggttataaatcctctcccagtccctatcagtcctgaaaattgaggcttcattaggatggtgacttgttgtaatgaatataagcaaactgaccactggtgcagtataggtttcagcaagaataagctacaatttatattcttgtattattagaaagtgaaaactaagaaagaatgaggacgaaaccaggagactaaagaggaaagactaggtccatttggacttttaaataaacatgaatgttaaatgctctctttaataaacacatatagaatagagtaattgacatatttcacccatctaggacattcaaaatggaacacaggcttcctgtttcattcaaaatatctgtaaaatayaatactacaaaaatgattattctctaataataaaacagtaacaacccggttttaaaatctgggcctgagttaaaaacatttgccaaacctttcttacaccttttcaaacaccttgaaaaaaatatctcattgatttctcactgagtgccaatcaaggtcagcttccattaacatctccgtcaagaggagaacaatgaagacagagcttttcaaagtacctggctatttgaaaaca

SEQ ID NO: 746500 - DNA, 625 bp, Homo sapiens
aacctttttggcaccagggaccagttttgtggaagacaattcttccacagaccgggatcagtggatggtttcaggataattcaagtgcattgcatttattgtgcactttatttctattattattgcattgtaatatataatgaaatattaataattatacaactcactataatgcattatagaatcagtgagagtcctgagcttgttttcctgcaactacatggtcccatctggggtgatgggagacagcaacagatcatcaggcattagattctcataaggagcacgagacctagatccctcacatgcgcagttcgcaatagggtttgtgctctcgtgagactctaaggctgctgctgatctgacaggaggaagagctcaggcggtaatgctcactgcctgaccactcagcatmccctgttcagcctggttcctaacaggtcacagaccactactggtctatgatccagggtttagggacccctgctataatggaggtcacagaaaaaatggagacttgcttccctttctttcccaggttacagaatcttcacaagtgctagtagaagcaagcataggattcagtaagcaaatttctaaaagaatatgaaatgtaaaaagggtg

SEQ ID NO: 746501 - DNA, 625 bp, Homo sapiens
aacctttttggcaccagggaccagttttgtggaagacaattcttccacagaccgggatcagtggatggtttcaggataattcaagtgcattgcatttattgtgcactttatttctattattattgcattgtaatatataatgaaatattaataattatacaactcactataatgcattatagaatcagtgagagtcctgagcttgttttcctgcaactacatggtcccatctggggtgatgggagacagcaacagatcatcaggcattagattctcataaggagcacgagacctagatccctcacatgcgcagttcgcaatagggtttgtgctctcgtgagactctaaggctgctgctgatctgacaggaggaagagctcaggcggtaatgctcactgcctgaccactcagcataccctgttcagcctggttcctaacaggtcacagaccactactggtctatgatccagggtttrgggacccctgctataatggaggtcacagaaaaaatggagacttgcttccctttctttcccaggttacagaatcttcacaagtgctagtagaagcaagcataggattcagtaagcaaatttctaaaagaatatgaaatgtaaaaagggtg

SEQ ID NO: 746502 - DNA, 566 bp, Homo sapiens
atgtgcactttatttctgttattattacattgtaatatataatgaaacaattatataatttattataatgtagaatcagtggagccctgagcttgttttcctgcaactagccagtcccatctgtgggcaatgggagacagtgacagatcatcaagcattagattctcataaggagcacgcaagctagatccctcacatgcacaattcacaaaggggtctcactcctacaagaatctaatgccgctgctgaccgacaggaggcagagctcaggtggtaatgytcattcacccaccactcacctcctgctgtgcagccctgttcctaacaggccatggactggtaccagtccgtggcctgggggttggggacccctgcaatacagtattgttaactctaggcactatgctctatgttaagtgttcttaccacacacacaaatattaataataaagagggtagaaggaaacttttagagataatgtatatgtttatggcatagattgtggtgatggtttcactggtatatacttatctacaaacttatcaagttgtatacattaaatat

SEQ ID NO: 746503 - DNA, 566 bp, Homo sapiens
atgtgcactttatttctgttattattacattgtaatatataatgaaacaattatataatttattataatgtagaatcagtggagccctgagcttgttttcctgcaactagccagtcccatctgtgggcaatgggagacagtgacagatcatcaagcattagattctcataaggagcacgcaagctagatccctcacatgcacaattcacaaaggggtctcactcctacaagaatctaatgccgctgctgaccgacaggaggcagagctcaggtggtaatgttcattcacccaccactcacctcctgctgtgcagccctgttcctaacaggccatggactggtaccagtccgtggcctgggggttggggacccctgcaatacagtattgttaactctaggcactatgctstatgttaagtgttcttaccacacacacaaatattaataataaagagggtagaaggaaacttttagagataatgtatatgtttatggcatagattgtggtgatggtttcactggtatatacttatctacaaacttatcaagttgtatacattaaatat

SEQ ID NO: 746504 - DNA, 639 bp, Homo sapiens
tttttaatttggggcaaacgatttctgatatccatctatatctatatctacatccatatatcaaatctgtgcaactttccaagttgcagagaacttacctgtgtgatctggatggtgtatagaataacacgagcatttgtgaagtgattttgctaaaaaagatgagtttttccttgagagtcaatcagttggaaacattggaaagacacattaacctttagaggtcattgcttttttttttttttttttttttttttctgagacggagtctcgctcagtcacccaggctagagtgcaacggcgcaatctcggctcactgcaagctgggcctcccgggttcacgccattctcccgcctcagcctcccgagtagctgggactacaggcacccgccaccatgcccggctaattttttttgtattttttatagagacggggtttcaccgtgttagccaggatggtctcaatctcctgaccgcgtgatccgcccrcctcggcctcccgaagtgctgggattacaggcgtgagccaccgcgcccggcccactgcttttataaaagaaatcatgctttcagaatgtagacatagtagagatggatcatacaaagagatttaggcttgaattaagcagtcattttta

SEQ ID NO: 746505 - DNA, 470 bp, Homo sapiens
gaagcacaccttctacacggggaagacagacccgcctccagtgcccactgccctggtggctcagccagagtggcaccaccagtgggcagctgagtgggctgcaggggagagcccagaggtgggcagagcaagtgcacccatggctgcctgggaccaagtgatgattaatggtaatgcctttgatatcatggtgtcatggaattttttggagaaagacataccttcgatatcatggtgtcatggagttttttggatttgaaaacgttttcttataaatgtcatctaaaggctgtttctgtcataatctawcccaggaaataaatgtatcaagtattttaggatgaagtaaaggtcccgagaacattaaataactacactgtcataattgtcggttgcttgactctgaataaagccaaagaatatccaatggatacaatgcaagaaggaaagatgaccatttgcctggatcc

SEQ ID NO: 746506 - DNA, 574 bp, Homo sapiens
atagaaatctgtagctgttttctcccacttgacaatttcagatgactgtgtttgactcggggccttgtacatggacgagtataaacttgttatgtgcagaaatttctttccagttgcatgaagccttatatcctgtgcatctcaggtgtccagtcataactctcaagaccggagtagcccacctcctcttctcrggaattagccacagcggtgaagggtctagaaacttctctgtacaactaacaagagagggcaggaggatgacccggatgagaatgaacaggcttagagggaacttagtcacccttttcaaatatttgaagggatgccagacaggagaggaggcagactgatgctttcaatcaccaaaggaaagctctaggagccagcgatggaaactccatggaagcggatcatcactcagcagaaggaagaacattttaaccgctgaagagcgccaacgttttggcagcagggagcttcatgtccctgtgtaatgcctttgtagatctcatccccaagcagtaaaatttactggcaagctaattgaattagggtcatgttaacacgacac

SEQ ID NO: 746507 - DNA, 629 bp, Homo sapiens
aagttgcgtgtgatgaaatcacctttttttttaatggcataagtgtccctaagattaataagcaagacatcttgcatgacattcccttgccagggcagcgtctgagaatgggtggaaacagggaatgatgtgcatgtccccaggccaagtcaaaggccacaccactttgtgtcaggccaaatgcatggggcaaaaagttggagataaattctgagctggatagtgggaaggaaagcagtggrctaggagactggacagaaacacagagaaatgtggatgctaagattgagacgggcagaagcaaaggaaactggcagaataccctgagaggccacacatgggcctgtgctctaaaggtgtggaaaccaaggaatcccgtcactcaaaacaaatctctgcacctttaagtctctacttaattccattcaagtatctttaatgtgactcttcccatacaaggataacctgaatagatggggagtgtagcacatgaattaaaatcccactaaatttggaatttttaacaattcagcttttgggtatttgtttcttactgcctaaaaaattacacattttttcttctgtaattttttaaattatactttaagttctgggatacatgtgcagaa

SEQ ID NO: 746508 - DNA, 550 bp, Homo sapiens
actttgcagcaaagtctctatggcacgaggagccgtaagagttaaattttgacttagagtcagtttatcagtctcctgaatcaggcttgctgtggctgctatggcccacagacaacttgtccacctggaggccactgggtccagtcttttagacaaatagatgmctgggcatcaccatggccctccgctgtgacggtctccatgggcttccgggggccaagagagagggagccccggcccttttaatcatcagattcctctgctgcggggagattgaggacctttgtggggaaaatagagagagatcagactgttactctatgtagaaagaagtagacataagaaactccattttgttctgtactaagagaaattcttctgccttgagatgctgttaatctgtaaccctagccccaaccctgtgcttgcagagacatgtgctatgttgactcaaggtttaatggatttagggctgtgcaggatgtgctttgttgaaaatgtgtttgaaggcagtatgcttggtaagtcattgccattctctaatctcgag

SEQ ID NO: 746509 - DNA, 550 bp, Homo sapiens
actttgcagcaaagtctctatggcacgaggagccgtaagagttaaattttgacttagagtcagtttatcagtctcctgaatcaggcttgctgtggctgctatggcccacagacaacttgtccacctggaggccactgggtccagtcttttagacaaatagatgcctgggcatcaccatggccctccgctgtgacggtctccatgggcttccgggggccaagagagagggagccccggcccttttaatcatcagattcctctgctgcggggagaktgaggacctttgtggggaaaatagagagagatcagactgttactctatgtagaaagaagtagacataagaaactccattttgttctgtactaagagaaattcttctgccttgagatgctgttaatctgtaaccctagccccaaccctgtgcttgcagagacatgtgctatgttgactcaaggtttaatggatttagggctgtgcaggatgtgctttgttgaaaatgtgtttgaaggcagtatgcttggtaagtcattgccattctctaatctcgag

SEQ ID NO: 746510 - DNA, 675 bp, Homo sapiens
ggaccgttaggcattttttgttttaaggtttattgtggtgtaattgacaaatacaaattgtatataatttaaaaaagaagaaagaaatgaatgaatggacatcaatctactcatttatataataagaaatttggtttagttcaatgctaagagtcttcttagttccaaaaagcagtcaagtgttcctctactgaaatattagcactcagtagtcgcttattgttgagctcctcaactcaatctccattgcacatttttgttgttttcttacctgcccaaacagagacatctagggcagagaatattgttgtacctaaatatgtgtccttttctaatttttacccgactttgctaataattaggctatatgactgacattgtgtaagagaatgttwaggaaagcattaaattacttccaggttttgtacctaaagcatcctgaagagtctcatagagctctttggctcctcagtctcctagacgaagggaatccttgagactatgccatgaaggccctagcagacaaagcggcagcaaaatgaaggacttttagattcctgagtcagtgctttcatgtgtgacccaggaaagccacatgacctgtgtcgggctatgatgtaattaagaaataaatctttattgtgtaagccactaaggttacttttttaatggcaa

SEQ ID NO: 746511 - DNA, 675 bp, Homo sapiens
ggaccgttaggcattttttgttttaaggtttattgtggtgtaattgacaaatacaaattgtatataatttaaaaaagaagaaagaaatgaatgaatggacatcaatctactcatttatataataagaaatttggtttagttcaatgctaagagtcttcttagttccaaaaagcagtcaagtgttcctctactgaaatattagcactcagtagtcgcttattgttgagctcctcaactcaatctccattgcacatttttgttgttttcttacctgcccaaacagagacatctagggcagagaatattgttgtacctaaatatgtgtccttttctaatttttacccgactttgctaataattaggctatatgactgacattgtgtaagagaatgtttaggaaagcattaaattacttccakgttttgtacctaaagcatcctgaagagtctcatagagctctttggctcctcagtctcctagacgaagggaatccttgagactatgccatgaaggccctagcagacaaagcggcagcaaaatgaaggacttttagattcctgagtcagtgctttcatgtgtgacccaggaaagccacatgacctgtgtcgggctatgatgtaattaagaaataaatctttattgtgtaagccactaaggttacttttttaatggcaa

SEQ ID NO: 746512 - DNA, 552 bp, Homo sapiens
ttaatattttgagatacgttccaccgagacctagtttattgagactttttagcataaagggctgttgaattttgttgaaggtcttttctgcatgtgttgaaataatcatgtggtttttgtcatttcttctgcctatgtgatagattacgtttattgatttgtgtatgttgaacaagccttgcatcccagggatgaagcctacttggtcgtggtggataagctttttgatgtgctgctggattcagtttgccaatattttattgaggattttcacatcaatgttcatcgggaatattggcctgaaattttttgttgttgttgtgtctctkccaggttttggtatcaggatgatgctggcctcataaaatgagttagggagaattctcactttttctgttgattggaatagtttcagaaggaatggtaacagctcctccttgtacctctggtagaattcagctgtgagtccatctggtcctggactttttttggttggtaagctattaattactgcctcaatttcagaacttcttattggtctattcagggaat

SEQ ID NO: 746513 - DNA, 578 bp, Homo sapiens
ctgcagcctggtggggggagaggcatctgccattgctgaggcttgagtaagtaaacaaaaggccaggaaacttcaactgggcaaagcccaccacagctcagcaatgctactgcctctataggctccacttctgtgggcatggcagagctgaagaaaaggcagcaggaacttctgcagatttaaacgtccctgtctgacagctctgaagagggcagtggttctcccagcatgatgtttgagctctgagaatggacagactgcctcctctagtgagtccctgacccccgtgtagcttaactgggagacgcctcccagtagcggccaacagacacctcatacaggcaggtgcccctctgggaygaagcttccagaggaaggatcaggcagcagtatttgctgttctgcaatatttgctgttctgcagcctccactggtgatacccaggcaaacagggactggagtggacatctagcaaactccaacctacctgcagctcagggacctgcctgtagaaagaaaactaacaaacagaaaggaatagcatcaacatcaacaaaaacgtcatccacaccaaaatc

SEQ ID NO: 746514 - DNA, 624 bp, Homo sapiens
ttaacaaaaacttacaaaacatgctaaaaaaaacaagtgaaaatcacagtctgaaaacgtagagcaaacatcaaaaccagattcatatatggtgcaaatgctgtaattcaggaatttaaggtaaacctgattaatatgttaaaggctttaatggaaaaggtagacaacatgcaagaatacatgggtaatataaagagagagatgcaagaatcaaaaggaaatgcaaaaacagtaaaaaaaaatgtctttgatatgttcattaacttactagaaactgatgaagaaataattactaagcttgaacataggttgwcagaaatttaccaaactgaaatctaaaagacaaaagaatgaccaaaataaaaactgtaatagaacttcaggaaaatttcaaaatgtgtaatagatacataattgtaatactagagaagaagaaagatgtggtagaaatatttgaattagtaatagccagtaaatttccaaattaataaaggacaagaaggtactgtaagttcagagaacactgtacaaaataattgcccaaaaagccacatgttggcatgtcatatttaaattactgaataccaaagacaggaaagtattttaaaaaataataaagaaaaa

SEQ ID NO: 746515 - DNA, 625 bp, Homo sapiens
gaaaatttatgagacaaagagatacattatatattgataacatggttatcccaaaaaagactaacaaccctaaacatgtatacaactaaaaagggaccataaaaatatatgcatcaaaaactcacaggatgacatcaaacaatagacaaatccactatttgggtagttcaactccaatctttcattaattgataaaccaagaaggcagaaaatcaataaggataaagctgatctcaataccagccaccttgatctaatgacatttacagaatactttaatccaacaacagcagtatactcattcttcttaaggtttcatggaatagtcaccaaaaaatataaatatgaatagtctggaaaatgaactttaaaattttaaaagtacaaaaaacatacaaagamtattaccagaaaaaatgggattagactagaaaacaataacagaaagatggctgaaaaatccccaaatatatgcagattaaaaaagtcacgggtaaacataggtaaatgaagaggtttcaagagaaagtttaaacatattcaaactaaatgaaaatgaaaatataacttgttaagtttgtgtcatgcaatggaaacagtgcttaaagtgaaatttatagcatta

SEQ ID NO: 746516 - DNA, 634 bp, Homo sapiens
atagaaagaaaactccacgccaacattcttggtaaacagtggtgcacaagtcctcaataaaatgcttgcaaaccaactccaacagcacatcaaaaagctaatccaccacaatcaagagggcttcattcccggaatgaaagattgtttcaacatacacaaatcaaaaagtgtttttcatcacataaacagaactaaagacagaagccacataattatctcaatagatgcagaataggctatcaataaaattcaacacccgttgatgttaaaaactctcaataaaataggtattgaaggaatatacctcaaaataataagagccatttataacaaacccacagccaacatcatactgaatggggaaaagctggaagyattccccttgaaaactggcacaagaaaaagatgacctctctgattcaacatagtactggaagtcctagccagagcaatcaggcaagagaaagaaataaagggcattcaaataggaagagaggaagtcaaactatccctgcttgctgacgacattattctatatccagaaaaccccatagtctcaactcaaaagctccattagctgataaagaacttcagaaaagtttgaggatacaaaatcaatgtgcaaaaatcacta

SEQ ID NO: 746517 - DNA, 611 bp, Homo sapiens
ccacataattatctcaatagatgcagaataggctatcaataaaattcaacacccgttgatgttaaaaactctcaataaaataggtattgaaggaatatacctcaaaataataagagccatttataacaaacccacagccaacatcatactgaatggggaaaagctggaagtattccccttgaaaactggcacaagaaaaagatgacctctctgattcaacatagtactggaagtcctagccagagcaatcaggcaagagaaagaaataaagggcattcaaataggaagagaggaagtcaaactatccctgcttgctgacgacattattctatatccagaaaaccccatagtctcaactcaaaagctccattagctgataaagaacttcagaaaagtttgaggatacaaaatcaatgtgcaaaaatcactagcattcctatatatcaaaatccagtgygaaaccaagagccaaaccgagaacaaacccagtaaggcaattttattcacaagtgccacaaatcaacaagatgcctaggaatacaggtacctagggaagtgaaaggtctctacaaggggaactacagaacaccactcaaagaaactagagaaga

SEQ ID NO: 746518 - DNA, 632 bp, Homo sapiens
tctcattcctaatcttagaggaaaacatttcagttgctcttcattgaatataatgttggctgtgagtttttcataaacaccctttattatttgcagaagtttccttgtagtcctaatttgttgagggcttgtatcatgaaagaatattagatattttcaaattctctttctgtatcaattaatcatatttcaatttattttgttaatgtgctatgttatgttgattgatgttcatatattgaaccacccttgcattcttggaataaatcccacttggtcataatataggattctcttaaaattctgttggattyggtttgctaatattttgttgaatagttttgcatttgtaataataaataatattgatcttttgttttgttctcatgtgatgtctttttctaactttattatcagattaatcctggcctcaaataaggagttaataaaaaaattacttaggaaaacatcttctacgtttaggaaaatttaaaattgactgatgttatgttttaaaaaacgtttggaacaatttgccagtgaagacatatggtcctggggattcttttgagggaggttttgagtgctgatacaatctttttatttgttgtttgtctttttaaaatttttat

SEQ ID NO: 746519 - DNA, 519 bp, Homo sapiens
gtttgatgcaatcccatttgtatgttttcgctctgacttctttcttgatggcaatctactcaaagaaggacgccgacttcaaacactgtgaacccaagatggtctgtacagacctgcactgagttctttgtcatatatggggaggatttaactatgtcttggatgagtcttagaaggagaaggaggactgggaattgttgggggaattaaagacaaggtaaggaaaragccagctgggagtgtgagagtaaattaacaatagtaatagtgataatcatgacacctcatttaattgaacacttactatgtgccagaccctgctgtaggagctacatatgttacttaaatgttaacatatccctcctcctatcatcatcctcattttgcagatgaagcaactggctgataaatttcttgatgtgccagtaacagaattgaacgtacgtgtcactccagtgctctagagacaggtgtgaggggggagaacgtggaatttagagctgtcctatcctggagatc

SEQ ID NO: 746520 - DNA, 600 bp, Homo sapiens
ctgatgggaataggacaacttctaggctggctgcctcggctcccccatccccgttattcataaggttttactctaaatcgttcctgcaccccactgttaagtgtcctgccagatgcatcaaggggatttacaatcacccatttgtgcactccatggactttcctgcttagttctgtaattccctctgcttacgtagatgaaacccattgttacacttgtgcgcttacccatgtgcttagtgctagcaattctgagyactcgatattgtcatgagaaaatactacaagattgcaacccagctctctgcacaggcaggcctatcctccccgcagtagcatatgagctccatgaaagctacaatctagaatgctacatcccagtgtcttgaactgtgcctgacatgtagtaggcacccaatagacatgggtggaacagatgattgagttgatgagcagaaaaaagcaagaggcatgttgcatcttctgtgcacaaaatcccaccagcaaaggaacctatgtacaagcttctttttttgttaaaggcctccccttacacctcgccaaccccacaccctttttcaatacacaatctcctggaaaa

SEQ ID NO: 746521 - DNA, 530 bp, Homo sapiens
ttatttctagttcatagatagtatcttctaggtgtgtcctcatggtagaaaggactagctggctctttggagtctctgttataagggcatgaatgccaagcatgagggcttcacctttatgacctaatcacctctcaaaatttccacctgccaatttcaacamcttagaggttaggatttcaacttctggatttgaagggaacacaaacatttagatcacagcaattttgaccacttggttatgggggtatcttccaagtctctcccctataaagtcttttaaaccttttctaaactctgttacttggaagttctatgagtagtccatgctcagcgggagaagaattaaattctaccccctgaaaggagaaatatcaccatatattatttaaattcttctgtaagaaagtttttccttctcccccattatttatttattcattcacttatttatatcagtttggactcatgaatatttgtttaatttgttaggttgtaatctaatactattgtgttatttttttgctcaa

SEQ ID NO: 746522 - DNA, 645 bp, Homo sapiens
atgtgacttatacaaatatgatagatgaacattgggacctatgagtttgaatgagatccccaagcagatagaaaagaagagggttgtgaaagcgtcctagaggatggagagggaaaagaaaaagcagaaagagattaaagatgagcagtcagggaagtagaagaagaaccaaaatagagtcatggaaggcaagagaggaaagaaatcaataacaccaaaggctgcagagagcaaccaccatttgtctacacagaggacttggccaacagagcctgaaaggcagtaaatgctgggttctgtttttgagaaatgctgagacatctggctggtaggcccaaaagggatgtgagacggtggcctgttgaagaagcaggagcatgggagacccagcttgctygttggtctttgtggatgatagctcaggcaagatccagaactgagatcagacttcagatcttcttgtttccggcccaggactcgattcttattgcgtttcagagctgtgtctcttgcttctaatatttgaaacagatgttgtgaaatctataatttccagctttgaaatgaattaatatgttaacctcctacttctcagatgcattctgaagaaatagtactaagtgtgacacaaggttagaacatcaa

SEQ ID NO: 746523 - DNA, 613 bp, Homo sapiens
atccaggtcagctcctggctgggagccatgaaaggaggacagctaagtgacagagcctgaggctgtgctctacatgtgggggaagagggaaagcaggtaagaggacaggaaagaaaggaggaggaagaggaatggagacagaagtaaattctcctaatccttccctaggtgtctgcctctgggatctctctcttcatgatttcctgtctatwcaaagccatacactgagagatgtgatgccggcttgacatgccacccaggaaggctgcccagtcctgggtcagcgtttgttggtccggtcaatctgtccaagaaattttcatttctggcttggaaactttcttagtttgggttcccttagaagcactttctgagactgcatagtgagtgccaggggagtcataaagtgaaacaggggagcgaaggcagccatcaaggcaaatggatcttcttccctccaagtggctctgggagccagtgtagaatacttgcttcagatttatcctacccaaggagccaggggcatgttccttagatgccagctcccatcagtcgttgagagctgctcctggggaaaggggaggttttgattcccagcacctgatctgctcct

SEQ ID NO: 746524 - DNA, 568 bp, Homo sapiens
catgtgggggaagagggaaagcaggtaagaggacaggaaagaaaggaggaggaagaggaatggagacagaagtaaattctcctaatccttccctaggtgtctgcctctgggatctctctcttcatgatttcctgtctattcaaagccatacactgagagatgtgatgccggcttgacatgccacccaggaaggctgcccagtmctgggtcagcgtttgttggtccggtcaatctgtccaagaaattttcatttctggcttggaaactttcttagtttgggttcccttagaagcactttctgagactgcatagtgagtgccaggggagtcataaagtgaaacaggggagcgaaggcagccatcaaggcaaatggatcttcttccctccaagtggctctgggagccagtgtagaatacttgcttcagatttatcctacccaaggagccaggggcatgttccttagatgccagctcccatcagtcgttgagagctgctcctggggaaaggggaggttttgattcccagcacctgatctgctcctggtgtgttctagcagtgggagaaagcc

SEQ ID NO: 746525 - DNA, 651 bp, Homo sapiens
acatctgcagcctttcccaaaatgactatggcatataaggaggcctggcactgggcagagggtccccagtccagccaggagaagcaagaccacattacattttggactcactcatgtaactattttgagctttgagtcagggctcagaaacatctctggtcttcagggtctccrgcatcacggaggcacaggtgggaaaaaggaaggaaaaaaaaaagggaaagagatgatcaaactagaagaaaatagggagcacaaagagacaaagaaaagcaaaaatgatataacccacagaaaagccagcagaactccaaagaagcatgaagtgggtcacacagatgtggtaggtgcaggaagttgaaataagagacaagcctggagagagatttcagagcagttggtgaaaggattctaggcagcatttagcccaggatgcttctctttctttctggggggctaaatccaagaaggtgtattaaggtctgtcataaagagagagctgcacctctaatgtatctatgatgggacaattagcaatacagaatagaaattgctagggcaatagaatcacaacagtctatgtggttgagaagtctggccagcagcatttttggtcagagttgtgcccagtgtgacacaaaccagcaatgg

SEQ ID NO: 746526 - DNA, 498 bp, Homo sapiens
tctaggcagcatttagcccaggatgcttctctttctttctggggggctaaatccaagaaggtgtattaaggtctgtcataaagagagagctgcacctctaatgtatctatgatgggacaattagcaatacagaatagaaattgctagggcaatagaatcacaacagtctatgtggttgagaagtctggccagcagcatttttggtcagagttgtgcccagtgtgacacaaaccagcaatggctgccaacatctggatcaccatgagctccgaatgtgtatctgcaggcagcgtgtcagccaaggaagacrgtctcagcgggtcagcgctattattccactagctcttcctcatttgagagccccagggcattggatttggtcatgtaaaatgatgttaaatggaactctttcttatgaccccaaattttggcaaagaagccttaaagttgaagacatgtgagaagtccccacatactccagagaggtgctaagcatac

SEQ ID NO: 746527 - DNA, 614 bp, Homo sapiens
tctgtgtgtcaactccctcacccaaagataataagactccctggaaataatattaatagtaacagctaacattaatcctgctctcaataagtatcagaaactatagtaagttgaaactacaccaagaagctacactaaatatttctgtaattataacttactcagcatgtgcctagttcttttggcggtgcattacaccattattactcattcaatctttacgttaagcctgtaagctaattccattgttatgcctatttttttgatgaagactctgagtcacaaagaggttaagtgattgcttmggacacatagctaatgagtggtggaaccaggatttgaacccccacagtaaaacatgttttgtagggcctttaacactattccacattttcctagtctttgcattcattgtatcacatattctgaactctgcctaatttttagctctgtcttgaaccatcctctgccctaatctctgcattctagctgtactggcttttttatttcccaaacctgccaggcttcccccaccataggaccttttatatactatatgagacagggatttaatttctttcttttgcatgtggatatccattcattcaagcact

SEQ ID NO: 746528 - DNA, 643 bp, Homo sapiens
agtagggccaagaactcgagtttcctgaccaccattcgaagctgtcttttagaagctgaaggaaagcttcaccaccagatcttatggatccagaaaagatcccaaaaatatagttgggtttgaggtatgtcaatgtgtttcaatgatgatttgctatttgagtcataagcacctccaraatgtctttgtttcagccaccgggatatcctgtgtattagaccctaaaataggagtcatgtaagttcaagttaggagaaagccagagaactcggcacccaataaagaaaggaaataacagtcttttcaaagactcatgaaacagccactaaaactgcctgtgtattagaccataatacaaaattcactacattttaaaagttcagacttattcagggctatatttctgacccaaaaagcaataaaactagaaattattaagaattatttttaatccatccacttgcagttataggcattcttctaaataactttttgattaaagaggcagttaagactgaaattatgaactatttagataaactgtttccaaccccaaccctaatgctatctgaatatttttagaccagtcttagaatctctcgattttcttctctctgaaaggaggttgttgcaagattgaaaa

SEQ ID NO: 746529 - DNA, 592 bp, Homo sapiens
ttaattaatgagttaaataaaatctttgacgcatgttcattttgtctttgaaaaggagtcatgatttcgctttttgttcttaatattctttaacattttccactgctgcctgagacactatcagcctgggttactctattctagaaacacagtatgctcattccttcccttttcaggtctcccctgcccagggatcacaaacacacacacgcgtacacacaygcacaccaggagcagtgagcaggcttctagggaaagttgagaaggtgagaaagcaaaaagggaatataacagccaattagaccaaggttggcaaactatggcccttgggcccaatctggtttactactttgtttttttaaatttttattgcaatgcagccatatccattcatttatgtactatctatggctgcttttgtgtgaccacagcagagttgggtagttgtgacacagactggcctacagtctaaaatagtcaatagctggccctttacagaagaagtttgctgacttctgaattagacacactctgtaccctttacagcaagcttgtccacctgccgcccgcaggccacatgcagcccaggatg

SEQ ID NO: 746530 - DNA, 522 bp, Homo sapiens
aactcaagagaaaaactaacccatgacctccagttacaaacgagagcagtgagcactttgggctccatggatacctcacctggttgcctggtgttcctgggggtcattggagtctgactttgagtcccacttgtgacactaatctcttaaaagaaaaaccttagacaaataagagtttaatagagcaaagaacagtttgtgaatcgggtagccctcrgaagcagaacaggttcagaaagactttggggctgccacatgactggacacttatggacacaaaaagggaaggattgtacagaaaacagaagtgacttatagaaacagctggctcacttagagcttggagttcgctaaagcgaataaatttgaacctggtttgaatacgtggccacctgtgattgactgaaacttggctgccctgattggctgagactcagttatctgttacaaagccaaattcctaaattagatttatggtttgtttacagagttaggttttggttacataagggcttgagtatg

SEQ ID NO: 746531 - DNA, 543 bp, Homo sapiens
gggttccaggactaacataaggatgtacaattataaagaaagactgatgaggacctgcccaaagcatgtggagaaggccaagagggggttaggggaggtgctgcaaataccatgacaatagagaccactgggaacctcagagaaaagggaaarggggcatatattttcaataaaatactgacacatgtaagagaaaatggaaatgtgaattagacataaatttatagaaaaataaagctaacattatctgcctttaatgcagacatttaaatttccagcagatggagatgttaccacgtgaaagagaagtttgacaggtggactcagcttcgctttctaaaacatgatggtttgtttcttaggagtgagacaaagagaagacccctaaaataggtagactcctgagctttaaataaataatactttttaaaagaaactttaagtgttacctgagttcctaattcagagggttagctttttaaatgatgaaagcattcgccagttgtttccttgttttagaagaatttggcaaaaatcatttgt

SEQ ID NO: 746532 - DNA, 536 bp, Homo sapiens
tttactagcagtctgtttatgttctcattcgatttcacatttaacagaagaagaccccgtctgataggaaccagtggcgtcacaccctcacacatttggccctggctggctccgtgcacgtctgaaggagggcgtgtggagcttttgcctcgtttcaatgccttgatgttgtagctctggtttctgaaatgttcttttgtaaatcaggaactgtactgcaaattatctgtatgtttaccttggtgaacagtgctatttgggggacttaatttgcctaagcatgaaacctgagtttgcacattgctgggaggaaatgagaagttctccctgccccaggatgggaggatgccagtgggcgttcactcatgctcaccctatagaaaaggawtggaaacctatgtcggcccagataactgatgaggcagctggggctcctgaaggctcacttttccaaaagtaaacgttccaaaagtttcttgaagagtctgagggatgctgatgctgggtagagatggggagagagacctgggctgcac

SEQ ID NO: 746533 - DNA, 596 bp, Homo sapiens
aggcatttaatttaaaacttcatttactttttaaaaattaacacaatacatgttcacaattctaaaaactcaaatacaacaaaacgtttaatataaacttcttaccctctcattcccaattccattccttactttcaaacatttcagcagtttcttctatttatttycatatttgtatactctctctctctctctctatatatatatatatagctatttcttgattattttgaaaacttactgaccactgaataatgacctcctccaggtaaaatgaggatatctttcttttacatcaactcctgtccccataggcttaatgtgattatataaaaatttctagttaaatcagtagaactgggacaggccacaaaggctgatccaagccgagaaattggagagaataatgatttttttcttggctaaagttgtgtatccttggaattactatcaaagcagcaaacatgcaatgcaaaagatccacctaagcattaggctatatatgtatcaactctggctcttagtacctcccttgcttcctctcccaaggtgcagcctgggttcaaggtcctagcagtccacacattgtgaggact

SEQ ID NO: 746534 - DNA, 576 bp, Homo sapiens
tctaaccacagattagaaagagcagctgatcttcagcctgggtgacagagcaagaccccatctctataatatatatatatatatataatatatatattttatatataatatatatatataatatatatattttatatataaaatatatatattatatatataatatataaaatatatatatttatatatatattttatatatataatatatatatatatatatatcagattaggaaggcatggtggtgtgcacctgtagtcccagctactcaggaggctgaggaggtccaggagttcgaggctgcagcaagctacgactgtgccattgcactccagtctgggtgacagggagagatcctgtctctgaaaaaaaaggaggagaakaaagagcagccgatcctatcttcacatggcaggaaacaaggtcatgagcagtggccacacaggactgttttattttgatataatggaagtggcatgggaaaatgcgaaaagaaaggtcaccctgaatagctctagggaagaaaaagaatgttgggcatttcaacaaacagcattacagaaaagaagaagcag

SEQ ID NO: 746535 - DNA, 511 bp, Homo sapiens
ccataggagagtaaggtcccacagagagtgataaatgccaaaggacaaataatcagcaggcttcaggggatcccactgagtgagtgcaagatcttagtagaaaacaagtatttgataaatagttgaaacatgaagtcatgcttgttcagacatttattcccagtgtcatgaaaagagcataagccaagaggtagaagatttgtaattcaaattcatttctctactttctggctgtaaraacttggacaagatacctaatgcatttgaatattcatttcctcatctgcaaaatatgtgaacaatatttcaatgactttttgaaagcaacatgagaaaaagctgtaagtgcttggcaaagaaaaattgcaggtgctttttgaatgatgtcattcatacctcagtttccccatattacacaggatatgaatgacatggccatatagaaaaagaatcattgaaatttataatgtgagaaccagagatccagagatatgacttcagggataagaat

SEQ ID NO: 746536 - DNA, 597 bp, Homo sapiens
attcaatagtgctgtgttttaattgctcaaattgtttcagctttggacattgggagctctttcagttgattcttctttccttttaacacattctcattcatgtaaggatgcttcttgttgatatggtgcttcgtttgtttgtttgttttgagcacttccttactttctggcaccatgagatgcttcaagctcagcttgtacatttcctgcccccatcctagaccaaccatttctccaaggagctttggttctttctgttggagaayagcatcagaaaccaggatctagatgcaagatgtgctcattcctactctgtattgttgcctctaggcccccttagctgacagaacaagaaaatatgtgtgtatgtcagcccatgtatattgatatatctataaacatttctatatgtaactatctacatcggtattaagctaaacatgagttcacacagatgtctccaactctaaatctgttgctacatagatcattctggcctcctccccttactcatctgtaaccccccaatttaacagtgataaaagtagcttcaaatacctggcatccatttccttatttcattcatgtatacatgta

SEQ ID NO: 746537 - DNA, 582 bp, Homo sapiens
ctcagatgtcatcttccctttgcagcctttagcaccttaccaattagagtagggacctcttaattgtggtcccaaggcagcccatacttccctctatccaagggattctcaaacctccctgcagaatggaatcacctggaaagctatcaaaacatagcaatgcccaggtcttactcacagggattttgatttcattggtctgagttggagtcaagcatcactatataatatagccaggtggttctattattcagccaatgctgagaaccactgctttattgtaaatcttgcaccatattgtattataagtytttgtttatccttcccaagattaagtttcttgagaactgaaattattttgtattgatatgcatatcgcttgagatttttaaaaaaattccaagcactaggaagtgttcaataagtagtttataaataataaatgtatgactgaatgaatgaataacgtgtacacatcccaaccacccacccatctatgcttagaagcttgcttacattcatgcagctgttcagggttagaaattgtggaaaataaaagaatcaatgtggatcccaggtgtc

SEQ ID NO: 746538 - DNA, 613 bp, Homo sapiens
acatttcttcttccttgatgttaaccttggccatgggacactcttgggccagtgggatgttagtggacaagatgtgagtgaagactcagcatgtgcgtgagggtcaggtttgccatctcacacaactgtttttctcagtgagaagaactttcctcagacagatgctggtttagggaggatgagagacacatggaacagatttggamacaaccaatagctgaaagccaagttcaggctagataaactgaactaaactttatctccatgtgggtgagtgagaagaagatgcttattttctgccactgagatttggggggtgagggggacatcatgacacaatattgctatggcaataccagctgaagcacacctacatcggaatcacctagagtgcttgttgtaaatgaggtttctgagccccaatctagacctagtaagtgatcatctctggagtgtttttagaactttgtattttagcaagaccctcagaaaatttttacactcactactgggctacagacaatatttatcagcatgctactttcagtggcaaggaaagagcagtaggttagcacccagagagctactacatttacctacataaaacttctga

SEQ ID NO: 746539 - DNA, 613 bp, Homo sapiens
acatttcttcttccttgatgttaaccttggccatgggacactcttgggccagtgggatgttagtggacaagatgtgagtgaagactcagcatgtgcgtgagggtcaggtttgccatctcacacaactgtttttctcagtgagaagaactttcctcagacagatgctggtttagggaggatgagagacacatggaacagatttggaamcaaccaatagctgaaagccaagttcaggctagataaactgaactaaactttatctccatgtgggtgagtgagaagaagatgcttattttctgccactgagatttggggggtgagggggacatcatgacacaatattgctatggcaataccagctgaagcacacctacatcggaatcacctagagtgcttgttgtaaatgaggtttctgagccccaatctagacctagtaagtgatcatctctggagtgtttttagaactttgtattttagcaagaccctcagaaaatttttacactcactactgggctacagacaatatttatcagcatgctactttcagtggcaaggaaagagcagtaggttagcacccagagagctactacatttacctacataaaacttctga

SEQ ID NO: 746540 - DNA, 603 bp, Homo sapiens
agaagttagtctatagaaaattcttccaaactttatagcacatatggaaaatgaacgtgtaggtaacacggaaaaagaaaagacatgatggaaattttcccaaatgagataacaatcttaagaaatcacaagccattactaataacaagttgtcaagctgaaaaaaatctaaactatcaataataaaaattttgtgattaaccatgttagaagaaagacaattatatttctrttcaatctattaaattataataaaacaaaatcaccacttaaagagcatctagaaaaaaatttaggacaaaactacagaggtatgtcaggcagtaaaataatgcacttgtgttatttttccaggttttgtgatgcttgtggattttgtgtcagcattctagatttattttttcattctaaagaaatatttactttttcacctaaatttatattcaaacgttgtattttttttttcaaattcaatgccttatcatgggcctctgcaattacagttagagacatcaacatccctctctcagtaattgatagaactactaggcagaaaatcagcaaatacatagaagacttgaacaacagaattaatcaatagga

SEQ ID NO: 746541 - DNA, 641 bp, Homo sapiens
cagggagagctgcttagagatgtagtaggggaaaaaaacccagccagtgtagcacccagaggatttggcacaggagtgtctgcagtgaagctcagccagggatgtccatcctccaagccttgctgggtttccctaggagacttgagccctaggagagctagtggacctgaaaagagcagattgatcctgccccgagataggaccagttctaccagagcagccccctgtctgctggcctcwcctggagtttcagtctggctgtgcctgcttacagtgcagcctcagatgcccagccagagtgccttctgggggcccgtatcatagctcatatgctggcagactgcacctgaccatcggacagctccagcagagcagccatttgtgaagtgcaccaggtcactcgcacttaccccccaccatatccttccctgtgcaactttgccagcatacacttgcctatggctacccccctatcactttgccagcacacatgcatacaggtggacatcacctcccctccccaatggatgtacatgtgtgtatgcactccaccacgctatgagtgccggctggagcacaccctgccactccctgactgtgccaccattgctggtgcaaatgtgcccagagattccagcaga

SEQ ID NO: 746542 - DNA, 641 bp, Homo sapiens
cagggagagctgcttagagatgtagtaggggaaaaaaacccagccagtgtagcacccagaggatttggcacaggagtgtctgcagtgaagctcagccagggatgtccatcctccaagccttgctgggtttccctaggagacttgagccctaggagagctagtggacctgaaaagagcagattgatcctgccccgagataggaccagttctaccagagcagccccctgtctgctggcctcacctggagtttcagtctggctgtgcctgcttacagtgcagcctcagatgcccagccagagtgccttctgggggcccgtatcatagctcatatgctggcagactgcacctgaccatcggacagctccagcagagcagccatttgtgaagtgcaccaggtcactcgcacttaccccccacyatatccttccctgtgcaactttgccagcatacacttgcctatggctacccccctatcactttgccagcacacatgcatacaggtggacatcacctcccctccccaatggatgtacatgtgtgtatgcactccaccacgctatgagtgccggctggagcacaccctgccactccctgactgtgccaccattgctggtgcaaatgtgcccagagattccagcaga

SEQ ID NO: 746543 - DNA, 641 bp, Homo sapiens
aaccaaaccaaagtgacgctttcaagtgattataaaatagatccaaataaaatatcctataaatgcagccaaatcactaagaaatagatacttgggttactggttttttgaaagaaaatttttttttaatattttgttataatggctttaatgtagtagaaaagaacaaaactggagagcggatttattatgggtagccagaaaagagtcatgtttctaacggaactgaaacattgctcattcatacattctaagagaagaagctgtttcaaaacatttgaagtaacaggacagaataaagcaaataagtaactggaggcaacaacgggataaaaacgatgagcccgagaactgycttcaagtctgtagaccccatgaaggacctcaggcccttggaagacagttggagagacaatgtaggcctcctagctctcattaagggatacaaggtagtctgtttttaacttgtttctgtaacagagcatttttttttttttacttctcctatgaatttcttaaaaaaattgggctcgattaaagttgtttctatctttaagatctcatgagacacacaaactttataaacaaaaggggaggaatcagattaactccttttacagggcaaaataaatttaacaccc

SEQ ID NO: 746544 - DNA, 641 bp, Homo sapiens
aaccaaaccaaagtgacgctttcaagtgattataaaatagatccaaataaaatatcctataaatgcagccaaatcactaagaaatagatacttgggttactggttttttgaaagaaaatttttttttaatattttgttataatggctttaatgtagtagaaaagaacaaaactggagagcggatttattatgggtagccagaaaagagtcatgtttctaacggaactgaaacattgctcattcatacattctaagagaagaagctgtttcaaaacatttgaagtaacaggacagaataaagcaaataagtaactggaggcaacaacgggataaaaacgatgagcccgagaactgccttcaagtctgtagaccccatgaaggacctsaggcccttggaagacagttggagagacaatgtaggcctcctagctctcattaagggatacaaggtagtctgtttttaacttgtttctgtaacagagcatttttttttttttacttctcctatgaatttcttaaaaaaattgggctcgattaaagttgtttctatctttaagatctcatgagacacacaaactttataaacaaaaggggaggaatcagattaactccttttacagggcaaaataaatttaacaccc

SEQ ID NO: 746545 - DNA, 641 bp, Homo sapiens
aaccaaaccaaagtgacgctttcaagtgattataaaatagatccaaataaaatatcctataaatgcagccaaatcactaagaaatagatacttgggttactggttttttgaaagaaaatttttttttaatattttgttataatggctttaatgtagtagaaaagaacaaaactggagagcggatttattatgggtagccagaaaagagtcatgtttctaacggaactgaaacattgctcattcatacattctaagagaagaagctgtttcaaaacatttgaagtaacaggacagaataaagcaaataagtaactggaggcaacaacgggataaaaacgatgagcccgagaactgccttcaagtctgtagaccccatgaaggacctcaggcccttggargacagttggagagacaatgtaggcctcctagctctcattaagggatacaaggtagtctgtttttaacttgtttctgtaacagagcatttttttttttttacttctcctatgaatttcttaaaaaaattgggctcgattaaagttgtttctatctttaagatctcatgagacacacaaactttataaacaaaaggggaggaatcagattaactccttttacagggcaaaataaatttaacaccc

SEQ ID NO: 746546 - DNA, 643 bp, Homo sapiens
cttcatgttaggagttaagcattttcctcagtatgctacatcatagatatagatctactggcatacttagctgtgctcttatcattggccaactgggctgtcttcctctgtatcatgagactacctggagagcagaagctgtaccttttatctatgattcccagggcacagataacccaggtacataaaggcagtcatcacaagtcggctgaatgcattaagtggaatttcctttttacatatactgaagtgacaatactagtgtatcaatagaatattggctaaaatattttgtcttcatattgtgagatatatatgtatatgcatacatacacatacacatatatattcatttttgtatgkattttctattttttactttatatatacatactttatttttagagcactgcatgcaatacaaagctgagtagaaggtacaagtttttccacatatcccctgcttctgtgtacgtatagcctcccctattatcaacatcccccaccagagtgatacattcactataattggtgaaactatgttgataccttattattacctaaagtccatagtttatatttggactcactctcagtgttgtccattctgtgggtttgaacaaatgtataatgacatgtatcc

SEQ ID NO: 746547 - DNA, 655 bp, Homo sapiens
tcttaaagcgttcctctggttaaagaatgttcttccatgtttttcagtcacacagacctttattcactatacctagagtgctggaaaatgaatatacctttctttatgcttttctgaggtaaaacagataacattatcaccaggttttcatttagaaaatattcaaacatatcagctctatcaaatctatcaaaaagttataaaaatactatcctcatgtaccgatcactatattatcaaatttttgttgcatatgttttattgctccatacctctctctacrtgtgtgtacctgagtgtcctcttccctactcaaatatttgttattttctgaaacacttggtagtgtgttgacaccatcataacacttcacctaaaaatattttggtatcagttccttaagaacaaagacattctgtaatgtattatcaatactattttcaccaccaataaaattaataataattccataacatcatttaagttcatactcacatttttctaactgccacaaaatattttattatgttgttattttttaatctaggaaccagcaagttcacaaagtgtcgattttttgttgtatctgtttggacgcctttaaaagcctgaagcctcatttacatccttcaaactttcctttcttgttttgtcc

SEQ ID NO: 746548 - DNA, 655 bp, Homo sapiens
tcttaaagcgttcctctggttaaagaatgttcttccatgtttttcagtcacacagacctttattcactatacctagagtgctggaaaatgaatatacctttctttatgcttttctgaggtaaaacagataacattatcaccaggttttcatttagaaaatattcaaacatatcagctctatcaaatctatcaaaaagttataaaaatactatcctcatgtaccgatcactatattatcaaatttttgttgcatatgttttattgctccatacctctctctacgtgtgtgtacctgagtgtcctcttccctactcaaatatttgttattttctgaaacacttggtagtgtgttgacaccatcataacacttcacctaaaaatattttggtatcagttccttaagaacaaagacattctgtaatgtattatcaatactattttcaccaccaataaaattaataataattccataacatcatttaagttcrtactcacatttttctaactgccacaaaatattttattatgttgttattttttaatctaggaaccagcaagttcacaaagtgtcgattttttgttgtatctgtttggacgcctttaaaagcctgaagcctcatttacatccttcaaactttcctttcttgttttgtcc

SEQ ID NO: 746549 - DNA, 668 bp, Homo sapiens
tataggacttttatatatatacctatgtgtgtgtgtatatatatatacacacacatgtgtatatatgaaaattaaacctgaattacacacacataggtgtatatatatacacacatacacacacatatatatatatatacatatatatgtatawatatatgttgcaggatatgattttggctaatgaaagtcaattgctttcctatacaccagcagtgaacaattgtaattataaatttgaaacacaatgtaattttcattaacacaaaatgaaatatttaggtcaaaatctaaaaaaatgcatacaagatctatatgagaaaagctacaaaactctgaggacaaatgtcaaagctctaaataaagagagatattctatattcatatatggaagcctcaaataatgttaagatgcgagttctcccaaacttgatctgtaaattaaatgagatcctgatcataaatcaagcatattgttttgtggaaattgacaaatttattctaaagtttatatggaactgcaaaatacacagaagattcaatgcaacggttaagaaaaaggtaaagtcggaggattgacactacacaacttccagacttactaaaatctatggtaatcaagagagtgtagtactggtgaaataacaaacatatggatcaatggaaag

SEQ ID NO: 746550 - DNA, 668 bp, Homo sapiens
tataggacttttatatatatacctatgtgtgtgtgtatatatatatacacacacatgtgtatatatgaaaattaaacctgaattacacacacataggtgtatatatatacacacatacacacacatatatatatatatacatatatatgtataaatatatgttgcaggatatgattttggctaatgaaagtcaattgctttcctatacaccagcagtgaacaattgtaattataaatttgaaacacaatgtaattttcattaacacaaaatgaaatatttaggtcaaaatctaaaaaaatgcatacaagatctatatgagaaaagctacaaaactctgaggacaaatrtcaaagctctaaataaagagagatattctatattcatatatggaagcctcaaataatgttaagatgcgagttctcccaaacttgatctgtaaattaaatgagatcctgatcataaatcaagcatattgttttgtggaaattgacaaatttattctaaagtttatatggaactgcaaaatacacagaagattcaatgcaacggttaagaaaaaggtaaagtcggaggattgacactacacaacttccagacttactaaaatctatggtaatcaagagagtgtagtactggtgaaataacaaacatatggatcaatggaaag

SEQ ID NO: 746551 - DNA, 636 bp, Homo sapiens
atacaatttggccctttttactattaagaacattggtgatgcagcctttctaggagtgtgctgcactaattatctccgagatttgcttctaagccactgatatctcttcaacaggttttgatattgacaccttgtttatgtgttcttcacagcaggtatcaataggaagttttcagtcaaccacaaggtctcataatccttcctggaactattcttgaatagtttgccgtctgaaatgttgagagcttgccccttggataacatgccccttggataacaaccaagtcagttcatgagcaagcagtggcaaacactgtgtcccaccagctcctgactgactgagactacacgataccattyatcattaagatgtacctggatttcaagcatgttactgtgaaaaataaaatggagtcttagaaatgatgatataagtagaatttattttttgtctctgaaagacgaaactcctaatttttataacccctactatttataataaaatactgaaaagaaatagttatttttaatcacaccaataggccaaatcaatagatcataattataggaaaattggtcagatatagctggctatttgattcataaagaacgccttatttctgagaaaggaaaaat

SEQ ID NO: 746552 - DNA, 624 bp, Homo sapiens
attttgtctttgttaactattacaattgacaacttttcattaaaaaatgttttggtacagaaattagttctaaagatttatatttgtttttaacattgaataaaaatgtagaaatgcatcaatttattttattatggaaaagatactacctatattttaatatatatatgaaattactgtttccatagttaaaaagtcaatttattttattatagaatatgtgctacctacatcttaaagaayaaagatcagaaatatgaaattattatgtttttacaactataaaacccattcaatgacaaaaaattatttttctgaatagaagctttggcaaacattttgcctctataaaaccttccatgagatctactcaatttcaactgcatttcaatgttgggtaatacaggtggatgaaattgtcatgttcaactccacaaattctattccaataactcttaattggaatggaatctgggccacctgacctttagacttcacattaataaactgtgttattttcttgattttgtcaacaattgagaaaatagacttaactatgttttcaaaagcacagtaatattttatttaactatgtctcacatatctgattacttcattctacag

SEQ ID NO: 746553 - DNA, 626 bp, Homo sapiens
gtactcaattctaaccaagaacatggtgtcctgtggtgtctacagtagaataaacagtaaagccttgtacttcaataatagatcctccaggggaaaaaattattctaagtggatttatgtgtagagatggttttaagtgatgttcctatctctttagcactaaatcagtggcagtaactattgaggaggaagcaagaaagaagccaagatccacagtggctgcttccaagttgcatatggactagttgcttgtggcagggagagacatgggttccgaaatccagtctgttctttggaggggcctgaccatggctgtgactccacggtgctattctagatagattaattcagactttgcttggttttgcatcctaagattgcgttatagaaagaggagaatgaaggccaggcacggtggttcacgcctgtaatyccggcacttgggaggccaaggcgggcggatcacaaggccaggagatggagaccatcctggctaacacggtgaaaccccgtctttttactaaaaatacaaaaaattagccaagcgttgtggcaggtgcctgtagtcccagctactcaggaggctaagtcaggagaatggcgtgaacctgggagtcagaggttgc

SEQ ID NO: 746554 - DNA, 473 bp, Homo sapiens
gttttttaaatatctcttaaaatttttttttttttttagaaatgaggtctcaccatattgcccaggctggagtgcagtggctattcacaggcacgagcacagcatgctacagtctcaagcctcccgagtagctaggactacaggcaagtgccagcgtgcctggcaaagtggcatatgtttcaccttaagaggccttttcaggtatctggaagagttctgttcctaaycaccgcctgtccaattttatgagtctcctggctgaggttttctatgaccatggtgatattgacaagctctcctgctattattgaaccatagtacgtaggattttctcattctttaagcctttggtaaagtgtagaatgaagaggcatgggaggaggagaagacagcccacaattcctcttccgtagttaaagtttttgaacttagatcaaggtctaacttttctcatcttgaatcacattatctaa

SEQ ID NO: 746555 - DNA, 578 bp, Homo sapiens
gtagacacgggggactactagagcagggagagagaagtggatgagtgggctaaaaaatccctatagggtactatgctcactacctgggtgataggatcatctgtaccccaaaacctcagcatcatgcaatatatccacataacaaatctgcacatgtacctgttgaatccaaaatcaacgttaaaaataaaataaaataaaatatatgtttaaagcttccagaattgtaggattagctgaccgctgtcttggttttaatattttactctgtctatcctcctatttatcctatttatttaaaataatttttccttctttctttatatataaatattcatagtaaattccaacccctaagagacctattatgatggctttaatgtaaaattactcayaagtcagagtcactggatgttgaatgagaagagaatgtccttaatataaatttgacatgattttccagattcatagagccacttgaagaaaaggcattgaaaatcaattccatgctccttctttcctaaacaatcatttatgtcttaattaatagatctaagaaaccagagcaacattaaaat

SEQ ID NO: 746556 - DNA, 483 bp, Homo sapiens
atgttctaaattcaagcctttagaatgtccaagagctgacctattatcctaactttatggatgaagaaactgcgcataaaaccagttgaatggcaaagacatgcaggtggttaactgcggtactggaatttgaaatctgaactctgttcatatgattaaasatcactgcacttcaccatttcagttcccagtatacaatatttttctcatttctacaggttaaaaattggagcaagaagtcaaatagaatttcatagacagcaaaactgaccaaaatagaacaatgggtgtaccctcttttgacaatatcatcttttggaacattctaagctgcgctcagttacagaaatatgtggtagccctgtcataatttcattaataaatgacattgctcttgagttccatagaagctcattgagactagtagtttttgttatggttttaatttcaagattattttttgaaagtcagcataagtgtact

SEQ ID NO: 746557 - DNA, 615 bp, Homo sapiens
aacacaaagaaagaaagaatttactgagctgtgaaagtgacggacacacagaaagttctaaacaaaatgaaacaaaacaaaagtggatttatctcagcctctaacaagaagtaaagtttaaaaggcattgggttatgagaggaccatctagaygatagaatcaacatcatcagaagaatagtgacaagaaatgttgagatgtatttagaaaaaaaaattgaccatttgaactaaaataaaaacgtgtctttctctttcttttttaaatagacatagaaaaaaagcaggaagaacatcaggctaaaatatacagaaaatttaaggtcagcttaaatatgtaaaatgtctatatgtttcattgaaacttttggcagtgacatacagaaaggaaagggagagtgaaagctactgccaaagtttggaattgatgccataaggggaaaaattttagtagggaggttggcagagaagaggaaaaggtaacagccactgtaaaggatgagatattaacaagctgaatgaagggatgaggaagaaatcgatgatgacactatgggcttgagcctggggaactagaaaatatgcagagcactaacttaaaatacaaatgagggg

SEQ ID NO: 746558 - DNA, 615 bp, Homo sapiens
aacacaaagaaagaaagaatttactgagctgtgaaagtgacggacacacagaaagttctaaacaaaatgaaacaaaacaaaagtggatttatctcagcctctaacaagaagtaaagtttaaaaggcattgggttatgagaggaccatctagatgatagaatcaacatsatcagaagaatagtgacaagaaatgttgagatgtatttagaaaaaaaaattgaccatttgaactaaaataaaaacgtgtctttctctttcttttttaaatagacatagaaaaaaagcaggaagaacatcaggctaaaatatacagaaaatttaaggtcagcttaaatatgtaaaatgtctatatgtttcattgaaacttttggcagtgacatacagaaaggaaagggagagtgaaagctactgccaaagtttggaattgatgccataaggggaaaaattttagtagggaggttggcagagaagaggaaaaggtaacagccactgtaaaggatgagatattaacaagctgaatgaagggatgaggaagaaatcgatgatgacactatgggcttgagcctggggaactagaaaatatgcagagcactaacttaaaatacaaatgagggg

SEQ ID NO: 746559 - DNA, 615 bp, Homo sapiens
aacacaaagaaagaaagaatttactgagctgtgaaagtgacggacacacagaaagttctaaacaaaatgaaacaaaacaaaagtggatttatctcagcctctaacaagaagtaaagtttaaaaggcattgggttatgagaggaccatctagatgatagaatcaacatcatcagaagaatagtgacaagaaatgttgagatgtatttagaaaaaaaaattgaccatttgaactaaaataaaaacgtgtctttctctttcttttttaaatagacatagaaaaaaagcaggaagaacatcaggctaaaatatacagaaaatttaaggtcagcttaaatatgtaaaatgtctatatgtttcattgaaacttttggcagtgacatacagaaaggaaagggagagtgaaagctactgccaragtttggaattgatgccataaggggaaaaattttagtagggaggttggcagagaagaggaaaaggtaacagccactgtaaaggatgagatattaacaagctgaatgaagggatgaggaagaaatcgatgatgacactatgggcttgagcctggggaactagaaaatatgcagagcactaacttaaaatacaaatgagggg

SEQ ID NO: 746560 - DNA, 586 bp, Homo sapiens
atcggaagtaagaatttaagaagaaaaggttagcaaggcagaacaaggagtacaaaggacatgagggctgaggttaagacaagcaataaagcaatgcagaagatcaaggaactagtccctgctagatgctagaaaaccaggcaataaaaatgtggcaaatatctgtctcacgtaggaaaccttgtatatgttttctgctttgcagcgagaaatagatggctggattcaagagcagagctagcatacaactcagagacagctaatgcttatttaggaaactggaaagttcactctgttataatgggaactatcagaaatgaggattatttggtaatcctgttggaaagacaggaaaagaaatagagtarggtgggtagtgagaggagctaatatttctgtgctaggctttttacctctattagcccatttaaccacacttgcaccaattttgagaagttagtagttgtctttggtagatgaaataattatgtctgagtcaaattaaatgaattgcctatggtcacccacctgatttttcaaggaagtaaacaaattaacactgtgagaataaaacttaatttcccag

SEQ ID NO: 746561 - DNA, 476 bp, Homo sapiens
acagagttaccctgtgacaatgaatattagaaggtttagattacattttaataactattcaaagacattgtaaaaattgagatttctgtttccataaaaattcatttaggaccacatcaatttcttgatgaagccacatawaatttcaggcagattaaaatgaatgcttgcatgtgtttgtttgtattgttgaccctttaacaacacagttttaaactgaatgggtccatcttcttctgcctccgccacccctgaaataccaggacccacctcccctcttcttcctcctcctcagcctaaacaatgtgaagacaaagagaaagaagacttttatgatgatccacttccacttaataaattgtaaacgtattttctcttacttatagttttcttaataacattttctgttctctaccttactttattggaagaatacagaatataatatatagaacatacaaaatatgagttaatca

SEQ ID NO: 746562 - DNA, 644 bp, Homo sapiens
ggtaaaatgatttctatttctttgggtatatactcaattatagcattgctgggtcaaatggtaattctgttttaagttctttaagaaattgccaaactgctttccacaatggctaaactactttacattcccaccgtcsgtacataagcatccccttttctctacaacctcaccagcatgtgttattttttgactttttaataatagacattctgactggtgtgagatggtatctccttgtgtttttgatttgcatttctataaggattagtgatgttgaacattttttcatatgtttcttggccacatggatgttttcttttgaaaagtttctgttcatgcccttttcccactttttaatagggttgtttgttttgtgcttgtaaatttgtttaagttccttatagatactgaatattagacctttgttggatatataatttgaaacaatttcctcccattctgtaggttatttgtttactctgttgataggttatttttttaatttgtgtgtatgtttttttaatgttcagaagctctacagtttaattaggtttcatttgtcaatctttgttgcaattacttttggcatctttgtcaagaagtctttgctggtcttacgtccagaatggtatttcctaggt

SEQ ID NO: 746563 - DNA, 606 bp, Homo sapiens
cggattacctgaggtagggagttcaagaccagcttggccaacgtggtgaaaccctgtctctactaaaaatacaaaaatcagccaatgtgttggtgcatgcctgtaatctcagctactagggaggctgaggtgggagaattgcttggacccgggaggcggaggttgcagtgagttaagacggcaccactgcattccagcctaggtgacacagtgagactccatctcaaaaaaaaaaaaaaaagaaagaaagaaaagaaaagaaaaagatcaattggactgatctgacctatgagggatggcagagaagcaaaaaaaaaatggattagtraataaataaatgaagatctaacattaaggcttgtacttctcatataccgttagtattactactttgacatttctgaaagcagctcttaatagtgatagcttcacattaattttttgtgctctatacaggatatgggattttcagtttcttttcgtgaaaatgtttgacataagtatttgttatttttgtaagtattctcctttctcaatcaccttaatttgttctctaccatctgactttctgttatcctgatatgcacataatttctgggttttttg

SEQ ID NO: 746564 - DNA, 587 bp, Homo sapiens
gactatatgataggccacaaaacaagtctcaataaatttaagaaaattgaaattatataaagtactctaccagatcacagtggaataaaactggaaatcaattccaaaaggaaccttcaaaatgcaaatacatggaaatyaaatacctgctcctgaatgatcattgggctgacaataaaatcaaaatagaaatcaaaacattcctcgaactgaatgataacagtaatacacaacctatcaaaacctctgggatacagcaaaggtggtactaagaggaaagttcatagacctaagtgctgcctacatcaaaaagtctgaaagagcacaaatagacaacttaaggtcacacctcaaggaattagatgaacaagaacacatcaaacccaagcccagcggaagaaaagaaataactaagattggagcagaactaaatgaaattgaaacaaaaaaaattacaaaagataaatgaaagaaaaagctggttctttgaaaagatagataaaattgataggtcattagcaagattaaccaagaaaggaagagaaaaaatccaaataagctcaattagaaacgaaacaggagatatt

SEQ ID NO: 746565 - DNA, 569 bp, Homo sapiens
agggtaacagaagaaaagaaataactaaaatsagagcagaactgaacaaaatttagtcccaaaaatccatacaaaggattaatgaaacctaaacttagttccttgaaagtattttaaacaattgaggccgggcgcggtggctcacgcctgtaatcccggcactttgggaggccgaggcgggtgggtcacgaggtcaggagatggagaccatcctggctaacatggtgaaaccccgcctctactaaaaatacaaaaattagccgggcttggcggcgggtgcctgtagtcccagctactcgggaggctgaggcaggagaatggggtgaaccgggaggtggagcctgcagtgagcagagatcgcgccactgcactgcagtctgggcaacagagcgagactctgtctcaaataaataaataaataataaaaacaaaaaattgaaagaacagcagctgattaacaaagaaaaacaaagagatcaaaacaagcacaatcagaaatgacaaaagtgacattacaaccaatccagcagaaataaaaaagatcctcagagactattatgaacacctct

SEQ ID NO: 746566 - DNA, 569 bp, Homo sapiens
agggtaacagaagaaaagaaataactaaaatgagagcagaactgaacaaaatttagtcccaaaaatccatacaaaggattaatgaaacctaaacttagttccttgaaagtattttaaacaattgaggccgggcgcggtggctcacgcctgtaatcccggcactttgggargccgaggcgggtgggtcacgaggtcaggagatggagaccatcctggctaacatggtgaaaccccgcctctactaaaaatacaaaaattagccgggcttggcggcgggtgcctgtagtcccagctactcgggaggctgaggcaggagaatggggtgaaccgggaggtggagcctgcagtgagcagagatcgcgccactgcactgcagtctgggcaacagagcgagactctgtctcaaataaataaataaataataaaaacaaaaaattgaaagaacagcagctgattaacaaagaaaaacaaagagatcaaaacaagcacaatcagaaatgacaaaagtgacattacaaccaatccagcagaaataaaaaagatcctcagagactattatgaacacctct

SEQ ID NO: 746567 - DNA, 569 bp, Homo sapiens
agggtaacagaagaaaagaaataactaaaatgagagcagaactgaacaaaatttagtcccaaaaatccatacaaaggattaatgaaacctaaacttagttccttgaaagtattttaaacaattgaggccgggcgcggtggctcacgcctgtaatcccggcactttgggaggccgaggcgggtgggtcacgaggtcaggagatggagaccatcctggctaacatggtgaaaccccgcctctactaaaaatacaaaaattagccgggcytggcggcgggtgcctgtagtcccagctactcgggaggctgaggcaggagaatggggtgaaccgggaggtggagcctgcagtgagcagagatcgcgccactgcactgcagtctgggcaacagagcgagactctgtctcaaataaataaataaataataaaaacaaaaaattgaaagaacagcagctgattaacaaagaaaaacaaagagatcaaaacaagcacaatcagaaatgacaaaagtgacattacaaccaatccagcagaaataaaaaagatcctcagagactattatgaacacctct

SEQ ID NO: 746568 - DNA, 569 bp, Homo sapiens
agggtaacagaagaaaagaaataactaaaatgagagcagaactgaacaaaatttagtcccaaaaatccatacaaaggattaatgaaacctaaacttagttccttgaaagtattttaaacaattgaggccgggcgcggtggctcacgcctgtaatcccggcactttgggaggccgaggcgggtgggtcacgaggtcaggagatggagaccatcctggctaacatggtgaaaccccgcctctactaaaaatacaaaaattagccgggcttggcggcgggtgcctgtagtcccagctactcgggaggctgaggcaggagaatggggtgaaccgggaggtggagcctgcagtgagcagagatcgcgccactgcactgcagtctgggcaacagagcgagactcygtctcaaataaataaataaataataaaaacaaaaaattgaaagaacagcagctgattaacaaagaaaaacaaagagatcaaaacaagcacaatcagaaatgacaaaagtgacattacaaccaatccagcagaaataaaaaagatcctcagagactattatgaacacctct

SEQ ID NO: 746569 - DNA, 568 bp, Homo sapiens
actgtcttctaaactatataacccaaactaccttacttctattggattatgacaatagtcctttaactacatcttcccatatctattcattcttccttccctccattacatccagggtcagtttttaccaaagaatgattgttttctttaaacttaagtcctatcatatcatttcctaacaaaatccctttcatttcacccagaataaaattcagtcgttcctatggttaaggccctacataatctgacwtttcatgatctccctaaccttatcttgtaccactctttcgagttcattctgctccaactaccctggcttcctttcagagtttgtaaacatgtcaaccagactcttaactctggacctttgcatatgcagttccttttactgggaactctcttcttccacatagtggcataaatatcttcattatttcatttgaatctctgttcaaatatcaccttctcagagaggacttcccagtccaagctgtctacaacaagtacagtggtactttagtatctgtggagtttggttccaggacttcttgaggatacccaaatccac

SEQ ID NO: 746570 - DNA, 619 bp, Homo sapiens
ccttatcttgtaccactctttcgagttcattctgctccaactaccctggcttcctttcagagtttgtaaacatgtcaaccagactcttaactctggacctttgcatatgcagttccttttactgggaactctcttcttccacatagtggcataaatatcttcattatttcatttgaatctctgttcaaatatcaccttctcagagaggacttcccagtccaagctgtctacaacaagtacagtggtactttagtatctgtggagtttggttccaggacttcttgaggatacccaaatccacacacactaaaatccytgatataaaatggtgtagtatttgcatgtaacctttgcacatccccctgtatatttaaaatcatctctatattacttataatagctaacacaatgtaaatgctatgtaaatagtttctacactgtcttgttaggaaataatgacaagaaaagaaagtctgcacatattcagtacacaagtagttatcttttttcccgaaatatttttgattcaaagttggtcgaatccatgaacgtagaatccacagatacagagggctgactatagtacccttcttctcatcacttccctcaatgttcttac

SEQ ID NO: 746571 - DNA, 518 bp, Homo sapiens
tcttatctttttttctgatttatatgtgatttttctccctcagttggtaaaaaaaaacaaaactaaaactaaggcataccactgtgaaacaggtgaaaggagtctaggagaaagcccttctgcacacatttataactccatggtaatggtttttaactatgtgcatctatacacaaaaatattacatggaattttagtttscagatcctctgaagaccatatattcatcacatataggtccaggtataaccctgctttatggatacttgaaagtataagaaaattattggtagtattaacttctttacacatttgcagcctggctcagaggcccaactacttttgggccttgccctcttgtcctcttgcctcctttgaagtacttcttaactgtctctcttatttgatagacagttgctctcatatcagtttcagtctaccaagaggcccacacttaatatttggggtaaagtgaaacagtggagaagcaaggctgttagccagctgctgactctaag

SEQ ID NO: 746572 - DNA, 518 bp, Homo sapiens
tcttatctttttttctgatttatatgtgatttttctccctcagttggtaaaaaaaaacaaaactaaaactaaggcataccactgtgaaacaggtgaaaggagtctaggagaaagcccttctgcacacatttataactccatggtaatggtttttaactatgtgcatctatacacaaaaatattacatggaattttagtttccagatcctctgaagaccatatattcatcacatataggtccaggtataaccctgctttatggatacttgaaagtataaraaaattattggtagtattaacttctttacacatttgcagcctggctcagaggcccaactacttttgggccttgccctcttgtcctcttgcctcctttgaagtacttcttaactgtctctcttatttgatagacagttgctctcatatcagtttcagtctaccaagaggcccacacttaatatttggggtaaagtgaaacagtggagaagcaaggctgttagccagctgctgactctaag

SEQ ID NO: 746573 - DNA, 518 bp, Homo sapiens
tcttatctttttttctgatttatatgtgatttttctccctcagttggtaaaaaaaaacaaaactaaaactaaggcataccactgtgaaacaggtgaaaggagtctaggagaaagcccttctgcacacatttataactccatggtaatggtttttaactatgtgcatctatacacaaaaatattacatggaattttagtttccagatcctctgaagaccatatattcatcacatataggtccaggtataaccctgctttatggatacttgaaagtataagaaaattattggtagtattaacttctttayacatttgcagcctggctcagaggcccaactacttttgggccttgccctcttgtcctcttgcctcctttgaagtacttcttaactgtctctcttatttgatagacagttgctctcatatcagtttcagtctaccaagaggcccacacttaatatttggggtaaagtgaaacagtggagaagcaaggctgttagccagctgctgactctaag

SEQ ID NO: 746574 - DNA, 643 bp, Homo sapiens
ccttttcaaaaataaacttgtgtttcttcaaaacacactgttaagagaataaaaggtaatcctcagatggggagaaaatatatgtgcaagtcacttatctgataaagtacttttgtccagagtatttttaaaactctcaaaactcagtaataaaagaagtaacccrgccgggtgcagtggctcacgcctgtaatcccagcactttgggaggccaaggcgggcagatcatgaggtcaggagagcgagaccatcctgggtaacatggtgaaaccccatgtctactaaaaaatacaaaaaattagctgggcatggcggtgggcacctgtagtcccagctactcggggggctgaggcaggagaatggtgtgaaaccagtgagccgagatcgtgccactgcactccagcctgggcgacagagcgagactccatctcaaaaaaaaaaaaaaaaaaaagaaataacccaacaatttttaaatatgtgcaaaaaatttgtacagatacttaaccaaagaagatatacagatggcagatagactcataaaaagatgttcagcatcattagtcatttgtgaaatgcaaattaaaatcatgagataccactacacgtatattaaaatgcctaaagttaaaaagatagaccatga

SEQ ID NO: 746575 - DNA, 643 bp, Homo sapiens
ccttttcaaaaataaacttgtgtttcttcaaaacacactgttaagagaataaaaggtaatcctcagatggggagaaaatatatgtgcaagtcacttatctgataaagtacttttgtccagagtatttttaaaactctcaaaactcagtaataaaagaagtaacccggccgggtgcagtggctcacgcctgtaatcccagcactttgggaggccaaggcgggcagatcatgaggtcaggagagcgagaccatcctgggtaacatggtgaaaccccrtgtctactaaaaaatacaaaaaattagctgggcatggcggtgggcacctgtagtcccagctactcggggggctgaggcaggagaatggtgtgaaaccagtgagccgagatcgtgccactgcactccagcctgggcgacagagcgagactccatctcaaaaaaaaaaaaaaaaaaaagaaataacccaacaatttttaaatatgtgcaaaaaatttgtacagatacttaaccaaagaagatatacagatggcagatagactcataaaaagatgttcagcatcattagtcatttgtgaaatgcaaattaaaatcatgagataccactacacgtatattaaaatgcctaaagttaaaaagatagaccatga

SEQ ID NO: 746576 - DNA, 643 bp, Homo sapiens
ccttttcaaaaataaacttgtgtttcttcaaaacacactgttaagagaataaaaggtaatcctcagatggggagaaaatatatgtgcaagtcacttatctgataaagtacttttgtccagagtatttttaaaactctcaaaactcagtaataaaagaagtaacccggccgggtgcagtggctcacgcctgtaatcccagcactttgggaggccaaggcgggcagatcatgaggtcaggagagcgagaccatcctgggtaacatggtgaaaccccatgtytactaaaaaatacaaaaaattagctgggcatggcggtgggcacctgtagtcccagctactcggggggctgaggcaggagaatggtgtgaaaccagtgagccgagatcgtgccactgcactccagcctgggcgacagagcgagactccatctcaaaaaaaaaaaaaaaaaaaagaaataacccaacaatttttaaatatgtgcaaaaaatttgtacagatacttaaccaaagaagatatacagatggcagatagactcataaaaagatgttcagcatcattagtcatttgtgaaatgcaaattaaaatcatgagataccactacacgtatattaaaatgcctaaagttaaaaagatagaccatga

SEQ ID NO: 746577 - DNA, 657 bp, Homo sapiens
gatccaccatcttgtcttgctcctgagacatggcttctgtttgtttgtttaaattgtatttatttattaaatgtttgtttctgagaaactgggtatgtcagcctcttgctttggcctctcagctttctcagacttttaggggtagrtttgcataggcctgtcccctgcaggacagttaaacacattatctaccatcatatccagtcattccactcttaggagtggtagaagggaactgaaaacatatgtccatacaaagacttgtacacgaacagtcattacaactttatttgtaggagccccaaagtggaaacaacccaatgtccaccaacaggcaaacagataagctctcacgcattgtcagtggtaatacaaaataggatagccactttggaaaacagtttggcagtttcttacaaagttaaacataccatatgtttcagcaatcacattcctgcatattacagtaggaaaattaaaacttatgtttcacatcaaaatctgtacttaaatatttatagcagctttatttataatggcttcaaattagagacaacacaaatgtacttcagtgggtgaatggataatgaattataatacattcacattgtggaataaaaaattacaaactactgatgtgcacaacatagataatct

SEQ ID NO: 746578 - DNA, 532 bp, Homo sapiens
cattttaaaagaatagctacatacacagatatatacgtcaaaatgttaatagcagtagaattctggatgatatttgtaactgtgtcatctgaaatttttaaataatagcatttacttgatttcttattttctgatttaaaaaatatttctattttgaaaatwatcaagtagactataagatgccttttttccccacttgaacaattaattcgggcatacagtattccactggacaatagtagaaacaaactagatttctggtcttgagttcctgagcccaagtgatcctcctgcctcagcctcccaaagtgctggaattacaggcgtgagccactgtgccaggctcaacctgaatttctgaatgcaaatcaaaatattggaatatattcatcttgatgctatttctgaataaagagggcctctaacaaaatgatgaccaggataccctcatttctgtataaaatttattattttacttttatgtccataggcagcccttctcaaacaatcctgtctaaatatggcttacatg

SEQ ID NO: 746579 - DNA, 604 bp, Homo sapiens
gaaagttctcatcatctagactcaaagttagaaaaaaatagctgaaaagtcaagaagtacgtggcaaagccagcaagacaataccttaatcttaagatagtctggtggaagtgatccaaaaattcaccaagggtgaattcttcaaagattaatcatttaaacccaaaccaaataatctaggatccacaaactggragcaacccttgtgtttacccatcaatgacataaaggttcacattaaggttattaaggacatcaataacacacaccaaagttttaaaaattgtttccttatctccattataagagttcctgttacctaacttaggctgttggtgaaattgatttatgacctgaaagccaaatttggtttgttattctctattttcccaatgttttgaaaagcttaatttctatagcaagtttcaaataataataaaattaaacatacgcccatcactaaagttcaccaactgacaatatttgttttctccttccttctctctgtatgtacgttattcccctaaacactggagagtaaattgcaaacaactgttcacttcctaaaggtcagcatgtatctcctaaaaacaaggacattctc

SEQ ID NO: 746580 - DNA, 604 bp, Homo sapiens
gaaagttctcatcatctagactcaaagttagaaaaaaatagctgaaaagtcaagaagtacgtggcaaagccagcaagacaataccttaatcttaagatagtctggtggaagtgatccaaaaattcaccaagggtgaattcttcaaagattaatcatttaaacccaaaccaaataatctaggatccacaaactgggagcaacccttgtgtttacccatcaatgacataaaggttcacattaaggttattaaggacatcaataacacacaccaaagttttaaaaattgtttccttatctccattataagagttcctgttacctaacttaggctgttggtgaaattgatttatgacctgaaagccaaatttggtttgttattctctattttcccaatgttttgaaaagcttaatttctrtagcaagtttcaaataataataaaattaaacatacgcccatcactaaagttcaccaactgacaatatttgttttctccttccttctctctgtatgtacgttattcccctaaacactggagagtaaattgcaaacaactgttcacttcctaaaggtcagcatgtatctcctaaaaacaaggacattctc

SEQ ID NO: 746581 - DNA, 509 bp, Homo sapiens
tagcttaccttcattatccttgtcatcatagttaaactactccagtctgtgtttgcagattgacataggcaagcagacttttgagtgtgaatcagaacaactattttaggaaataacgttactattctctgtaccagttatctcccttccttctcagagccctctgagaaaggatgggggtcattctcactcagcctaggtcacacagctgcctagaagatgtgagtttcttgactcccaatctcattatctttccattttgccaacttaagagttaaataataacgactctcctgttgctaaaatgttacacataatccctctccattactgcaatattttaactagaatctaccccttyatggattttcttgctaagtaatgcttgaagagaaatgttcaaagtcagtactccaacactaaggaatcaagacagaaaagcaatggtacagttcagaaagatcaaagtttggggaggtcattatgggaatttatttcattttgaaaga

SEQ ID NO: 746582 - DNA, 634 bp, Homo sapiens
gtgttatttagactgaactccttttttaggcattgagcatgaatgccttcacaccaagcattttctactccagtttccaccacaccttagtttatacccaatgagtttcttcattaagttcatgcctggtgcctgaaggcatgtgagtttgcaaccctctgctttaagctacttcctttctaggtaaatcaggagtggtaaataagtttatctcatatgccaatttcgtgaaaaatgtcaaaagtrcatccagatacaggggcaaagaatcttgtgattgaaggatcgtgtctgctgtgcagacaggagatgggaggaatggcttatgtaccattgtttgtaattcctgtgctaatcatttactgtcccctcaagcatcttttaataacttcatttctagacttgacttttctctagtgccctagtttatcagtgaacctttttaaaaatggttcgaagaatgtggatactacatgtggtacaaacagcaaatgagatgaaatggactgtgacttctgcagacctgaaggtattatgctaactcaacccaggttgcatatttggtatgaatgacatataagtaatttgtgtcaaacagatagtgccacaatatcccggagtattcttcacacaa

SEQ ID NO: 746583 - DNA, 530 bp, Homo sapiens
agcaggaggatctcagtaaatatttttgatttcttaattttgagctctcaaaatgagaattgtatgtgagtccacaaaacaagaaatctttgacatatgtagcaatatttaaatattatttacttcgtcttaaaagcattttaaaaatattatgtcacayggataaactttttccatattcatagttaagagtagatacactcatttaaatgttaaacttgtttctaggaaatatttattacggcttggaaatattagagatgtatgtctccctacactttctccatatatttattgacttgaatttagagagaaaataaaagacttaaaaatgaagattcttgtaaaattattcaaacactgatttccagctaatattatatagacatttaagtgtcaaaatttatatcataggaataaagtacagtactttaatattctgtttgaagttaaaacatggcagatggtattgccaagggaaaatgtgaaccataatggagtgaattagctgaattcaaagtaaaaacatg

SEQ ID NO: 746584 - DNA, 602 bp, Homo sapiens
catatgaacagagagtcacaaaagatattaggtgaatgtttaagaaatattcttagtccatttttttgtttgtttgtttgtttgtttgtttttctgagacagagtctcgctctgtcgcccaggctggagggcagtggcgcgatctcggctcaatgcaagctccgcctcccgggttcacgccattctcctgcctcagcctcccgagtagctgggactacaggcgcccgccaccatgcccagctaattttttttgtattttttagtagagatggggtttcaccgtgttagccaggatggtctcgatctcctgacttcgtgatccgcccatctcggcttcccaaagtgctgggattacaggtgtgagccaccgtgcccggcctcttagtcccttcctatgtgaggtgtactggggtacattttatcactctttcatctcagtaggtrctgataattcaggtttctctcccacattatcataacccatatgaacaccaggaccccatctttatttactttggaacctaaaagtatattgggacattgtagttagatgctcgtgcacgaagttcagatggggctcaccaaaatctcaggagacgcac

SEQ ID NO: 746585 - DNA, 616 bp, Homo sapiens
ataaatatctttattctctatatggtcatatgcatgcctttgacaaacagaaaaaagtcacttaccaggaaataaagatgtgttaatattttatgcctcacctcactacataggcaccatgcttggcactggaaatttagtgcagaacaggacactgaaggtgccttccctcacagagcataacgtttagtaaaacacgggacacagtgtaggattttaggaaggtatatttgaagatccttaaaatagtctcaaragagaaagtcacaagttccagctgtgatattatcaaggtggtaagagagcttaatgcctattttggaaaactttagaaatcttaatttcagtaagcttatcccttggcaatcagatgctaaaagagttatattctattataaagacactcataatgaaactaaaagtaaaaccttgttattctaaaaatatgttgatttagactttccccacagtaagaacccttactcattgctattgattattaaagaataaagcttttgatgaacttgtgaaaccttgggtaaagctaatttccctttatactatcagtcattgttccaagatttaaatttcataaaaagaacagccgtctgcaaaa

SEQ ID NO: 746586 - DNA, 595 bp, Homo sapiens
ctttgagctcactgattctttcgttagctgtattcagtctaactgatgaacccatctaaagcagtttcatttgtgcagtgttttttatttccaccacttacttttaactcgtatagtttccatctctgtgcttacattacccaactgttcttgaatattgtctacttttttcattagagactttaacttataattattgttattggaagtttctggtctgataactccaaaatctctgctattttgtagcmcagttctgatgcatgctttgtttctttagactgtttttttctttgccttttagcatgtcatgcaaatttttgtagaaagctagacatgatgtatcaggtttatgaactgaggtaaattgacctttagtgtgtgtgtggttttatgttaacctggcaaggagttggattatgtttaatgtttgccatagctatgggtgtcagcagcttccatttcctctaatgtccttgtctttttctcttctgctgtctttgggtttccctaaaaactacttttcaaagagaggctgagccttgcagctctttcaaatgtaatatattatattattattacactctggttatag

SEQ ID NO: 746587 - DNA, 525 bp, Homo sapiens
cacaaacaccatacacagtaggtcagacctgttgctcatgcaacattgcaggtcattccacaggttcgaggtgaacaggcaatctgccatgggccagattgccagaaactcccatcggccctttgtccaacaaagcacacgttacctctagcacattttaaaatttgttgttgttctaccaacttgatcactaaaattcagtgttccaaactagctcttgcttttattggatacttttgagtgctatagaactgtatgacacattctcaggaatggaggttcaggagtagcaagacacgagtgcagtaccttttctgttatgtcagttcaggggtataacttctattwaaaaacagagttagtctctgctgctccaagcagggaatcatactcaaaagacatttgacagtaatcagagcaaaatttcaggctaatgctaagactctctgaagttaacatggttcaataaaaggtattagcctttttcatagttagcccagtcgttctgggatgaagctgccatat

SEQ ID NO: 746588 - DNA, 619 bp, Homo sapiens
aagaaagatcaaattttatgttattccatatggtgatccatgatcctaacatcatttattaaaagctcgacttttttcccactgatatttcagatgtcatttttatataagccaaatttctatttggaattgtagactctttctgggttttgtaattgttctgtccacctgttcatttatgcaggcatcaaaacataccattttctttatagttcatttataatattttaatatctggtaataaatatttcccagtattgctgcagaagaatatttttatcaattattaagatrtaatttatgtgcaataaacttcattcatgtaaattgtacaattcaaagtactttgataagtgtattcactgtgaagccactgctaccatcacaatgccaataatttccaaaaccagcgtacatttcctgttgcccctttgaagttcattctgctcctagtaaatgaacgatctgctttatgtcaatgtagattagtttgcattttgtagactttaaagtaaatggaaacatgccgtatttattcttttatatatcacttctttgactcagcataattatttccagagtcatattatgtgtcagtagtttattccttttgtgatca

SEQ ID NO: 746589 - DNA, 489 bp, Homo sapiens
aatcaatgatgacagaaatttggcaaaatatcacattcatcactgttatcatctctaaacaaaccagaaagaaataaacttagtctgatggagtatacctgtgaataaacatatagctggcattatacttaacagtgaaagagtgaatactttcactttaagatttgaaaaaaaaagacaggtatgtttgttctcacaacttttattcaatattagattgaaggctactcatctgcacaatatgacaagaaaaatagagaaaakgttttcaaattggaaaggaagaagtaaaactcactttattcccagacaatatgagtatctacatagaaattcctatagaatctaggaaaaagctactataacatctaactatttagttagagaatataagatcaattatagattaattataattcatatgttaatactaacacaagataattgcaaattaaaatgtagaaaacaatgccatttataaaagcataa

SEQ ID NO: 746590 - DNA, 573 bp, Homo sapiens
tggagagagatgaggccagacagtgcaggagctagtgcgcatggcaaagattctggagattatgctaagagaaatgagaaatcctgggagagttcaaagcagtggatcatctatgtttgaaaaaggttggcacaaattgcatgtggaagataaatygattagggtaacagtagaagcaggaaaggtgttgccatagggtcgatgatgcttatttatatgtgtcaacttgcctgggctaagagatgcccagagaactggaataacaatctttccgggcatatctgtgaggatgtttcccgaagagattagtatttgaatcaggagactggtaaagaagatccagcctcactaatgtgcgtggtcatcatgtaacccacggagggcccaaatggaaaaaaaatggcagaggaaggctgagttctctctcttcttgagctgtgacttccatcttctcctgccctaggacatcagagctcctggttctcgggtctttggactgcatggtttaacactggtgaaccccacagggttaagcctttggcctcagactgaattgcaatatggactttccct

SEQ ID NO: 746591 - DNA, 573 bp, Homo sapiens
tggagagagatgaggccagacagtgcaggagctagtgcgcatggcaaagattctggagattatgctaagagaaatgagaaatcctgggagagttcaaagcagtggatcatctatgtttgaaaaaggttggcacaaattgcatgtggaagataaattgattagggtaacagtagaagcaggaaaggtgttgccatagggtcgatgatgcttatttatatgtgtcaacttgcctgggctaagagatgcccagagaactggaataacaatctttccgggcatatctgtgaggatgtttcccgaagagattagtatttgaatcaggagactggtaaagaagatccagcctcactaatgtgcgtggtcatcatgtaacccacggagggcccaaatggaaaaaaaatggcagaggaaggstgagttctctctcttcttgagctgtgacttccatcttctcctgccctaggacatcagagctcctggttctcgggtctttggactgcatggtttaacactggtgaaccccacagggttaagcctttggcctcagactgaattgcaatatggactttccct

SEQ ID NO: 746592 - DNA, 506 bp, Homo sapiens
ctatccatctgacaaaagtctaaaatccaaagtttacaaagaacttaaacaaatttacaagaaaaaaacaaacgaccccgttaaaaagtgggcaaaggagatgaacagacacttctccaaagaagacattcatgcagccaacaaagatatgaaaaaagctcracattactactcattagagaaatccaaatcaaaaccacaatgagataccaccacatgccagtcagaatggcaattattaaaaagtcaataaacaacagatgctggtgagattgtggagaaaaaggaacacttttacactgttggtgggaatgtaaattagttcaaacattgtggaagacagtgtggtgattccttaaagaactagaagcagaaataccatttgacccagcaattccattcctggatatctacccaaaggaatataaatcatttcattataaagatacatgtacgcgtatgttcattacagcaccaatcacaatagcaaagacatggaatcaatc

SEQ ID NO: 746593 - DNA, 485 bp, Homo sapiens
atgatgatggaagcactcaagagtctgttatttggattatcccttaaggaataacctgaacaaagcacaacttcaaaaggtataaggccaatagaatacaacattgatattgtagagggatgaggagtgatcctgaaaaatttgctgaccacagatttttcttgttttttgaatgarggaatgtagatgttggcctggtatctataaactggtttatatctaaaaacactggtccattggggttattttgagcaaaatatagacgtgataaaaacaagatttcaagtgatacacatcaccatttttcacattcttatatactgctagtatgtaggaaatatttcaaatggtgttgggtatacttgccattagaaaggtctgtactcaagggctccagatcccagagtaattgggcagtagcagaagtaaaagaagtttcaaaaatcaggaaaggaagcagaaggaattcttttaaagcttcacat

SEQ ID NO: 746594 - DNA, 485 bp, Homo sapiens
atgatgatggaagcactcaagagtctgttatttggattatcccttaaggaataacctgaacaaagcacaacttcaaaaggtataaggccaatagaatacaacattgatattgtagagggatgaggagtgatcctgaaaaatttgctgaccacagatttttcttgttttttgaatgagggaatgtagatgttggcctggtatctataaactggtttatatctaaaaacactggtccattggggttattttgagcaaaatatagacgtgataaaaacaagatttcaagtgatacacatcaccatttttcacattcttatatactgctagtatgtargaaatatttcaaatggtgttgggtatacttgccattagaaaggtctgtactcaagggctccagatcccagagtaattgggcagtagcagaagtaaaagaagtttcaaaaatcaggaaaggaagcagaaggaattcttttaaagcttcacat

SEQ ID NO: 746595 - DNA, 646 bp, Homo sapiens
gagtctcctgttttcaagaaaactattctgtttggggatccatctacttccttaaagcttcagtttgatcatgtggcatttagcatgagtgacttcattttggtttggtctgttggggcctagtgcaggagctcagtcccaagcaatggcctcctcctgtgccccaattaaacaaattttgccaaataactgtatttcttctggaaaatatgatcagttatatgcatattttaatattgtccctaacatgaagtagcctagaggccccaggggccacatttactccacagaagaggaggagttatgctaaaaggtgaaaagatggaaagcaaaattttaaaataataattaaaaagtggcccagattcgtcktcaccccaaattgctgagatgtggggtgatagaacacttgcctctgcatgagtctgtgcaaatgtctgctagctcccagtgggtgagaactcttacagcacacttgcttgatttcatgcattcagggatgaccccaaattgttcaaaacggtggaaacatgaaactgaatttggcgtgactgaaacgagaactgcattacagcacatttatttttaatttttcaagattctgagaaatgcaaagtataaatgaaggaagaaaatgacatttaat

SEQ ID NO: 746596 - DNA, 633 bp, Homo sapiens
tcaagaaaactattctgtttggggatccatctacttccttaaagcttcagtttgatcatgtggcatttagcatgagtgacttcattttggtttggtctgttggggcctagtgcaggagctcagtcccaagcaatggcctcctcctgtgccccaattaaacaaattttgccaaataactgtatttcttctggaaaatatgatcagttatatgcatattttaatattgtccctaacatgaagtagcctagaggccccaggggccacatttactccacagaagaggaggagttatgctaaaaggtgaaaagatggaaagcaaaattttaaaataataattaaaaagtggcccagattcgtcgtcaccccaaattgctgagawgtggggtgatagaacacttgcctctgcatgagtctgtgcaaatgtctgctagctcccagtgggtgagaactcttacagcacacttgcttgatttcatgcattcagggatgaccccaaattgttcaaaacggtggaaacatgaaactgaatttggcgtgactgaaacgagaactgcattacagcacatttatttttaatttttcaagattctgagaaatgcaaagtataaatgaaggaagaaaatgacatttaat

SEQ ID NO: 746597 - DNA, 646 bp, Homo sapiens
gagtctcctgttttcaagaaaactattctgtttggggatccatctacttccttaaagcttcagtttgatcatgtggcatttagcatgagtgacttcattttggtttggtctgttggggcctagtgcaggagctcagtcccaagcaatggcctcctcctgtgccccaattaaacaaattttgccaaataactgtatttcttctggaaaatatgatcagttatatgcatattttaatattgtccctaacatgaagtagcctagaggccccaggggccacatttactccacagaagaggaggagttatgctaaaaggtgaaaagatggaaagcaaaattttaaaataataattaaaaagtggcccagattcgtcgtcaccccaaattgctgagatgtggggtgatagaacacttgcctctgcatgagtctgtgcaamtgtctgctagctcccagtgggtgagaactcttacagcacacttgcttgatttcatgcattcagggatgaccccaaattgttcaaaacggtggaaacatgaaactgaatttggcgtgactgaaacgagaactgcattacagcacatttatttttaatttttcaagattctgagaaatgcaaagtataaatgaaggaagaaaatgacatttaat

SEQ ID NO: 746598 - DNA, 646 bp, Homo sapiens
gagtctcctgttttcaagaaaactattctgtttggggatccatctacttccttaaagcttcagtttgatcatgtggcatttagcatgagtgacttcattttggtttggtctgttggggcctagtgcaggagctcagtcccaagcaatggcctcctcctgtgccccaattaaacaaattttgccaaataactgtatttcttctggaaaatatgatcagttatatgcatattttaatattgtccctaacatgaagtagcctagaggccccaggggccacatttactccacagaagaggaggagttatgctaaaaggtgaaaagatggaaagcaaaattttaaaataataattaaaaagtggcccagattcgtcgtcaccccaaattgctgagatgtggggtgatagaacacttgcctctgcatgagtctgtgcaaatgtctgctagctcccagtgggtgagaactctyacagcacacttgcttgatttcatgcattcagggatgaccccaaattgttcaaaacggtggaaacatgaaactgaatttggcgtgactgaaacgagaactgcattacagcacatttatttttaatttttcaagattctgagaaatgcaaagtataaatgaaggaagaaaatgacatttaat

SEQ ID NO: 746599 - DNA, 627 bp, Homo sapiens
ggagctcaaatacaactagcatcagatttttcagtggaaaccttacagaccaggaaagagttgttactgtgtgccttaggtgagacccagtgctgtgctagctttgggtctgacccagcacagtcctggtggtggtggccactggggtgcttgtatcactcctcccccggctccaggtagctcaggagagagagagagtctccgtttgttttggggaaagtaacgaaagagatcaagaggctccatcaggtaattcttctgtaattccggcatgacatatttaagggctgaagaagaaaaacttatattctagaatagtatatctagtgaagatattcttcaaacatggagctttacagacaaacaaaagctgagcaatttcatcagcaccagacctgtgctataacaaatgctaaagagagttcttcaatctgatagaaatggaagtaaatgatcatctgaaggtacaaaactcactrgtaatagtaaatacacagaaaaacacagaatattataaaaccgtacctgtggtgtgtaaactattcatatcttgagtagaaagactaaaatataaaattatcaaaaataataacaatggcaactaataaagctattgtataacatatg

SEQ ID NO: 746600 - DNA, 608 bp, Homo sapiens
tatgatttcctggaagaaataaatctagaattttctttttgaaatctaaaaacacaggttataaaaggggagggacactgttctagttatctcttactgctgaacaagtcatcttgaagcttagtggcattacataattgttatttcttattatctctcatgattctgttggtcaacagagcttggctgggtggtttttgcctggggtctctcagktggttgcagttagaaggcagctagggctgaggtgtgtgaggtggcttcttcccttacacgtctgacacccttatgtccctctctccagcagagtagcctagactttattcatgctggctcagggctccaagaggcaggaagtgaaaacctccagtcctcttcaaggtgaagtgtgcaactgacatagtccttttctatggaattctactggttaaagtagtcataggccagactagattcaagaggcagaggaatagactccatccctcagtgggggaagtggcatggtcacagctggcttcacaacttgagaggcccactgcaaaataaaaatgaagggtcccatgataaaaacaaaaccaaaactaaacaagaataaatgccattcaagt

SEQ ID NO: 746601 - DNA, 609 bp, Homo sapiens
tgacttttattcttgttcttatgatcaaaacaaggcataaaagctaaaaacatttcatagttaaaacaagtcagagagctgaagtggttagaccctcccctgagtgcaaacttagccaccctccaaagtcagaaagcaaagcaggggagatgactccaacagaggtccctgggatttcagagaccataagtgtttacagaaactttcctcctctaatttcwtttatacaaatatacaattaagaaaataaatgggcaaagatacaaaggacaaaaacctgttttcataacatatgtctgtcaaggaacttatgttaaaaatattaaaaaaactcttaaaaatgagcaagaaagagacaatccaccaaaagaaaaaagaaagcagggaaaagacttgaataatagatatttcataaatgaagacatacctgtcgcatttttgcacatataaaaggtactcaaccggctggacgtggtggctcacgcctgtaatcccagcacttttggaggtcaaggtgggtgcatcatgtggggtcacgaatccaagaccagcctggccaatatggcgaaaccccatctctactaaaaatacaaataataataataataa

SEQ ID NO: 746602 - DNA, 609 bp, Homo sapiens
tgacttttattcttgttcttatgatcaaaacaaggcataaaagctaaaaacatttcatagttaaaacaagtcagagagctgaagtggttagaccctcccctgagtgcaaacttagccaccctccaaagtcagaaagcaaagcaggggagatgactccaacagaggtccctgggatttcagagaccataagtgtttacagaaactttcctcctctaatttcttttatacaaatatacaattaagaaaataaatgggcaaagatacaaaggacaaaaacctgttttcataacatatgtctgtcaaggaacttatgttaaaaatattaaaaaaactcttaaaaatgagcaagaaagagacaatccaccaaaagaaaaaagaaagcagggaaaagacttgaataatagatatttcataaatgaagacatacctgtcgcatttwtgcacatataaaaggtactcaaccggctggacgtggtggctcacgcctgtaatcccagcacttttggaggtcaaggtgggtgcatcatgtggggtcacgaatccaagaccagcctggccaatatggcgaaaccccatctctactaaaaatacaaataataataataataa

SEQ ID NO: 746603 - DNA, 608 bp, Homo sapiens
ccagcttaacagagaatagtgggatcccacttaattcatgtcgcttctcagagtttcaatttcctactatatcaaatggctcacaccatgaacacttacatccaagggtttttgttaggaataaagaaaataaacgtaaagtactagacccctaatagacaacatatccatggcagatgtttcttgaaaattgattgttttcctaatgatttctatcttgctctgggagagcttgtatccaaaaaggattcactcctctttatggtaatttagaaatatgttagagactcattttctagytcttaaatatacttcagtgactgtttaagattacattatggaatgttccctaatacactggttataactttcacttgtctttccagtaaaaacaaacaaacaaacaaaaaacgtggagccaaaacctttatggtatatttcagatattgtcacagcccaaatcccatggtgaaatgtcatcctcaatgttggaggtgaggccttgtaggagatgatcagatcacaggggcagagttctcatgaatggtttagtaccaccctcctggtgctgtatctttgcaacggtgagttgtctcgagatgtggtca

SEQ ID NO: 746604 - DNA, 655 bp, Homo sapiens
tgtggaaatgctatgaccactttatccaatacagtattataaattgctagacattttccaggtttgtaatttgtatagcaaaggctaggaaatgggagtttagtagggagattatatcaggcattgattaaatcaaggtttgcatattttagtgatgattccccagttggaatattttattattggtgaactgagaagagtagaaaaatacctggaaattctggaactttttgactcatagattaacttaaaaaaattcatgtaattgtgaaataacaaaaataaagatggagagtttcatctataactattcagtttcttacaatatatttactcaataggttcattctgtaaactgtattctaaagaatgtcttcagtaagattacttgcagtcatcacatgaattgaggctggaaattttattcctggggagcattttaaatattacgaagattctacatccttttcagttaactataaaagagatcaagsctttgcagatgtgaattaaatacgcccttttctttgcttgccacaacctctaacagtgtcttttttatcttatctgctcagtgtattaaggattcataatatttagtctgtaagattatttttaagattcttaaaatacaaataccacctatggaatgttt

SEQ ID NO: 746605 - DNA, 613 bp, Homo sapiens
acgatactggggtttatggtacagattatttgtcacctaggtactaagtctggtatccggtaggtagtttttctgctcctctcaatcctcctaccctctaccctgaagtaagccccagggtctgttgctaccttctttatgtccaagagttctcgtcatttagctcccaattttaagtgagaatatgcactatttgtttttccttttctgcagtagtttgctaaggataatggccttcagctccatccatgttgccacaaaagacatgatctggttcttttttatggctgcatagtattccatggtgtatatgtaacacattttaaaaaatataatctatcattgatgggcatttaagttgattctgtatcttcattattatgaatagcactgcaatgaacattcatgtacatgtgtctttatggtagaattatttatatttctctagktatatacccagtaatagggttgctgggttaaatgatagttctgtttttagctctttgatgaatcaccacactgctttccatagtgattgaactaatttacactctcacctacagtgtataattgctcccttttccctacaacctcggcagcatctgttagtttt

SEQ ID NO: 746606 - DNA, 528 bp, Homo sapiens
atgaagtcttcataagttaagatgaaagagaaatttgataactttaaaataaaatgaataaatcatgaaaatgaakaaagtgagaaatatcctcacttatattcataaaagctgagtttcctggaatattttaatcacattttgggcataaaatttggcagtggaaaatgaaaaataaagactttcataccacaacatattaaatagatatgaaatactactctttgcttacaatcccatttgaacatcctcactttataaatagatgaactttaaaattctcaaattgttatttaaaggtctaaaatatggcatatctgagcattcagtgccttatctcttagctttgcacaatgcatcagctttgtcctgggctatgaactgaatgtatttggcacatgcatattcattacttccccccaaatcccatatttaagatgaaatcctatagagaactttcttctaaaatcctgacacttgtctgcatatattgaacttaatggtttttgtcacgttttgtaggaatat

SEQ ID NO: 746607 - DNA, 599 bp, Homo sapiens
aagttatctcgttttcccttgatgtcagttctatgctcagcccatctttagtgtgaatctagtctttgggaactcattgctattctaatctttccagtggagatttgttcttgttcccgcaatgcccatatagcaccagcttactctttagcagcctggggaggccaggtttgggttgcctrcttgtcaaaccatctgtttcttcagagagacaggctgaaagcattcatctctacattgctaaaccctcaatcctgtccttccagtagatgagacagccatcctctcacctgatcccaccccactgtggcagtagcctgtcttgagcactctgctggacatcatccctgggatccagacaccagcatgtcatggtgactttttcttccccaagctcagcctctgccccttccctcctaaaatgagggctccagctagggcctgctgggcttgccaagggtggaatcgtacaggcatctggcttccctcactcccatctgtcccctgaacttcttagtaccagcaaagacaacaatcatcagaataatgaactggctccccaggtttcaaggttgctgctcctttccagataattgtac

SEQ ID NO: 746608 - DNA, 716 bp, Homo sapiens
tctgcacccccagaggacggcggatccttccctcttaagacaattcaggtggtcctggcgctcacgcccaggcggaaaggtcagtgagagcagtgacctgcagcagcagcagccaggctcctccgcctggattttcttttctactttggagaggccgctcccatgcagcccctgcagaaggtgcctggggaagcgcagggaatgggcgtgggctgctttgaaaaggaaaggccaatattgtgtgtgtgtgaatgtgtgtgtgtgtatgtgtgtgtttcacaaccaaatcctcagattttgaaaagccacacattttagcaaatgaccttgtttggaaatacaaactaaatagtctaaaaatatttagtgaccttcactgtgtggagggaaaattggaaagtgggatgtcatccgtagcatggagaggattttataaatgttttaactgtaaaagttcctctcaaataacttctttccccaatagtgcctgatctttcctcagttcctgatgaagtasgattcaagttaatgttctccagtatcttcctctctcccgcctaattcacactggctttaccctcggagctatatgaataaacaattaaataaaaactgatgatttaaacattttttattatgtcttctttcttttgattacatagaaacagactcaataatcattgctcatcttttccagccaaattaataaaaccatc

SEQ ID NO: 746609 - DNA, 621 bp, Homo sapiens
ttccccaatagaagcctcacaaggctctactttaccacaacatgggctctgcctgtccaagggaaagttaaacaaagaagattaaataagagttcagcatttttaaggtaaaaattaaaatttacaggtagcttctactgggagaatgggctctcactgggtgctctgtgttatcactggggcaccaggttctcagcaggcatctgcagctgagcagtgggcttcaagtgggaggatgttttcatgtgtaccaacacagagctgcgaattgtcagaaatacaaaatatttgcatacatcgatgtgatatatgaaccctcaaaaaaaaaagcaaaaccaacaaaacatagtgtgtgtgatctagcatcacagatatatttytgattctcaggacacacatagaagacaatctgtcctcttattttgtaagggccaacattggtcaactgtatcttggagagaccacaggtggccttggccagtgcatggccaaaaatgtaaacagcctgtgaacgggagtgctgaggagtgaagggaggaaggtggtttctgcactcccgggttccaacaggaaatgcaattctcaaagtctgcaagaccctagactagaaaaattcatttg

SEQ ID NO: 746610 - DNA, 588 bp, Homo sapiens
cctggtcgacgaaatcaggcgccaagactcaggaggggatatttgggtcaacgcacttgaaaaccttgaattcccacatcctctgagccctttggggctccagaagaagcccctccattctgttcaaagccagcactctcatcttgatctaggctggtgcagaggtttctctgctttgaagggaacacacacagtcacacacatgtgtacacacctgcatgttcacacacacacacccctcccccctctaacttgtcctggggtgcygagcctgctcagagaggaaagtggatccccaacaaggagctgcaggaccagccagcatgcactggcctgcacacgggaccagatcccaggggtgtgggggcaggggggttggaatctcaacttagatacggggaagatttcatctaaataggagccctgtcccaggaagtcgcactgaatgccctggcaaagaccccaggggaccgtgctaatatgctgccatatgggctatggaaggcttgggaaagcaatggtccatgcttagtggagtagaaatgacagtctccagggcagatggcggaggaaggatcaaaggctgag

SEQ ID NO: 746611 - DNA, 618 bp, Homo sapiens
aactgtcgatggcactgtcaagaagggagcaatggccaagacccttccagggaaattattgatttctgcccgttcgggattctgaagtaatcagcggcactgcaagcttaaccttgttaacgtggaacccaagtgaaatctctcaccgcttccagcgtgaggcgggaccagcagtgcaagttcggctctctcagttaggactcacccttgtcctgggaatctgccggaatgtgacaggcggccaagccacgtgctgtgcctctgagacgatgccggtgaactaaggagtgacacacctttgcaagtcagggctttcggcagcctccccyagctgatcatcatgtatttctgtttctctgataggaccccgccaacacgcatattgacccaaggaatcttcgggatggactctgcttctgatcacatcttcacctgctcgaggatcacctgtggcacgtcgggctctgaatgcaagccccaggacaccccatttcatgcgtctgcattcttaacctcactgcccattaacatgcatctcaatgcatccaaaataccgcacccccatcacatcagagagcattaaaaataagccagctcaatgcacaaaaatgagggcga

SEQ ID NO: 746612 - DNA, 574 bp, Homo sapiens
  misc_feature 6: n = A,T,C or G
cccatntgtcccctacagtaatacattctccctgttttttgggtcatagtctgttcattttgcttgcaccccatgaaacttgagcatggacttttttgtgcactttctaagctctggagaccctggaagcacaggagaagggaaggcctggtcctgctgctgagtgaagccgggatgggcgtcgcttgcattgcctgagcttgactcttggctccttcacaccagatcacttggggaaaaatcacttactctttcttaatctcagtttctcatccacaaagtagggttaataatgttacttttttaaaaaggctttaaggattaaatgacatagtatgtgcaatrtccttagcaggatgcctggttactgtcatttctctttcctttcctgcagtctaagggagaagaaagccaccgaacaagcaactgcaatattataccataagaacaagggcagcgggcttatcactgctaccgagaaagcctgtgtcatggtgcgtctgttccatatttcagcgatcccagaaatcttcatgaaagaaggggcagccatcttgggaaccaaaagatgttg

SEQ ID NO: 746613 - DNA, 632 bp, Homo sapiens
tgaaaattaaagacaaacaaaatttaaagcagtgatcagaaatgacactttacctacagaagaaaaacttgaatgatagagaatttctcagatgaaactacagaggccagaaaaaaaggagtgtatttttcaagtgctgaaaagaaaagaactatcatatccagttaagacgtattttgtgaatgaaggaaggaaatcaaagctttctcagttgaataaaattaagaaagttttttaccagcatctacacttmaaaagaatagctaaagaaagtttactaccagaaaataataaaagtaagaatcttggaacctcaagaagaaagaaagaacaatggagaaaagtaaatatatgaataatgcaacatatcctccttcacctctagaattttctaaatcatgtttgaggacttaagcaaaataatataacactgaatatggttttaaatgtatatagcagaaatgcaaaataattgtattataaatgggaaaaggtatcagaacagatggaaggttaaatttctacaactcatttgaactggtaaaatgataacaccattaggcttataagttatgcatatttaataaaatacctagagcaacctgtaagcaagctatataaagaaatagact

SEQ ID NO: 746614 - DNA, 632 bp, Homo sapiens
tgaaaattaaagacaaacaaaatttaaagcagtgatcagaaatgacactttacctacagaagaaaaacttgaatgatagagaatttctcagatgaaactacagaggccagaaaaaaaggagtgtatttttcaagtgctgaaaagaaaagaactatcatatccagttaagacgtattttgtgaatgaaggaaggaaatcaaagctttctcagttgaataaaattaagaaagttttttaccagcatctacacttaaaaagaatagctaaagaaagtttactaccagaaaataataaaagtaagaatsttggaacctcaagaagaaagaaagaacaatggagaaaagtaaatatatgaataatgcaacatatcctccttcacctctagaattttctaaatcatgtttgaggacttaagcaaaataatataacactgaatatggttttaaatgtatatagcagaaatgcaaaataattgtattataaatgggaaaaggtatcagaacagatggaaggttaaatttctacaactcatttgaactggtaaaatgataacaccattaggcttataagttatgcatatttaataaaatacctagagcaacctgtaagcaagctatataaagaaatagact

SEQ ID NO: 746615 - DNA, 651 bp, Homo sapiens
aaaacaagaaaggaaagtttgaaggatgtaaatgaggcttcaggcttttaaaggcgtccaaacagatacaacaaaaaatcgacactttgtgaacttgctggttcctagattaaaaaataacaacataataaaatattttgtggcagttagaaaaatgtgagtaygaacttaaatgatgttatggaattattattaattttattggtggtgaaaatagtattgataatacattacagaatgtctttgttcttaaggaactgataccaaaatatttttaggtgaagtgttatgatggtgtcaacacactaccaagtgtttcagaaaataacaaatatttgagtagggaagaggacactcaggtacacacacgtagagagaggtatggagcaataaaacatatgcaacaaaaatttgataatatagtgatcggtacatgaggatagtatttttataactttttgatagatttgatagagctgatatgtttgaatattttctaaatgaaaacctggtgataatgttatctgttttacctcagaaaagcataaagaaaggtatattcattttccagcactctaggtatagtgaataaaggtctgtgtgactgaaaaacatggaagaacattctttaaccagaggaacgctttaaga

SEQ ID NO: 746616 - DNA, 651 bp, Homo sapiens
aaaacaagaaaggaaagtttgaaggatgtaaatgaggcttcaggcttttaaaggcgtccaaacagatacaacaaaaaatcgacactttgtgaacttgctggttcctagattaaaaaataacaacataataaaatattttgtggcagttagaaaaatgtgagtatgaacttaaatgatgttatggaattattattaattttattggtggtgaaaatagtattgataatacattacagaatgtctttgttcttaaggaactgataccaaaatatttttaggtgaagtgttatgatggtgtcaacacactaccaagtgtttcagaaaataacaaatatttgagtagggaagaggacactcaggtacacacaygtagagagaggtatggagcaataaaacatatgcaacaaaaatttgataatatagtgatcggtacatgaggatagtatttttataactttttgatagatttgatagagctgatatgtttgaatattttctaaatgaaaacctggtgataatgttatctgttttacctcagaaaagcataaagaaaggtatattcattttccagcactctaggtatagtgaataaaggtctgtgtgactgaaaaacatggaagaacattctttaaccagaggaacgctttaaga

SEQ ID NO: 746617 - DNA, 577 bp, Homo sapiens
tttcttcccaaaactaataaaacaagaaaaaaagcgtatatacattagttatataataccgttagtaggcctgatttactaaatatatagagaactattgcatatcaaagtttgattgatcttttcacacgtatttggaatattaatacaaactaccttacattacataacaaataagtgacatgaaatacattctctgaccacaatgcaaaatcactggaaattaagaatatatagctaacatatttgtctamtaagaagttctaaaaatataatttaaataattactgaacctagaagtcacagatgacaacaaagtttccaaataacagcattacatttaaagtgactgtaaaatacagctacaatgttacattaaatagtgtgcagacttatatatgtttatttaaaaaagaaaagtaaatattaacaaattttaagttctaaaatcaaataaaaagaatgaggataataagatcaaataaaatagaaaaaagcaaagataaaatataacttacagaaaaaaaaaacaaaaaatagatgccagaatattaataagatcaatgatgacaggaaa

SEQ ID NO: 746618 - DNA, 621 bp, Homo sapiens
atgaatagattaggaaaataaaatcgattggattggttggagttggcagaagtaagggccaggaaaaaataggaagggagaaaaaaaatttttttaaatgaacggagcctcaaaagcatattggaaaatatcaagtgatctacagttttgtcaytgtagtcccaggaggcaaggtgagagggaaggggacagagaaaatatttaaataaaaaataataataaaagttccaaaatttaacttatactttaatctacaaatccaaaaatctcagtgaaccccaatcaggatatatacaacataaacctcaattagacacatcatgtcaatgacaaaagcataagtcgttcaagaagtgatcttaacatgacttgctttccattaaaataactcgagtcactacttgatgtcataaacttcaaatatgctaacgtgctaagtataaaaagcgaaactattaacaagtagaagaaaaatcagtgggagaatgggcatacatttacatgatctggttgaaatacattcttaagcaagttacaaattccagatgtccaaaaggaaaaataacaacataagtattttcattatttttattagggaaaataagatacacacatttaaat

SEQ ID NO: 746619 - DNA, 621 bp, Homo sapiens
atgaatagattaggaaaataaaatcgattggattggttggagttggcagaagtaagggccaggaaaaaataggaagggagaaaaaaaatttttttaaatgaacggagcctcaaaagcatattggaaaatatcaagtgatctacagttttgtcactgtagtcccaggaggcaaggtgagagggaaggggacagagaaaatatttaaataaaaaataataataaaagttccaaaatttaacttatactttaatctacaaatccaaaaatctcagtgaaccccaatcaggatatatacaacataaacctcaattagacacatcatgtcaatgacaaaagcataagtygttcaagaagtgatcttaacatgacttgctttccattaaaataactcgagtcactacttgatgtcataaacttcaaatatgctaacgtgctaagtataaaaagcgaaactattaacaagtagaagaaaaatcagtgggagaatgggcatacatttacatgatctggttgaaatacattcttaagcaagttacaaattccagatgtccaaaaggaaaaataacaacataagtattttcattatttttattagggaaaataagatacacacatttaaat

SEQ ID NO: 746620 - DNA, 616 bp, Homo sapiens
ctcagttaagtatgtgtttgcaacaacaggtattgaggttcaatgaaatttataagatcctaaaaatattgttctatatactggcaatcaaacaatgaactatcgtgtatgcggaaagacaccctaaaacaggactggggtggaaatttgacatttgacatttgggccacactaaagcagccagagtgtgtggctgaatgaggacatggaggaaaagaaagaacaggaaaatggtgagggggcccacatagtagagagctttaagctatctaaaagtttgaattttattttaaatacaaaggaaagccatgccattaaaagtctctaaaaagtcgaataatataattcaaattaaatttttaaaagatcactggctgtggtctgaaaattagttctttgggggatgtcaccactgttcyggaaactgcagtggtggcagtagagatggagaaaaatggacactttcgtgacatattttttagttataatataggacttgccgacaggggcagggaggatgagtgaaagcaagaaatcaagggtgattccctaatctctggttgaaacaaattgggagaaggtggtaccatttatcaagataaagaagaaggctgaa

SEQ ID NO: 746621 - DNA, 522 bp, Homo sapiens
atgcatagaattttcacaagctgaacatgtcatataaccagcacatgagtcaaaaagctgtagccttaccaggatctcagaagctcccttcatggcccctttcagtcacagccccacaggaacactcaccatcctgacctctaaccgctatggctgcaggttgaccttttgcttgaccatgtggttaaaaaagaatatcactctccagctccactaaagtttctgtattacccagaaaccaagyttcttgaaatttcttaatttttctagttttttttattactagtagagaaacaagtaaagacaacgaggaattaaatgaaacaatgatcacactgattttgatccttagtaaattctgttttagtttaattttattttctttgaataaatcttatacatttttgtgtgtccataagaatttataaaattagttatacatatttccacaaaagacgtcttattacatttaaagttagagattttatgaggcaagttgtatggtcataatccaatacaatt

SEQ ID NO: 746622 - DNA, 480 bp, Homo sapiens
agggagcccatgtggatccattttgaaagctctcaggggccttgacgactccagcctctgtctaccttactgagaccatctagttactactgttagagaatgtgatagcccaactccagttctaaggatgttttcaaaaacattccaactatacttttcagggaataccgttgactaatcttcaggtccatccgatgctactccattgcttcctttttcctgctgcatatacttgtggtattggtggtttgtctctgcccacttgtaattttagatttgctgtaaatgtgtctctgggtttttggttktgatatttaattgttctgcctgtttctatgtagggatttggagggattgaaagatatgcttgtgatgtcagcgccatcttctaggaagcgcattttatctgatcttctatctgtgttgaatagtagagtgtctagcatatccccaaggaataggagacacatgatctaggta

SEQ ID NO: 746623 - DNA, 480 bp, Homo sapiens
agggagcccatgtggatccattttgaaagctctcaggggccttgacgactccagcctctgtctaccttactgagaccatctagttactactgttagagaatgtgatagcccaactccagttctaaggatgttttcaaaaacattccaactatacttttcagggaataccgttgactaatcttcaggtccatccgatgctactccattgcttcctttttcctgctgcatatacttgtggtattggtggtttgtctctgcccacttgtaattttagatttgctgtaaatgtgtctctgggtttttggttgtgwtatttaattgttctgcctgtttctatgtagggatttggagggattgaaagatatgcttgtgatgtcagcgccatcttctaggaagcgcattttatctgatcttctatctgtgttgaatagtagagtgtctagcatatccccaaggaataggagacacatgatctaggta

SEQ ID NO: 746624 - DNA, 578 bp, Homo sapiens
ttgaaaacagatcttctgaaataatctagtcagacaacaaaaaagaaaaaaaatgaagaaagcttatggtccctatgggacaccatgaaacaaacaaatatttaccttatgactgtttcaaaagaagagatggtaaaaggcataaaaatctatttcacaaaataatggctgaattagtaattgatgctggtaaaactgaatatcgtatgcagaagcataaaactagacctstttctttaaccatgtacaaaaaacaaactgaatatagattaatgactttaatataagatcccaaaccataaaaatacttgaagaaaacataggggaaatgcttaaggacattgacctgggcaaagatatatggataagtcctcaagaacacaggcaacagaagcaaaaatagacaagattacgtcaaaataataagcctctgcacaatcaacagggtaaaaaaatgaaatataataaataaaaataagaaaatgaaaaaaatacttgaaatgtgttcatctgacgtgaaattaatattcagaatataaaaggaactcaatagcaaaaccacaaataatccaattaaa

SEQ ID NO: 746625 - DNA, 672 bp, Homo sapiens
gaatgataaaggtgtgaggtgatggatatgctaattaccctacaaattcctagaaaaaacataaactgtcaatattgatgcaagtgaaaagagaacatatgaacagatctataatacgcctattggctgaatcaataaccaaaaacctccctacaaagaaaagtccaggaccagatggcttcactgatgacttctaccaaacattcagaaaatattaaataccaatccttctcaaactcttccaaaagttgaagaggagagaacacttcctaactaaatctataaggccatcattactctgatgccaaagccaggytaatgactccacaagcacatgaaattggagaccatatcccttatgaatatagatgcaaaaattctcaacaaaatattaatctaaattcagaagcctattaatatttaaatcttattaccaagaggaatttatctcaggaatgcaagggtgacaaaacataagagaataactcaatgaaatatgccacattaatagaatgaaagaacaaaattatcattttatttgatgcagaaaaagcattaaaaaatctaatactttttgttatagaaagccaacaaattaagaatggttggaaatttcctcaatgtgatggagagcatttatgaaaaacccacagctaacattatagtcaataa

SEQ ID NO: 746626 - DNA, 696 bp, Homo sapiens
ttaaattagaaatacaggaaggatacccaatttcaccacttttattctacattttactgggatctccagccagagcaaataagcatggaaaataaataaaaggaatccagaatggagagaaagaagtcttcctccagatgacatgattttatatagagaagcttctaaagaatacaaaaaactctggaaggtacttcaacaagtttgtggaaaatggaattaaaagttgaaaataaaatgtraacttaattttaacataaggtccatcaagctcaagacactttgtaagttatgatacagactatttagcccatccttaagaaactgaaggtcctggaaatttaactatgtcactgcaatctgttttacactattaactgaaagaaaaatgagtgtttacagattttttaagattaggaaacaaaaaaaaaaagtcagaaggtgctaaatcaggaaaaaaatgtttcaggatgttgatcccacttgtttcaaatttccattgaaatctttgctcttgtccatagttgacaagagcatccattgagtagaaactttgctcagttttaattttccaggcagaattatttaagctgaaccaattaaggtgtctatggtgttgactattatttgtgctgttagtcattggccctcttcaaatagggcacaaacaaggtgaagtttttccttccaaattga

SEQ ID NO: 746627 - DNA, 696 bp, Homo sapiens
ttaaattagaaatacaggaaggatacccaatttcaccacttttattctacattttactgggatctccagccagagcaaataagcatggaaaataaataaaaggaatccagaatggagagaaagaagtcttcctccagatgacatgattttatatagagaagcttctaaagaatacaaaaaactctggaaggtacttcaacaagtttgtggaaaatggaattaaaagttgaaaataaaatgtgaacttaattttaacataaggtccatcaagctcaagacactttgtaagttatgatacagactatttagcccatccttaagaaactgaaggtcctggaaatttaactatgtcactgcaatctgttttacactattaactgaaagaaaaatgagtgtttacagattttttaagattaggaaacaaaaaaaaaaagtcagaaggtgctaaatcaggaaaaaaatgtttcaggatgttgatcccacttgtttcaaatttccattgaaatctttgctcttgtccatagttgacaagagcatccattragtagaaactttgctcagttttaattttccaggcagaattatttaagctgaaccaattaaggtgtctatggtgttgactattatttgtgctgttagtcattggccctcttcaaatagggcacaaacaaggtgaagtttttccttccaaattga

SEQ ID NO: 746628 - DNA, 589 bp, Homo sapiens
tttacagattttttaagattaggaaacaaaaaaaaaaagtcagaaggtgctaaatcaggaaaaaaatgtttcaggatgttgatcccacttgtttcaaatttccattgaaatctttgctcttgtccatagttgacaagagcatccattgagtagaaactttgctcagttttaattttccaggcagaattatttaagctgaaccaattaaggtgtctatggtgttgactattatttgtgctgttagtcattggccctcttcaaatagggcacaaacaaggtgaagtttttccttccaaattgatatggatggtctgctgctgccgggcttcatcttcaacrtcatcttgtcctttcttaaaatgagttattcatttgtaaatctctgatttctttggacattatccacataacgttcttgtaaatcatcaacaatttcaccattcttccacccaagcaaggggctcttgctttaattttagcagggtttacattgctctgatagaggctgcattcaaactgatgtcttatctttcttagtgcctcaaactacatgctgttcagacctgttataacaagttagaatgaattc

SEQ ID NO: 746629 - DNA, 546 bp, Homo sapiens
tacaaccaacatcaatgagcttttcataagttaaaaagaaaaactcatgtcggccccagccctgaggctacctgacctgacaaaactctttacactctatgtgtcagaaaaataaaaaatggcaattggagttttaacccagactgtaaggccctggacaaggccagtggcctatctctcaaaacaactagascaagtttccagagggtagcccccacggtctaagagccctagcagccatggccctgttagcacaagaagcaaataaactaacccttaggcaaaacctgaatataaaggccccctatgctgtagtaactttaatgactaccaaaggacatcattagttaacaaatgctagattaaccaagtaccaaagcttgctatgtgaaaatcccccataaccattaaagtttccaacaccctaaaccctgccaccttgcccccggtgtcagattgcccagttgaacataactgtgtagaggtgttggactcagtttattctagcaggcccaacctccaagaccatccttaaacagaagtaga

SEQ ID NO: 746630 - DNA, 623 bp, Homo sapiens
tttaataatgatttctcttataatgacaccaaacctgtatcaaattttatctttaccagaactctgtattggatgtcatcaggccctctatggctgcatttccctttgtctccccaaaatcaaagcctaaaaatgagcttaatttaggtctatttgtactcttcctccacttttcagatttctgactttttatctttttttttttttttttttttttgagatggagtctcccattgtcaccaaggctggagtgcactggtgcgatctcggctcactgcaacctccgcctcccaggttcaagcgattctcctgcctcagcytcccaagtagctgggactacaggtgactgccaccacacccagctaattttttttttgtatttttagtagagacggggtttcactatgttggccaggctggtctcaaactactgacttcgtgatctgcccacctcggcctcccaaagggctgggattacaggcgtgagcctccgcgcccgaccctttttatcattctatcaacataaccagtgttctcctttcatcttagactcaaacgcttaatgtattagtcaaccagttgcttgtctaactttattctttaatttgttaacaaaatctacc

SEQ ID NO: 746631 - DNA, 620 bp, Homo sapiens
aacctgcatacattttcaattgcttcttaaaactcatagtgctgccctctccctctccctctcccgctcctgctcccgctgccgctccccacggtctctctctccctctctttccacggtctccctctgatgccgagccaaagctggactgtactgctgccatctcggctcactgcaacctccctgcctgattctcctgcctcagcctgccgagtgcctgcgattgcaggcaygcgccgccatgcctgactggttttcatattttttttggtggagacgcggtttcgctgtgttggccgggctggtctccagctcctaactgcgagtgatccgccagcctcggcctcctggggtgccaggattgcagacggagtctagttcactcagtgctcaatgttgcccaggctggagtgcagtggcgtgatctcagctcgctacaacctccacctcccagccgcctgccttggcctcccaaagtgccaagattgcagcctctgcccggctgccaccccgtctgggatgtaaggagcccctctgccccgcggcccagtctgggaagtgaggagcgcctcttcccagccgacatcctgtctaggaagtgaggagtgtctctgcccggc

SEQ ID NO: 746632 - DNA, 620 bp, Homo sapiens
aacctgcatacattttcaattgcttcttaaaactcatagtgctgccctctccctctccctctcccgctcctgctcccgctgccgctccccacggtctctctctccctctctttccacggtctccctctgatgccgagccaaagctggactgtactgctgccatctcggctcactgcaacctccctgcctgattctcctgcctcagcctgccgagtgcctgcgattgcaggcacgcgccgccaygcctgactggttttcatattttttttggtggagacgcggtttcgctgtgttggccgggctggtctccagctcctaactgcgagtgatccgccagcctcggcctcctggggtgccaggattgcagacggagtctagttcactcagtgctcaatgttgcccaggctggagtgcagtggcgtgatctcagctcgctacaacctccacctcccagccgcctgccttggcctcccaaagtgccaagattgcagcctctgcccggctgccaccccgtctgggatgtaaggagcccctctgccccgcggcccagtctgggaagtgaggagcgcctcttcccagccgacatcctgtctaggaagtgaggagtgtctctgcccggc

SEQ ID NO: 746633 - DNA, 620 bp, Homo sapiens
aacctgcatacattttcaattgcttcttaaaactcatagtgctgccctctccctctccctctcccgctcctgctcccgctgccgctccccacggtctctctctccctctctttccacggtctccctctgatgccgagccaaagctggactgtactgctgccatctcggctcactgcaacctccctgcctgattctcctgcctcagcctgccgagtgcctgcgattgcaggcacgcgccgccatgcctgactggttttcatattttttttggtggagacgcggtttcgctgtgttggccgggctggtctccagctcctaactgcgagtgatccgccagcctcggcctcctggggtgccaggattgcagacggagtctagttcactcagtgctcaatgttgcccaggctggagtgcagtggcgtgatctcrgctcgctacaacctccacctcccagccgcctgccttggcctcccaaagtgccaagattgcagcctctgcccggctgccaccccgtctgggatgtaaggagcccctctgccccgcggcccagtctgggaagtgaggagcgcctcttcccagccgacatcctgtctaggaagtgaggagtgtctctgcccggc

SEQ ID NO: 746634 - DNA, 538 bp, Homo sapiens
ctttttcccctagatccagaggtgtataccatagggaagggaaatacatgattcagaagagatgtgtaggacaactgaagtacgatgacatgaaggttgttttgacctaaaggcaggatttacacactcttacctagggagcaatagataaactggaaatcttaagaggccttcttagaaccagggttaatcaaaagtcaacatggcaaattagcattcaagatgtagttgctttatctccacaactgttatccaaaatatacaaagtactcaaagttaacaataaagaatcaaacaatgcaattaaaaatgggccaaataccyggacacctcacctaataagatatgcagatgacaaataaacatatgagaggatgctgcatgtcacatgtcatcagggaaatgcaaattcaaagaatgagataccactacacacctattagaatggctaaaatccagaacacttgcaacaccagttagttgctggtgaggatgtagagcaacagaagttctcactcagtgctggtgggaataggaa

SEQ ID NO: 746635 - DNA, 635 bp, Homo sapiens
aatcaaaacagaattaaatcttatttgaggccggggctggtggctcactccaataatcccagcactctgggaggccgaggcgggtggatcacttgaggtcaggagttcaagaccatcctggccaacatggtgacaccctgtctctactaaaaatacaaaaattagccaggagcagtggcttgtgcctgtaatccctgctactcgggagtctaaggcaggagaatcacttgaacccaggaggcggaggttgcagtgagctgagatcgccactgcactccagcctgggcaacacagcaagactcygtttaaaaacaaaaaatcttatttgaaaataatctatgaagatttttgactgttactaaacttaaagtttgcaagaggctgaaaatgttcctgttttttaagcttggccagctggttaatgttgtcttaaaatccttatttattcaatatttttataatgttctagtgtgatgtacccacaactacctttccttgtctcaaaatattttctatttgtctgtctgtttaaactatcagttttacatatgctatcataaaatacttgactcttgttttctctcttttctttcttaattccatcaactcacagcaatctaccttctttgattagg

SEQ ID NO: 746636 - DNA, 561 bp, Homo sapiens
ttgaattttatcaaattcttttactgtatttgttaaaataatcatatttttgtccttcattttgttgatgtgatgtattacttttattggtttgtgtgttttaaaccatcctggcatccctgggataaaccccacttgataatgtttgactcctgtatcagtgagtttcatactttctgtgttttcattatggcaaatatcatcctttcatttccagatataatacctctgtaagcatttcatgcagggccagtctagtgatgatgaattctctcagtctttgtttatgtggaaaagatttcattgcagtttttaaggataactttcctgggtaaaagttttcttggctggcagcattttttttgtcagcaatttgaatataccatcctattctctcctgacytgtaagttttctattgagaaaccagctgttagtctgatgggaatctccatatatgtgactggactcttttctcttgttgtttttagagttgtctctgtctttgaattttgacagtttgcctataacgcgctttgaagaagacctttttgagttgaatc

SEQ ID NO: 746637 - DNA, 621 bp, Homo sapiens
ctctggttcaagcatcaaataaatgttttagggagagacatgatctggtgatttatttattaattcaataacccttcattgaatgtcaactccatgcctgattggcttcactagaggcacaaaggtgagtaaaactgggctcctgcctcaaaggacttgcagaagactgaagggggcacacctgctcctcagccctggccactacacttgccctcacttggaggctcacactcttcatgagctgcctgcccactttccatgctgatctctgtgggaacacactctactccatttttacctaattaactcctacttatcattcagattttagctctgtgcctggcacatggtatttgctcaataattattattgaatgaatgactaaatgaacaaaacatcataatacaatacaagaagttctcagatacaggaggaagcaaacagctcttgggcgctgggaccatgktaaggatatcaaggaaggcttcacaaagggcatttgagctcgtggtatttgagatagattttgaatggaattgaagggtaaataagggcaacatgaagagagggttacaaagtggtgagaaaaaaggaaaacttatactaaacaaagggaacat

SEQ ID NO: 746638 - DNA, 625 bp, Homo sapiens
ataaaaaaaaaaatagtttgaggctaaaagaaacaggagagaagcagacacatttttagacatgtcacaacatttacagtgattttaggtgaaaagagcagtaaatttcaatagactgaaaaaatttgcagcacagcaggcctagggggaaaaaatctgtcttttaccaagatcttaaaaacttctgttgtcaaaggcctcttgaaatgtgaagatgctgtatattgtcttcagaattctgcatttatactattgttattttagcattttctaaaatgtctgcaatcctctgtgggatccttgaaagtaatgtaggtttatgaaggtgtcttcaataacccttagtgctatcaccaatgaatattgagactaaggtctgccatgaataagtctcatgcctacttaaaagtttctggctratggtgaggagagccaaagggaggagccatctaatctcagttgctgtcctccttctcctgacattctcaatgcccttgtttataagtgtcctagctccagccatttctgccacataatacttcttttattttatttcacttttcttagaatggtctatgctttactcatcagcttcaaaactctgctcagactcagcttcaggcat

SEQ ID NO: 746639 - DNA, 625 bp, Homo sapiens
ataaaaaaaaaaatagtttgaggctaaaagaaacaggagagaagcagacacatttttagacatgtcacaacatttacagtgattttaggtgaaaagagcagtaaatttcaatagactgaaaaaatttgcagcacagcaggcctagggggaaaaaatctgtcttttaccaagatcttaaaaacttctgttgtcaaaggcctcttgaaatgtgaagatgctgtatattgtcttcagaattctgcatttatactattgttattttagcattttctaaaatgtctgcaatcctctgtgggatccttgaaagtaatgtaggtttatgaaggtgtcttcaataacccttagtgctatcaccaatgaatattgagactaaggtctgccatgaataagtctcatgcctacttaaaagtttctggctgatggtgaggagagccaaagggaggagccatctaatctcagttgcygtcctccttctcctgacattctcaatgcccttgtttataagtgtcctagctccagccatttctgccacataatacttcttttattttatttcacttttcttagaatggtctatgctttactcatcagcttcaaaactctgctcagactcagcttcaggcat

SEQ ID NO: 746640 - DNA, 632 bp, Homo sapiens
agccaagttctatcagatgtacaaagaagagctggtaccaatactactgaaacttttccaaaaatttgaggagaaggcgctccttggtaactcattctatgaagccagcatcaccctgatacccaaatctggcaaagacacaacaagggaaagaaaactacagaccaatatccctaatgaacatagatgcaaaaatcctcaataaaatactagcaaaccgaattcaacagcacatcaaaaaattaatttgctgtgatcaagtaggtttcattcctgggaggcaaggttggttcaacatatgcaaatcaataaatttgactcactacataaacaaaactaaaaatgaaagcaatatgatcacttcaatagatgcagaaaaagcttttgatgaaatccaacatctcttcttgttaaaactgttgacrgttaatattaagtgtcagcttaattggattgaaggatgcaaagtattatttctgggtgtgtctatgagggtattgccagagaagattagtatttgagtcagaggactgggagaggcagatccaccctcagtctgggtgggcaccatccaatcggctgccagggtggctagaaaaagcacgcagaagaaggtgagatgagctgaattg

SEQ ID NO: 746641 - DNA, 621 bp, Homo sapiens
atgtttgaaactaaaaattagaaatatacaatttaggcttaagtctatttttggttaaaggtttccttttttaaaaaactgtgagatatgagaatcctctctagaatgagccattatttcctgtgaatcctcctttttgctagagcactcagcaatgtgtggcccagagaaaaggcgccaatacacatctggttaaactggatcttgggcaaatacaccttgtggaacggtgcatatggatgagaaagcctgactcgaaaatgtattactcttgctttttacaaacagaggattaacaaagtcttctgaatatttgagtatgagctggggaactaagtcagggacaatgggttacgaggtrggaaaaaaacacgacaaaatgaaacaacaaaaaataaaatataaggtaatgtgtggaatagtaaagaaagcttgaaatagaaatcagttatcgtgggttttattcctggttctactagcaatgaaaaacaatctgtggaatttgaccaccacgtaccaatctcctaagattctattatctaatggttttctaagccattaggtaatataaattctgcccttatccatattgacttctttttcctttgagaggattgtgct

SEQ ID NO: 746642 - DNA, 611 bp, Homo sapiens
tgacaaaggtctaatatccagcatctataaagaccttaaacaaatttacaagtaaaaaaccaaacatctccattaaaaagtgggcaaaggacatgaacagacacttttcaaaagaagaaatacatgtggccaaaatcatatacaaaaagctcaacatcactgatcattagagaaatgtaaagcaaaactataatgaggtaccatctcacaccaatcagaatagctattatttaaaataaccaaaaaaaaaaatgacagatgctggtaaggttgtggagaaaaaggaacacttatacactgttgatgggagtataaaccattgtggaagacagtgtgacttttccttgaagacctaaagtcagaaataccattcracccagcaaacctattactggatatgtacccaaaggactgtgaagtgttctcttataaagacacatgcatgcatatatttattgcagcactattcacagtagcaaagacatggaatcaacctaaatgtccatcaattatagactggataaagaaaatgtggtacatatacagtataaaatactatgtagccataaaagtaatgaaaccatgtcctttgcaggaacatggatggagct

SEQ ID NO: 746643 - DNA, 575 bp, Homo sapiens
accatccccagctaatttttgtatttttcggaagagatgggtttcaccatattggccaggctggtctcgaattcctgacctcaggtgatcctcccacctcagcctcttaaagtgctgggaatacaggcatgagccaccatgcccggcctgtttttgggatattttaatggaaagtgatggagtatgaatccggcctgctcaggtagctctaggtcagccatgaaatctacgtcctgataaggagcctggagaggcttcctcaaatccccaggccatggcattgccagcgcaacacttgcatctcctgacttagcccagcactgccaagcagacctcaygggtgtccttctgccaccttcgtgcttcctccatcctggtctccctgtctgtttacatcagtgtttctcttggcccagggcagggtctctttatctcacggcctctgtggtccagttagttaggagagagttttgagcaggtgcaattagtgtggagtctctggggcctgcactcacacacgcgggatcctgacaagccctgagtcctggaacagccgcaccctgcagtaacaccca

SEQ ID NO: 746644 - DNA, 575 bp, Homo sapiens
accatccccagctaatttttgtatttttcggaagagatgggtttcaccatattggccaggctggtctcgaattcctgacctcaggtgatcctcccacctcagcctcttaaagtgctgggaatacaggcatgagccaccatgcccggcctgtttttgggatattttaatggaaagtgatggagtatgaatccggcctgctcaggtagctctaggtcagccatgaaatctacgtcctgataaggagcctggagaggcttcctcaaatccccaggccatggcattgccagcgcaacacttgcatctcctgacttagcccagcactgccaagcagacctcatgggtgtccttctgccaccttcrtgcttcctccatcctggtctccctgtctgtttacatcagtgtttctcttggcccagggcagggtctctttatctcacggcctctgtggtccagttagttaggagagagttttgagcaggtgcaattagtgtggagtctctggggcctgcactcacacacgcgggatcctgacaagccctgagtcctggaacagccgcaccctgcagtaacaccca

SEQ ID NO: 746645 - DNA, 616 bp, Homo sapiens
atgttactttgggagcacattgggaaggacgtaatcatagctaccttcacctgagcgagcactcattaggtgaaggggtttacatagattatctcatttcatcctctcaatagcccagtgatgcaggcactgttatcctcctcttcattttacaggggaggccactgggacacagagggttggaatatcttacccaagatctgacagctaggaagygcaggagcctcctctcgggtcctacattccatctgaggactggatcctgctggaagaaggaaggaggtttatccagggagggtgtgcaggtaggaggctgtcgtgattcatcacgggaagtcaataaagggtgaataagggcagtgggaggggccaaggacagcagtggggatggtcagaggggccagcacatcacatgagatgaccgactggctgtagggtgtgaggggaggagggaggccagtagagcgcccttgtttccagctgggggctgccatcaaagcgggcactgttcactcaatcaggaaggagtgcagcaggtggaggaggctgggtgggaagcaggtgggttcagctgtaaaataaaccttattcagttgatgaccatgcattctgaagt

SEQ ID NO: 746646 - DNA, 627 bp, Homo sapiens
aactactgcaatggacatgaggagatgttactttgggagcacattgggaaggacgtaatcatagctaccttcacctgagcgagcactcattaggtgaaggggtttacatagattatctcatttcatcctctcaatagcccagtgatgcaggcactgttatcctcctcttcattttacaggggaggccactgggacacagagggttggaatatcttacccaagatctgacagctaggaagtgcaggagcctcctctcgggtcctacattccatctgaggactggatcctgctggaagaaggaaggaggtttatccagggagggtgtgcaggtaggaggctgtcgtgattcatcacgggaagtcaataaagggtgaataagggcagtgggaggggccaaggacagcagtggggatggtcagaggggccagcacatcacatgagatgaccgactggctgtagggtgtgaggggaggagggaggccagtagagygcccttgtttccagctgggggctgccatcaaagcgggcactgttcactcaatcaggaaggagtgcagcaggtggaggaggctgggtgggaagcaggtgggttcagctgtaaaataaaccttattcagttgatgacca

SEQ ID NO: 746647 - DNA, 635 bp, Homo sapiens
aggtctcctcctctgcctggtgattcttggtcttctgtttgggattgagaaaacaggatgggtatgtggtgttggttctctctgtggctgagtctctatggtatggtgggtgtgttcaattattttagaaaataggctacagtggtttctcttggaacatctacaggccacctcttctatggatcaaggagtatatattctttgtgaacttgtgacttatcaggactttaataacccccctgcatacccagttaacatattctaggaagttgcttcaccacacgtttcattagccaacacatttccctctaactagcagtgtctgcattttccattaaataatccatgacttctcatactatttgcctttgccaacttcatcacatattcaaactccttctctaataatagggctatatgaactaaaaatcaacacagctttayggcatttttaatatttggaaaagtcatttcccctcataatactttctttcaaaacatttaaaatttattctcaacacttttttcttccacatgaactttggatttattttaacaagttttcccaaaaatagtatagagactttgtttggaattattttaattatgtaagttgggaaatttaatcatacaaa

SEQ ID NO: 746648 - DNA, 541 bp, Homo sapiens
tttaagccagagcctggtggacgtgggtctgattggtatgcctgttattaaaagtataggctctggccgggcgtggtggctcacggccggacgcagtggctcatgcctgtagtcctagcactttgggaggccgaggtgggtggatcaactgaggtcaggagttcaagaccagcctggccagcatggtgaaaccctgtctctactaaaaatacaaaaattagctgggtgtggtcgcgggcacctgtaatcccagctacttgggaggctgaagcaggagaattgcttgaaccctgggcaaaagagtgaaactccatctcaaaaaaaaaaaagtataggctctggacatagttccactgtttcctacctccaggaccctggrcaatttatggactctgccaagcctcagtttccttatttgtaaaatagggaaaacaatagtactcacatcacagggctgttgaaaggattaagtagatacacatgtgaagtacagtacttaccacgactggcgcagagtaaatgctcagtaaatcactcattc

SEQ ID NO: 746649 - DNA, 541 bp, Homo sapiens
tttaagccagagcctggtggacgtgggtctgattggtatgcctgttattaaaagtataggctctggccgggcgtggtggctcacggccggacgcagtggctcatgcctgtagtcctagcactttgggaggccgaggtgggtggatcaactgaggtcaggagttcaagaccagcctggccagcatggtgaaaccctgtctctactaaaaatacaaaaattagctgggtgtggtcgcgggcacctgtaatcccagctacttgggaggctgaagcaggagaattgcttgaaccctgggcaaaagagtgaaactccatctcaaaaaaaaaaaagtataggctctggacatagttccactgtttcctacctccaggaccctgggcaatttatggamtctgccaagcctcagtttccttatttgtaaaatagggaaaacaatagtactcacatcacagggctgttgaaaggattaagtagatacacatgtgaagtacagtacttaccacgactggcgcagagtaaatgctcagtaaatcactcattc

SEQ ID NO: 746650 - DNA, 592 bp, Homo sapiens
cattttactgacttcgtaaggtgatttccatctgtagtgtttaagctgatttttgtttgtttatttgttgctattgcttttaatgagggcattactttgggtcatttttactgctgaagcaaaatatgtctgtttctgtcaaaatcacttcagaagctatgtagtattacaggggaattcttttaaaaatcaaatacagagmtgctatttggggaagatgatatcgatgattgaagggaataggacctttgtgcagtatttattctggaagtcccattatctgaatttcaggatttctgattcagcctttaaagccggttgaggcattgaggcagtcctgacagggtgtgtaggcacatacacacacacacgcacacacacacacacacacaccctctaaaagagagaaagataagaaaataccatggataagcttcgctagcattgcctttcctttctaatttggtggttggaaagaggcaaagaggagacaagatggtgatagaccggttgcaaggtttcagcagaggggaccttggcaggctgcctacgagcagggagtgtgcagtttccaggcatggccacaggatgg

SEQ ID NO: 746651 - DNA, 548 bp, Homo sapiens
ttcacttattgcttttttttttttttttttttttgcagattgttgcttactttcttgttccctgatgatatctcttagatgtaatgttgttcaattgatgcacatccttccatactttacataatatagtgctttacctaatgttaaatttagtactttacataatattaaaagagcagaactgccttggaggtagatagagtctagatatcaggtcatttttgtcctagtttgtgaatttagggtttctactttcatccagtttcttgcctgtttttgtgactgtccccttaacctctgttatcagagcatctagaaatagtgaagaattcactaaattagtagtctggagttcaaagggcaattgttttatgtaartgttttaaaagcttatcctccgaaacgtaagcaatccagtaaatctatccagtgtaagtgtgttatgattgggatggattaacctcattccactaaaagagaaatgcagaactctatgttgcagccaaggtgcactggttaatgtccatatggattgacaaagtggttgt

SEQ ID NO: 746652 - DNA, 632 bp, Homo sapiens
ggcaggaccgacaaccaacacacctgagttccaaccctggctctgcgtctcaagcagctctggaaccttgggcaagtcacttaacctttctggctctcagaaaagtcatttggaaaatggtggttcctcaataggcagcggtaagaatcaaatgaaatgtcaaagtgctttgtaaacttagaaacactgtacaaatataaaaggaaggccctgtcactggarcattcattatgcaagggcctgaaatatggtatggcacaagatggtgaaggtttcatatcgcaaaaatactcacacattggtccctactccaaacctcctttcaattaacacaagcactccttcttgccagaagcacaggtctgtaccttcctgatggtctgatacccacaatatctgaccttatttgcaaatgctgtgcaaatatatggcaaaatgaaattgcaaatctggtaattaatgagggatttcatgaggtcagtgaaagtgatgttggaggctgcattaattcaggcagctaagccactgaccaagaagtatgggcagaggtagccaattcccaaataatgaaagaaaaaaagtaaggttagtgatgcttcaaaaaaaaatgattttaatgtcaaagacttaaa

SEQ ID NO: 746653 - DNA, 606 bp, Homo sapiens
gctctgacccaggcaattcttcatacagtggccaaatatttaaggtataaatcatgaatattatgtatctgctcaaaactctccaatggcttcccacaggttcaactgcaatgtattagtaatttctttgtttattgtttgtgtcactgaaatacaaactcctaaccaaaggactgtttgtttcattcaaaactgaatctccagtccctacaacagctggactatattagctgcttaaatatttcttgaataggtaagcatggcaacatagttcwcttaaagttaaattacaccaaaatgtctttattaaagaaataatgtcaaaggtagataatgtcagtcacagaactccaaaggataccattcatacagaaaataattatactgtttctgtctcttgttgggaaatgagagctgtactggaaaatgttaccattcatgcatttttggtattgctgttctctttcatgagtgtctcactagcttcccttcatctacagaaaatcacttggtagactagcaggtgtttattagattatgtcacctactttgtcataaatgtgcatcataattagactttaaatagggctgagtcaaggaggtgac

SEQ ID NO: 746654 - DNA, 606 bp, Homo sapiens
gctctgacccaggcaattcttcatacagtggccaaatatttaaggtataaatcatgaatattatgtatctgctcaaaactctccaatggcttcccacaggttcaactgcaatgtattagtaatttctttgtttattgtttgtgtcactgaaatacaaactcctaaccaaaggactgtttgtttcattcaaaactgaatctccagtccctacaacagctggactatattagctgcttaaatatttcttgaataggtaagcatggcaacatagttcacttaaagttaaattacaccaaaatgtctttattaaagaaataatgtcaaaggtagataatgtcagtcacagaactccaaaggataccattcatacagaaaataattatwctgtttctgtctcttgttgggaaatgagagctgtactggaaaatgttaccattcatgcatttttggtattgctgttctctttcatgagtgtctcactagcttcccttcatctacagaaaatcacttggtagactagcaggtgtttattagattatgtcacctactttgtcataaatgtgcatcataattagactttaaatagggctgagtcaaggaggtgac

SEQ ID NO: 746655 - DNA, 493 bp, Homo sapiens
tcagcagcagtcaaataccacctcccagaacccaaccacccaaaaaaagatactgggaataagaatgtcctcagaaagctcaactgtaaaactaaaacataaaccagaacatagattaggaagtcaagcacggaggatcaagtaaaagataggactaaatttaagatactaacatgcaatgaaaagaaatatatctaccagaaatatggaggtgagtagtttggtcagcaatgaaagcagtgaaaaaggaaaggtacaaaacactatcacataagcatyaaccaggagaaaggatatcctataaggcagattgatgtaagtaactgcttgacgagtatatcatggagctgagattatcactttatcagagtcgatgccatttaaaacttctagtcatttataatcaactcccttgttgttatctcatgatcttgttcagtaggcaactattgaaatttggttttccattcagcattctacagtgaaagaatac

SEQ ID NO: 746656 - DNA, 493 bp, Homo sapiens
tcagcagcagtcaaataccacctcccagaacccaaccacccaaaaaaagatactgggaataagaatgtcctcagaaagctcaactgtaaaactaaaacataaaccagaacatagattaggaagtcaagcacggaggatcaagtaaaagataggactaaatttaagatactaacatgcaatgaaaagaaatatatctaccagaaatatggaggtgagtagtttggtcagcaatgaaagcagtgaaaaaggaaaggtacaaaacactatcacataagcattaaccaggagaaaggatatcctataaggcagattgatgtaagtaactgcttgacragtatatcatggagctgagattatcactttatcagagtcgatgccatttaaaacttctagtcatttataatcaactcccttgttgttatctcatgatcttgttcagtaggcaactattgaaatttggttttccattcagcattctacagtgaaagaatac

SEQ ID NO: 746657 - DNA, 593 bp, Homo sapiens
atcactcaccagggagatcttaaaagttaaaaatgaaactcatcgtcaaggtagccattaccatatggactgtctgaatcacaggcaatacggtgattggcttgatgaattagaggctgcactacttgaaaacagctggcttagtggtgacatgaggctaaagagaagtttttaactattcaaagaaacttgcctgtgttactcaaggaaaacttccagcctctgttccccagtcaaaactggatcagacttgatcttcttggttgatactacagccaatctaaatcctaaatatttctttgtatcagtgttcaaatatactttccacaaaatgtatgactctattcacatatctgcagaaaaaytgtggctttgggaagatcttagctaaggtataataattataactagcccacctttctgccctaaaattggttttcagaaatgaaagtacagcctcaactacattctcaaaattgtacagttaagaactgactttcaaaatatattacctgactctacattttataaaaattacctaatattttgcgtgagctttcctctgcgaatgaagaagcaagtgagagataatg

SEQ ID NO: 746658 - DNA, 507 bp, Homo sapiens
aaggatttgtgttggtggtattaaataaaaactgaggtccccctatagatatattccaagaccaacagcacatagccatgtagtcaaaagttatcttgagttccctgaaacactagctgtaatcataaaagaaacaaaaactgtcagctttacatccttgttagcatgattcaatgaaattaaactaatcagctatagacaaatcagattaaacagctttgcttgccttacaaagaatattaatatataatagtcaatcacaagaaargtcaaaatacttcctcctttatgcttcaaaaaattgtgctgtaactgctgtgagtggggcttaccacttttggtaagtccttgtggttggtgaaatgttcctttgtatgcatgatacacttttaaatttcttcccattcgatctaattttggttttgacagtttgaataagagatgtcttattgaaataggtaaattataatgacaatagagtgaggcataacttatatgaataatcct

SEQ ID NO: 746659 - DNA, 668 bp, Homo sapiens
ttccactcctagaaattgattttaaggatataaacctagatacacagaaatacaactatgggggtattcattacagccctcttcataggaatgaagaatctgaaataactaatgtccaatggaagggtcttggttcaataatagtttctctataacctgtataatataaagccaaacgtgtgttatagaaggaaatttaatgataagtagaaatggcataggaactgctaattgtcagatttatgagcctttattcccctctaaaagaaccttgactttacttggaatggaaaaaaggccagttaaaaataaaaagactaatcctttaacaayatgtaagtgaatactgtttgatgagcttccagaagaactttttcaaaagaggcatatacggattccatcctaatctccttttttttttaaaattatactttaagttttagggtacatgtgcataacgtgcaggtttgttacatatgtatacatgtgccatgttggtgtgctgcacccattaactcgccatttaacattagatatatctcctaatctccttttgtcccattgctctttcagcctggaaagcccactttatggctggagttgtagtagctcctttgcgacctagagaatggcaatcacatgtaaaagatgatgaggtaaaattataa

SEQ ID NO: 746660 - DNA, 646 bp, Homo sapiens
tttatttgtgttgttttcagtttctttcatcaatggtttatagttttcattctaaagatctttcacctatttgcgtattctttttttgtacgtattgttactttcttgattttttttaaatggttcactattagtgcatagaaatgccactaactttggtawgctgattttgtattctgcagctttactgaattcatttattatttctctaatagttttttttaactggagtctttagagttttctatacatatgatcatgtcatttgcaaatgggggcaattttacttcctcctttccaatttacatgcccttaattttttttattttgactagttgctcttgttaaaactttcagtattatgttgaacaaaatggtgaaaataggtattcttgtcttgttatagaacttagaaagcattcaacttttccccattcagcatatgtcagctgtggatctacaatgtatgattttcattgtgttgaggtatgtttcttctctgtccagtttgttgagatcatattttctttaggaaatggataaaatatggaagaattagtagaaactttagttcataattatagtggggggttaacaagtttagttaagaaatttatatataaagtatactcaactataaatataa

SEQ ID NO: 746661 - DNA, 640 bp, Homo sapiens
gtattctactactttcatgtcctgtatcctataaatcacaaagcaggtttttttttggggggggtggggggttgttatctagcaactccttctttacaattttttttcatatggattgctttcctcttcaaccccactggcatcactttaaactaaaccaggagcaagcaaactttttcwgtatcacctgaaagtgagtatttgtatctttggaggctatttggtctctgttgcaacactcaactctacattgtagtatttaaaacaatcacagacaatatgtaaatgagttcatatggctgtttccaaaattttatttacaaaactggcagaatttggcccatgggctgggctgtagtttgccaaccccttcactgtccttgctaccacccaattgaatcaccagacatcttctgattcccctgcctaaacaaatgctcttctttgcacctacctatctacaaaaagatatttatagattggtatttttaaacctcttttccattatatcattcttttactaaatttttcaagtggttctcaaacagaaattggcataactgggataaggaaggcagggtagggacaataatttacccaaaaaagagagtgtagatttatagagtgatattttaatgca

SEQ ID NO: 746662 - DNA, 549 bp, Homo sapiens
tcagttggtggcaggtaagagaagagggcttgtgcaggaaaactccccttttaaaaccatcagatctcagccaagtgcggtggctcatgcctgtaatcccagcactttgggacactgaggcaggtggatcatgaggtcaggagattgagaccatcctggctaaaatggtgaaacactgtctctactaaaaatacaaaaaattagctgggcgtggtggtgggtgcctgtagtcccagctactcaggaggctgaggcaggagaatggcatgaacgcaggagatggagcttgcagtgagctgagatcatgccactgcattccagcctgggttacagaacaagactccatctcaaaaaaawtaattaaatagatacaataaatatataaataaaaccatcagatctcatgagacttattcactatcacaagaacagcatgagaaagacctgctcccatgattcaattacctcccactgggtccctcctacatcgtatgggaatttaagatgagattttggtggggacacagccaaactgtatcatagaccttt

SEQ ID NO: 746663 - DNA, 626 bp, Homo sapiens
acttcactagcaatatgccattatttctattgtccaatatcctcactgacatttgaaatgttcactcttttattttagccatcttggtttgttaaagggttgtcacactgtgattttaatatgcatttttcttatgattcctgataatgagcatcttttaaggcaattcttggccattttttatcttctattgtgaatatatttttaaagaatttcccctttttcttttaggctgggttgtttgtctttttattattgatttgtaagagttatttacatgttctggttacaagttgtattttctccaaatctgtaatttagattatcattttcttaataattttctttgacaaagtttcttatgttgataaagtttgaatttatgatttytatatttaatattttattcagtttgaaacaccatagattaattcaaaatcatgaaaacttacttctatttttttctctatctgtattattaggttggtgtaaaagtaattgtggtttcagaccgtgaattttaaatcattataactaggctcaaaaacatctttattattcaaattatgaaccatggcaattaacacatttttgccaacaagaaataagtttgtttattcctgtag

SEQ ID NO: 746664 - DNA, 636 bp, Homo sapiens
tgaataaatgatgtaaagaaaaaataataaaaagtaatacattaataattattgaattaactgtaaaattaatgcatggaacacatcacttaattttggataatggtttcatttattaaaacttaacagagttttcagtacatgtgccacacactgctacgtgcttaatgtttattaatctatttaatattcagagcagtcttatgaggtaactattactattagttttacttagtatgaggctatgtagcttataaataggagaatatggatttggccccaaactcagtattttctttgaactttgctataacagttctattaartgttatgcaattaataatcaacaaagttaaaattagacagtttcctcttaaaattgggtattctaatacattttttatcatattgaccacttttccagtacgatgcatggatagcaaaagaggcttccaatagagagtaaaaatgaatctcagctctgaactaagaagagaaactcatttgcatggaaatttacataatgatgacaaaatccctcttccctaacttgttttattaatactatggtgtgtcgatagaattatttttaaaacccataattacatgtagctagtttaatggaagatatcagtc

SEQ ID NO: 746665 - DNA, 624 bp, Homo sapiens
catttaagaaaatgaaagcacattaaaatgctcatatatcaacataaccagttatagaatttctagatggattgtacctaaggtattgcaatttattaaatcagttgggaaaagcaaatttattttgtaatgcaatgaaaaatattaagcatattttctgcacttatatcttatgttaccttacaatgcacacaggtgcttaatggaattatttttgacaaacaatataaataatgtaaagtaaaataataaagagcacattattaacaaaattatytaatttggtaatgacatttcaaatagtcatatggttttgtaatgttggaagttaccagaacaccaaatttgctttgtaaattcataatgtttggtctttttaattttcttttctatacatgtttgaattacatcaggcattatatttggataatatattttaggggccaaggacactaataagtaatatgcatatcttcacccaagttcaaaactatttaaatgatttattagatagatgagtattaaatactggcataagtatatacaaggttaatttgaggatggtgtcttgatcttcagctgcatctgggctcctgatacctatcttctactttgagctttctc

SEQ ID NO: 746666 - DNA, 626 bp, Homo sapiens
atcccaaagttttctttaagttgtgttgtttttaaatggctaaatttacattaacttgttagggcaaaaacagacaattaatacataagcaaggtaatttgccattttaaactactatagaaaatcatacaatcatgtcaatagatgcctaaaaataatttgacaagatctaacatctattctaggaaaaaaaaatcattagcgatctagaggaaaattttctcaacctaacaatgggtatctatgaaaaaacatatagctcatattctacttgttaactattgaacagtttctctcctacaattaagaaaactatgtaaatatctgacatgtattaaattacatcttacaggatataaggtaagaaacacaataaggtaagaaaaaggaaagtcactcaaattggaaagaagaggcaaaactctatttatttgcagacamcatgattgtctatatgaaataaatgatagaatctactagcaataatagaactaattaatgaattttacagtgctgcagaattcaaaatccatattctgcaaagaagacatacaaatgggcaactggtgtatgaaaatgtgctcagcaacactaatcagggaaatcctgattcaagccacaatgag

SEQ ID NO: 746667 - DNA, 582 bp, Homo sapiens
cagcttgagagatcaagtgactgggttgacctttgacttaaggcatactaagtatgttggcatactacaagggtcttgtgtccctttctcccctcattcttctcttgcggtgggctgtccacatgcacagtggcatgctagcacttgggaagggagcaagcacagtgtgtttactggagttgtatgcgtgctcccttgaggcattcttgccttccaggtcaggtcarttgtctctagatcatgtaacagttaaactccgccattttgcctcttaatgcgcatgcttgagcccactcgcccatatcttgagatcttattgggaaactactaatcagtaaccagtttcaggttttttgtatttattgggagactgcctttccctggcagtggctgcgaccaattattattttatagaaatagtgtaatacctgcctgaccatcacttgatgatcatttaacgttcctgatgggagcaggagggagccctctcctgccgtgctcatacctgactagcttgttacctactgtaacaaggtcagtggtgaccaggcttgaggctcctaaataggcatttgaagcatt

SEQ ID NO: 746668 - DNA, 489 bp, Homo sapiens
ccttaggtaaatattatatatccacaaaaaaaaactttattggaaggtctctgcaatttatccctaaagctcttctatctcaaaaaaatgagtctgaatgtgtttcccagtaccaggatccactgcatttccaaagatgctcaaacctatacctctgtcatttctccactgtttaaataattatctattgagtaatcaccatccacaaacaactttttaaaagaaaaattgtgttatccataatatgagtaattgaaattttaggaygcatcaaaattttcaatttctagatttcccttatcttggaatgttttcttagcataaaatccccagatatgtactacagtgtcaaataatatcagcctcatgcccaatgttgcattttacttttaatgaatgtctccaaaagtttgattaacaccagcaatatatgcttcttgaaatcctattaatattgggtatttttaaagttcctagcttgatttgtat

SEQ ID NO: 746669 - DNA, 388 bp, Homo sapiens
gagctcctagaattctacaccactactgttatatataaatgcacttagtactctgtaatatgacaatttgaaatgttggtaattactattcttctttgtcattcaaaagcgtttgataattggctcccaattacctttgaaaaagctctgccagtttactatcaagcagaaagaatccaacttaactctaggccagggattctaratattggcactattgacattttaggtcagctcactctttgaagagaatgaaggagctggaaattggcctatagatgtttaggaaatgtttagctgtatccttggtttctcctcactagatgctagtagcaacattctcctcgcaaggtgagaaaataaaaaatgtctccagagagtgccacat

SEQ ID NO: 746670 - DNA, 388 bp, Homo sapiens
gagctcctagaattctacaccactactgttatatataaatgcacttagtactctgtaatatgacaatttgaaatgttggtaattactattcttctttgtcattcaaaagcgtttgataattggctcccaattacctttgaaaaagctctgccagtttactatcaagcagaaagaatccaacttaactctaggccagggattctaaatattggcactattgacattttaggtcagctcactctttgargagaatgaaggagctggaaattggcctatagatgtttaggaaatgtttagctgtatccttggtttctcctcactagatgctagtagcaacattctcctcgcaaggtgagaaaataaaaaatgtctccagagagtgccacat

SEQ ID NO: 746671 - DNA, 483 bp, Homo sapiens
aaaaactataatatagtgcaaaatgaaaatactaaacattttaaatataaaaacagaatatcagagatgtaaatgtcttattaggctaatcatcagaatgaacccagtaagaaagtaatggtgaacttgaagacccactaaaactacacaaaccaaaatgtaacaataaaagataatagcaagaaacaaaattaagaaaattcaaaagctaaatacatatcaaatggtctaacattcatataaccagagscttagcagtggagaaagaacaagcaaaaacaaaggtaaagatacattagttgagaattttccataagtactaaaatacagcaaaccataaatttaagtagctcagagaaaattatttatacataactttataaaattacctgtatatataattttctctgagcttcttaaatttatataattttctctgagcttcataatacacatcaagagacattttagtcaaactgcttg

SEQ ID NO: 746672 - DNA, 618 bp, Homo sapiens
aaacagtgttccattgtgtatatatgccacattttcctccaaatttgggaagttttctgctattatctctttaactaaacttcctgccctttgtctttctcttctcttacctgaactgtcatttgaatgtttatgcttttgatgccgtcccattaatcccatcacttttcttcattcattttcattttcttctttttttcttctactaactgtatagtttcaaatgaccttttactccacagattcttctgcttgattaattttgcttttgatattttctatttgattttgtattttatgtattatatttttacctccagaatttctatttttttttttcatttctctgttacatttttcattttggtcagttactgttttccgaatttcatagaattttctttccatatttgcttgaaggagactgagcttccttgaaagaattgcttcaaattccttgtcaggmaatttgtttatctcaactgctttgacattagctactttgaaattattgtgttttagtagttttttaaattttatttattttttttgacaggctcttgctctgttgcccaggttggagtgcagtgaaattatcatggctcactgtagccttta

SEQ ID NO: 746673 - DNA, 591 bp, Homo sapiens
tatagcactgttagcaatatatatattgtcctctgctggctatgctcttctccataagttgagatgtctttggggtcaaggagatttgcccatttggagtcctgccctagacccactccctgcttatagaccacactctgggtgtttaggaccctggaattccatgcccagttattcctgaagccacctacctggccttcacaggcctctttccattctcacaagagtggactgtgttgttggaatgcccatacctagactcaaggtatagtcaagagtgactcattgcagagagtataaatgcagcttgaatgcattagttaacatgtgcactagtaagaagtgatayctcagtctgtacaactagaaaaaaatattataaacaggatggcttaaaaacaacagaaatttatctctcatagttctggagtctagcaagtctaagatcaaagtgctggcagatttggtgtctggttagggcctgcttcctggttcatagatggtgccttcttactgaatcctcacatgctggaaggaacaaggcagctccccaggacctctttctataaaagcagtactcccattcatgag

SEQ ID NO: 746674 - DNA, 574 bp, Homo sapiens
ataaattttaaaaatgcattaaatacacctaacctactgaacattgtagcttagccaagcctacattaagtatactcagaacacttacattagcctatggttgggcaaaagcacctaacacaaagccttttttataataagtattgaatatctcatgtaatttattgaatactgcacactatagagtacagtatctactgtttaccctcatggttgcatggctgcctgggctggcactgtccagcattgcaagagatgattataacatgtacagttaacccaggaaaatatcaaaattgaaaattcaaagtacagtttctactgaatgcatatcacttttgcaccattgtaatgttgaaaaatcttaagttgaatcaccagaagttggggactgtgtgtgtattctttaatgaagaaagaggcccacgaagggraaaattgcctagggcccatgatagtcataatgtgaccctgaggcttctggttttaaataccttctagatacatttacaatgctactcacaaatttctttctccagtttggaccttgatatggtttggctgtgtccccacc

SEQ ID NO: 746675 - DNA, 574 bp, Homo sapiens
ataaattttaaaaatgcattaaatacacctaacctactgaacattgtagcttagccaagcctacattaagtatactcagaacacttacattagcctatggttgggcaaaagcacctaacacaaagccttttttataataagtattgaatatctcatgtaatttattgaatactgcacactatagagtacagtatctactgtttaccctcatggttgcatggctgcctgggctggcactgtccagcattgcaagagatgattataacatgtacagttaacccaggaaaatatcaaaattgaaaattcaaagtacagtttctactgaatgcatatcacttttgcaccattgtaatgttgaaaaatcttaagttgaatcaccagaagttggggactgtgtgtgtattctttaatgaagaaagaggcccacgaagggaaaawttgcctagggcccatgatagtcataatgtgaccctgaggcttctggttttaaataccttctagatacatttacaatgctactcacaaatttctttctccagtttggaccttgatatggtttggctgtgtccccacc

SEQ ID NO: 746676 - DNA, 509 bp, Homo sapiens
taattaaatactttaacataaaagaggaaaactcaaatttctttccccgacagcttctgctgcctagaaaaaagtgttggcaagaatgtcagaaaagaaccatcagcaaaaatgacagcctcacacagaggctgaaagcgagactcccaacgtgtagggatcaggcgtgaactttagagacagacagcctgggtttgaataccatctgctccactggcttgtctcctgaacttaacrtaacctctctgatgctcagctgccataccgtcagatgacaacaggaatccctgcctcacacagttaatgagaaaatgagattatgtatgagtgattatgcaggcaatcattccacacagtggctgtcacataaaaagaactaaattgaggcctgtaatcccaacactttgggaggccgaggcaggtggatcacctgaggtcaggagttcgagaccagcctggacaacatggtgaaacccccgtctctactaaataaaaaaaattcattgggc

SEQ ID NO: 746677 - DNA, 489 bp, Homo sapiens
gctttttatttacatttactttgtattttctgtttttattcacattgttggtgtttagactcattttaatttaaagatgcatgaagacaggatgcatattatatatttgttctacattcctcccaaccccaggtttagtgctttatacagagtatgggcttaagatattttactaattagctaaaaacacataaaatgttcacattttatcttttcctctctaaactttggtctgtttatttataagtacattatgaggctgtatacatgtaaacgtttcycatgccactctcacatcttctaggtccactttttgcgtttgaatgtatcctgccagaacctcaccccttgcctctggttttctgtgtgatccttctctgctactgccttgtagtatgcctacagcactaattcagttattttgggggcatgcaaaagcctggaagtatgagagggctaacacctgttggggcaactcttgaccaatgg

SEQ ID NO: 746678 - DNA, 501 bp, Homo sapiens
aatggaaacatattgcttacaaccaaatatgatcataggattgataaacagataatccaccttagtttcatttttaacttcagttgactatctctcttgaagcaacatagttgactagttatgcatatgcttccccaactttttgtatcttttgtttctaaatcactagaacaacatctgctaggtgtaatttcattttctcacagtgaatgctgaagaaaattgcttcaccttcttgtaggcgaagtgcactactttgagtttgctgctagcccttttaaatttcagtcactaagtgtgaacctaagttttcagcttcacacctcttttcctagtatttaaatctgtcttaytgtcaatggatgctcattgtcttaaagctctgcataacatccaaacatagtgacccataagacttcttttgctcattaatctccaagtgtctctaatgtaaacctacaaaggaagaatttggtaactccctgcaaaataattaaatca

SEQ ID NO: 746679 - DNA, 576 bp, Homo sapiens
aattcatcaaatgaaataaattcttgtaacagcttaatctgatgttaaaagaaataagtaaaagaattaataaaaaggaagataatatcaggtataatttggtgattaatgtccaacaatgtgttaaaatagagagtgaaagaaaacttatgcaaaaagggaaaaaagcagagaagagaaaaaygaacaaaatcttaaagatatataaggagaaactgaaaaaaggaataaaaaatgacaataagaagtaatttttttaaagagattggaaatttcttactatcgtaaagcaaagcattattattttagtaacaatatcaaaaatgttaaatcacagggtggttagtaaacaaatacaaaattttttttaaagttgttacataccactgtattgctttttatttaattaattactgccattttaataaaaatatctatatcctcttatatcataggatggattatttcatatagataagctcatatgaaaacaaagtaatcacaatgtctcaaatgcagaggactcatgtgtgtacgttaatcagaatattcaattctacttgaataagcacaatt

SEQ ID NO: 746680 - DNA, 628 bp, Homo sapiens
tcaagagcttcatcttttctattatgaattatgtgcagctctcaaaacctctaagaggtaagattttactgttaccctccccactagtacctataatgaaatttggaaaatacccactcagcatgattcagtagcaatgcttaaaatgagaacttgaagaaaccattgctatttttttgcatcatgaagaggatgcttgtccttaatctagcccwgactgaaaaactaatttccaatctaaaaacctgcctgcaaggaacttttttttaaaactcttccagtccctttcctggaaacaagaagcacaaaaatgtatatctgtaatactagcaattgctggtttgggcattctattttcacttaatgctagagttagaagatatattattttctattgataataaaaatattggatatcactgattatagtatgtattctgcatacttccaaatagatctgaggaacttcttattagaaataacagaaggtggtaagagactctcttgccagggttctggtttaccacagtcaagcattaaatttagctctgggcttcccagagccaagacaagaacgacatacaattaatgatatagttctcatggtctggtaaaggaatcatagttg

SEQ ID NO: 746681 - DNA, 540 bp, Homo sapiens
ctgccacttttgaccccaatttaaagtctatttaaaagcagcaataatttttgttttaactttgcttaaatttttcacttaattttttctcatagtatctaaaagtattcattatagcgtgtacttcacatgaaaacaaaatctaacaggattaccaatacaagtagctatgagggaaaaacttaaatagtagcaattgataagtgtaatttctactgagctgcagcagagaaaacagaacacacaattaccgattactgagtaggtctacactgatttgtgaaaatagatatttttgccatgtgagggtgagtgatatttaggagttgggaacgctgaaattttacttaaatcttatttraactgttaagttttgttaaaatggaattatataaaatacataaatgctgaattcatcttttgcttccactgtttaaatttggttggctttggaagctaaagtatggagcaaatgagaataagattcttgtgtaaggcaataagtctcctggaaagaaaaatgtactttatcttcctgga

SEQ ID NO: 746682 - DNA, 545 bp, Homo sapiens
atgctttccaaacagttccctgaagtcttaactgattccagcataatctcaaaaatccaagtccaaagtctcatctgagactaagcaagtcccttccacctacgagcatgtaaaatcaaaagcaagttagttacatccaatataaagtgggggtacaggcattgggtaaatgttctcattccaaatgggagaaattggccaaaataaagaggctacaggccccttgcaagtctgatattcygatacccagctgggcagtcattaaatcttaaagctccaaaatctcctttgaatatagagatggaaaatacaaaacataaatacaaaatataaaacatgatgcaaggcagtgtacagcttctgtggctgctttcacaaactggtgttgagtgcctgcagcttttccaggagcacagtgcaagctgtcagtggatctacctttctggtgtctggtggatggtgaccctcttctcacagcatcactaggcagtgccccagtggggaatctgtgtgggggctccaactccatatttcccttctgcatt

SEQ ID NO: 746683 - DNA, 652 bp, Homo sapiens
tttattattcttaaaaaatttaaaaaaaaacacctttggctctcccggtcctcaattacgtaggtttttgtccttgtttcaatagtttatgctttttattctattctacctccttttttgaccttattttgttggtttttttttttccctaacctcttgacatatggatggctagttcttaatgttcagtcttycttcttttctaatatttatactgaagcctctaatatttacatgaatggagctaattattacttcaggtgcatcccactagtttggatatttattgtttttgttattgttcagcccaaactattttctaattctcattatgacttctttagttcctgacttatttcaaagcacaatttttaaatttctcaatatatgacaattctctagttgtctccttgttattggtttctagtttaattatgaggtggtcagagaacatattctatagatttaaatcctttcagatttgtttagacttgctttctgacctaatgtgtgatcaatgttgttaactataccatacgtatttaagaacacacgtattcttgtaagaactggaagcactattctgtgtagatttgttaggtcaaattttgttgtggtcaagtcttctcagtcattggtgattgtttatctg

SEQ ID NO: 746684 - DNA, 508 bp, Homo sapiens
tttctttagattgtctaccatctaaagcatagctttactgacagtgaagaggggttgtaaaagctttcatttatccttgaaatacctactgagcaaggaactatggaaaacaaagtccagcccagacaaattctgtgctcgtcaagattatagcatgacacagtaaaaatgcttatgttagaaagtgagctcatactgcacacggagaaataacatggaagtgtaacagtgggaaaacttatttccagctggaaatgacctctaagatgggttttgtggracaagtagacacatagaagcagggaagcaaaacacagaaagaaaaaagatcggagacaaaggctcagaaatggaaaacttccaggcatgtataaggaacagctgctagtttggttaagcagaggagaaagctggatgtagtccatgagaatttccctaaaaatgggaaataaagcacatttcatctccagtctgtctgtggttaaagctttctaaacacattgaaact

SEQ ID NO: 746685 - DNA, 487 bp, Homo sapiens
taaactattttttgtgaggatttctagttttatttacttaaaatatttcaatattacttagaatattagatgaaaatgttagaataaataaatacttagaatatttgatgaaaagggcatgttgatagtgctggataattttttggttgtcacagtatttctggaaagatgtttggcagaatgtttgaacaaaagcgatacagaatgttagaggctatttgagccgatgaaattgcacgccaaaaaaatttggtaaactcaagcactatacaagaattgttatttagttcagatgaatgttatgacattttatttctcattgtctgtgtcaacgccyatctgtttcatctatttgagggtctatttcacagaaaccaattatctccatgtttactttctactcccttcctcaatcttaataattgcaatcatttattgttttatctctgtgtttattaattatccatattctgagaataccatagta

SEQ ID NO: 746686 - DNA, 599 bp, Homo sapiens
atacaggcaggtggaaaaaataggactttcaaatgataatcaaagctatgtcaataagaaatgtttttaaaacacaggctagcttgggagtagaaaactaatgagtaaactttttttttaagagagagaaaagaaggtatttttctggaaagaaagggcattagtttttttccattctacttctgtgtggtgtatagttaatttgtgtkctatctgttggtttcagaaatcttatcagacctgacagaggtaacaaagaagcctgtaggtttaaaaaaaaatgcaaaaagttgagccattaaaatcagtgctccgccaggcatggtggctcaagcccgtaatcccaacacttccggaggctgaggcaggcgaatcacttgaggtcaggagttcgagaccatcctggtcaacaggatgaaaccctttctctactaaaaatatgaaaattagctgggtgtggtggtgcatgcctgtaatcccagctactcgagaggctgaggagagaaaatcgcttgagtgcaggggtgcggaggttgcagtgagctgagattgcacccaccgcactccagcctgggcgatagagcgatagagtgagactc

SEQ ID NO: 746687 - DNA, 599 bp, Homo sapiens
atacaggcaggtggaaaaaataggactttcaaatgataatcaaagctatgtcaataagaaatgtttttaaaacacaggctagcttgggagtagaaaactaatgagtaaactttttttttaagagagagaaaagaaggtatttttctggaaagaaagggcattagtttttttccattctacttctgtgtggtgtatagttaatttgtgtgctatctgttggtttcagaaatcttatcagacctgacagaggtaacaaagaagcctgtaggttwaaaaaaaaatgcaaaaagttgagccattaaaatcagtgctccgccaggcatggtggctcaagcccgtaatcccaacacttccggaggctgaggcaggcgaatcacttgaggtcaggagttcgagaccatcctggtcaacaggatgaaaccctttctctactaaaaatatgaaaattagctgggtgtggtggtgcatgcctgtaatcccagctactcgagaggctgaggagagaaaatcgcttgagtgcaggggtgcggaggttgcagtgagctgagattgcacccaccgcactccagcctgggcgatagagcgatagagtgagactc

SEQ ID NO: 746688 - DNA, 581 bp, Homo sapiens
agtttatgttccgagcttaataaatgttaccaccagtattttatcaacaacttgataatctaatgacatatttcttaggagccaatttggttttaaagcattataacttacagcaccaccctttgacactagcaaggagagctgagagtttctgacaggggcctagcatatttgaggggctcattctagctgctgaagagtgtccaatccagggtgcaaccactctccccattggagacatactccagatactctcygcccaaaataagcctgacagttgatccagggcctgtgccaggttctttgccagtcagtcctctagaagtcagatcatccctgcagacccaacactattttagagggccattaaaaggggagctgttcatagttgtgtagggtctacacagcaggcagagtttgagtaagtgggctagagtgcatgcatggaaattccttcaccgtgctggaggttcctgcagatggaaagaaaagtgggatgggcagcaagccttctagataaaaatgaagacatatttattaatgggaggatagaagatgttttacttaatagcttgatatct

SEQ ID NO: 746689 - DNA, 549 bp, Homo sapiens
ggccctagcacccagcaccatgaagatcaaggtactgttcagtgacagacccagtggcaatgccgccagcagtgtcagccctataaccacagataagaactcttcagagactgtattttggtgacatgcaattgtgggttttaggggtaggtartggacacaaatctcatattttacaggatgtaagtcaatctagttcataagaaaaattgagttactttatataaaatttgatctctatttatccttgtctgtcagctactttcagtagctgcagtcaaagtcaacagagctccccacatgctcatctctctttaaaatatgcattttgttgtttttctcgacacaaaaatagtgcatcatgcatgtaacacattttttaaaaatactgatgacctagacttatttctgaagaacttcaaacactgtagatttaggaggagcttatactcttcctccactactaacctcaatcctgtggccaagaattcaaattttatcctcattcctctgtctagcacatcttttggtacaggtgctcaaaagcac

SEQ ID NO: 746690 - DNA, 665 bp, Homo sapiens
tatgaccctgaaggagatgaaagaccattttgtcctgtgtagacattttcacaaactttcttattgcctgttttttctcctgcaaatgcatttatttttccaaaaagtcatttgtttcccataagtgcctttatccctttacttattaaaatggtatataagccccaaattctaaccacccctttgagttactcatcaccaagctctcccacatgtacgcatgttgcatgaatgaataaacattgtaattttctcctgttaatctgttttttgttagtctgattcacgggccctggtggctaaacataaagaaggcagaagaaagttttttgccccctcccctacatattatatttctatctgtgctatgtttataaggataatagacttttttcccctcaagaagaaatttcatttcctgggaaaacaatattacyctcattgagaatgtatgagttaaaatacaaaaaacaaccccatattaatggtcaaggaagaaagctatagtgtctaggaagtttagtaggtcaaaatcctggtagtagcaattcagatacacaaacaaacctgttgatatttcatgggttatttaccacaagggctgttttgagtttcatgcctggaatagaaatgagcaggcagttctggccccaaaaatgcccatc

SEQ ID NO: 746691 - DNA, 600 bp, Homo sapiens
catgttaatgcccttgaagatcttccagtgggacaagatgtagaggaggacagggatactgatgattctgaccttgtgtaggcctaggctaatgtatctgtgtcttagtttttaacaaagaagtttaaaagtttaaaaaaaaaawtttttttaataagacaaagcttatagagtagggatataaagaaaatatttttgtgaagctgtacaatgtgcttgtgttttaagctaagtgttacttattttttaagagacaaagtctccctatttgtccaggctggtatcgaattcctgagattaagcaatcctcccaccttagccttccaagtagctgtacgttaagctaaatgttactaaaaaaagttaaaaaaatttaaaagttcataaagttaaaaagttacatacagtaagctaaggttaattatcgaagaaaagtatgttataaatttagtgtagcctaaggggtatagtgtttaaacagtatactacagtagcattcagtaatgtcctaggcctttactttcactcacccactgacccagagcagcttccagtctgacaagctccatgttaagtgctctaaacaggtgtaccattttt

SEQ ID NO: 746692 - DNA, 577 bp, Homo sapiens
ttacatatactatcccatttatatattttaattctcacaacagccctttaaaacataaactgtcattcattttcttttaccaaggaaaactctagctcagcagggtgacaacagctaagtgacacaaagtcacaacagctggggtagagaagcaattatatcaagttggggatgatttgggttttttgttgatgttgttgttctactattctaatgtaaacaaaacacagttataacaaagattatgcaaaaacattggggggaactcaacaattccattggttaacaaattaattaaaatcttagagctagaagggattttggtgacataccaacacccttatttaaattaacagatagggaaattgaggctcagargtatggtgatcacctgaggtcacacagctagttaaaatgcagagctgtgattcagacacaagcctgacttcaaggccggtgatcttctcactagagtacattgccagacccagagctggctcactaacttcagccttagcttgggtcccgtgaatattaatgatattgacaagataaagccataggtctggagtctaag

SEQ ID NO: 746693 - DNA, 627 bp, Homo sapiens
ctggtcccagatgctgcctgtgtcgctagcatgcagtctttagctgtcagcccttatggggactgcctcggcctcacctaaggtcctgcccctgctcggtatgacccacaaccatgactggttattgcaggagtatcaagatctaaatgtcttagcccartttgagccaatgctgaagggcctctttagtcctgagctccctatggggttggctgaagttgtcattgagcctgtagggcagctgaacttcttctccctggtcctccttctgccctgtcccttccaaggtgtcaataccaaagccactccttaaaaaacattctgcttgttgaactcagattctgttttcttagcaaacccagtttgcaatgacagttactcagtgatgaaactaacaattgaaccacatctatttatttctccatttaacctctttctgtggataacttcattactattaatagataaagtcattcattcatttacttattcaaatatttcctgaatcttccaagaagtgtgatccctttcttaatccctgccttcaaggagtttagagtacaataagcttacattagttgtttctgatataattgtcgtcctacatttatgtgagtgctgacattt

SEQ ID NO: 746694 - DNA, 614 bp, Homo sapiens
gaggggaattgttccccagggaagaccccacaatctcacagacctaggttgaaatctctgtctgacttccccatcacttgcaagctctgggaaacctcaaaagagtcatctaactcccgtgagcctttcctgtaaaagagcatagatggaggagagaacccacatgtgcttaaggggtcctgggggccaggcactttttgtgtgttaaaccatgtaaccctgcaaggccattattgtcccctttaaacttgttagcaaggwcatgaactaatccaaggccacgtggctagtctatagtcatgtcaagatttaaacaaagtcggtcttgactccaaagctgatggcatatccactatcttacatcacccctgacctgtgctatttcaaagagggacccagatgtagatcaaatgaaatgatggatgtaaaagacaccttgtaaaatgttacaaaaatttctatgccttccttaattttcattttttttaagatcataaaatttcggagctaacatggactgcaaaaggtgtctagtctaatcttccctcctaatgaggaatcaagtctataatatccttcctgagtggttatccctctttggatacccccagtga

SEQ ID NO: 746695 - DNA, 627 bp, Homo sapiens
tttttttttttcactcagcctaaatgcccaagattcatccaggttgtgtgcatcaataatagcccattactttatttcctttttttcctttttgagataggctctcactctgtcacccaagctgaagagcagtggggtgatcatagctcactgtagccgccaactccaaggctcaagccatcctccgcctcagcctcctgagtagctaggactacaagtatgctaccgctctcaattaatttttaaatttttttgtagatatgaggtctcaatatattttgaaggctgtcttgaacttctggcctcaagtggtcctcccaccttggcctcttaaagttcaggcrttacaggtgtgaaccaccacaacctgttcagttgtatgttccttttttgtagctaagtcatatttcatcatatggatgtgccatggtttgtttaaccacttatctattgagagatagctaggctgtttccagtttttggctattacaaataaagctactgtaaacattcctgttctagtttttgtgtgaacctgtctttatatctctggactacatgccctggagtgaaattgcttggttgtattgtagttgtatgtttagtcttataagaaactgacaaatg

SEQ ID NO: 746696 - DNA, 588 bp, Homo sapiens
ttatagtggtagaaatcaaaatagtggttaactcttggtgagaaaggatacaggtttgactagaatgaagcagaagagaaattcctggaatgtgaaaatgttctattctgattggggtgttagctatatggatgcatacctttatcaaagatcataaaactatatatacatataatatatgtgcatgtgataygtatatgtatgcatatgtataatatatgtatacacaaaactgtatacccatgtaatacaggtatacattacagaatacacacacacacactcacacacacacacacgaaaaacaacacgacagcatttatcaaaatgactgattccaggtttgggttaggaaatgtacaagatgagccaagagtatcttgtcatgaaatgaaagcaaggatgctatctaagactactagggtttttgtgaagtgaactgtgtccccctaaaattccatgttaaagacctaacccccaaggtaactgtctttggagataaggccttttaggagacaatttaggttaaatgaggtaataagggtaggccttaacctgatgggacaggtgtccttgtaagtagaggaa

SEQ ID NO: 746697 - DNA, 633 bp, Homo sapiens
tggagaagtctggggagtacagtgatttattgtctttaccgacctactctccttaacttgcaacttggaccatttgatcaccattaagggactttaggaatccaaattttggcctagcacagcatgactcaggaaatggtgttgggattgcatcctcaggctatcccattgtggtggtgtgagcttggactttgcacatmacctctccccatttgtaatggggcaatggtgccaacctcatagaattattatgaggattagaaaagatgtatttgagggcctggatcacatagtctttggatctaaggtgcagatcttgtgccaattcttagcgtctcatccatgatgtgatttctgctgccacaccagtgccatctggaaacataaagattaagggaaatatcatcatcctcagcttatgctgccaaattttataaatcttattattgattcttatctcctttagagctttctccagttgtgtgctaagaaggaatttcattttgattatgaaacctttgtgtttcacatttggctgaggaggcattgtctttgacttagcaatctcttgattaaaagaccctggagttgttggagccctgtcagcggaatgggtggagtcggagaagtgcc

SEQ ID NO: 746698 - DNA, 623 bp, Homo sapiens
tgtctgtaactgccaaatcttcccaatggattgaaccttctatcaatataaaatatccctcttcatctctagtagcttttctttttgttttaaagtctattttttgagtatttgtatagccacttcagctttcttatggttgctatttgcatgatacatctttttctatccttttagtttcaacttatttgtatcttgaaatctaaagtgtgtcccatacatagcattagttggccttgtttttaaagttaatttgacaatctcttcgttttgattgtttaatcggttcacgtttaatgctgtaattggtacagttggatttacatatgtcacttattgtttgcttagtgtcacatcttttgttcccctctattcatcctttactgcttctttttcattacctgaatatttctttctttttctttttgagggsgaaggggcggcacggacagagtttcatccttgttgccccggctggagttcaatggtgcaatctcagctcactgcaactcccctgatctcaggccatccgcccacctcagcctcccaaagtgctgggattacaggcatgagccaccacgcccggcctctgctttctttctctgtgatttgactattccaga

SEQ ID NO: 746699 - DNA, 590 bp, Homo sapiens
tatcccaatagcccccagaatcttaattcattcgaacatcaattcaaaagcctgaagtccaaagtctcatctagctccaaaatgggtgagacttaaggcaccattcatcctgaggcaacttccctctagcagtgagcctgtgacatcaaaatatgttatctacaaaatgagttatctccactgtaaaatacagtggtgagatagatgtaggatagacmttcccatttcataagggaagaatagtcaagaagaaaggggtaagtggccccaactaagtatgaaaacccaaaagagaaaacaagtcttaaaactccagaatggtctgctttgactccatgtcccatgttctggacacactggagtagaggttggacccataaggctcataccacgcagcagcattcacaggttggagtctcttgctgtgcctgcaggtctccaaggcagttctggggttgtgggagtggtctcactcccatggctccactagggattgtcctgggggggctgtctgtgggggctctgaccccacagtttcactgggcattgccctcataggggctttctgtggtgactctgaccctatgaca

SEQ ID NO: 746700 - DNA, 636 bp, Homo sapiens
accaacacaaagtattcagtcacattgctccatccattcaggccctatttcccaatggcagaacaactagtcttcctctgcaaactccagcattcctctggggccaatttaaaaaagcttgggacttcaaaatgcacgggcacacttttctttataaagaacagcttttgggtaagcagcattgtgaaagggactgaatttataaatccacacaaaagccatgtatttcttttgagacagatcaactcacacactttgtcttctgattcactgtgtgtgctatctggtctacaatgyagacagttccctaggtcagaaaatgcatctgctcatgaacagacagaaatggcaatgttcttaacacttgtcttagatgagaagtctgcttacatgctcacaataaaacaaggaagcaatttttgactctagtcaagaagcttctggaatcttttttccaacacaaatgtttctcatttagtccaagctctgtttcaattacacgccaagaaaagacaaagaaaaaccccctctaccacctactcctgccttcacgaaaacattgtaaattatctttattacatcatatagaaaagtcatctcacatagggtaaattgttgacaaatggttacagcagc

SEQ ID NO: 746701 - DNA, 603 bp, Homo sapiens
ttgttcttgttaaacagagtagaggtcagttagtggaatgtggagagtttaaagtcattgctgacttaatgactagtgaaagaccaagaagatatggtctttgccactgtacttcttaatgacagaatcaaagacttactgtgtggactttatggaagtctctaggagtaaacttgatgacagaattttttttttctaggccatgtttatattttcaatctgttctttctgctacctgggacattatttttatttattacaaaacattgactagaggggctcacgcctataatcccagcactttgggaggctgaggtgggaacatcrcttgagctcaggagtccaagatcagcctgggcaacatggcaaaaccccgtgtctaccaaaaaatacgaaaattagccaggcgtggtggtgctcacctgtagtcccagctactcgggagactgaggtgggaggatcgctagagcccaggaggcagaggttgaggtgagctgagattgcactactgcacttcagcctgggttacacagtgtctccaaaaaaataaaataaatagagaaatggcctggatatggcttgaaaccaagcctcttttaagca

SEQ ID NO: 746702 - DNA, 583 bp, Homo sapiens
gagccaagcgctttctatggagttgaggaaagtctgtctctctctctttttttttccgcaaaaggtgtatcatcccttgccactgtgcctgatcgcctgctgctgtccttggtcttcagaccccaccctggcctccttccctttccgactccctgggcccagccagttgagccactgaggaattctccctgctgcttcctcttgcagtatcctgctccctaccccactttttctttcctttttttcccatcttcagattttaacwtgctctcctcacgaaagctccctgtccttttccttcctggactgtccctgagtctgttagatccctggagcaccctgcgttcacgttttgagttgttatctcacctagtattaaatgatacctttgcttctttttccttttcaacttataagctcctcgaagtctagaactgtccatcttcaaattcgcgatacctggcacataatagatacacccgaatcgtttggagatattgtctcttaaacaaatgatatattttgattttattttttaactacagccaatttatgccccatagcagatgtatttctattatag

SEQ ID NO: 746703 - DNA, 583 bp, Homo sapiens
gagccaagcgctttctatggagttgaggaaagtctgtctctctctctttttttttccgcaaaaggtgtatcatcccttgccactgtgcctgatcgcctgctgctgtccttggtcttcagaccccaccctggcctccttccctttccgactccctgggcccagccagttgagccactgaggaattctccctgctgcttcctcttgcagtatcctgctccctaccccactttttctttcctttttttcccatcttcagattttaacatsctctcctcacgaaagctccctgtccttttccttcctggactgtccctgagtctgttagatccctggagcaccctgcgttcacgttttgagttgttatctcacctagtattaaatgatacctttgcttctttttccttttcaacttataagctcctcgaagtctagaactgtccatcttcaaattcgcgatacctggcacataatagatacacccgaatcgtttggagatattgtctcttaaacaaatgatatattttgattttattttttaactacagccaatttatgccccatagcagatgtatttctattatag

SEQ ID NO: 746704 - DNA, 620 bp, Homo sapiens
ttagtcctgtttcaaggtaaaatccagtcatcctctgctgacctcttacagcttcctggacactacctgtgtctttgccagtgcaccttctcctggaatgtcccctttgcctagctgtccactcatctgggccgatttgctcagtactttgccagatagatccagtctccccttggctggtcccattccctcccctcagtcttattttctggcatggaaagcagtggagtatcttcccctctaaactggaaggtgcttcagtgccatgcaatgtggttcctctcagcagccctgtatctggtggctcccacaatgcctagaatacggaaagtgatcgctaagtgactgaaagaagagagcaatgtcaggagcccaggaaagtctagagctccacctgccttctgggtcacacggcccctcctgcagtatccccatcactatgggcaggaaagagaagtggtcccagccccacrtcccagctatccccatccaatattcacagctcacctccaccctctgccttggttccattaggacaaaagccaagtctcctttatccctttcttcttctttatatcagcttttggaggaggtcaggatgccaggatgaccacttcctg

SEQ ID NO: 746705 - DNA, 450 bp, Homo sapiens
atgttgttatgaggtacatatgatattttgaattatgcatgcaatgtgtaaggatcacatcagggtaattaggaggctcatcacctcaaacatttgctatttctttgtgttagaacatttcaaatcctctcttctagttattttgaaatacacaataaattattattaactatcgtcaccctactgtgttgtcgaacactaggacttatttcttctattaactatatgtttgtacctccccytcctccatcctttttcttcttttgtcttttgtttctcttgccaagtgtttcctaaacattaggctggttaaataagaatgaccagggattgggttcacatttagattggtggctactgctcccagaggctcagatttggaaggtctatggtattcacacaaatgctgttctcagacacgacacgacagaagtgggcacctgttgtcag

SEQ ID NO: 746706 - DNA, 616 bp, Homo sapiens
gggtctatggtgtcatggtgctccgagtgtggaccactgagattgaaactcatttggtaacactaagctcagacccattttggctgcctctccataccttagaatcagtgttttcatattgtattgtccagaattttaaggttcagtggagaccattaactggaaagctccacatcaattggattcccacttcttgaaatttttactttattctgtttcaacctgaaataaacacatgtatgcccatgtacacacayacacacaccacacacaattcaaatgttttatgtaccaaatgataatacgtgagaacctagttgcatgtaaagttggattgctaggctaacatgttttggggaagatttcagtataaagcttgtcaccctgtattctgtaaagcatttgaaattcctatggctaaatcagtgattagtataattgtagctcaacatcatttttatgctttttattttattttattttattttattttaattcagaactacacatactccttatccattttagattagggttttctcaatattgtgcatccaaaagaaaatacaggaattagctcttgagatgtatatgactacactcttgtcatccataa

SEQ ID NO: 746707 - DNA, 427 bp, Homo sapiens
gtaagcagtattccagcaagctgtttaccatttgaaagagatatttacaggtctcagtaggtgaggcttctttttggctctgtggtgttttgtgcagcttgaatgaatgggtctggatttcaaggcaccaaccaagtggtatttataacaaagctaatatacaatgtttgagagattttcaagcacartctccattttaaagaaaagcagaaaatacagagtgattcttcccattctacagatgaaaaggagatgtattgcatgaagcaatggctgcccatctgcaggagcatggagagtggaaagtgcaaattttgagtcagagagacgtgaattcagtgttcggttctgcactcgctagtcactggtcatgcatttgagcaaattgttaacccctgtgggccttagtttctttatctgaaaaata

SEQ ID NO: 746708 - DNA, 646 bp, Homo sapiens
tcttttgaggatcctcttcatccacgataagacataaaaggcttattggtttgtgttgtgagtcacttaatagacacctttggtttgaaaaggtcaatactgccaggaatatttactgtttgtcctggctcaaacctgatagtaggatatttgaaagaatttgttttttaagagtctatggtcaggagttggccaaactgtaggctgacattcagaacctgatatgatacacacacacacacacacacacacacacaccatttttttaaggctactctgttctctgttttggatcttgcttctcccatgggaacttagttgcyagaaatccttcttcacaaagccctgctgactatatgcacttcctattctgtctacctccttcttgttggaacttcattgacctctttgggaagcttgagatctccccacactggcacctctcagacttcttcttctctccactggcttctgcttctgcttccatgttttttcaccttcattctttcattcagttcccttgaatccttgatatgtctgctttcaagcccctacctcctcccatgcctctgtccacctgtcagacctattcccttcctactcaagcccctcaatcacttgaattttaagctcgttgctctcaaca

SEQ ID NO: 746709 - DNA, 604 bp, Homo sapiens
ttattatcttaagcattgtaaaagtcttaataaaaccacaaccttctattacaagcagtactgagagaaatgttatcacctcatataactaaaaattcccagtattcatgcttctgggcttttgatctctctgtagtttkcaaatccccatgtccaactttaagttctgattacctcaactttcagcttttcaacgctggatatgaatccctggactcgtgagccctgttctcagaacccacacctttagcctataatatgtcttgatataggaagagttttgaggaaaaaaaaaggaatgagtatacatatccactctaaaaataacaaaattctatactaacatctgcagttagtagaggttacattgtcttagcactgaggtaggtaattgctatcaaagtcctcgtatattcccacagttcaccaacatctgcccttgctaagtagggccttccgagaggcccttgcccatttcttcttaaaggtaaacatcagaattcacaagaactgcctgtttatgtacctctacctctaatttagcttcagcaagtgaaattagtccatcattgtcaattctgcctaaaaggttttaacagtaaaa

SEQ ID NO: 746710 - DNA, 604 bp, Homo sapiens
ttattatcttaagcattgtaaaagtcttaataaaaccacaaccttctattacaagcagtactgagagaaatgttatcacctcatataactaaaaattcccagtattcatgcttctgggcttttgatctctctgtagttttcaaatccccatgtccaactttaagttctgattacctcaactttcagcttttcaacgctggatatgaatccctggactcgtgagccctgttctcagaacccacacctttagcctataatatgtcttgatataggaagagttttgagraaaaaaaaaggaatgagtatacatatccactctaaaaataacaaaattctatactaacatctgcagttagtagaggttacattgtcttagcactgaggtaggtaattgctatcaaagtcctcgtatattcccacagttcaccaacatctgcccttgctaagtagggccttccgagaggcccttgcccatttcttcttaaaggtaaacatcagaattcacaagaactgcctgtttatgtacctctacctctaatttagcttcagcaagtgaaattagtccatcattgtcaattctgcctaaaaggttttaacagtaaaa

SEQ ID NO: 746711 - DNA, 433 bp, Homo sapiens
agtatggaagagagatgagggccagtgggcctcccatggatcccagtgggagggaaacttgaccccatggcagaggctgctgggtggagaaccaaggcccagggtggatggaggaggcagctgagaccatggggagctgctgctctagcaagaaccaagacaagggagtataactggaggggacacagtagacccccagcagaccacmagatcaccaattatactgactgtggtctcagaagcttctgccagggggatgcctaatggacagacaggacatcatctcaaaggccagaggggaccagaagacagtatgaggagcagcaggttgacatcctcacagcaaagaggacaggtaagctttcctctccatccagttgccatcttatggaagactacatcttgtgagaggcacctcttgtggaaagtgcct

SEQ ID NO: 746712 - DNA, 573 bp, Homo sapiens
tagcaggccaggagctgcaaaagaaattgcagtctgcaaaagccagataactctttgtcaactttgaaggagattctcatttcctacaattccttcatcatggagagctctatcacgattacatctattgagttttatagttcaatagtctggctctgcagaaggctcctgcagagcyttctgttaactatggcccaggaaaaacttccatatctcccagaatatagaccaaagcagtatttttaaatgcagtctattcttccaccaaaattcaaaaaggctcaccaagcagtgtacctctttcttagtggtaggagttgcaagtagaacaatgtgtttatttctttgtaagaatgtcctagcatattctggattgctggatatctactaagttgaccaatatcatgggaacctgaacttcattgggtttatcacctaccctctgatatgcatgtatcttactgggtcacctagggtattaacatttccaataaccatgacatcatcaatacagtagacaagtgttataccatgacgttctgcagaaggctaagatgatggaaatacctagct

SEQ ID NO: 746713 - DNA, 656 bp, Homo sapiens
agacattacataattctgctattcctccaggaagagttcttattaataacccttatttataataaatcagcaagatgttgaggaaaatcagaaggtcgcctcatacaagaaaggtgagttgccaggtgcagtggctcatacctgtaatcccaacactttgggaggccaagatggaaggatcgtttgagttcaggaattaaagaccagcctgggcaacatgggagactccatctctataaaaaatctaaaacattagccaggcatggtggtgcctgcctatagtcccagctccctgggaaactgcggtgggagaaccacctggagaaccatccggaggctaaggatgcagaaagccatgattcagccttagcactccaacctgggtaaagggcaagcccctgtatcaaaaaaacaaaacaaaatgaaagaaagraaggaaggaaggaaggaaggaaggaaggaaggaaagaaggaagaaagaaagaaagaaagaaagaaagaaagaaagaaagaaagaaagaaagaaagaaagaaagaaaaagaaagttgagacaattgaatgaaatgagcccaagatccaaatttggagcagaacacttctctccttttacccagccagttcttttgagcagccaccctggactacttcctttgtc

SEQ ID NO: 746714 - DNA, 589 bp, Homo sapiens
aaaccccctttatcaccagcctccagcatgaacttccccaaggcaagcaaggtggcacggatatgtctgcatctaccccagcattctagcaccaagcctgccatatgtaaattaggcactcagaagctgcaggttggacaaatgaacgaatgcatgagtttagtttggaatatggtaattgacaaaaaaaatgcactcactttacagcacgcctttcactgaacttgcatatttaggggttcttcttgtcacttctgcctaccctccaaagttctcctaaagagagattgtgatgccagraggccaggacatcacttggggtgagatgtgctggactcataagaagcagcaatgatccgaccagaatgtgcgcaaggcagaggtgaaaatgctgctctgatggcttggcactttggaggtggagccccttcttttgggtggatactagttacaggcagctgaggaaaacactttctctggattctagagcaagtagttttgtaaagggtgtgtatgtgtggggagtgggaggcaggaggcgggagcttgtgcagatgtaagggaaaaccagagagaaaattactgtaaa

SEQ ID NO: 746715 - DNA, 469 bp, Homo sapiens
cccacagttaagaaacttgaatacatgcaggctcgtgagctttatttttatcaattccattttaatattttactgaccatcacctatgcctaggttttcataatagcaagtaaaatggctgaatctttgcacactcatagaattcttcttctcaaactatagaaactacggtaagggatgtctgcaaagagatatgattgaaaccatccttgccactggacttcttgcaacaaagcaaacaaattttwaaagtaatacaattaactgccaagatatttctcaaatattcaaatggaggagcagtttaccttaacctcaattaccttaatagaattaaggggtagaattcttagaaagtatctgttaagtgcttaacatgttcttgtagaataataataaagttagctattgctctagttgtctccccacagtttttgtgtactaagatgggtagagaaaaattatcagt

SEQ ID NO: 746716 - DNA, 602 bp, Homo sapiens
tctctatgaaaaggaaggttctactcctttagttgaggacacacatcacgagtaagtttctgagaatgcttctgtctagtttttatgggaagatatttcctttttcaccttaggccggaaagtgctccaaatgtccacttacacacactacaaaaagagtgtttcaaacctgctctgtgaaagggaatgttcaattctgtgacttgaatgcaatcatcacaaagaactttctgagaatgctgctgtctgctttttatatgtaatcccgtttccaacgaaatcctcaaatctagccaaatakccacttgcagattccacaaaaagagtgtttcaaaactgttctgtctaaagaaaggttcaactgtgtcagtagagggcacacatcacaaacaagtttctgagaatgcttgtgtctagttgttatgggaagatatttcctttttcaacataggcctgaaagcgctccaaatgtccacttccagatactacaaaaggagtgattccaacctgctctatgatagggaatgttcaactctgtgtcctgaatacaaacatcacaaagatgtttctcagaacgctgcagtctgcaatttgtatgaatt

SEQ ID NO: 746717 - DNA, 602 bp, Homo sapiens
tctctatgaaaaggaaggttctactcctttagttgaggacacacatcacgagtaagtttctgagaatgcttctgtctagtttttatgggaagatatttcctttttcaccttaggccggaaagtgctccaaatgtccacttacacacactacaaaaagagtgtttcaaacctgctctgtgaaagggaatgttcaattctgtgacttgaatgcaatcatcacaaagaactttctgagaatgctgctgtctgctttttatatgtaatcccgtttccaacgaaatcctcaaatctagccaaatagccacttgcagattccacaaaaagagtgtttcaaaactgttctgtctaaagaaaggttcaactgtgtcagtagagggcacacatcacaaacaagtttctgagaatgcttstgtctagttgttatgggaagatatttcctttttcaacataggcctgaaagcgctccaaatgtccacttccagatactacaaaaggagtgattccaacctgctctatgatagggaatgttcaactctgtgtcctgaatacaaacatcacaaagatgtttctcagaacgctgcagtctgcaatttgtatgaatt

SEQ ID NO: 746718 - DNA, 533 bp, Homo sapiens
actgatttggtggccaaggcctacatttattgcctttcctgagtaaccgtgccgtgtagtgcttggagaatgatcggtgaaggtttaaaatattaacctacctaagggctggagcagaacacttttgctagagaacagcttctcactttgaaacccaattaacaaattctcagagcagagaagaaggaaaacgcakaaaagcagagcaggcaaaaaaagaaaaaaaaaggctgttgtataagtaaactttcctaccttctcttgagcctccgaagattttctcatggatttctttgtcatggccttggaaggcagtctcattatcagattgaacctgggaagatctaacctatgttcatattagcatgtttgtaatgttttctttttctctgaaaggtttttaaagtaatcacttgagttacactaaattgggttcaaattccagtcctcaggctttctagcactgtggttctagcctcagttagctgcctgcaaattacaggtgataatatttatcacaaatacaattgctg

SEQ ID NO: 746719 - DNA, 629 bp, Homo sapiens
atagtgcttgttcaataatatttattgcataaattaattaatatgttatggcattttcagaatttagttttgaatgacttggttccatttgtgaacttataagataaaataaatgaaatatttcaacttcaaaatttctatttatttacaaagtgtgaatttaatgaagtaacagaaaataatggatctattaaagatatatcttctgatatatatatattttgagatatatatatatctaaattaaggagataatattttactatctcaataactctttactactcaaaaacagtaatgtgggcatggtatgattcctacatgatgaagtaggaayattcaactccctgtcagttctttcatagaattagagagaaaacagttaatataaaaagagagagataagaggggatttattatgggaattaggaattgttccacatgattatggcgttaagaagtctcacgataatgctgtctgcaagctggaggcccaggaaaactggtggtgtaattcaatatgagtccacaggcttgagaaccaggagagctgatggtgtaactcctagtctgaggcccaagaccggaggactggatgggcttctggtgcaagttccagagttcaaaga

SEQ ID NO: 746720 - DNA, 534 bp, Homo sapiens
tgcctgtaatcccagctactcagggggctgaggcaggagaatgacttgaacctgggaggtggaggttgcagtgagccactgcactccagcttgggtgacagagcaagactccatctcaaaacaaacaaacaaacaaacaaacaaaaacagtttgggctaactagagtccctaaactttctcattttctcatttgagaattgctttgtctttcctcatttcccttgggttctttatcctctctagttcttcctggcttttaatcctgattcaggctgtgttctcccacagacttcattttctaacttgagaaaaattatagatgtattatttcattcattcaacsaatatgccctgaatgcctactactacatatggagtactcttgcaggtgtttggggacaaaggcctcagttctcacgaagtttacattccgatgaggggagacagataataaataacaaatgtgaaaaagaagtaaattgtataacatgttggaaggcaataaaagtcatgaaagtaaaaaggaaaaagtc

SEQ ID NO: 746721 - DNA, 468 bp, Homo sapiens
tccagttttgtttttcattatcaaggttgttttgaatatttagggttttttgatttcacataaattttaggattgtccattttttaaatgtcattggggttttgataagaattacattttatctgtaaattgctatgtgtaatgtgaacactttaacaatattaagtcttccaatctatgaacactgatttctttctgtttgcatgtgtagtcttcaatttcattcatcaatgttttgtggttttctgtgtacaagtgctttgcctccatttagatttttgctaagtwttttattcattttgatggtatggtaagtggaattgtattcttaatttttgaagaagttagtttgttcttagtttatagaaaagcaactaattgtgtgtgctcatttcgtatcttgcaaatattctggattattagttctaacaactttttatggaggttttagaattttctacatcatgt

SEQ ID NO: 746722 - DNA, 526 bp, Homo sapiens
tgagattagcccttcctggccagtacttctcagcttcctgttctccatgcatttcttgctcattggctgcagctttcatcagagcctgctcatttcctaccaagtgcccgcttcaggggatttcccagatactttgccgtaactcagtggacttaatgtgttcccaagaacttacattcctaagtccaacctgttccgccatccaccaagccctcggttctgatatcacacttattttttaccagaactaaggcaattttcaattatctggatttgcctatgggtatctaaagtttttatgcagcagcaataagtatttgcaaaggcattaactgaatatgctataatgtacgaggggaggattttcaggctcattgccagtcatctgrtactaaaaactagtttgttaaaattgagatggtgcctactccataccacatgactttacctgctattagcaattgactgtgcttagacaaatgtttttcattttccttaatcattctcacaaaggaaatgataagtg

SEQ ID NO: 746723 - DNA, 588 bp, Homo sapiens
aaaaattaaacctaaaattgatcaaaggaaggaaataataaagataagtgcaataataaatgaagtagagactaaatacatacaaaagatcaacaaaacaaagagttggctttcataactcagggctaatgataagatcaataaacccttagttagaytaagtttttttaaaaagaggatacttaaataaataaaatgataaatgaaagaaaaagacattgcaactgaaacaacagcaatacaaaggattgtaagagactattatgaacaattatattccaacaaatttaataacccaagagaaatagataaatccctggacacatataacttaacaaggttaaattatgaagtagaatagacttgtaatgagtaagaaaattgattcagtaattataagtctccatcagagataaacccagaacctaatggcatcactgctgaattctaccaaatattaaaagaaataataccaattcttctcaaactattccagaaaattgaagtggagggaaaacttccaaactcatttgacaaggccaccattattctgataccagaaacaaagacactacaaggaatactgca

SEQ ID NO: 746724 - DNA, 516 bp, Homo sapiens
tataattctttccaaatatgctcatttttcaaaatatatgatttatgaacctaaaagcttctgattttgaattttagaaatattcgtatcgcctatccttttactcacaagttttctaaacatcatgtcaaagtttgtcatctatatgttgaaaagagcacacaaaataagaaacaaaatgttgacatcattctttttgttttcaaactgacctcaattcataaacccggcctcttttacaaaattattcaacagttgaatytgtgaccagttaattagttgtgaatccactcaatcaaatcatctcaattcactatttcctttttttttttttttgagatggagtctcgctctgttgccaggctgcagtgctgcagtgctgcagtggcacgatctcggctcactgcaacctccgcctcctggtttcaagcaattctcctgtctcggcctctcaagtagctgggactacaggcacccgccaccatgcgtggctaatttttctatttttagtagaga

SEQ ID NO: 746725 - DNA, 516 bp, Homo sapiens
tataattctttccaaatatgctcatttttcaaaatatatgatttatgaacctaaaagcttctgattttgaattttagaaatattcgtatcgcctatccttttactcacaagttttctaaacatcatgtcaaagtttgtcatctatatgttgaaaagagcacacaaaataagaaacaaaatgttgacatcattctttttgttttcaaactgacctcaattcataaacccggcctcttttacaaaattattcaacagttgaatttgtgaccagttaattagttgtgaatccactcaatcaaatcatctcaattcactatttcctttttttttttttttgagatggagtctcgctctgtygccaggctgcagtgctgcagtgctgcagtggcacgatctcggctcactgcaacctccgcctcctggtttcaagcaattctcctgtctcggcctctcaagtagctgggactacaggcacccgccaccatgcgtggctaatttttctatttttagtagaga

SEQ ID NO: 746726 - DNA, 623 bp, Homo sapiens
gctgaagtggaacaatgaagaaacatttagaaaagcaaggcatctggcaataggtaaagcacacccacattgaggcacaatattttttaaaagcagagaaagaatgtattgcacatttgcatatgcaaaaaatatttctgaacacccaagaaactcctaacagtagctgtcatctaggaaaggagacctgagtgaatggattaagagggaaactaacttattatgattaaaagttcacagtcaggtgtggtggctcatacctgtaatctcagcactttgggagggcaaggcagaaggatcacttgaagccaggagttcaagaccaaccagcctgggaaacatagcaagaccttgtctttacaaaaaatttaacaatgtagccaggcatggtggcaggcacctgtagtcccagctaccgagctgaggctgaagcaggagaggatcacytgagcccaggagttcgaggatgcagtgagctatgatcatgccactgcactccagccacagcacctcccaaaactacatatcaaaaaattgtaggctgtgcgcagtagctcacacctataatcccagcactctgggaagctcgagcccagttcaatgttacggtgagctacgattac

SEQ ID NO: 746727 - DNA, 620 bp, Homo sapiens
cttaaacaaaagattctcattccatttaatacaaaagatagaacatgacttttatagctgctcaaagagagaatattgtacttttatttctggcttaaaataagcctttgctattccttttaggtttgttttcttttactcccttttgttagtgaatatcttaccaaaatatctttaggaattcttagattttgggtcatcaggaattctcccaaatctgatcattgctttgttttttttttttgttttttttggtttttttttttctactttatgcaacctggcacttggaactatgcagatacctgcttacccaraagcttgttctgacagccttctcatttgaaatcccaggaaatatagataattcactctgattgccaaagaatagccaaagccagcagcagtgtctcttttatgacatcacgttcttagagaaagcatgaaggagagaccctgctggataaactaaggtcaaagctgaaattattgttagaactctgtttaagaaaagcctctgtaagtcttggtgcgagtgattattaaatcttcctgtatccgtggatgttggaaatggtggagaatgggagtggaggattcttatagattcagaatagatt

SEQ ID NO: 746728 - DNA, 551 bp, Homo sapiens
ttcacatgtgctcttgcattatcaacaacctttcacatgttgtgttcttggcctagaaagctgtcttttatttttgattgggtaatactcatctcataagtctctgtttaaacattatttcctaaataatgtctttactaaccctggagtgaattacattcccttgcaatatgctcttcttctttgttaagactcatcacatttgtcattagttattatttttcccatgtgcatcctccctgctggaccataagcaactggaaagctggaatgacgtctrtagtattataattatatcttccactttataggcagtgcctcagatctattatatattaaattaaaattgaataattgatggttaattgcttggtcatggtatcttgctttcaatgatttctgtattgtatcatacttccccaatataaaatacattttacaaatatattgctctataaatgtttacagtttgttgtgactaaagatgatttgagatggtcctttcagtaattaaaattactgcatcttccaagtaatgcatggtggaggaa

SEQ ID NO: 746729 - DNA, 565 bp, Homo sapiens
aatttttatctctggattgtacagacatgcctggcctttaggagacttgtagaaacaagggaatttctttgtactctatttctaaagcaactcgggggaaaatggcaggcagggcacatgtcatgtgcttgcactgagaacagatcattaaaagatgaatattaccctcaagagtggtgatctgggatcctgatgggcctgctctgcacagatatactcaragggttatcgaggtttgtgctgcggaaggacagacaaaagtcaacttgtctcagccacaagagctgaaactgttttggtatgtaatttggttcacaaaaggcagcctgtgtcatctccagaatggctggtccaggcttgatagactctttttttttaaacggagtctggctctgtcgcccaggctggagtgcagtggcgcaatttcggctcactgcaaactccgcctcccaggttcactccattctcctgcctcagcctccctagtagctgggactataggtgcctgcaaccacacccagctaattttttgtatttgtagtagagacggagtttcaccgtgtta

SEQ ID NO: 746730 - DNA, 565 bp, Homo sapiens
aatttttatctctggattgtacagacatgcctggcctttaggagacttgtagaaacaagggaatttctttgtactctatttctaaagcaactcgggggaaaatggcaggcagggcacatgtcatgtgcttgcactgagaacagatcattaaaagatgaatattaccctcaagagtggtgatctgggatcctgatgggcctgctctgcacagatatactcaaagggttatcgaggtttgtgctgcggaaggacagacaaaagtcaacttgtctcagccacaagagctgaaactgttttggtatgtaatttggttcacaaaaggcagcctgtgtcatctccagaatggctggtccaggcttgatagactctttttttttaracggagtctggctctgtcgcccaggctggagtgcagtggcgcaatttcggctcactgcaaactccgcctcccaggttcactccattctcctgcctcagcctccctagtagctgggactataggtgcctgcaaccacacccagctaattttttgtatttgtagtagagacggagtttcaccgtgtta

SEQ ID NO: 746731 - DNA, 552 bp, Homo sapiens
aaaaaaagaattccctaattttgtttctgacccccagtcactacctcgactttagctgtttttcaaagccagaggcacaaagttctttctaagggagaagtcaaggggcagaaggtgaagaggagtatgagggcttcatgggagacagccccacgtccccatctagcagatcactgggagtgggcagaggctgttcagagctctttcaagcacataattgattcccagaaatcttttcaagagacaaaatttccctgtaagggcaacttctttattgtcttgccccctcccccaacacccccaccccacccccagcgccatacytcctggtccctatttggaccaagtcttcccaaaattttaggaaggctcatttaacactctcctcccaaccaagaattcgtttgtggatatgtcctgactccaaaccgaaattcatcggtccgactgcacatcccattttcttgatttcccccacacaaatggccgagcctccttcagccaggctgtgccgaccatgcctggaaagtaggcaggtttaacggagcggcc

SEQ ID NO: 746732 - DNA, 621 bp, Homo sapiens
tactggtgccttttgacttcaaaggcaaataataaaaagccaacagtaaatcaattagccctgagagagtgagttttcagtggacatgaaagagggagcaatgcatgtaaatgcaacctcgtgtttccagaagaaaataagagggaccacgagcctgagaacacattcgtattttttgacccagaccaaaaacttttggtcctttttaacggtacattcctacattaagaaaataattagtgataaatatattctctttttgtacaaattcaattccrgtttttaacaccctaattcacaaaattcatgccaatgtatgcgctgataggctgaagccaagctgtgaaacttcagaacacagttaagggcagcaatcaagcccgttccaggctgacgcgcagggcgttcttacatcacatcccggggtgccagctcaaccccggcacgtcagcacctgggtgaagggagtgccgggcactgatgggatcaatacaagacacagaccccttccgtcgggagctggctagtctctacagtgccccacaccactgatttctatcaggctccagggcctcccatggaggagaagggctgtggcccctctgattcttggggacgtgg

SEQ ID NO: 746733 - DNA, 632 bp, Homo sapiens
ctcatgctctgatggcaaatgaggtgtatgatacagcggtttgccaaaggacagggaaaaacccaccgtcacactcaacaacatgaagcagtgaaagctcacggcagcttcccagtaacccctaagcagcttaaagcaactggcctcctcatgggctcctgagggcttcaggactcagccctgcgggagcagagtccagcaagttccacgcagccctccagggttccacagtgaaggctgggatgacagccagatagctctttatgaacggaaaaaactcttaaacatatttctgaccctacaaaacccaaayccagggcacagcctggtcaatgtctgcatctaggattagaccagcagctttctgcagcccacacaaacccgggtgttagagggaggtctctccctaccctaagtcactcagaaaatgccaaaggttgaaaatcaatttccgatgtcgaatcctgataactgttctgaaaagatggcaattttaccatttgatcggaagatcagaggaggaaatttgtagatgttcaatcatacataagaagaatgattatgaaaactgaagagtaaaacaatgtttcttaagacaggattttaaccaaagcaacaacaataaaacaatt

SEQ ID NO: 746734 - DNA, 678 bp, Homo sapiens
gtaaaacaatgtttcttaagacaggattttaaccaaagcaacaacaataaaacaattaccaataaatccacacttccttgctggcaactccttcaataccaaaacggcaatgtcttaggatactatagtgtcatggagttctcacaaagacatatgttacgttctgctactacatttasagcattttctttgctgtaatcagagaataaactgaactgaaactgtggtcaaaataaatgtaacaatgcctttaaaacccaagaattagaaataagactaatagtgtgttgttaacctgactgtgaaagcttgtagaaacccattataaacgagctaaagcaataatacctgtttctaatcacactccagaggacagggtgacagtcatacaatggtgttttctattgcaacatacaggaagacacattcaagccaacctctgcaggaaaagaagatctgaaacaaggggacaatgaacagataacatttaaaggccaggagtttatggggtgagcacatcagggcaggatgtagtgagaagattagaagtatacagggaagacttcctggggtctgtgggaaatgattcacatacacaatctcttacaatcctcgctcaacaaggtgggtacggttattatcctcatttacagacaaggacacaaagactcaaggagg

SEQ ID NO: 746735 - DNA, 583 bp, Homo sapiens
actgtatcctcgagtgcccgtctgccttcgaaaggcaggggtggggggaggatctaaggagtgtgaagagaaatgccttcaaaagaagggcatagcaacagaaaaagtagctgtaacagagtggggacatggcaagaacagagagcggcattgtcacgggcggagtaatcctgtgacacactgctgtcactcaccacccggctccctgccgcgccagccagacatcaaaggctgccccataccatcttacatgctctttatcagctaatcagcccattcttccctaaataaagccctgttaaatcccctgctcacaggggtatcgtggtcttggtgcccatctgctagcgagggtcagctggggcaggaggcggcrggctgctctctccctagcggcttctcaaggtaaggacaatgctgcctccaattcccccgcccacaggcctccctctctgctttccaagatctgggccggtctgaggagctgctatctggattaacacttgctaatgaaatctccagtcataaagggagatcatctgctaactatgaaatcttgggattgcatttattttcagggatc

SEQ ID NO: 746736 - DNA, 656 bp, Homo sapiens
taaagaagaattctaccttctccctcatttatttattcaataatttatttgtatcagtttgaactcacggatattttgttttagtttatagactgtaatgcaacactattattgtcactcaaatatcaggtaggctagatatactgctaattctgcatatccaaactgagaaaaacagtaatcgattagcttttgtctgttttttgcagtcacctcactttctatttctggtctcaccactccctctcagctgagaataacgaggctgtatttgtaggatcctgggctggcgtttgagatgaagcctctgcccacggatcacagcagttaactggcctcctagggaactcaacccaggcactaacttaacatgtttyacaactaaagataaattctacataatctcaaaaatgaggtagcccaatttgtcctcatattaacatttcaactaaatggctgcttattttcatatttactgttcatgagaaaccactgttttaaatatgaagttcagccttcttggtcaaaagcaaacaccacattggaacttagaaggttaaaatataatgctttatatacaacacagactcaagcatgaatggatagctgcaaaaccaaatcacctttattgagtgaccattctgtaaaaggtccca

SEQ ID NO: 746737 - DNA, 656 bp, Homo sapiens
taaagaagaattctaccttctccctcatttatttattcaataatttatttgtatcagtttgaactcacggatattttgttttagtttatagactgtaatgcaacactattattgtcactcaaatatcaggtaggctagatatactgctaattctgcatatccaaactgagaaaaacagtaatcgattagcttttgtctgttttttgcagtcacctcactttctatttctggtctcaccactccctctcagctgagaataacgaggctgtatttgtaggatcctgggctggcgtttgagatgaagcctctgcccacggatcacagcagttaactggcctcctagggaactcaacccaggcactaacttaacatgttttacaactaaagataaattctacataatctcaaaaatgaggtagcccaatttgtcctcatattaacatttcarctaaatggctgcttattttcatatttactgttcatgagaaaccactgttttaaatatgaagttcagccttcttggtcaaaagcaaacaccacattggaacttagaaggttaaaatataatgctttatatacaacacagactcaagcatgaatggatagctgcaaaaccaaatcacctttattgagtgaccattctgtaaaaggtccca

SEQ ID NO: 746738 - DNA, 643 bp, Homo sapiens
gtagcagatttaacattttctgttgttccacaattagtcaacaaaaatcaaagttgaggaaaagagatgagaattactctaaattctatagagaattgcaaatgatttggattagacatcacttccaattaatagaatatggaaaatgtcacttccaagattaggttatgaaaaagtgctgactttgtttgcttactctctctcattatttctcttgcttaccttaagcgaaaccagctaccatgttgtgacctgcgtggacaggtccatgtaataaagaactaatgtctatagtcaacaactcaagagagatcttgaggcctgctattctgggttgaatttcatcccaccaccccctaaattcatatgttgaagacctaaytcctagtacctcagaatgtgactgaatttgggggctgagtatttactgaggtacagtcatatatggcttaatgatagagacacatctgagaaatgccttcatgcattgattttgtcattttgtaaatatcatagatctttctatgcatcatagatcaaatatttcagagatacattttacacaagctagatcacatttctcagttgtatcttacacaagctagatgatatagcctactacacacctgggctatatggtata

SEQ ID NO: 746739 - DNA, 671 bp, Homo sapiens
  misc_feature 184: n = A,T,C or G
tgttcaggatttttatcatgaagggatttgagatttttatcaaaagctttttatatgtctattgagataatcatatggcctttatttttaattctgtttatgttgtgagtcatatttgtttatttgtatatgtggaactaaccctatatccccagaataaacctactttattgtgttgaattancttattggtgtgttgctggatttggcttgctagtattttgctgaggawtttggcatctatgttaatcaagaatatttgcctgtttttttctattgttgtgtctttgccagattttgatatcagagggatgatggctttgtggaatgggttacagaagagtctctcctcctcaatttcttagaatagtttcagtaggattggtaccagctcttcgttgtatgtctgatagaatttggctgtgaatccatctggtccagagctctgtttggctggttgttttattttgttactgattctattttggagctcatacttgtctgttcagggtttcagtttcctcctgattcggtcttgagaggttgtgtgtttccagaaatttatccattttctgtagattttctagtttgtgtgaacagagttgagttccttagcctctgaggatcctttgtattacttttgaatcagttgtaatgtcaccattgtcatt

SEQ ID NO: 746740 - DNA, 671 bp, Homo sapiens
  misc_feature 184: n = A,T,C or G
tgttcaggatttttatcatgaagggatttgagatttttatcaaaagctttttatatgtctattgagataatcatatggcctttatttttaattctgtttatgttgtgagtcatatttgtttatttgtatatgtggaactaaccctatatccccagaataaacctactttattgtgttgaattancttattggtgtgttgctggatttggcttgctagtattttgctgaggattttggcatctatgttratcaagaatatttgcctgtttttttctattgttgtgtctttgccagattttgatatcagagggatgatggctttgtggaatgggttacagaagagtctctcctcctcaatttcttagaatagtttcagtaggattggtaccagctcttcgttgtatgtctgatagaatttggctgtgaatccatctggtccagagctctgtttggctggttgttttattttgttactgattctattttggagctcatacttgtctgttcagggtttcagtttcctcctgattcggtcttgagaggttgtgtgtttccagaaatttatccattttctgtagattttctagtttgtgtgaacagagttgagttccttagcctctgaggatcctttgtattacttttgaatcagttgtaatgtcaccattgtcatt

SEQ ID NO: 746741 - DNA, 582 bp, Homo sapiens
tcaaaaaccttaaacatttacctggcattctattttactgcagctgagcttgtaggcaaactacaagatagagcatttcccagttttctctcccttttctaataacagaggagcctcgcctcatggcctatgccaccacaattccactgtaagactaccatcaatgtttccttcagggccaagggctcttcagtcagcttgtggtaaatgctggtggctgggacactcccttcagggcagtggactacmctctggcccagtgcagattcagaaatgccattcaataccaagtcctggaatcagagaccccaagagcccacttggtgtctacccacttgtggccaggctagtacctaaggtgcaagacaaagtctctttcactattccctctgcttttctcaagatggagtctcacatcaaagccacaacagctgggaatgtgctcagtctcacctgaaaccagcaagtctctgaccctcaatgtagtacctgggtatattgttggttattcagagcccaagggctcttcagtttgcaggtgataaatcctaccaggactggatccttcccttcaagacactg

SEQ ID NO: 746742 - DNA, 609 bp, Homo sapiens
caattctggctgtgagcattagtcctccaatgcagagcaactactccaatctctggcccttgaccaaaatgcctgcagtggctgccgcttccaggtcaccaaacaacgactgatgttctataagcctgaattgaaaatgatttcctcctctcagttctgggcatcggaaaatgcctacagcttttcccattatcttttcctctgyctgtctcctcaagttttctccagggcttcagaggaactaggtgctctctcttggcctgggttgcatggaaccctagtgggaaggtgaatcacagcaggagactctgcttcctcatgtactggtgcttctctcacttttatcagctgaatgccatcacggggctgcttgcccactttctcctccctgagatctgggttgttgctcactattccagtgaattctcattttccttcttgaattaaagctcaaagagtttatctttatgcactgttttgctatttccaagtggctgagacatgctaaaagcctctagtacgccatcctggggaaaaaaaggttttattagctttttttggagctgttgtgatctcctgatcccttatagtcttcaagtccttgcagta

SEQ ID NO: 746743 - DNA, 615 bp, Homo sapiens
aaggaagtgacaaaaagattaagatggagagggatgaatgagaccagagtgaggcaggacaagtaaggtgctgagcagaaggtggtgatgagaagcaggggaggcagagggtcagaagccaggagagaggccagattgaagaaaagcacccagagccgamctcctaacacttgtggtagcatccctgcccatcctccaaaagcctcaggcttggacggggcattcagtggccatggttccatttcaaaacagtcatcaagcccagcgcttttatcttcttgctgagatatcctgtctctgctcctctgcacagccccctctgtctcccaaaatcaggcctgttcttgcacctggattcttactgtaccacctatcaaatctcctggcttccctcctagcctcctgcaggccattctgcacattagaatcacctgaagcggggtgggggggttgattctaattaattcagatgctcagatggtaccccagaccaataaaatcaatgtttgggggggtggggatcaggcatcagtaattttaaaagatcctcaggtgacttcaatgcacagtaacgttggggagctactgagcctaaggcattttcctaaagcacca

SEQ ID NO: 746744 - DNA, 618 bp, Homo sapiens
gccagatggctcccatactcattctcttaggccaagttctgcaagaaacagactgtgtgagagagatttgcacccaggtttactggggagtgtttttggggaatgaggccaacaggactggacagattactggggagtgctcttggggaatgtgctgaacaggactggacataggaaaaagctaaactgtaatatagttacagctgtaaacyttagccaattcctcaaggacctcctcactagcgtgggcggcccttaaagttgtctcaatttaagcagggctgctccctgaataggggagtaaccctgggcaagaaggcagcttccctcctctgaaagcaattcccagcgaaagattcagctgtgacctatgagcagccaacactctaagcaattagagaatgagtgcctcagtcctacaaaggtaactgtgcagcacaccacagcatcactatacccactcatttggcttcatttcttcacacctgaccctgccctgctggagtgctgtttttcctgttctactgtttatcttacatttcctgcccagatcgggaatcactcattcctccaaaatgccctacttccttttagtcatactcagagactactttgggg

SEQ ID NO: 746745 - DNA, 618 bp, Homo sapiens
gccagatggctcccatactcattctcttaggccaagttctgcaagaaacagactgtgtgagagagatttgcacccaggtttactggggagtgtttttggggaatgaggccaacaggactggacagattactggggagtgctcttggggaatgtgctgaacaggactggacataggaaaaagctaaactgtaatatagttacagctgtaaaccttagccaattcctcaaggacctcctcactagcgtgggcggcccttaaagttgtctcaatttargcagggctgctccctgaataggggagtaaccctgggcaagaaggcagcttccctcctctgaaagcaattcccagcgaaagattcagctgtgacctatgagcagccaacactctaagcaattagagaatgagtgcctcagtcctacaaaggtaactgtgcagcacaccacagcatcactatacccactcatttggcttcatttcttcacacctgaccctgccctgctggagtgctgtttttcctgttctactgtttatcttacatttcctgcccagatcgggaatcactcattcctccaaaatgccctacttccttttagtcatactcagagactactttgggg

SEQ ID NO: 746746 - DNA, 635 bp, Homo sapiens
ttgcagcataatatcagctaagccacagtggagtagagcacccagtgggatcctgcagtcctcgattcaaggccttggctcctggacagtatttctgaacctgccctgggccagaggggagcccaattctctgaaggaagagacataggcctggctgcattcatcacaggccaactaaagagcctctgggatgtgagtgaacatcagcagttgccaggcagtgctcaccgtgggcctgtggtggtggtggctatgcagagagacttctctgcttgaggaaagaatgggaaggacttggtcttgcagcttgggtgccagctcagtaatagtagaatagagtactagctagattcctaaggttcctgactccaggtcctagctcctgaacagcacctgtgggtctacctggggycagggaaacttatgtcttgaagggaaagacgcaagcctggctggatttgccatctgcttactgtagagcccatgggcattaagtgaacgtaagtggtagccatgcagtggtctctgtaagttttggatgagccccagtgctgtgatgcctttgagtctaacctggcacggtcccagtggtggtggccacaggggtgtctgtatcaccccacaaccaagtccat

SEQ ID NO: 746747 - DNA, 635 bp, Homo sapiens
ttgcagcataatatcagctaagccacagtggagtagagcacccagtgggatcctgcagtcctcgattcaaggccttggctcctggacagtatttctgaacctgccctgggccagaggggagcccaattctctgaaggaagagacataggcctggctgcattcatcacaggccaactaaagagcctctgggatgtgagtgaacatcagcagttgccaggcagtgctcaccgtgggcctgtggtggtggtggctatgcagagagacttctctgcttgaggaaagaatgggaaggacttggtcttgcagcttgggtgccagctcagtaatagtagaatagagtactagctagattcctaaggttcctgactccaggtcctagctcctgaacagcacctgtgggtctacctggggtcagggaaacttatgtcttgaagggaaagaygcaagcctggctggatttgccatctgcttactgtagagcccatgggcattaagtgaacgtaagtggtagccatgcagtggtctctgtaagttttggatgagccccagtgctgtgatgcctttgagtctaacctggcacggtcccagtggtggtggccacaggggtgtctgtatcaccccacaaccaagtccat

SEQ ID NO: 746748 - DNA, 551 bp, Homo sapiens
actcactcaataactatttactatcttagtttgggttcccttgaagcagagcctgacacaagtatttgggtgcatctgatgtactgagggagtgttttcagaaaattctattaaggaagtgaaggaagcaggatgggcaggggaaggagctgagcaaggatgaggtcttgagtgtagtctggcgttgccatgactcacaggggctccagagcataaatggcaccacagagctgccccaccttgagataatggggctgtgctgtcatacccctgtattagttggccagtggtcccccgagggtggcgatatacctcccagtgtctctgggtgaagcagctcctgtgagtgaaagatgrttatctggagaaggccacatgtgtaaacctgtagcaccaactctcacagcagaagctgaggcctgggtgtaacctgacactgtaagcatgaccaaccatcttgatttgctcaggaccaagggattcctgggatgcatgggcaccaacagtgtctactacattgactgagggtcttgataaaagttttctcaaga

SEQ ID NO: 746749 - DNA, 663 bp, Homo sapiens
atgactttaaatatgtctaggatccttatgagaagaattataagtaaaagtgacaggaattatgagacaaaataatgcataaattaaaatcacagtcagctattgaaatatatttaattttcaagatttctgattctgttcattatctttttatattttttctattttaagcattttaaagatgctttggccagtatcaaattgatactcctaagggtgtatcaatttgacttgactaaaagtcccagaaatattaaagatgacaagatagaaaaatatgcctcaaagaatgtagaaattacataaagaactaaattgtctaattttatgtttaacagtttcccaaatgtgacaacaactctattgtcccaaatgtgacatttatggaaataaagtgtacaactgaaaaacaatttccaaaactattgatgacaaaaagcaaatttggatcaaccacactagaagatwgattgatttactatttaattctctctataaacaatgacattgccaaattattgacatgtgagaaggcaatccaaagaagcagccaaaaatgtactgagaggagctaatccaggaaactctatttattagatgatgctgaaggccagtgtcataactccacatcccagcactagctgcatctccagcccctcagca

SEQ ID NO: 746750 - DNA, 589 bp, Homo sapiens
tataacaagcacaaaacagtccctggtgtgcagtaaacattcaataagtgtcattattattatatttcatcttattaaaagttaaatggttatgctagtgtggaaaacagtaagaaaaagtctttagtgagaaaataattgaaaatacaaaatcaatataaatatgttgtgttatgtaaggtcagcaaaaaaaaggcatagggaaaaaatagwgaatatgtattattcactccatcaccctgcaatgttctcaatcaaaaatcttagtataattttgaagcctattaattcaagactgaaaatatatttaagtaaaaacaattggattggcacattggccatatagcttaaagataggattaaggcccctgaaattatgtccctcatataatacacaattagatattgatcgtgaggctgaaacaccagcttcaatttaaatacttattaccaattgtatcagctcattgtattaccttatatattataaaatataagacaagtggttaaacggctaaaaatatttaatttcaaaattttgcttacaggcttttaagcaaactttgtctacttttaccttgaagcaaat

SEQ ID NO: 746751 - DNA, 610 bp, Homo sapiens
gatctcttctgtatgtctatgtgtacccattgtttagttaacacttatgagaacgtgtggtatttggttttctgtttctgagttatttcacttaagataatggcctctagctccatccatgctgcacaaaggacatgattttatatttttatggataaatagtattcaatggtgtacatayaccatattttctttatggacacttatgttgattccattgatggaactattgatggacacttatgttgagttcatgactttcctattgtgaatagtgctgcagttagcatacaactgcaggtgtctttgatataacaatttttttcctttgggtagatacccagtagtggaattggtggatcaaatggtggttctatttttagttctttgagaaatctccatactgttttccatattgtttttcaatccataagagatgtactaatttacattctcatcaacactgtgtaaacattcctttttctacacatgctcaccagcttctgttattttttgactttttaataatagccattctaactttggtaagatggcatcttactgtggttttaatttgcatttccctgatgattagcaatgttaagtattt

SEQ ID NO: 746752 - DNA, 629 bp, Homo sapiens
ttcaacatccccttccctctttcatatgagctggagatgaataacctattaccacgcagtagtttctggagtgggggcagcactggctggcagagaggagctgggctgcagttgctctctgttccagagccagcaggaggaataaggccctactatcttccaccctgtcccttccgctgycctcccctcttcttgggggtggcagcaggtgtgaaggaaagaactttgggaacagcaagccagcgatcgatgcattccaaaacagagtttccatgagaatgcagcctcctgaggcaggtactgaagtcctagggacaacagaagttcagtgtctattgaataaagttaggattgcgtgcatctcaaaaattctcattttacaaacagtagtgtctgctgaggcctgcctgtctctccacagatgtttcctggggaatttgcttggtgtttgacgtgaaaaaaattggagtctcacagaagctctctgtgcacagatcttctaatgaacaaggcatggccaggagccccggtcgattggaaggccactgcttcagataccagcacacagtgaagtttgccaggcgcaacatcaaacaattgctgttaggatcataacaatattctaatat

SEQ ID NO: 746753 - DNA, 607 bp, Homo sapiens
tagttttcttctgtttcatattgcttttggaggtgaaagaattttcatcagcggaaatgttataatttgccttttttcagagaatctttatatgaagtcgctttgattttttcccactcataggcatttgtggacaggattcctagttcaaaaacctcttctccatcagtttagtaaaccacagtttattaaatggtgatgctggtattggtaaaaggggagaggttggtgtgttgtgtctgaaaattaggcacttcttcctayaccttctttctctgcctgacacatctctgacaggtaccactccttgtcaatatgaatctttccaagaagcagtgtttcctggaagctacaaaatccagtgctgctcacttttaaattgccaccctgtggccactcacagcccaacatttagcagattagactcagtgttggagttttcttagagtgattgctctacacttcattttagtttcttactcttctcttctatttttcctggaatctctgaagactcaactatcctgttctccaaagctaatggcttgcaatggtgatagacgctcctttggaatttggtatttacttctttgtctttacgtaattg

SEQ ID NO: 746754 - DNA, 507 bp, Homo sapiens
ccccaagaaaggaaaatgttcacacaagagcctgttcacatagcagctttattcataatagtcccaaactgaaaacagcccacgtgtccttcaactgatgaatggttctgcttgcgatacagccataccgtggaatatcactcagcggtaaaacggaacaaatgctgagtacatccagcaacttggatcaatctccagggaattatgccgagtgccagaaaccaatcccaaaaaactacatactgcatgatcccctttatgtaaccttttgggaacggagaacagattagtggttgccagtggttagggattgagtcggaggagagggggtcacmtaagatcacagctagaagggaacctgaagcttaaactccttattgttgtagataaggaaaccagtgtctctgaagaagtaagtggtttgaccaaggccagatagatacatgataagtgacagaagggaggttgaacctgggtctctgtctcatgtgccataatagtatagta

SEQ ID NO: 746755 - DNA, 529 bp, Homo sapiens
tgcatcctcatagcttagctcccacttgtgagaagatacaatgtttggttttctattcctgagttacttcacttagaataatgatctccaactccacccaggttgctgcaaatgctattattttgctcctttttatggctgagtagtattccatagtaaatatatataccacattttctttatccactcgcactcgttggcacttgagctggttccatatttttccagttgtgtattgtgctgctataaagacacaygtgcaagtgtctttttcatatgatttcttttcctctgggtagatagagtcttcagcattttctaggtatatgatcatatcatcagcgaacagtgacagtttgacttctttaccaatttggatgcctttccttcccttgtctgactcctctggctgggacttctagtacaatgttgaatagcagtgatgaaaatgggcatccttgtcttgttccagttcttagggaaatgctttcaacttttccccattcagtataatgttggctgtgggttt

SEQ ID NO: 746756 - DNA, 612 bp, Homo sapiens
caattgtgtacaatttatgcctcttcacatataacaccgtggttgccttcgagcatgtgacaccgtttgtcagagaattaaaagaatttgacaagctcagcaaccttctgaaccagacatttgctgatattgagattcctccaatgtcataaccacataaaatggtgaactactcttggttaaagatttgactgtcaagaaagatagacttcttatatttaccactaaatctaacatagaaaaactagtgcgtgtttcgctttggctattggatggcactttcaagactgtccctactttttaaaatcartgatatacaattcatgcccctgttggatctggaaattctaaaacttatctacttctttatatattaatgactggaaacaaatgaagtattttataatcacttatttgaagatttggtggactgtgcagaagaaaatggatttcttggaactcccaaaccaaaatgacaggtttggaattaagtgtaatcaaagcttctaaaagtgaacctgaaagagttatcaataaaaattttttttcatgtagtctaacacatgtggcagaaattcagatgaatggattggtcatgagatttggcaatga

SEQ ID NO: 746757 - DNA, 582 bp, Homo sapiens
gatttggtggactgtgcagaagaaaatggatttcttggaactcccaaaccaaaatgacaggtttggaattaagtgtaatcaaagcttctaaaagtgaacctgaaagagttatcaataaaaattttttttcatgtagtctaacacatgtggcagaaattcagatgaatggattggtcatgagatttggcaatgacagaaacttgagtttaaaaatgaatmatttcatgatcctacacccagaaaaccttgaagattcatccaaaagactcctagacctgataaacgacttcagtaaagtttcagaatatgaaattaatgttcaaaaatcagttgtgtctctatacattatcaatgctgaagctgacaaccaaatcaagaactcaatatcatttacaattgccacaaaaaactaaaatacctaggaatgcatttaatgaaggaagtgaaagacctccacaaggggaactacaaaacactgatgaaagaaatcataaatgatgctaataaatataaaaacattccatgttcatgtaaaggaagaatcaatattgtcaaaatgaccatactatccaaagcaatcta

SEQ ID NO: 746758 - DNA, 608 bp, Homo sapiens
atgacccaaacagctcccacctggccctacctccaacactgaagattacagttcaacatgagatttggaggggacatccaaactatatcattccacccctggcctccaaatttcatgtccttctcacatgttaaaatataatcatcccttctcaatagtcccccaaagtcttaactcattccagcattaactcaaaagtcctaagtcccaggtctcatctagaaatgaattccttctacctataagcctgtaaaatcaaacaagttatttcctttcaagatacaatgggtgtatcagcattgggcaaacattcccatttgagaagggagaaattggccataagaaaggggctacaggccccaagcaagtctgaaacccaacagggcagttattaaatcwtaaagctccaaaatcatcttctttgactccgtgtctcacatccagagcacactggtgcaaggggtgggctcccaaggccttaggcagctccgcctcagtagcttttttatgctgagattgcaagctgatggtggctctaccattctggtgtctcaaggacggtggccttcttcccacagctccactaggcagtgcctcagtggggactc

SEQ ID NO: 746759 - DNA, 609 bp, Homo sapiens
atacattttagcccagaaaacctggccactgtggaacaatatgaaatgatggtgatgataatttgctgtcaaaatgacttttggataattacaagaaaaataccacctcttagctttggaaatctatcattcatcattgccaaatattgctgaattggtggttattttctcaatttctcaaacttgctaagtttttttccctctcaattcaggacctttrcacactgtttctgcctagagcactttttttccccatttttaaaatgatttgcccctgcgtatttggagttttttagtttaaatatatccagagaaatattccctgtttaccttatttaaagtgggtttccctggctccctatctcaaactggagtttctttacttcctagcacttatgataattagtaattctttgtttacttggttttgttagcttgcctcactaaataataaatacctgcctgaaccgtatctgttttacttactgttatataccaaacagatacattattaaatacaaataatagataactgcttttaaaagtgctctgattatatttgaagttgacatatggtcaaacatttattaaacaattatttattaagca

SEQ ID NO: 746760 - DNA, 534 bp, Homo sapiens
gaaagaccaccagtcatgagccatttataggtaaaacctaggtgcctgatctctaaaacttgcagctgaagccaagaggtttccaggagccttctcatgtaaagttcatcaagaatcagtataaagaagaagaacccctatagagctaattttgttctctggaatataagatttgcctgaagacattaacaagttagggaaaggactggtcccaaaagaagtcaacaccaaggaactgctaacccaagcaaagttctgttaccctcagaaccagttcagagacatagcagcacggcactagggtgacctacctcctctcaacagcctgagcacctcaagttcaaagcwgaacatggccaagggttagtactcaatgaaattcagagaagctcatccttatttgtatgtgcagacttacaatatactacctacttgagggaagaatatttgaaaatagatgaatatgttgaatttttgcagagacccaagaacttgaggccaaatctattggggcttgaaaagaatcagacattt

SEQ ID NO: 746761 - DNA, 640 bp, Homo sapiens
aaaagtttggaacttcctagagacttgttgaatgacttggaccaaaatgctgacagtgatatggacaatgaagcccaagctgagatggtctcagatggagacgaggaacttgttggtaaatggagcaaagaggacacttgttctgcttcagcaaagagactggaggcattttggccctatcttagagctctgtgtaacattgaacttgagagagattatttaggctayctggcagaagaaatctctaagtggcaaagcattcaagaggatggctagcataaaggatgggaaaatttacagcctgacaaggcaatagcaaagaaaaaactattttctgggagagaaattcaaacctactgcagaaatttgcacaagtgacaaggagctgaatgttattcaccaagacaatggggagaatgactccaaggcatgtcagagacctttgtggcagcccctcccatcacaggccctgaggcctaggaggaaataatggtttcctggggtgggtccagggcccccttgctgtgtgcagcctagggatttggtgccctgcatcccagctgccccagccatggcttaaaggggccaaggtaaagctcagccaatggcttcgtagggtgaaaaccccaagccttggcag

SEQ ID NO: 746762 - DNA, 577 bp, Homo sapiens
tcagattataaagtcattataatcaatgtgtccaggtgaacataagcttagaattcaacctacattctgtgaaagaaatacatgaaggaatcaataagttaataagtcctactatatgtatcactttttagcatactataaatgcacttatttattatgtttattgtctgtctctccacttaaacaaattcctacataacaggatgtctttttcttcaatgatgaatgaagtctatctagatgaatcaacaatacttcgataaggcactcactatttggtgaatgaaagaattatcttgatctsaaaaatacagactacgtactcctgttgctctttgaaattttaaataaaatgttggaatatttattttagatagtttaaagaagctaaaaatctctacaaatgcatttaggtggcagagaatctacaaaccaagtcaaccgatacatgaacaaacaaactgtaaatgagggaaagaaagaaagtaccaaaggatgacctagcgtgggtatttggaagggttacttaattatgtcgtctaagtaacctaatttatatgattgtaaaagatcagga

SEQ ID NO: 746763 - DNA, 603 bp, Homo sapiens
tccttcaacacccctttttagaccttatgcacctcataacaagaacaaaagcaaattctaatgatttagttgaatatttttggtggtcaatatgtaaccttggtggggaacatggactacatggtgtttaagaacaatcagtataggcataaagggtttttgtctatttgttaacaggattatgaagaacaggcactttgaagtttgacagtcatttgtgatttttttctgtatgatacatggactatctatgtgactatgtgactataatcaaattactaaatctttctgaatttccatttcctcatctataaaatgtgtcttgagtagtgataaaaggtaaaatgcctgccatataagaaaaatagagtattactgcattgcaaaccttgtctccgatgactctcaattaatctcatcatagttttgaagcaatttaatagatcraaatgtttctattttcctagagaattattatgcatttgttttccaaatgaatgctgtgttttacagccctaattgcctaagtgtgtatctaagagtcattgatgtcttcagattacttgcactgattacatgaaattctaggaagcagaggttctg

SEQ ID NO: 746764 - DNA, 568 bp, Homo sapiens
aataacaattattattctcttgttttcttacaaacaataaattatacagtaaaagattatatatttagaaattatttttgttttaatatgtttgttaccattttccataaatatcgatctataaatatatttgtacagcatccaacccacaaggtcattagcataatagatattaaatataacaaggcattcaaacgtagagatttaaaaaaatgggaactgaatgtcagtggaatttttaaaamacctgctttttattccatttgttctttaaaaattttatacacaagatttttcacgttccacattgcgtaagtttcacacattttcttaagtctttactttttcataatatgaataaaatcagaaatacctgaatatgctcaactaataataatagacaagtccactattgcatttagtagtaaaaaacaatatagcatttcagtataagttggaggtgcttagtatccacattataaattgagataaaatcagtatttatattcatatttcctcattcactctctcccctcccactctctatctcaggatgtgtaaataaaat

SEQ ID NO: 746765 - DNA, 568 bp, Homo sapiens
aataacaattattattctcttgttttcttacaaacaataaattatacagtaaaagattatatatttagaaattatttttgttttaatatgtttgttaccattttccataaatatcgatctataaatatatttgtacagcatccaacccacaaggtcattagcataatagatattaaatataacaaggcattcaaacgtagagatttaaaaaaatgggaactgaatgtcagtggaatttttaaaaaacctgctttttattccatttgktctttaaaaattttatacacaagatttttcacgttccacattgcgtaagtttcacacattttcttaagtctttactttttcataatatgaataaaatcagaaatacctgaatatgctcaactaataataatagacaagtccactattgcatttagtagtaaaaaacaatatagcatttcagtataagttggaggtgcttagtatccacattataaattgagataaaatcagtatttatattcatatttcctcattcactctctcccctcccactctctatctcaggatgtgtaaataaaat

SEQ ID NO: 746766 - DNA, 624 bp, Homo sapiens
gggccctacttatactaaaaagtttatttgttgttcatttgaaattctaaattaattgagggccctgtttcctttttcatgtgtgtgaaatatagtagtctgaatcatctcagttaactggcaaaggtctcagaagctcaaggtatatttgggtgaatgtgggttcaaagtttygttaaactgttggatgtcagatgtaggtcagaagaagcggtggtggggatttcgaagataagttgcaacacaatccaatcatgaatataaagctattattttcacagagtaatgccctaatcatcaagttttatccattaatgtaattagtataattaaagataattattctgtcacagtgctttcacggtcttcgctaattcaaatatataattgcattaattttggtcagatggaaaacgaggattgaaaaattcacaataaattcctctaacaaagcacatttctgaaaagtacatatgtgagacccttaaatattatattaaaatgttcccagttgatatgtcatattgatattcaaaataatgctgagctactcgctaaggatactacaatatttactaaactctagaaaacaaactttattttcttggaaaacaaaacaatgga

SEQ ID NO: 746767 - DNA, 624 bp, Homo sapiens
gggccctacttatactaaaaagtttatttgttgttcatttgaaattctaaattaattgagggccctgtttcctttttcatgtgtgtgaaatatagtagtctgaatcatctcagttaactggcaaaggtctcagaagctcaaggtatatttgggtgaatgtgggttcaaagttttgttaaactgttggatgtcagatgtaggtcagaagaagcggtggtggggatttcgaagataagttgcaacacaatccaatcatgaatataaagctattattttcacagagtaatgccctaatcatcaagttttatccattaatgtaattagtataattaaagataattattctgtcacagtgctttcacggtcttcgctaattcaaatatataattgcattaattttggtcagatggaaaacgaggattgaaaaattcacaataaattcctctaacaaagcacatttctgaaaagtacatatgtgagayccttaaatattatattaaaatgttcccagttgatatgtcatattgatattcaaaataatgctgagctactcgctaaggatactacaatatttactaaactctagaaaacaaactttattttcttggaaaacaaaacaatgga

SEQ ID NO: 746768 - DNA, 577 bp, Homo sapiens
gatcattttggagtggacaactcaagaaagaaaactttggtgggaggttttacaaggtcttcaaggcaggcaaagaaatgtgggttttgatctgaccacattatatgcactttgcttatttatcgttgaggtatattactgaacactgtcttatcctatttcagtaataatctttgtttatttggtaaagtattatttttttaagggttagcaattctaagttccaccatgaagcagtcaagtgaaattgtttctcagtatttgattgacttgattcatccattttcaaagaaaaggtaaatcatatagtattctgtatgatgtagactgtgtcactcagagtgaaaaagttacctttgtcttctaccatttgagaatgtgctgttgaatttgygaagaaaagagccctgaggcattaatcatacacattctccaatctagatttcaaaatgttcagtagatgtttagggtatgacagaagaatattaagcccgttaatacggtaattacagtgtttcttgcttccttgtaccctgaactgattaatacataaacaggactcaaaatataaacttta

SEQ ID NO: 746769 - DNA, 530 bp, Homo sapiens
ggttatcaaaatttgaaaaactgtgcccgtagtaatcgattcatttgttcactagttcacttattcaatcaaatatttatgaagcacctactatgtgtcaggcactgtactgggtgccagtgatacaaatgtgaataggacaaaattctggcccctgtgaagctggcattctagctagggcctggagtacaaatacacaaatagacttagctcattccccctcacccccatcttcaaagagagcaatgttgtatctctctgacctgccttccataattacatctccctttgaatacaaaaggggaaggttctccacattctaggtgcatgtaactagactggccacacccagataacytgagataacctcccatttcaaggccctaattaaatcaaatctgtacaatcccttttgagccataaaataacagttcacggtttctgggaattagaacatggatatctttagagacctttattctgtctagcagagaaagctaaattgattttttctcagcttcctttgcatt

SEQ ID NO: 746770 - DNA, 625 bp, Homo sapiens
tcagcagagatgtaattgccaaggcctggagcgaggtttcatattacctagacgtgtggcttatgcaagctcttccatgagactgtctgttgtcaataattaagagctatcaaaacacttggctaatttacacttgataatctgaaatgagggcccctgtgatcaccagcttctgtcttattatttaaatacacatagtataaaaaaagcagaatggggccaaagcaagccatatcagggaaaagaccggctttccagcaaacaagatatagcccagtggttgtaagcaagtacagcacaaggctgaacaaacayggcccagtgagtgctttttatggctgagaagcttcacagagcaggtgggattgtagaggatcttttgaacactgagatgtggggacctggcaaagtttaattggcaagctgttgtagtcaaatgcagagaccatgaaaatgggcatgcgttatggacatgagtagggagctcgcatggtatttcaaaaagagtgattgctagaaataataggaaataactatgcatgaacagaaaagaaataaaaccattaatttttaggaagtgcaaatagtcaaaataaagaagggcagtgcagtctgtatgtaaaca

SEQ ID NO: 746771 - DNA, 633 bp, Homo sapiens
tactccacatgttcagaaagcctttccctagagtataatttaatgtaattgacagtcattgttcctcgaaagtttgaattaaattaacctgagcctgaatgaaactggtaaaataaccacgtacagatttcattttattttcctttaggatcagtgacaatattatgtataaaattggcagttggctattagatcttcattgaatcaccctagatttgattaaaagtagatatttcagtgtacagtaatttaggttcatgaaaaactcttaggtttctcatttagttattgggtttattgaggaacagggtattttatgtgtgtaatgatgaattttgttctttctctttttccactgagatcaaatacagactgcaaaattgacygagcatgaaattgtttttagaaattgtgggagctagtttcgatggcaagaatcagaggaaccgttgttagtgaaaatgtgtttggaaaggatgatggtagtgggtaggagagaatagaggtagagaggtgttaacataaggcaaaaacattaaactgacaaacacttctctgtagagtagttgatgtgttaagccagcacacttaaaagcatacaagtttttggatagaaaagtcttcattgttctg

SEQ ID NO: 746772 - DNA, 628 bp, Homo sapiens
catttatccaagtccatagaatgcctaccaaccaatagtgtacccatgtaaaccaaaaataaaattttaaggacccccaaccatctggttggaccccttctcttggccagggcattccaacgttaccctgaaaaactggctcaggccatgatgggaagcgagagttggacatgcgtcatcattccctcctctctttcagatttcaggaaaagctgaccagcattagcactggcacagaccttaagtccgatgaacatttaccgtctgttctctgtgaagcctgcaacctagagggtttatctgcctgataaaactttggtctctacaactcttatcttatcatggtaacccaggcatttctttcaactgattccaggtctctagataatagcttagctctttcagccagttgccaattagaaaacgtttaagttgcccctactttccagacagaactgccartgtacgtcttacaggtatttgattaatgtctcatgtttttctaaaatgtataaaactagacagtgccctgaccaccttggacacatgttctcagggtctcctgagggctgtgtcacaggtcattggtcactcatatttggctcagaataaatctcttcaaatgttt

SEQ ID NO: 746773 - DNA, 560 bp, Homo sapiens
aagtcatacttgggtaggtggttctttaatacaataagactggagtcttatagtaaaaaaggtctgggcacggtggctcaccctgtcatcccagcactataggaggccacagcaggcggatcacaaggtcaggaattcgagaccagcctggccagtgtggtaaaaacccgtctccaccaaaaatgcaaaaattagccaggcttggtggcgggcacctgtaatcccaactagttgggaggctgaggcaggacaatcgcttgaacycgggaggtggaggttgcagtgagctgagatcgcgccattgcactctagcctgagcaacaagagcaaaattctgtctcaaaataaaataaaataagaaaaaaacagagagagagagagagatgcaggaagagcaccatgttaagacagaaaaaaagcgaagacagcatgtgaagagaaggcagagaccggagttacgcagcccaaccaaggaatgcctgagggcaccagaaaatggagacacaaagaaggatccttcctcagggcattcagagggagtgtgtcccttgatttcaaat

SEQ ID NO: 746774 - DNA, 605 bp, Homo sapiens
tttgagattttgccaaacagcttgagatatttaaaaatatttttgttcaaccaaattccaaacatgttttctgagtactttttttaggtcaatttttataaccatgtgtaatttcaagaaaatttaacccatatgtttgtttctgttagtgtatattcagattgatttataacacagatgtaagtatttctcttaacactggtatatgaaragggtgagagggtctcccaatttgctgcttgggacagtccacagtgagactttagattaatggtcacagactataacccagttctaatctcaacacagtctccatgataaaagtcacaggggactggctataagtgtcagcaaaagatcagatccagttactgcagtatgttgatgaatatgtgtgttcctagcatggactcaaaagatggaactctgactgatgactgtacagcactgtgagaatgaagcccttaagtgctactaaaaggtctttaccaactgtgatgaaaaactgcatctgtgagtaatgctacttactggcaaaataggactgtgacctgccaacatattccattattttttgtggcatcgagtataaaagtagacccgtt

SEQ ID NO: 746775 - DNA, 649 bp, Homo sapiens
aggatgtaccctcacctctctttctggtcacagaaaaataactgtggttacgtcaaaacttaatacaagtgaggaagttctgagtctgctaagagagaaaggggctatcccacaaagaagctgtagaatccagccaggggagtaatgtaagggaatgcrgatgctgatcaagggaagcagaacgaaagttagaaaaggaacattttgtcaatatgttagtactgcctcatgatacaggaatacataccctggcaaagtcaccaggagactggggaaattttcagataggatgtctcttggaagctaggagacagtgatggacagcccaagcttagtgaagtagaaatgccagagctgccatgactgacagtggaaaaaggtctcaaagcctcagaaaaggcacactgaagaggatacagcagataaggctggaaggtccagtagccaactctgtttcaagagagaacctggcaaatattccacttaccaaagtagtaagaaatgcattggtgagagaggcaccctcatctttgagatgcacagtgatggctattctctattggcctggactagcctttggaaatacttttatagaactgggcttcctgatagcaatggggatgacaggatcccatattaggggccagga

SEQ ID NO: 746776 - DNA, 620 bp, Homo sapiens
ttggtcgttcaaaggagttattggacctctgacacaaccatttctaaagaaccttagaccctcttttcaatggaaagaggattttcctccatctttctatagtgtattttgaagagaaataatatatgatgggcagggtaagaagtggaattctcagtaatcaaatatcattttttcatgataggaagatattaaaattatgcataaagagaagagcttgctttggggattgctgtgcctgtgatcattctagcttggcactgaagatcacagtgatgcagtctattttgcataaaagatagcttctgagaggtctttttatatcttaacaatcctagttcttcatatttttattcaatcataaaataggagttcttattttgtttttttaacaaataagaaraaattcctttcattagaattcatttccctttgcctattccaagcctaaactctcaaacgtcttctaaagactgtatgaatccccgaggcagaaaaataaaagctttattagcaaagtcaagtggagctgaggagggaagggtactgaagataacagaggtaataatctaatcacaaatatcataaatttctgagcttcagattcctcagagatgtct

SEQ ID NO: 746777 - DNA, 600 bp, Homo sapiens
ttaatgtcagattcaatttcaaaatggccacaagatttgaagaaatgcttcaccaaaaaaaatatagctagtaaataagcacatgaaactattttgacattactaattgttctgcaaatgccaatcaaaattacaataagataccaccccatacatattggagtggctaaaatttagaataaactataccaaatgttggcaagaatgtaaaacaactgaaacttttaaacactgctgatgagaatataaaatggtgcaaactctttggaaaacaatttggtagtttcttaaaaagttaaaygtacacatatcatatgagccattccactcccacacgtttacccaagagaactgaaagcttatgtccatacaaagtgttgaaaatcaatgtttataaaagctttgtaaatatctcaaaactgaaaacaactcaagttcctttcaacatgtaagtggacaaaccattttatagccatacagtggaatactactcagcaatattaaaaaaatgaaatagtaatatatgccaaaacatggatgaatctcaaaataagttatgagtgaaagaagttagacaaaaaagagtgcatagtatgtgag

SEQ ID NO: 746778 - DNA, 648 bp, Homo sapiens
gattccttttaccctctcaaaaacttacagagaatgtcaaagaatctttgcttatttgtttaaatatttatttatttatttattcatttaaaattaataattatacatttgtgtaaactaaaataaatattttatgaaacataactgtactcataaacaatggtgaaagggtggcattatctttttctgcaaatttctttactatctgacttaacagaagacaggtggaatcttaatctctgcttctgcatttaatttgttgggtgatgttgttttggttgatgtatataaggaaaatctggccccgtaaacatactgaatcatctgaacacaggctgcattgagagagcatacattgtggcaatgtggcacactgtggtaggcaggacagagaggcaaatcacagattaaatcagtggtctctatacatgtttaattacatatctttgccaattacatattttcagcagaaatacacacatgcacacrttattatcactcaatgataattcacttgttctgaggttctttgttaattatagggagtataaatccttatttcaaataatcttcttaaaaatttcacttttcattttcccccagatcttcacagatctgatttcgtaatatggttgataggagtaaaag

SEQ ID NO: 746779 - DNA, 627 bp, Homo sapiens
atttatgtttttgtatgctttgttgaagatcagttgattgtaagcatttggctttggctttatttctgggttctctattctgttccactagtctatgtatctacttttataccagtaccatgctgttttggtcactatagctttgtagtataatttgaagtgagggaatgtgatgcctccagatgtgttctttttggttaagattactttggctattcaagctcttttttgattccatgtgaattttaggatttttttttctaattctgtgaaaaatgatgttagtattttgatagaaattacatcgagtctgtagattgctttgggtactatgatcatgttcatgatattgattcttccaatccataaccatggaatgtattcccatttgtttgtgtcatctatgattaccttcagcaatgttttatagccctccttatagasatctttcacctcctttgttaaatatattcctaggtattttaatttatttttgcaactgttataaaagggattgaattcttgatttgattctcagcttggtcgtcattggtatatagcagtgctacaatttttgtacattcatcttgtaacccgagactttactgaattcatttgtcaaatcta

SEQ ID NO: 746780 - DNA, 646 bp, Homo sapiens
ttgtctttgagctctgaaattctttatcctacttgatctagtaaactgttagaacttgccactgcattttgtaattctgtaaatgtgtcttttacttccagaagttctaattgatttttttaatatctatctctttagaacatttttaattcacatcctaaattgttttttaaatttctttatgttggttttcatctttttcttgtatctctgtgagtaacttaataagcatccttttgaattctttatctggtatttcaaagttgtcatctcagtttagttccattgctaaagagctggtgtaatctttttggggttttatagaaccctgttttgtcatattgccagarttatttttctggtttcttcttatttgggtagactatttcttttaattatttttgaatttatttttgattcaactgtgctttttaaaaatgtcccatccttgaggatgtgactttaatgtttataaattgttgtaacctaattcagctctgggtgaagactttgtatgagttctttggttataaagagcctttgtatgatggctttttcagatactggttgtagtggcaatatgttaatggtgtgagtaggttcactgtctcctataattttggaatgacaaaagtctcttgaagct

SEQ ID NO: 746781 - DNA, 484 bp, Homo sapiens
acacctacaaccatctgatggtcaacaaagttgatttaaaaaatcaatagggaatggactccctattcaataaatggtgctggaataactggctagccatatgcagaagagtgaaactgggcccctacttttcaccatatacaaaaattaactcaatgtatattaaagatttatatgtaagacctcaaactataaaaatcctagaagaaaacttaggaaataccattctggacatcagccttggggaaaaaaaawgtatgacgaggtcatcaaaagcaattacaacataaccaaaaatttacaactgggaactaattaaactgtagagcttctttacagcataataaactgtcatgggcatcaacaaaaaacttgcagaatgggagaaagtattcacaaaatttgcatctgacaaaggtctaatatccagaatctacaaggaacttaaacaattcaacaagcaaaaaacaaccccattaaaaag

SEQ ID NO: 746782 - DNA, 631 bp, Homo sapiens
ttctcatgcctctaaaattgcttatggattgagcctcttctttcaatattttcttacgtgcagaactttcaggataagcataataactatgagagttttttaatggaagaaaaggcagtgccaaaatatataacgtgacaacctataaaacatgggaataaaaatccctaacattaccatacaataaattgtatgagaaatggatagtactaaactagacagctaaggaaaaactgaacaaaaaaaaatcctggaaggattagccaccattccaaccaaatcttattgggccagtaagattttaatatttaaataacaaagaatagacactgataaatcactatgtcaaacacgcaaattaatgtactctgatgatactaaggaagaaattatttgcataaaaatgtacctgatttgtctagaagcaacycattttctattcttatttcactgcctagggcactgttggagcctgaggggattaaaaagtatgtgcaagaaacagagcaacttgaataccataaaatagaacaaggcagagtactacatctaggtatgcaatgttgtttccatgagcagtaacatacataacaaggactaatcttatgaccaagtgaccacagtgtagttg

SEQ ID NO: 746783 - DNA, 625 bp, Homo sapiens
taatattgatacaggaagaaattacttcatttaactttggttactttatattactttacctgaaacagtattatatactggtttaatcacgaagtttcttcactaaagttgcactcaaatgatttttgtgcctgaaaacacatgcagactttcttttcctgtgagcatttaaatagygaatgtaaaacccatagatagtttttataagattttgcataaatacaattaatcaacctaacctaaattttacccttgaactgtatgtaagctgaagtgttagttaagagttggcatttaaaaggcccttcttgttcaaatacaaacactaatagaaattaaaatgaggaaatgccaaccaaaggaaagatgaatcatactacctattactacaccaaaaagaaaatgttaacagtggtggagtagagtctcgagtgtcccgcaaatagaaaggtctaattagtgattgggagaagaaagagtttcacttgtattttctactttcaaatgtgtaaactaacatgacagccatttgttgttctttataaaaatcaggacttaccaggcacacatgttcaggagggtaacatggacagagatgtaaatgaatgtctttgttttcagatgt

SEQ ID NO: 746784 - DNA, 666 bp, Homo sapiens
tatctcattactataattagcagctcctaatcataattcacttgaacctgcaggacctctgggaggttagaaacatagcaattattaaaagcgggagatcattaagattcactcaaaggaggtgaaggaataatcatgaacacattttcttatgtgrcctaaaacttgtgttgccatctaattgcttctgttacagttggggtcagaatagaatatcatgtatttacttatatcccacttcgaaaacctctcccttacatttcttccttgttccttcaataacctgatttctaggaactacctgcactgacttatgccctagggccataaagatgagtgaaacccaacacaattctcagatgcctgaaattccatctaaaccattcttttagcttaaaatcatgatttctgcgaacacatctttgagaagacttaagcttttatcaagtattaaaacctttgtgtgaatggaatattcatggtagggatgttagctgtcctccaaagttcatgctctttctttattaggctagtgcaaaagtaattgcgggttttgccattattggcaaattgctgcaattacttatgcaccaaactattatattgcggagttgttgctgagaagtggctgtctaggtaggaactatatttcccagatcttcttgc

SEQ ID NO: 746785 - DNA, 666 bp, Homo sapiens
tatctcattactataattagcagctcctaatcataattcacttgaacctgcaggacctctgggaggttagaaacatagcaattattaaaagcgggagatcattaagattcactcaaaggaggtgaaggaataatcatgaacacattttcttatgtggcctaaaacttgtgtkgccatctaattgcttctgttacagttggggtcagaatagaatatcatgtatttacttatatcccacttcgaaaacctctcccttacatttcttccttgttccttcaataacctgatttctaggaactacctgcactgacttatgccctagggccataaagatgagtgaaacccaacacaattctcagatgcctgaaattccatctaaaccattcttttagcttaaaatcatgatttctgcgaacacatctttgagaagacttaagcttttatcaagtattaaaacctttgtgtgaatggaatattcatggtagggatgttagctgtcctccaaagttcatgctctttctttattaggctagtgcaaaagtaattgcgggttttgccattattggcaaattgctgcaattacttatgcaccaaactattatattgcggagttgttgctgagaagtggctgtctaggtaggaactatatttcccagatcttcttgc

SEQ ID NO: 746786 - DNA, 557 bp, Homo sapiens
acttataatacctaatactatgtaaatgattgtcatattattcaaggaataatggcaaggaaaaaagtccacacatatttggtacagatgcattttttttttcaaatattttcaatccacaattggttcaatccatggatgcagaaaccacagacacactacagtaaccaaaacagaatggtactggtacaaaaacagacacatagaccaatggaacaggacagagaactcagaaataaagccacacacctaygaccacctgatggttgacaaagttgacaacaaaaattgaaaagtgagacctaattaaactacagagcttctgtacaacaaaagaaacaacagagtaaacagacaaccctacagaatgagagaaaatagtcacaaactttgcattcgataaaggtctaatattcataatctataagaaaattaattcaacaaacaaaaaaccaccccgttaaaaaacgggcaaagggctgggcacagtggctcacatctgtaatcctagcactttggaaggctgaggtgggactgaaaaaacaggcaggtgcatt

SEQ ID NO: 746787 - DNA, 605 bp, Homo sapiens
tatgagtttgtcctattatctatgctatttaagaagaataattatatagagaaaaaaattgttaggtaatatgccaacattaaatatttgaactttggtattttcacaacttgtattccctaaatgaaataattttaatactcatcctattttcttgggctattttgatctttatcacttactaagcacccacaatgtgtggctgaggatctacaaaacccatgtaagacataatccctgctttcacagagtttacctgctaaaaagacaagatgtactttaaaagggagtctttgggaatgaggattatttttgtgttgctaaactgtgccagaaagaaagcagttcattatcttatctcttcctgtcctgtccattgagtttgtggttttaatgagataaaaatttaaccattttcttgcactttcaaatgcaaatgagtctctcaytggagtgagcagaaagcaaagctgagatgtcatcataccaaggaagtttaggaagtccataatcattgtagcaataattactatcattttttaagcatcttctgagggctgggctttttgctaggtgttttcccattaatccacacaataaggatg

SEQ ID NO: 746788 - DNA, 392 bp, Homo sapiens
tatcagtatgttcagctcccctggtctttgttcttcattttaaagtttaacttcctcattctttatgtctccttgcccctagtttcagtaaacaaccccctcctagcctctatcacctagctccatcctgagtcaccccaggtcacctgctccattctgagycactcctaatcacctgctctgacctgagtcacctttagttacctgttctgtaactccttcccacgaaactactcaccctgccactccagctcatacccctgctctgtttaaaatagccaatcagaattagcttagactgtgtggtccaaccctagccaataggtgaaagacacagcagtagagattagctgcgttaggataagaaccccttcccctcccttgttcagttg

SEQ ID NO: 746789 - DNA, 619 bp, Homo sapiens
aatccccctctcctcttatttatttcttcaaaaatgtttatttgagtgactattatatatcaagtaatgttctaggaactggaaaacagtaacattaaaaataaaacagacaagaagccccgaactcatggagctcttatgaaaggaaactactattctgaattttgggttcaccattctctttttcttcctcatacttttcctatgtgtataagaatttctaaacaatttatgtcactttactatcatactgcatgagttcttctaagttttgtttctttcacttaatatttttgtgcatgaagttcgaattcattaatgttcagttttcatggtcttccattatgtgaatatttcagtttatccrttttcctgtttatggatatttggattatctttagtttcactattgcaaacaatgctcctatgaaatggtatcaaccatttgaatacaggtagcccttgaccaacacaggagtcaggggcaccacccccatcacagtaaaaaatgcaggcataacttttgatttccttaaaacttcactactaatagcctgcggttggccagaagaaaccttaccaatatcgtaaacagtcaattaacttacaaatacactag

SEQ ID NO: 746790 - DNA, 612 bp, Homo sapiens
caaggttagacaaggaactcaaaacatagctctgtcatgtctatcccaggactttcattgatttggcctgttttgtggacaacctgttgccctcagttatggcccccagattagtatatctgcacactctcagaccttgcctcctgttgtctggacataatagcagaacccagttccttccctatgaacaaaatgttattctttgtgatctgaagacatcatagcaaaactcaggaaatcaaaccatcagctgggcacgtctaataaaaatgattaccatttatcaagtacctactgtaagccaggcgtggtgtttagattctccatgtaaataatttaggccaggtgccggggctcatgcctgtaatcccagcactttgggaggctaaggcgggyggatcacttgaggtcaggagtttgagaccagcctggccaacacagtgaaatttcgtctctaccaaaaatacaaaaattatccaggcttgttgatgcatgcctgtaatcccagctactccggaggctgaggtatgataattgcttgaatctgagaggcagaggttgcagtgagctgagatcacgtccctgcactctaacctaggtgacagagtgaga

SEQ ID NO: 746791 - DNA, 626 bp, Homo sapiens
aagtaggggaaaatacttaaaaccaagtgtttttttttaattaaactggatggaaagccaacacttctgctaatatttatctacaggaactgtaaaatgcatggtgaatattggctttttctggccctgcccacataaaaatgtattgttcatatatgaaaaactgactctagtttggggaaaaagaactaaaagtgagttcacactcaatgcagctacgttaatgtaagaggaaatagttgtgtttactaatgtatctagttaacagtgtgaaatttaattgaaaaatcttacatgaatagtttattstatacaaaatgtgtttacttaagaaaatttaagcatagaaaatttaaataatttgtatcaacactgccttccaatccaccatcattatcagattatttcagattatctttaaggggaaacggttttgcacccagtggttaacatagtttagtactccactttcaaggattgtgggggttgtgtgtgaagtgcggaaataactcaccactttagttcatggtattagacatttttgagtaatagccaaagagttcttgtcagtttcaggaatttactgagtacatactttcacttttcagaagtgggcttggaatcaa

SEQ ID NO: 746792 - DNA, 603 bp, Homo sapiens
gctggctgctggcatatgagttgccattcaggagtcttccctgggatacttatttttgtgttttctttcttagagatagttattgagttcctggaacatagatcctggcctcgtaccctggattgtgatgtggctggctccatttcattgttgaatttgcgggtatctaactgattgcctcttcagagaggccctccctgttagccctatctaagctcttaccccagtccccttcatagttacttgctatctcaataacctgttatattgttgtcttagcactatctgacatttgtttatacttactgcagtaagttatccattgctccccrtagaatatagctcagtgtgggcagcaacttcatccagcccactcatctctatatcctcacctaccctatggtgaaggaatgattattattatctccactttacagatgaggaaactcaggctcaaataaatcagataggtttcccaagttcatagaactagtgagtggtagaaccaggattaagatcaggaaatatggctgcactttccaatatggtagccactagccacatatgactattgagaacttgaactgtagctagtccaaattg

SEQ ID NO: 746793 - DNA, 629 bp, Homo sapiens
tctgacttccttttagtctccttctgtttagcatggttcacactcattactctcttgatcaagttacagacaaaagcaggctccaaattaggcctattaagatttgtttttaatgaggagataatttttctaacaacacaggccagattcatgtgggtatgattacaaaatcaggccatattgcagaaaagcaaagcaaagcagatttttgcctggtcttcaaataatttcagccagccttgattaacttgatgacacttaaaagcacaaagcaaatataggatctgggactttggagtgatgaagcaatcacatggcctctgttctgctatgacagtgcgaaagtttctgtatcagggattagaacttcttagaaggcaaatgctcagatttaaaatattagaaatcacagaggaaaagrtaaatgcattctttccaccagtgtgagctttagaaagcaagctgtctcgctttccttaaattcatttgccagtcctttttgtcgttcaggaagaaatgccctgctctgtgtgactgaggaaaaggatttgataattaaccccaagcttttggggtctctttgcatgtgttttattttcattttagttataataatataataatgtaaa

SEQ ID NO: 746794 - DNA, 601 bp, Homo sapiens
gcatgaaaggaatccagcttcaatcttctgcatatggctagccagttacgcctgtaccatttattgaacagggtgtcttttccccattgcttttgtcagctttgttgaaaatcagatggtcatagatgtgcagccttatttctagtctctctattccgttccttggtctatgtkcctgtttttgtaccagtgccatgctgttttggttacttagccttgtagcattgtttgaagttcagtaacgtgatgcttcaagctttgttgttctttttgtttaggattgtcttggcaacttgggctgtttttagtttcatatgaattttgaaatagttttttctatttctatgaagaatgttgttggtagtttgatagtaatagcattaaatctgtaaattgctttgggcagtatagccattttaatgatattgattcttcctatccatgagcatgagatattttttcatttgtgtcttctctagtttcttttagcagtgttttgtaattctcattgtaaagatctttcacctccctggttcgtgtattcctgggtattttattctttatgtggcaattgttagtgggactgcctttctgatttggc

SEQ ID NO: 746795 - DNA, 576 bp, Homo sapiens
cccgattttccaggtgccgtctgtcaccccttttcttgaccaggaaagggaactccctgaccccttgcgcttcccgagtgaggcaatgcctcgccctgcttcggctggcgcacggtgcgctgcacccactgtcctgcgcccactctctggcactccctagtgagatgaacccggtacctcagatggaaatgcagaaatcacccctcttctgcgtcgttctcgctgggagctgtagaccagagctgttcctatttggccatcttggcttctcccctcttccatatgtttttttcctcccatatctggwgccccaaactgcattaatattcacattaaattgtaattattactctgagatttttcttgttacctcaggttcaatcttacgtttctcagcagaggcactgtcagtatagcatagtgaaaagagtgtggcttttgagctaaatagccccagttttgaatcttaacactcccaggtattcttcttccattaacaggtaactttattctgccaaatcccagtttctttatttgtaacataataataataagtgccccactagccagattgtt

SEQ ID NO: 746796 - DNA, 624 bp, Homo sapiens
gcagcccacttttgcaattactctacattacagtgaactgcggtcctcacgtcttcttttcttcactccccttaacaaaataaaataaataatttcccttcctgcccacccacggttgcccaagaccaagtcttagaggcagccgggttccgatcaagtgctgcgaaacgacgcgtttgacagctgctctggagccgaggatcacaataagagaaggcgcgtgaggctccggcagcaaacaccagccaggcaggcagcggtaatcacagtgagcaaagttgaagactataaaagagccaggctaacgtgctgccgagcaggtgtcctggattttattgtagttgcaaatatgctwctggtgataagtatcgaaattattttttaagtgcgctggggaggagggaggtgcgggaattgagcctcctccgtttccagggagcctctgaaagtggggtggggggagatgaggcatgcacgcgaggcaaagacaaacaggaaagtgtctctatcgggaccaacgtgtgcgaccctacctgaaacggcaagcagaattcggtgttttcttccttttgccctgatcttgacgagataggaaacttgggagagagagagagagagagagag

SEQ ID NO: 746797 - DNA, 578 bp, Homo sapiens
tatcgtgattgttcacctgagaaatcaaattaagaatttgattatgctcaagtatctcattctaaaatgaacttcattacctacagtaaaaatgtagaactaccgttcattgagaaaatgaagtaacaataaaattatagagacaactgtaagtcaaattaggtgagatatcccccatttgcattcatgaaataaattattgaatagctttggtgatcttttttctatcacatagataaatcccgctgaaaggtgacatcttttgtggtggcttcttcccttgcttactttaatgaagcaaaaagctcagaaaatatttgagaatttttttcaaaytgatggctgtgcctcttttatcatgcttatttgaataacaaaaatattaatgaattctttttcagtacaggcaatttcccccccccttttttttttttggcaggagaattgagccttctcagacaaatttgatttttgctattcatgatacttgtttagtcgttctactagtatgtaggcatcagcagtaatacaatttgtgcagaatggaaaatatgcctagagtgctaggcatgcagaaa

SEQ ID NO: 746798 - DNA, 578 bp, Homo sapiens
tatcgtgattgttcacctgagaaatcaaattaagaatttgattatgctcaagtatctcattctaaaatgaacttcattacctacagtaaaaatgtagaactaccgttcattgagaaaatgaagtaacaataaaattatagagacaactgtaagtcaaattaggtgagatatcccccatttgcattcatgaaataaattattgaatagctttggtgatcttttttctatcacatagataaatcccgctgaaaggtgacatcttttgtggtggcttcttcccttgcttactttaatgaagcaaaaagctcagaaaatatttgagaatttttttcaaactgatggctgtgcctcttttatcatgcttatttgaataacaaaaatattaatgaattctttttcagtacaggcaatttcccccccycttttttttttttggcaggagaattgagccttctcagacaaatttgatttttgctattcatgatacttgtttagtcgttctactagtatgtaggcatcagcagtaatacaatttgtgcagaatggaaaatatgcctagagtgctaggcatgcagaaa

SEQ ID NO: 746799 - DNA, 578 bp, Homo sapiens
tatcgtgattgttcacctgagaaatcaaattaagaatttgattatgctcaagtatctcattctaaaatgaacttcattacctacagtaaaaatgtagaactaccgttcattgagaaaatgaagtaacaataaaattatagagacaactgtaagtcaaattaggtgagatatcccccatttgcattcatgaaataaattattgaatagctttggtgatcttttttctatcacatagataaatcccgctgaaaggtgacatcttttgtggtggcttcttcccttgcttactttaatgaagcaaaaagctcagaaaatatttgagaatttttttcaaactgatggctgtgcctcttttatcatgcttatttgaataacaaaaatattaatgaattctttttcagtacaggcaatttccccccccyttttttttttttggcaggagaattgagccttctcagacaaatttgatttttgctattcatgatacttgtttagtcgttctactagtatgtaggcatcagcagtaatacaatttgtgcagaatggaaaatatgcctagagtgctaggcatgcagaaa

SEQ ID NO: 746800 - DNA, 622 bp, Homo sapiens
agaaatataggtgtctattaatattactgctacataagcctctaagtgttagtttttctttctcaaatgaggtatttctataattacaagtagtaaccaataaatgcacagttgatccaataagtatacacatctttcaaattttgataaataattatctaaacttaataagtaaacatatctcttaatgagttgggttgggatgattaatcattcttggatttaaaaaggcttctcctgttaccagtatttcaaatgttctatttgtttgctgctccagaggttatatgcctcaggacaatgcatctgagttgaaagattctgggcatgtgtgagaggaaccttttgaagtgtgattgtgtaagaaataggaaagraaatccaccacgatgccatcatcccaaccataatctcaggcatatcagttttagaaaagagtacatttggatattgtccatctggaaaatgattctttaaaaactctcagtgtctaccttctcatccttccttcctgagtttgaaaacaactggtccagggtggtgattatcaatcctaactacttttaaagtgtacttttaaaatatacccatactcctgagatgagaatctgaggaagggcat

SEQ ID NO: 746801 - DNA, 500 bp, Homo sapiens
gttagcagaaagcacagaagccatagggcaagatagcaatttctcttccattgcatggtagtgtagctcaaagcataatattattatagacttcatgtccgcagaacacatatgagtacaatgaacactcaggtacttctggaagtatctgtacacactcactggtttggaaggaaaaagcaagtttaattcatcagaaaaaaagtcatgwggctcttgcagcctcaatcctttcctgatgttaaaaatcatctggttaaaaatgtttctctccatgtccttcagatgaggcactgtttcagacccctgtcaacttgtattaagcagtgccatccagctttgtgttttcctacctgttaagctgggctatgccccctaccctattgtgtgtaaatgattttcatctgttcacaatacatagaatttatataatttgagtgtctctggccatggagaaggccctaggccatgcctttcaaattgacatatccttccttgac

SEQ ID NO: 746802 - DNA, 600 bp, Homo sapiens
ttattctctgcatccaacttcatagtgacttcttattttttttgtctgtgtcaaatcttttctgtgtctctcttgaggacacttgtaataaggattagggcctatctgtaggagaatctccccaggtcaaggtccttaatttaattagatcttcaaagactctttcttttctttcttttcttttttttttttattatcctttaagttctagggtacatgtgcacaatgagcaggtttgttacatatgttacatatgttacatatgttacatgtgccatgttggtgtgttgcacccattaactcgtcatttacattaggtacatctcctaatgctatcccacccccctccccccaccccaygacaggccctggtgtgtgatgttccccttcctgtgtccaagtgttctcattgttcaattcccacctatgagtgagaacatgcggtgtttggttttttgtccttgccatagtttgctgagaatgatggtttccagcttcatccgtgtccctacaaaggacatgaactcatccttttttatggctgcatggtattccatggtgtatatgtgccacattttcttaatccagtctatcattgat

SEQ ID NO: 746803 - DNA, 670 bp, Homo sapiens
atatttagataaattagctattagtttataaaacctcttcatggtaataaatttctagactcagaaactgatatcatggtctataattttgaaactgattggattggtattggaaaaggaatttattgctttgaagagttaaaggatcgatacacttggaataatgtgtcgggtaaccatgccaacacaacttacatacaaagctggagggtaaaatggttttaacataattgacagaaagataattaagtcaagttgtgacaagatataagtcaagatgattcatttgaagccctctggtatttctttggctgaaaaagaaattaggctagcagagtaaacatgacatctaataggtaattctctaaacaatgtttcccagagtatttccgtaagaggaaattttttcatgtytccccttttgcatttgggcttatcctatccaatttcttctcaaggactgtaagaaactcatttatttcacattcaagagttcaaaatgagtaaatatgcagggaagtcatggcaatcagattcaaacatgataaaactgtgataattgtttaacttttcttgggtgggccttcttccttctcagtacctctctcctttctgactcttcttgcttttaacatggcctttcattaatatcaaccactcctagcaaaaa

SEQ ID NO: 746804 - DNA, 579 bp, Homo sapiens
tttcaatttctactcccaatatatagctgaaatttgcagactgctaaaggatcctagataaatcccatctgtccaaaatgaggatgacaaggaagaacatcaataaatattaattattgattctaagtgctaaaaaatgataaatatataagacagttctaatggaaagaaaaataaatgtaaaataataaactatttgtgacagaaaacaatatgtagtctctcaatacaaatgataaatatataagacagttctaatggaaagaaaaataaatgcaaaataataaactatttgtgacagaaaacaatatgtagtccctcaatacaaaagttaatattacaaargtagaatttaaagacatatttaagctgggcatggtggctcacacctgtagtcccagcactttgggaggccgaggtgggaggatgacctgaggtccagagttcgagaccagcctggccaacgtggtgaaaccccatatctactaaaaatacaaaaattagttgggcgtgttgtacacacctgtagtcccagctactcgggaggctgaggcaggagaatcacttgaacctgggagg

SEQ ID NO: 746805 - DNA, 534 bp, Homo sapiens
taagcactgtgttaagtgcttgactacatgtcctgtgtaatcctcactacatccctgagtcatgccatccttgccccattctacaggtgagagattaagtatcctccccaagagcacagcaggcagagtcagggttcaccctcaggtctggatgtggagcccccaccaagcagcagctggctctctgccctgaagagggatcagttcaagacagaagacagacacagggcagcctcaaggagtcagcccctgaccccgagccccacacacctcccctgcctctcttggacatgtttgcttttcttctagtttccgacaaggaaactgtttgagcaggtccagcctcagcctagaggagagaaacakgctggggtgggagagggaagcagtacaaaaggaagctgtcagtgtctcccacttcggtgctcaatccctccgtaagtgctgagggccactgtgtgccagccccgatacacccactgtcacttttaatcatccccacacaacaatcccatgaggttacaggggagtatc

SEQ ID NO: 746806 - DNA, 615 bp, Homo sapiens
tcggagggagcagtgactgggccatgccttctatttttcaagataaacaactaagtctcataagtttgtaagagtagaatcaaacattgtttatctctgtaccttgtcctttttcttttcccaccgtctagcctcagcacctagtgcagaacctgatataatatggtggaattcaatttttttggatgagaagactttacactcacacatagmaatgtgataacgtattaacaacatttattgagattatgtgaaaccgctctaaacacgtttcccatattaacttatctaatcctcacatcaaccctttgggaaaggtattattattaccccttgacaataattggtgaaaaattggggcacagataggctaaatgactcacagctactaagtggcgaagacaggaattgaacccagttccactccagcaccagagcctgagcccttaaccacaacactgtattgtcgatattataatgggcttctgtttaactaaaaaaggtctaggtcagaaaaatatggaataggctcatattttaccttgaacttaggttccaaacttggatgaaaggtatgaattcttagcaataactaaagataattggagaattcta

SEQ ID NO: 746807 - DNA, 673 bp, Homo sapiens
tgactccttggttaggtatattcctaagtattatatatttttttgcagctgttggaaaaggagttgagatcttgatttgattctctgcttggtcgttgttggtgtatagaagagctactgatttgtgtacattaatcttttatctttgctgaattcttttatcagttcttggagctttctggaggagtctttagggttttcaaggtaagcaatcatatcagcatcaaacagtgacagtttaaattcctctttactgatttggatgccytttgtttctttctcttctctgattgctctggctaggacttccagtgctgtgttaaagaggagtggtgagagtgaacatccttgtcttattccagttcttagagggaatactttcaatttttccccaatcagtattatgttgtgggtctgtgggtttgtcagggatggcttttattgtattgagatatgtcccttgtatgccaattttgctgatagttttaatcataaagggatgctggattttgtagaatgctttttctgctgcatctattgagatgatcatgtgatttttgtttttaattctgtcagtgtggtgtatcacatttattgacttgcatttgttaaaccattcctggatccctggtatgaaactcacttgatcatggtggattatctttttgatatg

SEQ ID NO: 746808 - DNA, 524 bp, Homo sapiens
tagaattctgctgtgaatccatctggtcctagactttttttttgttggctatttttaaattactatttgaatctcactgcttgttattggtctgttcagggtgtctaattttccctgatttgagctaggagggttctatttttccaggaagttatccatctcttctaagttttctagtttrtgtacacaaaggtgttcatagtagccttgattggtctttcgtattgcagtggtgtcagttgtaatatctcctgttacttttcttaatgaggttatttggattttctctcttcctttcttggttaatattgctaatggtctatcaattttatttctattttgaaagaaccagcttttcgtttcattcatcttttgtattttgtttgtttgtttcaatttcatttaattctgctttattcttggttatttcctttcttctgctgggtttgggtttggtttgctcttgtctctctcattccttgaggtgtgaatttagaatgtccatttgtactctttcagtcttt

SEQ ID NO: 746809 - DNA, 465 bp, Homo sapiens
tgatataaagtttcatggttaggcaaaatcagagactatgtttgagactatgtaacaagggtagatttaattgagaagtgtcaagtctggagaggaatttcaacttgatgtggtggataatggagaatcaatctgtttctgagcagggcagcagtgtgatgaaattgcactttagaaaagcaaatcagctaacgatatgtaggatacaacaggaagaagagagaacaggggcacaagaacaggtagaaaactcaaataaacgaagcatgagtgaggtctttgrgaacaatttttgggcctgaggcacttctgaacaaatgcagcagacatcacttttaaaataacttagaattttgagttttgtgattttttaaaatctggaagtgacttgtagatatcatgtcacatttggaggcatttaatgaataattttaattttgatatcagttttccatttttgtgcca

SEQ ID NO: 746810 - DNA, 584 bp, Homo sapiens
ttgggaaatgcctgaagtgagactctgtaatctgacaatgtaaaccatattctttcttgcaaaaaaaatctagttgctctttttttttaaaccaatcaactttttatatattcttgactaatccatatacttacacatgtcatggttgattagcctattaaattgagtcatggaattactctcccaggatacttcagaagggtaattcatccctttacacattgggcatgtctgacggaagttacattggtaacagaaaaattacaattgatttatagtatatgaaccataactaatgattaaccaccaatcttggattagtaggctttttgttgtrgctatcaatagactcaagggaactgttagtttattttaccatttctcccaaagacttttaactcagagatttttaactgaagttgaaagtccttggggtacagaaagagtgaaaaaatttcaaagatcattttgccaagaacaattgatgttattttactgtgcaaatgaagaccaaagctatcaactaaataaccaaccactagaaatttcatcacagatatatatttttttcacttgtatattgt

SEQ ID NO: 746811 - DNA, 546 bp, Homo sapiens
tttgtctttttattatttagctataaatattctttatatactctggagacaagacagtcacatgtatgatttgcaatagtagtattttgtgttttttctctttcatcactttcaatgcagttattttcagcgcaaaaattttaaaattagatttagttcaatttatctatyttcctttgttgcttaggattttcttgtcatagctaagaaaatcttgtgtaagctttcatcacgacttactatgaattcgttcttaaaagttttagaattttggctcttacatttaggtctatgatacattttcagtaatttttatgtatgatataaaataagcagtcaacatcacatttttgcttatagatatccagttatcccagcaccatttgctgaggagacaattttttcccaattggattgatttgtcaccctcattgaaaatcaatgaatgttaaatgtaaggatttacttctggattctcaattctattccattgaaatgtatgtttattcttacaccagtgctaaatgggctgaattagtgtaggtt

SEQ ID NO: 746812 - DNA, 640 bp, Homo sapiens
ttctccctgccatgactctttgtctacctccaatttgtgccacaacgtatagccagagtggttttcttagaatggaatttaatcaaataattctcctattaaaaatctcatttttttaattctcaaggaaatatataaagcctccaattgaatacaactcttttctgatctttgtatagatagcattctgaatatctgaactctccaagttttgagacccacactgagaaaatatgcatgcagaattccttttaagcattttcatttttctttttgctggatatgccatatgttaaataaggaacgtatctagacatctaatgccrtgctgcaatactggcacgtcagctagaggaaagaatgggagggaagaggtgcatggtgagccctgactgttcagtcaacaagtgctaattgagcacctgttctttgctatgtgctatgctaggcactagaagtacagagcagaaaagacacagctcttgctgcctgctaaatgagaacattatccgaacacttgttaaagatggtaaggcagactttattcaagagagctatggtgatagggtcaccaccatggggtcttgcagtggagagattggacagttccaactccaacaaggataagtgggaatttata

SEQ ID NO: 746813 - DNA, 581 bp, Homo sapiens
tccacctggcaattatccaagttaggattccgtcctcccacaaacactgggagacagaggctccattcttcctgaggcgcattcttgtctttgagaaagacactcctgagttatgggagacatatatacatcttacagagaagaggaaggattctcagttgtaaccccttttaagaaaatactttaagaaaagcagacattttcatggggagggggagggagcatccaggagacagggccttatgctgctaggagccatgctagagttgggttgtctcctggtgcaaacgtttggatggagtcattacatgctgagagttctgcagtcctcrcttcttaataaagcaaaacaaaagaaaaccatccctaactcttaatacctctccaggaatcacactttttgcagtccattgttctagtcaaacatcttggaacagctggttctgctagctgctccttcttcacctcttattttatcttcagcacattcctgtcagggtttccaacccacctcttcacttcaccattctcattatcactgtttaccttgacaaatttagcaacaacgtcttttttttttc

SEQ ID NO: 746814 - DNA, 584 bp, Homo sapiens
tttcaaaaaaccaactttttgtttcattgatcttttgtattgttttcttcattttaatttcatttatttctgctctgatctttattatttattttattctctctaattctgggtttaatttgctctcactttcctagttccttaagatgcattgttagaatcagcaagaaaacaaagaatctcatcaaaaagtgggctaaggacatgaattctcaaaagaaaatatacaaatggccaataaacatatgaaaaaatgctcaacatcactaatgatcagggaaatgcaaaacaaaaccacaatttgataccaccttactgctgcaagaatggccataatcaaaaaatcaaaaaataatagatattgacatggatgtggtgatcaggraaaacgtttacaccgctggtgggaatgtaaactagtacagccactatggaaaacagtgtagagattccttaaacaactaaaagtagaactaccatttgatccagcaatccactactgggtgaggtagaagaagtcattatatgaaaaagatacttgtgcacgcatgtttatagtagcacaattcacaactgcaaaaata

SEQ ID NO: 746815 - DNA, 616 bp, Homo sapiens
caagtgtctacagtaggagcaacagcttccttattagatgcttttttttttaattagatggattttatttgcaagttttttttgttttccttccagacctttgagccatatggaggatgtcattaatggcaactcagtaatgaggatgtttgctctctctcactcagaaccagaaaaccttcctgtgtggcttgaggagacagatttccagctgatccctcaatatcaagtgaaaacttgcatggtgaatgttcggtgtacatgttaagctttactgagattkactaggtaaattgaagtaggcagtttggtgcaacaaccacttatggtacagagtgttcttcactaaatgcatcataattttattgtgaaagactcttagaggaggtaatgttctttctcaaagaagaaagcatttgctactgctgggaagaactagatatgcaaaactacagggaatgcattttaaaatactcctgctggaggagccccatattcaaatgttagttacagtagctcttatataatttattgcatgatttcccagcatttgtaaaaccaaatattttttatatattcataacatatggtaggggccagtttatttcagcacttg

SEQ ID NO: 746816 - DNA, 593 bp, Homo sapiens
gaattttgaaaaagagagaattattcatgacataccttgtatgtcctttaatactaaatttcattcatatgcacattatttcaaataactgaactggaacaaaactagatggtagtcttatttttatattgagtcacttctaataacactttatttaaaaattgaaaattascattcctgatattttaataaggcatgcctctatagcttgttgttaagaataagtaagatctttcatcagatttccatttgctcatcatataaatccaacataaaaatggggggagaagttaaagaatagcttatgagatttcagagtgttataaaagctaccaagttagaaagcttagaaagtataacagtcctaggagtttggctacatgttaatttaccttggttcaaaaggggaaatgctattcttttcttcaatagaatcagtttcttattgttcagaattgtgattattaatattagagtgtacctcttagttgacatttcggcccactgtatccaggacagcacctccaatccaatgaggtgacaattttatgttgcatcctatagacaggattggatatcttctgagatctaga

SEQ ID NO: 746817 - DNA, 540 bp, Homo sapiens
cttggggttgtttctcctctggaaatgcttccattctaaaaagttctggcatagggaattggcctaaggaaaaactctgccctccttccccttaatggactgtcctgcctttgagtgtgagtaaaaggggctgagatcattcatcagccaattttacrgctgcaatctacttagacctgcccccatctaggtcaccaaggatctttgtcagcatttggtacaaagcctatgtgaatgaagatggtcatttctttggtgttgtcccaagaaatgtaacagaaaatgactataaaagaatggattctgatatgggatgctgagtcctgataatctctctaaatgtctttcatctaggacctgcaatcagccattattaagaaaaagagaaaaggattgcaggggacagttccaattaacctgtggcatcccaaatctgtgttttactgaacacctagaactattctccatgggtttggcgtcaaagaggcattaggaaagatggtaactattcctcttacatacaatattaaggcctttgag

SEQ ID NO: 746818 - DNA, 613 bp, Homo sapiens
agaacttaattgcattgttgaaatttaaaatttcatttttcattctgacagttaactattaaatgcacttcaagctcctagaagcagttctagggccttccaaccttactgttaggaaaatcatttaaataaaatgtttcttggattaatatacttaattccacctctgtatttagcaaaatcttttcttggggcaacaattattaagtcaccacttaaagactatttaatgatgttgaaatgaagtctacacttagtcagccaactcactgggactttttcaaactcccaaccaccacctgggattcatctcaattctctgattctgtgtttcaaatcaaagatactatttgctgtcarcaagtcccctgatttatttaatccttccccaaaatatatcctgaaattctcacaatttaacccctatttgtcatgacagcagctcctctacaatgactaacacactcttcagcattatcaggtgtttgcagagggctcggtgactgcactggtggcctgggagatcaagagcaaccctctgtaatagtgttgttactttatcttctcaacaaatcaccagtaaattttaaaaataacatttataatctccatt

SEQ ID NO: 746819 - DNA, 355 bp, Homo sapiens
aaagagaagtgtccttgttacaaatcctgcaaatggtctggggtttgtcggtgtggtgtctccttccctcttcccccagctggagaacgctgagtagtctctagaaggaagatctgggctggagaacccagtccggcagttcgctcagaaggtgtaaaggtgctcttgctttcctgaartcaatcagaagccatttcttgaggccgtcagtttttgtttggagagtgtttctggtggaggagttgtgaggagaaccccggcattattgctgcaacgggaactagtctggggtgtttaattcaaactatggggctttcatccaagaaaaaaaaaaggaaaaagaaaagagaggaga

SEQ ID NO: 746820 - DNA, 535 bp, Homo sapiens
tttctttatccttgacctttgggagtttgactattaaatgccttgaggtagtcttctttgggttaaatctacttggtgttctataaccttgttgtacttggatattgatatmtttctataggttcgggaagttttctattatccgtttgaataaactttctacctcatctctttctctacctcctctttaaggccaattacagatttgcccttttaaggctattttaaagctattttgaggctattttctatatagatcctgcaggatcttttttctcctctgactgtgtattttcaaatatgttgtcttcaagcccactaattctttcttctgctattaaaggggtttgatacattcctcggtatgccaattgcattttttggctccagaatttctgcttgattctttttttttaattatttcaatgtctttcttcaatttagctgatagaattctgaattcctttggtgttatcttgaatttctttgtgttttctcaacacagctaatttgaattctctgtctgaaaggtcac

SEQ ID NO: 746821 - DNA, 547 bp, Homo sapiens
tttttttcttcagcactttaaatatgccatgctgctctctcctggcttgtaaggtctccactgaaaagtctgctgccagaagtatcggagctccattgtttgttatttgtttcttttcttttgctgcttttaggatcctttctttatccttgacctttgggagtttgactattaaatgccttgaggtagtcttctttgggttaaatctacttggtgttctataaccttgttgtacttggatattgatatatttctataggttcgggaagttttctattatccgtttgaataaactttctacctcatctctttctctacctcctctttaaggccaattacasatttgcccttttaaggctattttaaagctattttgaggctattttctatatagatcctgcaggatcttttttctcctctgactgtgtattttcaaatatgttgtcttcaagcccactaattctttcttctgctattaaaggggtttgatacattcctcggtatgccaattgcattttttggctccagaatttctgcttgattcttt

SEQ ID NO: 746822 - DNA, 520 bp, Homo sapiens
gtggcagtgttgatacctgaagccagcacgtctcagaggctcaccaaggccctcgatgtagtacctggctatcactgctggttatttagggcccaagggctcttcagttagcaggtgataaatgttgccaggactgggtcctttctttcagggcacggggttcccttctggaccagggtgtgtctagaaacactgtcttggggcaagggcctggaatggaggcctcatgagtctgaccagtgccatatcctactgwggcttagctggtatccaagatgtaagacaaagtcttcctcattcttccctctcctctcctcaagtgaaaggagaaggtctcttttgaagctgtgagctgtgcagtctgggactagaggaggggtgatgccagcacttctttggctgccccagctggtgtctcagtatgtcgcatgccccatgagtccaccatctctgagcttagttcgacactaggactcactgctgcctggggtggggcaggggtggcgtcttggcaattcag

SEQ ID NO: 746823 - DNA, 525 bp, Homo sapiens
tgtaggctccaggaaatggagcaactaaaagtggtttccttatgatgtcaaggtcttattattttctttcttttttttttttggaaatgcaacttatgagatcaacccaaaggaaattgtgcatcagtgtccataggggtggttcacagagtggcaggagtctctgagcaacartctaagctgtatatgaatttcttaagaattaatcccattgcacatgtcggtagatgtggcagggacctgacagatgggggaaattgagtatttcctttaggactcaaaagagactcctaagctagagattctcaacctgggatgaagatccaagtcacctgcgaggttttcagtcttcatgccttggtcccattcagctggctgcttctggtacccagctgtgtggagaacaactctcctaagccacttggaatcaaagctcccaagttattgggggaaaagattacccaaggcaaagagccagaatgtgcagtcttaattcagaagatgggaagcagtgggacgcaacag

SEQ ID NO: 746824 - DNA, 602 bp, Homo sapiens
tacttaaggtaattgtttatattatgtaagttatttctattattaagtaaaataatctgtgtgctatagaaaacaccaagattcaggttgaatttccatccaaggggctcatgatatagataaatgaggaatttctctagatccccatggagttggtggcatggtgagtttgtggagtgtttgaacatcaaagtctttttttttccaagtatcgaggatgaattaaataataaaacatgacctggcatgaattacagtatctgaattcatttctctaactagtgtgtttgtgggmccgaggttgaaagcaattaggtgtgaattattacaccatcttccatgccctggacggttttatgatgattataaaattttattattaatggttcactgtttttggaggagttgttaatttaaaagtatatatttatattgttaattaatgaataggacaaaaatagttgggtaaaaatctttccgaagagcagaatctatctaagagtggagaagacctcactgacagcaggggctatggctgaatcctgaccccagagagaggcagcatgctgcagttccaccagggatacccaggctattagagt

SEQ ID NO: 746825 - DNA, 591 bp, Homo sapiens
aatagaatgcatgtctattgaatatttaatatttttgcctttatttaaaacttcaatattttagaagtttttacttagacctaatgacatttggccctcataaaccctcattcaatgggagaactgagagaggggctaagtagcctacctgaatttacatagattattagtgacagaggtaagtaaagctaattagaaactaaaatggctaagcagacatagctaaatcctcggttcctgtttccaaatgtaatttaatttggagatgtgaggacatagaaacccatgaggtttggaatggtaatcctaaattgccagagtgccaagaatcgccagratccagattggggtaccccaacattgggtgtaaatattaatttggatcacagggtagctatctagatattaatttgtcttagtcttctagggctacggcaacaatatttcacagattggctggtttaaacaacagaaatttattttctcacagttctggaggctgaaagtccaagatcagggtgccagaatggttgagttttggtgagggctctcttcctggcttgcagacagccaccttctcactgtgtcctc

SEQ ID NO: 746826 - DNA, 626 bp, Homo sapiens
tcagagcagcggagggcctctttgttagggtcatgggtctgcagatggttccgcagatgatccttgcggtgaaacaccttatcacagtacatacactggtgggtttctgggctgagtgggtggccatgtgcctatacagcttgtatttggaagcaaaagactygccacagtgcagctgacggcagctatatggtctctgctctggttgtgggaggctgtgaggcctcagcttctctccatttgagaaaggtttctccgaaatttgacattggcacttcacttgactctccgcctcccggccccgaggcctgggaactagtttccagcccacttcctcctgatttgcatcttgaatccagcgggggacgctggtgaaaaatgtggtcatggcaaggctaatggcaaagggccatgttattgagaattcctcaccgtccgctccacacaggctctcagctctgtcacagcctccaatgcagctttgagaaaacaatctcttcgccgcactcggggccccaccgctgcgggctgggcggcgctcgggctccgccagtattttcagatttttaatcttttttggttgtcagcattttctagtatttctatacaaatacatattttaaaag

SEQ ID NO: 746827 - DNA, 550 bp, Homo sapiens
gaatagttgagtccaggagttcaagaccagcctgggcaacatggcaaaaccctgtttctacaaaaaatacaaaaattagctgggtgtggtggtatactcctgtagtcccagctactcgggaggctgagatgggaggatcatctgagcccaggaggttggggctgcagtgagccctgagcataccaccttactccagttttggaaacagagtgagacccagtctctaagaaaaaaaaagaatttataattgagatttgaattttatttttatttagttgggctagtgccagcattggtcactttaagccattcagtcaacacattttattaagcaactgctgtgcttagtaaaatactaattttattgaataastactatgtactcactgagctaagtactggatatataatggtgaacaagacagaaatagtataatacctgccagtctagtatgaaggtctctaagtaaacaaataaacaaatacttagaaattgtgagtaagcatcaaaaagaaaacaataaaaaggaggtgagatagagaataaaat

SEQ ID NO: 746828 - DNA, 504 bp, Homo sapiens
tctcttacttgattacacagttttaggtcaagcacgttgtttcagaatgcattcaacacctagcagtaggtgttaaataagtacttgttgactatatggatgtcctatgtgctcagttagcctgagatacaattgctgtatctccctagtmcccagcacagtgctatgcacagggtacatgtggaggattaatttagagggctttgcaggatcacatagaaaagagtttttttttaatctggcattttctcttactttaccatataatcttacctgaatagacttagcatttttctatgaattattcattttggcacgtaccctgtaaaacatctaaagtttctaaccttttgaaaccacaaggcttccccagccagcatttagagtgaaatctctgtggtagcactttaccaatttaccccttagctctttttcagttcttggctcatgtgaataagcaggccaaaatgctcttctgggaatgcacagcatggatatatattt

SEQ ID NO: 746829 - DNA, 511 bp, Homo sapiens
accacattacatttagtaatcaggtttctatcacttcttaggcactttatacaagtcatttcatttagtcctaacgagaaccctgtaaggtaagtactactattgcctcattttatatatgagaaaatcgagggttggagaagttaagtaacttgcctaaaattatgcttagttatattgtgaagctgaaataaaaactcaagttgtctyaccttcaactcctatgcatactcttccactgtaccaccctgagtcttaatactttttttgtttcagcaaagcaaccactctatctgaattactttttaagtttagaccttagggatgctattgtcttaacactagttgacaaaatttaaaatcttttatttactaacgatatatatccattattgagaaaaataagtaagtcatgaaagtcctaagcaaacactttttaactaccaacagaggtaaaaaaattttgtaaataaaaaaatgtaattttatccaattttgctatccattttga

SEQ ID NO: 746830 - DNA, 636 bp, Homo sapiens
caaaggaacactatttataatatacaaagaacacttaaaacacacacacacacacacacacacacacacaaaacccaaaaaccaaacaacgcaattagcaaatgggcaaaagacatgaagagacatctcaccaaaaaggatagacagatggcaaataaaaagatgttcaacataacaggccactagggaaaaacaaattaaaaccacaatgagatatcacaacacacctatcagaatggctaaaataaaaaaaaatagcaacaccaccaaacactgatgagaatgcagaaaaaccgaatcacttgtaagttgttggtggaaatgtaaaatggtacagtgaactggaaaacagattcagagtgtcttaaaaaactaaacatacaactaacaaatgacttagcaattgcactcctgggcattcaggaaaattaaaactgaacacataaacctsttgaaagcagctttattcataattcatattcagctaaaaactggaagtcattcagatgtccttcagtgggtgaacagttaaactgtagtgtacattcataccatggaatactactcaacaataaaaaaacatgcaattgataacacacaacagcaccatgcaacttaaaatctccagagaattat

SEQ ID NO: 746831 - DNA, 585 bp, Homo sapiens
ctttttagcaatctcttctctggatcctttacaagtttctccttttaaaattgactacttaatgttggatttcctccagacttggtcctaggctccttcatcctcacactctaacctctctctcttggagagctcatcaaccttgtggctttagattccacctatgcacagatgaaccctggaatccaacttcgccttggtctccagttctttcactccttcatgctatttgttctgccagactaccaggtctctccttgaatagtctggtcagaggtcccacatccatcataccccacagcctcatacagatgtcttgagatcagaatgkctgggaattccaaaaccagttcacctagcatccagcagttaataaaacctcatgctgctggagaacatcctgtaacagagctcattacatcaacctccctcagggccatggtttgaatgtgtccccaaagttcatgtgttggaacttaatcccaaacctaacagtgttgagaggaaagacttttaataagtgattaggttacgagggctcggtcctcatgaatggaaatgtcattactgagggattggcttcct

SEQ ID NO: 746832 - DNA, 601 bp, Homo sapiens
tgctgattttcccctctgccctcctctttgaggagcaagacattcggagcagacggaattgagggccctgcagacaggtggtcccagctcttcatgctggagttttcaattatgatgccagtcaatgggagagagtggagggcgaaaatgaaaatggaatatttggttagcgctctgacaagccatgaatcaaaaccaggtgaaattgctctggggtctcgcggcctgtcagcctccatcatccattctgcttgctcctcagcagtgtaattctgcacgcagacagtgacgttcacaggaaagcagactccagccccgcatgactgggtcttccgcggccagccctgccaggtacattctcaggccaggacagacaatctgcctccatgggcctgccggcaagaggaggtgaagagggcgggaggaggggccgtcagcagggtgggcaragaggtgtgtctgacccacatcacagcgctgcaatgcctgctcacctctcagggctctctgtgggcgctcatcagttccctgcagagtggctattcattcttacttgagtaaccctggcagaggctgggagctgtgtctgctggggtcaagg

SEQ ID NO: 746833 - DNA, 616 bp, Homo sapiens
ttccattaatttaggccttttgtttcttaaacaatgttttgtagttttcagtgtaaatttcttgcacttctttcatcaaattctttcctaagtatgttattcgtcttggtgctattgtaaatttaattatttttaaattgtatttttagattgttcattgcaagtatatagaatatgattattttttgcatatttatcatctaccctgaaaccttgctgaattcatttattagccataatttttttagtggattccttaraattttctaaatacaagattatgtcatctgccaataaaaatagttttattcttttttcccaacctgggtttattttatttctatttcttatctatttgctctgtccagaactttcagtaaaatgttcagtagaagtggtgaaagagacatctttgtcttattcctgatcatatgggaaaagtattcagcaattcatctttaacataatgttagcagtggattttgtgttgatgctctttatcaagttgggaaagtttccttctattcctagtttagtaagcatttttattataaaaagtgttggagtttgtcaaatgctttttctacatctatgcagggtgatcatatggtttttg

SEQ ID NO: 746834 - DNA, 597 bp, Homo sapiens
gaaaattgtgtttgattctatgctgttgttttcagcggacaaatgatagaatattgttagtgatggtgtgtgtgtatgtaagaagatgttggccagaacatgaagaggcatagtaaccatgctatgagaaatagttaagagaacctggaatagattatscaacatgaagaaaatatgtttatatttaaatttctgtgttatgtaagactgagttgattattaaaatttttctgcagttaacatctttgcacataaatgtttctctatactttagattatttccctaaaatagatatttgtaaattaaattgttgagtgtaaacagccaaaacccatgagctgtattatataatcgctctgcaataaagtagaaccagtttttattcccatcatcagtatttgagtatctcttctgccatatctttacctagtattagtattatctttttaaaaatgaaaactctctaggtttattgtaggacagtatcctttttttttttttgcctttctgtttcttcagtttttgtagttctcatttcaaacatgaatttctagatttttatgaggctacattcgtatttcccttagagaaggatc

SEQ ID NO: 746835 - DNA, 660 bp, Homo sapiens
tagagacttcatctctactaaaaataaaagaaaaaatagccaggtgtggtggtgcatgcttgtagtcccagctactcagcaggctgaggcaggaagatcacttgagcccaggagatagaggctgcagcaagctatgattgtacactgcactctggcctgggtggcagagtgagaccctatcctggaaaaacaaaaggaaaaggagagaaaacttttcaattttatgtggcctgcattacctgatatcaaaaccaggcaaagaatttataagaaaactacaagccagtatccctcatgaatatagacataaaaatgttaaacaaaatattagcaaataaaatctagtatataaaaagagtagaaaatacaycatgaccaaatgagccttactgcaagaatgcaaagttggttcaatatacataagtcaatcaatgcaatttaccatatcaacggactaaagaagaaaaaaggcatatgattatctcaatagatacagaaaaagcattttacaaaaatctatcattcgttcctgataaaactttcagaaaacaaggaatagaaggaaatttcctccacctggtaaaggggatttatgaaaacacctaacatcatacttcataaagaaagatgaaatgctttccccctaagatcagaacaaag

SEQ ID NO: 746836 - DNA, 660 bp, Homo sapiens
tagagacttcatctctactaaaaataaaagaaaaaatagccaggtgtggtggtgcatgcttgtagtcccagctactcagcaggctgaggcaggaagatcacttgagcccaggagatagaggctgcagcaagctatgattgtacactgcactctggcctgggtggcagagtgagaccctatcctggaaaaacaaaaggaaaaggagagaaaacttttcaattttatgtggcctgcattacctgatatcaaaaccaggcaaagaatttataagaaaactacaagccagtatccctcatgaatatagacataaaaatgttaaacaaaatattagcaaataaaatctagtatataaaaagagtagaaaatacaccatgaccaaatgagccttactgcaagaatgcaaagttggttcaatatacataagtcaatcaatgcaatttaccatatcaacrgactaaagaagaaaaaaggcatatgattatctcaatagatacagaaaaagcattttacaaaaatctatcattcgttcctgataaaactttcagaaaacaaggaatagaaggaaatttcctccacctggtaaaggggatttatgaaaacacctaacatcatacttcataaagaaagatgaaatgctttccccctaagatcagaacaaag

SEQ ID NO: 746837 - DNA, 660 bp, Homo sapiens
tagagacttcatctctactaaaaataaaagaaaaaatagccaggtgtggtggtgcatgcttgtagtcccagctactcagcaggctgaggcaggaagatcacttgagcccaggagatagaggctgcagcaagctatgattgtacactgcactctggcctgggtggcagagtgagaccctatcctggaaaaacaaaaggaaaaggagagaaaacttttcaattttatgtggcctgcattacctgatatcaaaaccaggcaaagaatttataagaaaactacaagccagtatccctcatgaatatagacataaaaatgttaaacaaaatattagcaaataaaatctagtatataaaaagagtagaaaatacaccatgaccaaatgagccttactgcaagaatgcaaagttggttcaatatacataagtcaatcaatgcaatttaccatatcaacggactaaagaagaaaaaaggcatatgattatctcaatagatacagaaaaagcattttacaaaaatctrtcattcgttcctgataaaactttcagaaaacaaggaatagaaggaaatttcctccacctggtaaaggggatttatgaaaacacctaacatcatacttcataaagaaagatgaaatgctttccccctaagatcagaacaaag

SEQ ID NO: 746838 - DNA, 613 bp, Homo sapiens
atgagttctattcccctgccctctcttctgggaataacttctaattttcctttggggaccattcctctctgagtagcagtctttgaggtctgggtggggctccaacctggccatcacaatattgtattcccctgggtacaatgactggtttagagatagacacaggaccaaatggagccaatgatgtccactgagctctttcttgggattgcagccaaagataattttgttctttcccacygaccttgaacctgagcagctgtgaactctggagctgccacattaccaacactgaaggcaccaccagcactggggacacagagccaaaagatggcaaggaggaactgggccctgaggacactgtgtgagcccctgtatcagctgtgcctgaagcgaggctgttggtttcttggtcaaaatgaaccaatacatattctcctttgctgaggctagcatggattaggttttctgacatctgcaactgaaggagtcctaactgaactactgtgcaatatagtctcacctttgatagaaaccccaatgcctggaagtccatctctagcaatatgttgacagaaaaacttggctcaggaggaggccagagagggacctc

SEQ ID NO: 746839 - DNA, 553 bp, Homo sapiens
ttttgagacagcttgctctgtcgccctggctgaagtgcagtggtgcgatcttggcccactgcaatccccgcctcctaggctcaagccattcttgtgcctcagcctcccaagtagctggaattacaggcgtgtgccaccacgcctggctaatttttttttttttttttttttgtatttttagtggagaaggggtttcaccatgttggccaggctggtcttgaactcctgacctcaagtgatctacctgcctcggcctcccaaagtgttgggattacaggcatgagccactgtgcccagccacatgacaccttttttwaaaaaaaaaaaaaaacaaaaaacacagatctgattgtaatgccctcttggggaaaactctccagtggttccccattgctctggggatgcagcccagacttctcataaggatggttgataggaccctgtgagatcagggctgcctgcctttcccttcggatctccctctgcactgaactctatgccctgagccttgaagccttgcttagcccctccggatcacctagaatcttcccac

SEQ ID NO: 746840 - DNA, 634 bp, Homo sapiens
aatagctggtcagtaaatttatgctgcgtatttgaaagttattgtgtcttggaattgactgcaatagtaaataagaccctgattcccttgggctgatcatatattggcctagataaaacagatggtctcgtcaagaaaaatgtgagatgctgtctaatttwaaaaatttattttactttatagccacaaaaattcaaaatatttaaagtttagttacttatattttctcatttgaaacatataaaaactctgaaaagactcccttctggtttttctatctcttaatatttgtaagactgacctttcctactatagtataattaagagccaaattgcatgataatattcgtcttagtttatggatacagaaactaaagctcaaagagtttaaatcactttgttttttaaaggaaatatgtttggaaattaggtataaacatattttgaacagtggaggtaacagtatttttatatttattatttcccttaatggttgtaacaaggatacagaagagtgttcagtcacttgtagactgtagcctcttgtttgtcaaagagtgcttgttagtctttatctgactagacctctttccatatttgatactggtgacccctcctctcttccttggcttcc

SEQ ID NO: 746841 - DNA, 613 bp, Homo sapiens
tccccacgttgcccaggctagtctcaaactcctgggctcatgtgaccctcctgcctcggcctcccaaagtgctaggattacaggtgtgagccactgcacccagcctcttaatattctttaatgtggaacaattcctcagtcttttaaaatgaccattctgacattggccttttcgaatgatacaggttggttatttccatagcatcttcctccatctgaatttatctgatgtccttgtgattagatttaggttgtatatccccaacaacacttcctcctttttcctgctttagagtttttcttaacaggctgattattcagttattctccaatggattgcaaacctgattgcacattagaaycactctggcagattttcacacaataggtgctgaggtcctacctcagtaaatcctgatataggtctgaggtggaatcttagaatatgtatctttcaaaagcttcccaggtgattccgatatatgtataaccaatggtaagcaccacaagcttcccctctcaatcagcatgtcctggcttctcttttgatctcattttgctttcccattgccattctctctccccactgtatcaactttcatctagggtagaa

SEQ ID NO: 746842 - DNA, 614 bp, Homo sapiens
aaattttgctcttggaaagtctgccacctatcaaaggtttaagacacttgatatcacaaaataggattataggtgactataaaatagtcattcatttagcaaaatgctaaaacaagaatattcatactttaatagagaagatgacttaatttccaaaacaataagacctaataaagacaatatgaagccaactaaatctgtcttttgccctcccttttttcattcttctgtagttttattcaaaaggtaaacacaatattttattatctctcacctgaaaattttgttccaaagacaaaatcaaatttttgctttgtatggtgtattactaatgttaaatgttaataaaaccttataagcaaatctgtctaatgttaatcagtttgaccataaggtaaratttccataatctttctataccctattaaatagcatatcaatgatccaagaaaaccctgttattccaacagacaggcccagatgctggccttgcattagtgtgcttttgatattaatgtttaatttatataaaaattctgaataaatcttatccctcagagtttgcccttacaatctcatgtgcccacctcttccacaataatccctgggcctag

SEQ ID NO: 746843 - DNA, 586 bp, Homo sapiens
ctgtaacttcccctccatcttctgaaggttcacagaaaaattaactcataaagagcagataaattggagaaaagacatacaaattcattcacatgaccatgagggcaaatcacagaatggttatctatccctcaactgggttcagaagcctaaatagtatcttgaggttacagaaagaatgggggcttggatcctggcaaaacacattatgggaggggggraaagaggaattctgttgaggggcagtaaatctttctgaggaaaatgaatggattagagaacagaggttcacttgtaaattagttctctttggaatttttatgaacctgagagacagacattatcttgtgaaagggtctgctgaggtgtggttacattcatggtcatcctttctgcaatagataatgagatagaaaggaaggcaagaaaaaaaaaaactattgttctccttggcgtgtccttctggtctttatgtagataggggaaaagtctcttacagtgtgtattgatctctaagagcctttaattcaaaatactcattataccaagtgatcatattttggagtaaagttccttgtgctccttt

SEQ ID NO: 746844 - DNA, 596 bp, Homo sapiens
ttgtctgcaaacagagacaatttgactttctcttttcctatttgaataccctttatttctttctcttgcctgattgccctggccagaacttccaatactatgttgactatgagtggtgagagcgggcatccttgtattgtaccagttttcaaagccattgcttccagcttttccccattcaatatgatattggctgtgtgtttttcataaatagctcttattattttgagatatgttccatcaatacttggtttattgagagtttttaacatgaagggatgttgaattttatyaaaggtctcttctgcatctattgagataatcatgtcgtttttttctttggttctgtttatatgatggattatgttcattgatttgtgtatgttgaaccaggcttgcatcccagggatgaagccaacttgattgtggtggataagttttttgatttgctgctggatttggtttgccattattttattaaggcttttcacatcgattttcttacggaacattggcgtgaagttttcttttttttgttgtgtctctaccaggttttggtatcaggatgatgctagcttcataaaatgagttaggga

SEQ ID NO: 746845 - DNA, 642 bp, Homo sapiens
cactgttgttaccaccacggagtacaggctgccggacttgagagagtggaagctgtatctgctggtctcactggagatgctttcatttttaatgaccacattttcatggatcagtaagacttggtaaaattctacgtctccttgtgcctgggtccagttagtaaacagactactggtcattccttggttggccacatgcaagtcagtcacttgggcaggcactaaaacagtagacagaagaaaaaacaaatgacacttagtcaccttaagaaagtgtaagaaaaatgagtcaaaaaatggagacagacttgaaagtactaaaaataatttttgtgttgttgctatagactctcagttctatttcctgtggcatatggagaactactcctctagagaggctctagtactttgaaaaagctgcttatatagggaatcaaaattatttaasatccaaagatgagatgatgcatgcttattaagtggttttgattttaaattttagataatgaaggctgctatttttgaaaactgcttagttaatgtgattttatctgtccttaccccatgagaattcaaagctatctaatctacctgagccaatgattgttatggggtggtattgggaattcccttcagtctgtt

SEQ ID NO: 746846 - DNA, 583 bp, Homo sapiens
taaagttgactttattattccatttattaacaaggaaaccaaggatcataaaatgtaagtaatttagcctatatcacagtgctaacaaatagccaacctggaactgaaagctagatttatctaacccctaagcctgtgtccttttcctaattaacaacatttatttcttccaacttatcatttaacaaatcttatacacagatcttgaagttggcacttggtcaacatacattcttctttgtgcctctttcctgaattacaataatcaaagggactggaaccttggcacccctctttytcaaagttcattgacttctggattaagatacaaaagcgttcattaaaaaaatcctactgtatatggatcagattcaattctaaagattcaattataattctaaattttatatgaaaggcaaacagctacagtggccaaagcaattttgaaaaagatgaataaagttagaggactaacaccacctgatttcactaaaaatcttgtaatcaagacaggataatactggcaaagggcagacagaaacatagattgatagaacagaattgagagcccagagatagaaga

SEQ ID NO: 746847 - DNA, 338 bp, Homo sapiens
agcaggaatagtaacatattaatgtctggtaactttgtcaagctaaaaaatcataattataggactggacaccgtcgttcaagcctgtgattccatcactttgggagcccaagacaagaggatcacttgagtccaggagaccagcctgggcaacatagtgaggccttgtctctacaagaaaaaaaaaatttraaaattgtccaggtgtggtggtgcctgtggtcccagctacaccagaggctgaggtgggagaattgcttgatcccaggaagttgaggctgcactgagctgtgatcatgccactgcacaacagcctaagcaattaaggagacgttttc

SEQ ID NO: 746848 - DNA, 560 bp, Homo sapiens
ctagaacagtcacaaaaagaattggttatagctattttaataaataatatcctcaccccaagaacaaacgttcagttatgctgagatgttctaatagctgtgtgcgtagataagcacctccatcaagaaaggaacacatgaaattgtggctttaagagtttgtggcagagttggacagcattccatctgcaggttagtaggaaagcctgtaccagcctttgtggaatgtcctagtctgccacactgacaagagkgtgcaccagtgctctactggaagagtatttctggttttctatgcaggactattgggcttataaattcctcaagaacaaggaccaagtctttaatctcgtctcgactcctaccttgtggaaattagtgcacagctcatagacattctacacacacttcttgaaattgctcctggcctgatattttggatgttaggtagtcagtgtccaataatactgttgtccgtgcaggttaatctagccattccttcatttgtgtgaagcataaataatgtaagtaaatacagcaactgaactttttatgttcta

SEQ ID NO: 746849 - DNA, 623 bp, Homo sapiens
tggaggattgcccatagaaaggtagatgtctagcttctcttgaaaaactggaagatttggtaatattgggccctcattggcaaaaatcaacagaactgagtgggggctgcccctggaatagggcacttgtctccagtttgccactgtccccmtccagccaggttcactagtttatgtctggcccctatgtgcatgaaacatgctgtttctactgaaaactgatgtactgaaaccaattgctcgaatatcctcaagttactgcatgcttgtagaaaccaccgccaaatggggaatttagatggtacaaggcacaatgaagagacagaacctatttcaagccctcgagaaccatgtttcttcagttctaagctgctgttaaaagaaaaacttcagccaaatcaaatttaaaggagttcagttgagcaaagaacgatttatcaattgggcagcctccggagccagagtaggctcagactccagtgcatccatgtggtggaagatgatttatggacagaaaagggaaagtgatatacagaaaatggaagcaaggcacagaaatagccatattggttacagctctgcatttcccttatttaaacacagtttgaactcttggtcacctt

SEQ ID NO: 746850 - DNA, 623 bp, Homo sapiens
tggaggattgcccatagaaaggtagatgtctagcttctcttgaaaaactggaagatttggtaatattgggccctcattggcaaaaatcaacagaactgagtgggggctgcccctggaatagggcacttgtctccagtttgccactgtccccctccagccaggttcactagtttatgtctggcccctatgtgcatgaaacatgctgtttctactgaaaactgatgtactgaaaccaattgctcgaatatcctcaagttactgcatgcttgtagaaaccaycgccaaatggggaatttagatggtacaaggcacaatgaagagacagaacctatttcaagccctcgagaaccatgtttcttcagttctaagctgctgttaaaagaaaaacttcagccaaatcaaatttaaaggagttcagttgagcaaagaacgatttatcaattgggcagcctccggagccagagtaggctcagactccagtgcatccatgtggtggaagatgatttatggacagaaaagggaaagtgatatacagaaaatggaagcaaggcacagaaatagccatattggttacagctctgcatttcccttatttaaacacagtttgaactcttggtcacctt

SEQ ID NO: 746851 - DNA, 623 bp, Homo sapiens
tggaggattgcccatagaaaggtagatgtctagcttctcttgaaaaactggaagatttggtaatattgggccctcattggcaaaaatcaacagaactgagtgggggctgcccctggaatagggcacttgtctccagtttgccactgtccccctccagccaggttcactagtttatgtctggcccctatgtgcatgaaacatgctgtttctactgaaaactgatgtactgaaaccaattgctcgaatatcctcaagttactgcatgcttgtagaaaccaccgycaaatggggaatttagatggtacaaggcacaatgaagagacagaacctatttcaagccctcgagaaccatgtttcttcagttctaagctgctgttaaaagaaaaacttcagccaaatcaaatttaaaggagttcagttgagcaaagaacgatttatcaattgggcagcctccggagccagagtaggctcagactccagtgcatccatgtggtggaagatgatttatggacagaaaagggaaagtgatatacagaaaatggaagcaaggcacagaaatagccatattggttacagctctgcatttcccttatttaaacacagtttgaactcttggtcacctt

SEQ ID NO: 746852 - DNA, 633 bp, Homo sapiens
tataaaatactcccttaaaatgattcatgataatggtactttctggtaagagaaagcaagaatgaaaaaacttcaaaatgtaaaggaacagttatttaggaatgaaattagagggtgtcagccagggcaactgcaaacttcagtctttatgaccacatttttaaaaaattggacattcagaatggatatttgagtttttcatctatttccttccctctcttttaagcagatgatggtcaagaaaaactggaaaaaaaaaaaaactggctcctaaactgattatatgttttttttttttaaacccamccaacaaacaaagagactaaataatttatgaaagatttaggaccccactgcaatgcccattcctatagtacagattttagaaaagaagatggttgaattagttcaccgtggaatctgatgacttagtaacagctgtactcctgagggtaaagaattaaaaggcctttacaaaaaagagggactctgtatttaaaaagaatggaaccggaggtggaaaaagcaactatcttgtgacattcattaaacaaagaaccagcatataccttaagtcaaagccctcttcccaatcctatctccgaactgaaacctagtcaatgtcaaagttac

SEQ ID NO: 746853 - DNA, 615 bp, Homo sapiens
tgaggcccccttcccccaagtaaaagggtaggattcaggccctacatctcccaggtccctagcagggactcaagatgcagtaggccccagccccaggagggtccctacatcttccaggcccctaggagggtcctcaagatgcagttggccccagctaagaggatgtgagaggagcttcccctgggacatgggggagggctggccatcagaatagcacagcatcacctgtcacagsctcagcacctttgctgcggagtggacctttggcctcacaacaaagtcgcacaaagataccgtgaagaagcccttataggtctgtaggctctgcccttggccataggctgcaatgataaaaatgtctgtttcttgcctcctagaatgattaaacttttggaaaggcctgagcccagtgacaaccaagggaatagtccaactcaggtagtgacagagtcctaccaagtggttcagcaacctgaaaatgaaatttatcctcatgcatgtgaatcaaatacttatgagctagaagtgtcttggagatcatcaaagcctaaccctaattctgaccttaacctttcatgatagagatatgaaaattaaagaaggaaagtaaggtgt

SEQ ID NO: 746854 - DNA, 565 bp, Homo sapiens
catctccagggtccattaacaatgccagtggtgcatccagaggcatagagggacagcatggcctggatggccacgtacatggacagggtgttgaaggtctcaaacatgatctgggtcatcttctctctgttggccttggggttcacaagggcctcygtcagcagcaccaggtgctcctccggggccacacgcaactcattgtagaaggtgtggtgccaaatcttcttcatgtcatcccagttgatgatgatgccacgctcaatggggtcagagtcccaatcttcagggtcaggatgccatgcttgctctgggcctcatcacccacgtaggagtccttctgacccatgcccaccatcgtgccctggtgccaggggcgcctaaggatggaggggaacacggctcagggggcgtcgtccccagcaaatccagctttgtacatgccggagacactgtcaatgaccagcatggcaatctcttcttccattgtgacaggcggaggagcagggcggcagagcagtaggaggacatggtgcacgggctggcggcagcgactgtgtgatactca

SEQ ID NO: 746855 - DNA, 608 bp, Homo sapiens
gttgaaagttagtccaactgtcttattttatagctgaagaccctgaagcacagaggagtgaactcattagctcaaggtcttactggcaagaaagtggcagagccagaaatttaaacttgggtcttcagactcttcagcttagcattccttccactacattgtgtcatctctttatgggggctactctaagttacattaacttaagtgtttgtgtttgatgctcccatgggatcctaggtatgacctgtttcgtttatacattcataaagtcagagacaggctagagtttcctcatagtcatttataaataaaatatttgcagaaaatggcttaagctttctgaagaccacagccccagagacttcctctcttcatcagctctgggtgtggatttcttaargagctgctgatttaataattcataagggccaattagctatcaaaagaaaaaaaagttcaaaattaaatttgctagtctcagagaaatgtgtctcctggaggccaagtcagatatctaggcagaaattctcttaaaatgcttttagtctatttcttggtaatcacagcctagagtgctttcagggctacctagtgctcattgaattctc

SEQ ID NO: 746856 - DNA, 602 bp, Homo sapiens
tttcaaaagcaaatattgcttttgtttgcatccgttaactatatcctcatgatgttattgctgctcccagatctgcatccccaattctttccaaaaagttaggccagataaagcctaaagacactttcatcatggcacatctctaactcgcataaccagaatagctcctgctgcctagagcctaaaagccaatctatagcttattgtcaaggcatctgcaaagaaaaccaaatgtatggtcttagctgcctactgtatcaaytctcttctccagactagtgatctactcacaatttcccatatgtaacttgtgctttcctgcctacttgcctctgctcatgaggttagagatgtgttctttctttctcttctaagagcttgtccaaattttccaccttttaagcccccactctcaagtttctcctgtgaagctttctctgaccacaaaagtacaagggattagggtcccattgctaccataatgaacatgggacagcacaggctttttggaacccaatactgcctgacttaaagaaatcaaagaactagctgggtgcactgggtcacacctgtagtcccagcacctttggtaggttgaagca

SEQ ID NO: 746857 - DNA, 634 bp, Homo sapiens
tcctctcagaataggtgtgttgggggaacactcagaatgggagggcaagcagggagtccactctgtgtgcagggtgcaaagcaacttccacatcaacttaataccatcagattgctcagtagtagagacattttattgctgtgatcccattaactctgacattgcactgttctattcttggacactttcttactatcgaaagccagcaaagcttaacagctgctgagaaccacaaaataaaaagaaatagctttggtcttgttggattgaatttttctttttttggcctctttttccctttgggcttcaactawttcctctaccacaagggctgacgtcaatgctgtcaccaggcacatggaccaactgggcttgtctggggacagagagtctgtcaaatcttacccacacagggtgggaggtcccaccatggtgcagtgagaacagaccaatggaaccagcatttctctgaaaagacaagcagagggttgacccatcacatgctcactcctctgccagtattgaaactgtcctctcctttgtgtgcagaaaggaggccaggaccaaaagtcaccaacaagtgcattggtcagggttttctacctattccatgaaacaaactttcagccaatta

SEQ ID NO: 746858 - DNA, 596 bp, Homo sapiens
tttcttaaagtgtactgcataatcacataacattttatatgattttattaagatccatttatctatttttcactttgaataaattttaacccatgcaatgatttcataatagtgtacattaatcatttagacaatattggttccctgagttatataacttttccaacttgaccaatttcaatacagtgttaaaaatcacattcattaatactatagtttggtgcaaaagtaattgtgattwttgccattacttttaatctatctaccatctatcttattcaaaagctgtggaattcacattggtggatacaagttttccaaaattttaatttttgcttgaaagctcattctttattattgggcaacacacactttcagttatttttcttatagtagcagattcatttcattcatttttgagaaactgtctgccaaataccaaagtgtccataactatactttgcctgtcagttgtttcttcaagtaaaaatggtgttccatgagaaaagtaccaagggcagcttaggacagcttagaatgtttcctccagtcaaacattgtatttctggatgtcacagaagtgcttctcatgtgta

SEQ ID NO: 746859 - DNA, 545 bp, Homo sapiens
tgaggttgcagtgagccgagattgagccactgcactccagcctgggtgacagagtgagaccctgtctcaaaaaaaaaataaaataaaaataagggcttggcgtggtagctcacgactgtaatctcagcactttgggaagccraggcgggtggatcacttgaggtcaggagtttgagaacaacttggccaacatggtgaagccctgtctctactaaaaatacaaaaattagcctggtatggtggcgcatgcctgtaattccagccactcgggaggctgaggcaggagaatcacttgaacccgagaggcacaggttgcagtgagccgagactgctccactgcactacagcctgagcaacatgagtgaaactccatcttgaaaaagtaaataaaataaaataaataagtaaaaataaaaataaaagaaattgaccacatccaaagcatctcacggcctgcactcttctccaactcccaggctggaagccaagggatgttagtggggttctgttgggcagcaggtcttccatggttttctccctacaag

SEQ ID NO: 746860 - DNA, 545 bp, Homo sapiens
tgaggttgcagtgagccgagattgagccactgcactccagcctgggtgacagagtgagaccctgtctcaaaaaaaaaataaaataaaaataagggcttggcgtggtagctcacgactgtaatctcagcactttgggaagccaaggcrggtggatcacttgaggtcaggagtttgagaacaacttggccaacatggtgaagccctgtctctactaaaaatacaaaaattagcctggtatggtggcgcatgcctgtaattccagccactcgggaggctgaggcaggagaatcacttgaacccgagaggcacaggttgcagtgagccgagactgctccactgcactacagcctgagcaacatgagtgaaactccatcttgaaaaagtaaataaaataaaataaataagtaaaaataaaaataaaagaaattgaccacatccaaagcatctcacggcctgcactcttctccaactcccaggctggaagccaagggatgttagtggggttctgttgggcagcaggtcttccatggttttctccctacaag

SEQ ID NO: 746861 - DNA, 545 bp, Homo sapiens
tgaggttgcagtgagccgagattgagccactgcactccagcctgggtgacagagtgagaccctgtctcaaaaaaaaaataaaataaaaataagggcttggcgtggtagctcacgactgtaatctcagcactttgggaagccaaggcgggtggatcacttgaggtcaggagtttgagaacaacttggccaacatggtgaagccctgtctctactaaaaatacaaaaattagcctggtatggtggcgcatgcctgtaattccagccactcgggaggctgaggcaggagaatcacttgaacccgagaggcacaggttgcagtgagccgagactgctccactgcactacagcctgagmaacatgagtgaaactccatcttgaaaaagtaaataaaataaaataaataagtaaaaataaaaataaaagaaattgaccacatccaaagcatctcacggcctgcactcttctccaactcccaggctggaagccaagggatgttagtggggttctgttgggcagcaggtcttccatggttttctccctacaag

SEQ ID NO: 746862 - DNA, 566 bp, Homo sapiens
tcaagttcaaagtttcacagatctctagggcagtggcaaaatgccactagtctctttgctaaagcacagcatgagcaaattttactcccgtttacaataagttcctcatctccatctaagaccacctcagcctggacttcattgttcacatcactatcagcattttggtcaaaaccattcaacaggtctctaggaagttccaaactttcccacatcttcctgtcttcttctaagccctccatactgttccaacctctgcctgttacccagttccgaagctgtgtccacatttttgagtatctttatagcagtactccactcctggcaccaatttactatattagtccattctgacactgctrtagagacaccacctgagactgggtaatttatgaaccaaggaggtttaattgacttacagttctacatggctggggaggcctcaggaaacttacaatcatggcagaagacaaaagagaagcaaggaccttcttcacatggtggcaagagagagaagtgagaatacaggaaaaaactgccacttttaaaaccagatcttgtgagga

SEQ ID NO: 746863 - DNA, 585 bp, Homo sapiens
ttgagcattaattttactgattatgattaagtgttatttgaaggaagcattctgtagtccaataactttcagagcctctggataaagcacagcttccaagcgcgaatagtcttaatatatgaatgcactctgtgatcttcttgaaggagctatagcgtgcagcattgtgcagtgttattcaagtatgaaaaccttttctcaaggagcacctcaggggatttgtactgcaaggagcactctggaaaatgctgcaccacaccctgcttctactggaaagaggaagttgggctaggaactagaacttcaggcactgcrtaaagccaatggaagccaccctcggagacacaaattgcatcaggcggtggccaactccacttatccacagtgtgaatgttcagccactcctgttttttgtcactatctgaaactactcgtggcccctatttcctgtctggatcactggtgttttccatgacttaaccctggtgagctgtttccaagctctgctgaccttcagtagtgttctcatttggggaaatggaagcagaaacaggcacgtatggcaatctgctcagaggatgctcc

SEQ ID NO: 746864 - DNA, 658 bp, Homo sapiens
ttaattgggttagactcctactgctaaaagggggaggactacagaagattagtttatttttagcttgttgctataaaactcttctgtgcttctttcagctcagagtcaaaagaagagtaaatgttttcgaaagtaacagaacgttaaggttgcacattggcatctttgttctaatgaacagagtgtgatttgaagatggcaaacttgggttttgtaccataactagctccaaagcttctggcttatataggagcaagttttgcctttcccattggtaatgtgttgtggttgagctgttaacaatactaaagcatatactacatccttatatatatcaatttcaaactatttacctgctcactgtgtttttttcttccataaataatgcacaagagagtaaagtatatggaagccttttatttttccattaacayaaacaaaaaggtgggtgaggtgggtgacccacctacctcagcctcccaaagtgctgagattacagacgtgagccaccacgcccagcccttttgtgttgttcttattgttctccttgtctctattctgtgtgataaggtcctccaaggtgctgtctatccttattccatccttgattactccccaggaccaaccttcaatgtcttccgcacagtatacattcaat

SEQ ID NO: 746865 - DNA, 658 bp, Homo sapiens
ttaattgggttagactcctactgctaaaagggggaggactacagaagattagtttatttttagcttgttgctataaaactcttctgtgcttctttcagctcagagtcaaaagaagagtaaatgttttcgaaagtaacagaacgttaaggttgcacattggcatctttgttctaatgaacagagtgtgatttgaagatggcaaacttgggttttgtaccataactagctccaaagcttctggcttatataggagcaagttttgcctttcccattggtaatgtgttgtggttgagctgttaacaatactaaagcatatactacatccttatatatatcaatttcaaactatttacctgctcactgtgtttttttcttccataaataatgcacaagagagtaaagtatatggaagccttttatttttccattaacataaacaaaaaggtgggtgaggtgggtgacccacctacctcagcctcccaaagtgctgagattacagacgtgagccaccacrcccagcccttttgtgttgttcttattgttctccttgtctctattctgtgtgataaggtcctccaaggtgctgtctatccttattccatccttgattactccccaggaccaaccttcaatgtcttccgcacagtatacattcaat

SEQ ID NO: 746866 - DNA, 622 bp, Homo sapiens
cagaccccagggagttgtatggggctccagtctgtgcccgagtgacccctctttccctcatcaggagccatgtctatttcatccagtgcctcacccctaaccctggaaaggtgagctccccagcaactggcctcagggccctccccctccctgcacctccctccccacagctctaggccccttgactccagctgtctttggctctgtcttgtggccacagcttccaggcctctttgacgtgggacatgtgacagagcaactgcaccaggcagccatactggaggccgtgggcacccgcagtgccaacttccccgtgcgtgtgccctttgaggccttcctggccaggtggggcccatcacctcagggcaggactgacatggaggccccctgggagtgactggcagcccccgggggctccttctgattggagatggactcactctgcccaggactgggcctagcacccaaccctccctctctctcctcgtcctctcatcctctctctctctctctttctctctccatctcgctctcttctaccattcaccatccctccaygcattcgtcatttcttctcctctctgcaaacctctcctgtgctgatgcctgggcaccagagatg

SEQ ID NO: 746867 - DNA, 606 bp, Homo sapiens
ttcatattgatatcttcattcaaatcattcaaatttaatattagagatttttcttaatttatttggttttatttttgtagctccttcttctattattattttttagagatggagtcttgctgtggttcaggctggaatgcagtggtgaaatcttggctcacagcagcctycaactcctgggctcaagggatcctcccatctcagccacctgagcagctggaactacaggtgcatgcccccacgcctggcaattattattattatttaagataagagtctcgccctgttgcccagggtgcagtgcagtggcacgatcttggctcactgcaacctctgcctcccgggttcaagtgattctcttgcctcaacctcccaactagctgggactacaggtgcccaccaccattatcggctgatttttgtatttttagtagagatggggtttcaccacgttggccaggctggtctcgaactactggcctcaagtgatctgcctgcctcctcccaaagtgttgggattacagacatgagccaccacgcccagccaattattttttatttgtatagtattttctcccttcttatacaagataatttattacatgt

SEQ ID NO: 746868 - DNA, 647 bp, Homo sapiens
ctttttcattgtgtggacctgtgttctaggaagtcttcacctaggaatttatgctggtgtgcaatcttgagaagtgaatagaagacaaagattccagagtaccacaggcagagaggcatgacacaggaggcacatgcaagtatggacaggtatgaatgaaatgttttgtttgaggaactgggaattctgtttccayagtatctgaacacataagaagccgaatgaacatctgtgttgccttcttgtacttcaagaaggactgttcgcatcaaagaaaatattgcttagctcatctatgtgcatactgttgctaattatcaaaggatactttttaaaaatttcactatctaaggatgggctttattctgctcagtcaacactgtgctcttctgaaagttgctcaggaaacaaaaggccttgcttagataggaagctacctggctctaccaaacttagccctgtagtgaaggctggtagcatggcccttccctcatctcttttaccagactggtgcacagatgctctagctattgtgggtccttctccagggacctccaggtgggcccttctccagatacttgcccttggcagaaggaaagccactttgctcttggatgggaaacccctatccaaatgacgggaatgcg

SEQ ID NO: 746869 - DNA, 543 bp, Homo sapiens
tccaacgattctcctgcctcaggctcccgagtagctgggattagaggtgctgccactacgcccagctaatttttgtatttttagtagagacagggtttcaccatgttggccaggctggtctcgaactcctgaccctgtgatccacccacctcggcctcccaaagtgctgggattacaggcgtgagccaccacacctggccggctaatttttcttaagtatatgtacggtccactttcatatttcaatgtgtaatattaaaagtgtttggartctttatttagaagtttggtgatgtttctgtgaccagaaatatgtcataggaacttgactcttgtttatatcaattagcctatggtaaaattggttttgttaataacagatgttggcaagattttggaaaaaagggactgcttatccactggtggtgggaatgtaaactagttcagccactgtgaaaaacagtttggggatttctcaaagaagagaaaacagaatttccattcaacccagcaatcccattactggttatatacccaaaggaa

SEQ ID NO: 746870 - DNA, 610 bp, Homo sapiens
tgagactcatttttcaacaataaaattgcatagtaatagaaacaatgccaaacatctattttcaagatgttcttccataggaagagttcttttgaaaagcagatataatactttctctctcactaacaaaacatcatcttttccttgaagaaacagaataaacttattttaaatagctgttagtattacagaaaaggwcagtggatttcgaataagtttcttcttgaaaaagaaaagtatataactcatctttaagaaaggccatcctttttttaacttttaggttcaggggtacatgcgcaggtttgttacataggtaaattgcatgtcatgggggttcggtgtacagattattttgtcaccaaggtaataagcatagtatccaataggtagtttttcaatcttcaccttcctcccaccctccaccctctaagaggccccagtgtctgttggtcctttctttgtgttcatgtgtactcaatgtttagctcccacttataagtgggaacatgcagtatttggttttctgttactacattagttcgcttaggataatggtctctagctgcatccatgttgctgcaaaggacatgatctcattctttttatg

SEQ ID NO: 746871 - DNA, 610 bp, Homo sapiens
tgagactcatttttcaacaataaaattgcatagtaatagaaacaatgccaaacatctattttcaagatgttcttccataggaagagttcttttgaaaagcagatataatactttctctctcactaacaaaacatcatcttttccttgaagaaacagaataaacttattttaaatagctgttagtattacagaaaaggtcagtggatttcgaataagtttcttcttgaaaaagaaaagtatataactcatctttaagaaaggccatcctttttttaacttttaggttcaggggtacatgcgcaggtttgttamataggtaaattgcatgtcatgggggttcggtgtacagattattttgtcaccaaggtaataagcatagtatccaataggtagtttttcaatcttcaccttcctcccaccctccaccctctaagaggccccagtgtctgttggtcctttctttgtgttcatgtgtactcaatgtttagctcccacttataagtgggaacatgcagtatttggttttctgttactacattagttcgcttaggataatggtctctagctgcatccatgttgctgcaaaggacatgatctcattctttttatg

SEQ ID NO: 746872 - DNA, 610 bp, Homo sapiens
tgagactcatttttcaacaataaaattgcatagtaatagaaacaatgccaaacatctattttcaagatgttcttccataggaagagttcttttgaaaagcagatataatactttctctctcactaacaaaacatcatcttttccttgaagaaacagaataaacttattttaaatagctgttagtattacagaaaaggtcagtggatttcgaataagtttcttcttgaaaaagaaaagtatataactcatctttaagaaaggccatcctttttttaacttttaggttcaggggtacatgcgcaggtttgttacataggtaaattgcatgtcatgggggttcggtgtacagattattttgtcaccaaggtaataagcatagtatscaataggtagtttttcaatcttcaccttcctcccaccctccaccctctaagaggccccagtgtctgttggtcctttctttgtgttcatgtgtactcaatgtttagctcccacttataagtgggaacatgcagtatttggttttctgttactacattagttcgcttaggataatggtctctagctgcatccatgttgctgcaaaggacatgatctcattctttttatg

SEQ ID NO: 746873 - DNA, 664 bp, Homo sapiens
ggaaagaaagggtgcacacctggatccaagtcaaggcacctgactcccagtggctccccctaatggctgctactgctctaggggctccctggctccagctggttcactctgggggacacaaagagatgtcctagaaaacaaagtggacatttgtccaataacaaaagttcccaaagactacactatcaaccatagccccattctctgcagaactcaccagttaagaaggagaaggctcagggtgctgttccccaggagcccgagaggccacggcaggagaactggagagattttcattgaaagtcgggccacatcccctctaaacaggtgaggggcttgagcatggattaaagggaaagtcaacacaaacaaaaccaggagaaacaatgagtttgggctctgagagctgctctgtgatttctgtgaaaacatcccagccctaagtggggaagagaagagctcacagctgaaattctaactggcgtttcagcctcctcgtgcgctcctyctgcctattacaactgaaggggccctcagtgagtgcgtctgccctgtacacacagtgtgcacacacaggccatgatacacacccatgccatgcacacaccatgtgcacacaggcacacgcgcatgcacacacacccacacatggacatgtgtgcac

SEQ ID NO: 746874 - DNA, 572 bp, Homo sapiens
tctagaccaggccagatggcgagcggatccatctagaccgagggtgtccagtcttctggcttccctgggtcacaccagaagaagaagaattgtcttgggccacacgtgaaatacactaacactaaagatagttgatgagccaaaaaaaaaatcacaaaaaaaatctcataacattttaagaaagtttacggatttgtgtagggccgtcttcaaagccatcctgggttgcatgyggcagacagacctcacattgaacaagcttgatctagaccttatcttagtttaattacaactgcaaaaactttatttccaaataaggttacattccgaggtttcaggagggacgtgaattctggggaggacacccttcaactcaatgtacttgggaatcacttggtgataaaggcttgactcacaggtatgagccaagtccgaaggccgagagcggctgcggcttcccagtctggtggtgggaggacctggctccccatggggtcccctgtgctgtctggggctgttgaacttggctgcctgcaccaatgcattcagggactgtctctgagaactgcatg

SEQ ID NO: 746875 - DNA, 572 bp, Homo sapiens
tctagaccaggccagatggcgagcggatccatctagaccgagggtgtccagtcttctggcttccctgggtcacaccagaagaagaagaattgtcttgggccacacgtgaaatacactaacactaaagatagttgatgagccaaaaaaaaaatcacaaaaaaaatctcataacattttaagaaagtttacggatttgtgtagggccgtcttcaaagccatcctgggttgcatgcggcagacagacctcacattgaacaagcttgatctagaccttatcttagtttaattacaacygcaaaaactttatttccaaataaggttacattccgaggtttcaggagggacgtgaattctggggaggacacccttcaactcaatgtacttgggaatcacttggtgataaaggcttgactcacaggtatgagccaagtccgaaggccgagagcggctgcggcttcccagtctggtggtgggaggacctggctccccatggggtcccctgtgctgtctggggctgttgaacttggctgcctgcaccaatgcattcagggactgtctctgagaactgcatg

SEQ ID NO: 746876 - DNA, 572 bp, Homo sapiens
tctagaccaggccagatggcgagcggatccatctagaccgagggtgtccagtcttctggcttccctgggtcacaccagaagaagaagaattgtcttgggccacacgtgaaatacactaacactaaagatagttgatgagccaaaaaaaaaatcacaaaaaaaatctcataacattttaagaaagtttacggatttgtgtagggccgtcttcaaagccatcctgggttgcatgcggcagacagacctcacattgaacaagcttgatctagaccttatcttagtttaattacaactgcaaaaactttatttccaaataaggttacattccgaggtttcaggagggacgtgaattytggggaggacacccttcaactcaatgtacttgggaatcacttggtgataaaggcttgactcacaggtatgagccaagtccgaaggccgagagcggctgcggcttcccagtctggtggtgggaggacctggctccccatggggtcccctgtgctgtctggggctgttgaacttggctgcctgcaccaatgcattcagggactgtctctgagaactgcatg

SEQ ID NO: 746877 - DNA, 525 bp, Homo sapiens
tccaggagcccctgcacaaggcccagggcgggagggatttgcagggctcctgggacggcccacaccgccacaccgcacacagctgacgaggctgctgcagggatgcgggatgcggctcccaaggaggaaagggagaggctcctttagagccagtcctgctcacccccaggtcttgggttgcccaggggagccacctgtctgggttgggcccgatgcccactaccgcacggcctacagctctgacaacagctctgctttttctctggaactggaactcccycaggggaatagggtggctggggaaggctgtgggaatgcaggctctggaaggcaggttgggctctcccatgccatcctctgttcctgtacagagcccagggctcctggggagggggctcctagaacagagagaggggacacacacgggcctccccattgacctctccagaggtgcagcccaaatcccccttctctgagaagcctgtgcgtctccacctgacaggacccagctctggcccccttgcc

SEQ ID NO: 746878 - DNA, 557 bp, Homo sapiens
ttgcaatgatctctatggcgtgtgcctctcctgtcacggttttcatttaaaacaaaggggcaaggttttgttggtcaaacaatgaagggtaactttgtttctgggttcaagggaccccagattccccaggggttcctgccagctggaaggtacccaggtccgtatgtgacttcccgagaaggtgataagagcgtgccaaggagaaagacacttaggcaaatggccagagtccccgagctgagyatttaacagactgcctctctttaaatattcacagggaaagtgcatcttcctaagggcgagggtttcagcagtggttgaactcggcggggtggggcggagcgggaggatgcaaacttgcaaagtgaagcaaacacactcaccgcagcccagcaagggctctggcagctgacagggctttgtctgggacagctgcaaaccagtgtgccgtgccagccaaggacagggtggactgcggctacccccatgtcacccccaaggagtgcaacaaccggggctgctgctttgactccaggatccctggagtgccttggtgt

SEQ ID NO: 746879 - DNA, 533 bp, Homo sapiens
tgagggttccagctgctccaagtccttgccagcaccgcgtgttgtcaatatttttttattttagctgtatcaataggtgtgaagtggtatctcgttgtgattttattttgcatttccctaaagaataatgatgttgggcatcttttcatgtttgccatctgtagatcttcttacataaagtgtctattcaaatcttttgcctatttaaaaactaggtttatagccaggmgtggtggcgcatgcctgtagtcccagctagttgggaggctgaagcaggagaattgcttgaacccgggaggcagaggttgcagtgagtcaaaatcatgccactgcactccagtctgggtgacagagcaagactctgtctcaaaacaataacaacaagaaaaacaaacaaacaaagaaacgaagaaaactaggcttgttttcttattatcaagttatgagtgttttaaaatatgtattctggatacaagttctgtatcaaatatgtgtttcataaatatctcctcctgaagtgcttttgaagtggt

SEQ ID NO: 746880 - DNA, 574 bp, Homo sapiens
cccacacgtgacgccattaaggaaggccaccctggtcttgcggtgtttcaactgcaaggttacaaagtaaagataatgggaaataatgctgcttcatcatttttaacctttctgaataatgcctctgtgcataacccagagatttttattttaaaatcaattgtgcttattgtgttctttggaaacataaacgagaagctgggaagaaagaagtgggatccagggtttattaagacaaagagtttggagtggggtgtgggaatgtggtcctgcctagcctagactgctgttgtcctggaggacagggttagcagctgaaaaccccaagtggttgctatgggagaagagagcttctcacgctgcaaaaatgtaccagacatatgtgggcaaagcatctgtcttctattaccctcaggcgcccagagaacctycattcttatcccaaggaaaatggggctctggccctaaggaagagcttttaagagaaaaatatcagacatcaaattcagcttcagccactcgttagctgtgtggccttgggagggttacatgatgcctcttctgcagaatgcag

SEQ ID NO: 746881 - DNA, 506 bp, Homo sapiens
attaagatttgttctgttgccagtggccatcagtggaagatccgcttttaaactggaaaaccactcaaaccttttgaagttggtcctcagcaaagtccaatcagagggaacgtaagggttgatttttttttcttttaaagaaaagagtgctctgtgtgtgtgtgtgtgtgtgtgtgtgtgtrtgtttccccccaaagaaagcgtttcaaatgctcattaggcaaaaatatctattttacatgcactgtaattgttctatctaagatgaaatatattatttttcttaagtaaagctacaggcagtttattagcagagcttattaacccacaatcaggaactggctcacctctaatcacaacctgcctgcattcttcacaggcaatgtggtagtgctacagcacttatatttataaatatgtgcaatgcaatatgaactatatttatggggacagcatcaatttttttagccacaaaacctgacctccctaaaacagatggtgagaga

SEQ ID NO: 746882 - DNA, 583 bp, Homo sapiens
gcccacatcccccaggccccctttgggatccaactctgatttcattaagatttgttctgttgccagtggccatcagtggaagatccgcttttaaactggaaaaccactcaaaccttttgaagttggtcctcagcaaagtccaatcagagggaacgtaagggttgatttttttttcttttaaagaaaagagtgctctgtgtgtgtgtgtgtgtgtgtgtgtgtgtgtgtttccccccraagaaagcgtttcaaatgctcattaggcaaaaatatctattttacatgcactgtaattgttctatctaagatgaaatatattatttttcttaagtaaagctacaggcagtttattagcagagcttattaacccacaatcaggaactggctcacctctaatcacaacctgcctgcattcttcacaggcaatgtggtagtgctacagcacttatatttataaatatgtgcaatgcaatatgaactatatttatggggacagcatcaatttttttagccacaaaacctgacctccctaaaacagatggtgagagaactggactgccgatctagggctggagatggagac

SEQ ID NO: 746883 - DNA, 478 bp, Homo sapiens
aaataatattaaaatctccaactataactgtagatttttcattttctccctttagttcctgtcttagtctgttttctgttgctataactgaatacctgggactggtatttgtaaagaaaaggaatttatttcttacagttctgaaggctgagatgtccaaggtcaaggtgggscacatctggtgagggccttcttgctggtggggactctctgcagagtctaggctggcacagggcatcacatggcaatggggctaagccatgctagctcaggtctctccttctgctcctataaagccactaatggcccaccatcttgaccttatctaatcctaattgcctcccaaagttctcacttctcaaataccatagtcagatttcccaccttcttagtattgttacagtggggataaagtttcaacctgagttttggaggagacaagcattcagaccatagcagttccatcaatttttgcttc

SEQ ID NO: 746884 - DNA, 491 bp, Homo sapiens
tgaccaagaagggcaataggatacagtgggggccctaggagatggggaggaacgaagggggaatgtctaacccagaagaagtctttctttggctttctgcagggcagaggccacagtaatggggctgctggacctgggctcttccctagactcagtgggaggaggctgccaaaggcccaggtggtaggacattgctgttcccaaccttctcttgaaaacaggagctgctaatctttctgcttctaraaaccccttgatatttgccttgttggggagaagtgtgtggcggcacatataactctggggatacagaggaagtggtcagctcaaagcacctcacttctgttaagtcccaaacttctcttgtggacacacatggggtttcaggcagcaaaataattcatttaatcttcccccaaaatatgtggtgtccatttttgggctagcaccaaagtaggccctggggggtatgtagtgaacaacactgacag

SEQ ID NO: 746885 - DNA, 638 bp, Homo sapiens
ctttctgtttgaagaacttcctttagtcatttttctggggtaggtctgctggtaacaaattctcctttatctgagaatgctcttatcctctcttccttcctgaaggatatttttgctggatatagaatcctgagttgacagttaatggtttgttttcccttcagcacttgaaacatgtaccacttccttctggactgcaggatttctgatgataagtccactgttactagaattattgtttctttttaggtaatgcattatttctttctaggtgattttcctatgtccttagttttcagaagtttgattgtgatatgtctgggcatgggtttcttgagttatcctatttggggttcactgtgctcttgaatctgtaggcttatgacttttgccaaatttggggggattttaggcattatttcttcaaatatstttcaaccctactccctttctcctcccttactgggactctgatgatgcacatactagatttcttttgttattatttcacagttccctgaggctctgttcttcttttttcagtgcattttttgtatatgttgtccaaactggatcatttctattcatctgccttcaaattcagaagttctttcttctattatctcttctttgctatt

SEQ ID NO: 746886 - DNA, 564 bp, Homo sapiens
tctgcaaaagacatgatcttgtttttttatcactgcacagtattccatggtgtttatgtaccacattttctttattcagtctgtcattgatgggcatttaggttgattccatgtctttgctattgtgaatagtgctgcagtgaacatttgtctttatgctagaatgatttatattcctctgggtatatacccagtaatgggacgacagggttgaatggtagttctgcctttagctctttgaggaatcaccatactgcttttcacaatggttgaaccagtttacatttccaccaacagtgtgtaagtgttccattttccccacaaccttgccagcatctgttattttttgactttttagtgatagacattctgactgctgtgaratggtatctcattgtggttttgatttgcatttctctaatgatcagtgatattgagcttattttcatataattgttaaccacatatttgtcttcttttgaaaagtgtctgttcatgtcctttgccccctctttaatggggttgttttcctcttgtaaatttgtttaagttccttatagatgc

SEQ ID NO: 746887 - DNA, 603 bp, Homo sapiens
tgagcagttcgacttcttccccaactgcctttatccatagacaattcatccatccatccatccatccatccatgcatagaatccatagtttttaagttactggcacatgccaaatactgttttagtggagagggtttatcagtaaagacaggcaacatcatggctctaatggagtttatatttttatgtaaatggacaatcaacagatayacatcaagcaaatttcagcctgaaaaaataaaagcacttgatgataataaggtgattgggaagtaggttaaatactttagattccagaaaaaaaaatcagcaagagaaagacagtagaatagaacctgttcctgttgtatttctggagaagcacctggccatgtggaaggctctttatgttggctggaagaaaaattgaatgtggaatattatttagccaacaacaagaattcattatatctgcacgtggtaacatgaaagggtttctgcgagtagaaacatgtaagctgcagagagatcatttttgtaaactccatgcagatagatgcacagagaaagagctggaagaacccacactgcatggttggcactgggaaggaagaacaggctttc

SEQ ID NO: 746888 - DNA, 626 bp, Homo sapiens
tagctgagaccagcaccctgagggccaacagcagtggcagcttcaaacctccaagtcttttttattttattttaattatttatttattttttgagatggagtctcactctgttgcccaggctggagtgcagcggcacaatcttggctcactgcaacctctgcctgccgggctcaagcgattctcctgtctcagcctcctgagtagctgggattacaggygcacaccaccacgcccggctaatttttgtatttttattagggacggggtttccccatgttggtcaggctggtctcgaactcctgacctcaggttatccacctgccccagcctcccaaagtgctgggattacaggtgtgagccactgcgcccagcctccaagtcttttgtcaagatgacttccgtcccttcagggcatgtccagcagatgctgcccaggctgctgtgagggggacaagggctcattccccagtaggcgtgaagggaggctatacgggggtcagctcccccatggtgcaaatctgcacccagactccacaaggagcctagcctgtccctctctcagttctcagcctgctaaacaggagaatgatgcttcctgcagggtggctagaggctttcaaaggat

SEQ ID NO: 746889 - DNA, 626 bp, Homo sapiens
tagctgagaccagcaccctgagggccaacagcagtggcagcttcaaacctccaagtcttttttattttattttaattatttatttattttttgagatggagtctcactctgttgcccaggctggagtgcagcggcacaatcttggctcactgcaacctctgcctgccgggctcaagcgattctcctgtctcagcctcctgagtagctgggattacaggcgcacaccaccacgcccggctaatttttgtatttttattagrgacggggtttccccatgttggtcaggctggtctcgaactcctgacctcaggttatccacctgccccagcctcccaaagtgctgggattacaggtgtgagccactgcgcccagcctccaagtcttttgtcaagatgacttccgtcccttcagggcatgtccagcagatgctgcccaggctgctgtgagggggacaagggctcattccccagtaggcgtgaagggaggctatacgggggtcagctcccccatggtgcaaatctgcacccagactccacaaggagcctagcctgtccctctctcagttctcagcctgctaaacaggagaatgatgcttcctgcagggtggctagaggctttcaaaggat

SEQ ID NO: 746890 - DNA, 626 bp, Homo sapiens
tagctgagaccagcaccctgagggccaacagcagtggcagcttcaaacctccaagtcttttttattttattttaattatttatttattttttgagatggagtctcactctgttgcccaggctggagtgcagcggcacaatcttggctcactgcaacctctgcctgccgggctcaagcgattctcctgtctcagcctcctgagtagctgggattacaggcgcacaccaccacgcccggctaatttttgtatttttattagggacggggtttccccatgttggtcaggctggtctcgaactcctgacctcaggttatccacctgccccagcctcccaaagtgctgggattacaggtgtgagccactgcgcccagcctccaagtcttttgtcaagatgacttccgtcccttcagggcatgtccagcagatgctgcccaggctgctgtgagggggacaagggctcattccccagtaggcgygaagggaggctatacgggggtcagctcccccatggtgcaaatctgcacccagactccacaaggagcctagcctgtccctctctcagttctcagcctgctaaacaggagaatgatgcttcctgcagggtggctagaggctttcaaaggat

SEQ ID NO: 746891 - DNA, 565 bp, Homo sapiens
aatttgggaatggcagaacctgtatcttggatcccttgactgatcttgggttgacagttaagagggctgggcttgtctctgcagatggctgtgttgcttccatgctaactgggcttgggttcggattatacggtttcccttcctcaaagcccttcaggctgcactgccctcagcacagcgttagtagctctggcaccttgggttgttagataaatgytccagcaactcgaatgcagccaaagaccacaagctgcaggatgcctggcacgtatctggcctcttcaaactttgataaatgaagtgcccatgtctcaccgtcaggagggaaggctggggttgttgggggtggggttctgtgcatctgggtttgcatatggcttatgagtggcttgtgatatacttggagagatcacaggaaacaagccagcaagcacacagacattacagccattgcgttgaggctttaattacagaaggcagagtttgttttaagctaaagcagttgtgcttggctctaacttgtgtgtgcaatgtccaggcttcagaagagccaaacgtcttgaaa

SEQ ID NO: 746892 - DNA, 659 bp, Homo sapiens
gctaccaatgctcaccctgtccatgtgctaccaatgctcaccctgtccatgtgctaccaatgctcacccggtccatgtgctaccaatgctcaccctgtccatatgctaccaaccacagagagacccccacccgtgccagctgacccagggctctgtgrcgtcttctttggacctgtggacaggctctgcccctaaaactgaagttgaagtcttaatgctttagtactttagaacttgccctaattgtttggaaatagagtcattgaagatgcaattagttaaattaggaaaaggccatactggaatagagtgggcctctaatccaatatgactggtgaacttataaagatgagaaacttggatacagacacgcacacaggaagaatgccaagtgaagatgaaggcgggggtctatcagacgaggaacaccaaagatagccagcaacccaccaggagagagacaggcctgggacggattctcccttatggcccctagaaggaaccagccctgctgacaccctgatctcagacttgcagcttccagaaccgtgagatgataaacatcctttgtttaagccaccctgtctatggtatttgttctggcagccccaggaaactaaagcaagctccattatgcgtgacacaagcagaatgtctaa

SEQ ID NO: 746893 - DNA, 659 bp, Homo sapiens
gctaccaatgctcaccctgtccatgtgctaccaatgctcaccctgtccatgtgctaccaatgctcacccggtccatgtgctaccaatgctcaccctgtccatatgctaccaaccacagagagacccccacccgtgccagctgacccagggctctgtggcgtcttctttggacctgtggacaggctctgcccctaaaactgaagttgaagtcttaatgctttagtactttagaacttgccctaattgtttggaaatagagtcattgaagatgcaattagttaaattaggaaaaggccatactggaatagagtgggcctctaatccaatatgactggtgaacttataaagatgagaaacttggatacagacacgcacacaggaagaatgccaagtgaagatgaaggcgggggtctaycagacgaggaacaccaaagatagccagcaacccaccaggagagagacaggcctgggacggattctcccttatggcccctagaaggaaccagccctgctgacaccctgatctcagacttgcagcttccagaaccgtgagatgataaacatcctttgtttaagccaccctgtctatggtatttgttctggcagccccaggaaactaaagcaagctccattatgcgtgacacaagcagaatgtctaa

SEQ ID NO: 746894 - DNA, 623 bp, Homo sapiens
ttgtaataaccaaattactaaatgcataatagttatttggtactttgggctttttaaaaaggaaaatagactttatatttcttcaagaaactttactcatgagagcttaagttgaccaacatttcaaaacttgatgctgcaagtttgcataaggtaaattacatataatatttgatttgttctccacattttgttacagggaagtctattaaactgcatttccctctattatttgagtcaagaaatagagatgatgaaaatattttgaaacaaaatatttrtcaagaagctacttgtattagcttgaagaagggttgaatatcaaacattggaggcttgaatactacattgtctgttgtggacctttcttcaagtcttccattttcttttttaggatgtttgggtaacaaatgttcttaaatgaaaaaatctatgttgtagtggattgaaaatgcctactactggccttgcttattttaagagttcaaagaatgtaaacagtgaaacagaagcaaagaaatagcaatcagaaaattctgtcttgctatttgaactgagctgctctccgttcctttgctttaagtatcagaaataaattatgatttataatgatgccttggaat

SEQ ID NO: 746895 - DNA, 640 bp, Homo sapiens
gatattttggaagattttatctttattctaaaaacgaggtgaagcactcaaaaacgtttaagtagggatgttttaatcagatttccatctttaaaagtgatttagattgcagagtagaggagaatggattggcgggttcaggggtgacactgaataaatggaatgttattgcaaaaagcctagggaagtttgcactagtatgatggccgctgagagggagagaaagtacatgttgtgagatatttaagaactaaagttaaaaagaacaatgggggtaagaaagaaaggatgtatcaaatctgcattattaaacttattgtgctacatcaaattttgggattacagttttatcttcttctaaccctactgctgctgaactttcactcttccaggagacacacacacaaaataaattttgtattttccacgttagcatagcrcctagcatataggttctcaagaaatagttttagtaaaatagttaatagctgaaatttattatctttcccttgccctccattcccaaataatttgaaaacaaaatatttgttgaggaaaatattactcattggtatatataaactctgatatttgaaactgccaaccacaaatagccagaagcaaataattattcacatta

SEQ ID NO: 746896 - DNA, 399 bp, Homo sapiens
gagactatcctgagcaacatggcaaaacctcatctctacaaaaaaatacaacaattagctgggtgtggtggcatgcacctgtagtcccagctacttgggaggctgaggtaagaggatggcttgagtctggggagccagtgagccaagaaggtaccactgcactccagcctgggcaatagagccagaccttgtctcaaaaataaagaaatgtaaggtagtatttggttttcaataatttaacatcacaagagaawgtttaaaatataatatgtgtacacaaatatgtaaattaaaatcttccaggatgatctgaaaacactatggaaaagagaagagagaaattaactgacaattgggtattcactaaacaattgaaagaacgaatgaaaggaatctatt

SEQ ID NO: 746897 - DNA, 411 bp, Homo sapiens
cttgggaggctgaggcacaagaattgcttgaacctgggaggcagaggttgcagtaagccaagataatgccactgcactccagcctgggtgacaagagtgagactcggtctcaaaaagaaaaacaaaaaagaaaacccaacagaccaatatcccttatgaattgaggcaaaaatatttaacaaaatataagcaaatacaattcagcaatacataaaaagaatcawacaccatgaccaagtgtggcttcttccaggaagtaagattggttcaatattcagaatcaatcaatgtaatccacagtattaaccagttaaagaataaaaatctcatgattacatagattggtacagaaaaagcattgaaaacaattctacactcatttatgataaaaacttccagaaaaatagaaat

SEQ ID NO: 746898 - DNA, 586 bp, Homo sapiens
aagctgcctttgaaagacccctaacctacaagcctttaatgagattaatttgagtaataattctgtctcccatatgtcgttgaagcggcttcgttgtctggggtggtacccgagattcgttgtctcacagtcacagaaaactgcgaggcagacacaccaagagtgaggttgagagcggaagtgtttgtttgtttgtttgtttgtttgttttttgagatggagtctctgtcaccaggctggaatgcagtggtgcgatctgggctcactgcaacttccacctcccggattcaagccattctcctgcctcagcgtcccgagtagctgggactacaggcacgccaccacgcccggctaatttttgtatttttagtagagatggggtttcaccatgttggccaggatggtctggrtctcctgacctcatgatctgctctccttggcctcccaaagtgttgggattataggcgtgagacaccacgcccagccaagagcggatgtttaataggcaaaagaaagagaatagctctctctgctgcagagagagggatcccgtatgagttttccagtcctcggtgaaatgcagggg

SEQ ID NO: 746899 - DNA, 623 bp, Homo sapiens
aaggtgggggcacatcgggtgtctcctggtgctttctgctggcactaacattctaaaacatgaagcattaagtacagcaacatggatcttccttttttaacatggaaaatacgttttcatagagcaggagggaaaagaactctctaaaaaacagagctgaataggcttagcaagaaaagaaattcaggagatggagaggaggagctctaaaacatccacaaaaaaataaaccatttcatagcaatgctgaccattttaattgattctcgacgacagaagaacacaagaaaaggtagatgatgtaatgcgatggctgctgaaggcaaaagtcacaaaacaaatttagcccttcgaataccacagtagccaygggtcaatataaaaagcttcaacggtcaggagcaaaactggggtgaaggggctactcccccatacatgtaatttgtccaagccctgccatagccaccacctccctggatcctcaaagcaaccctattatgcaagacatgctgatccaggtgcatctgacgattcagaaaaccaggaccaagccgtggggcaccgagcctgagctaataagcagcagagtcgaccctggcacgaaggtctcccagctccatgaa

SEQ ID NO: 746900 - DNA, 610 bp, Homo sapiens
taggaaagtatgagttaatcaaccaattagattatctatcaccatatcaattactaagaaatcacatttaagtattttacttaagtatctgttaccctactcagcaacctttgaagttttacttaagtatttgttatcccactccacaaccttagattgtttacagctcttgcctccatgttggctttgctatcagccacgatgaatcaccaataaaaagcatcctactggcacatgatatagaaatccctttgtgggccaggcacggtggctcacgcctgtaatcccagcactttgggaggccgaggygggtggatcacgagctcaggaggtcgagaccatcctggctaacacggtgaaaccccatctctactaaaaatacaaaaaatcagtcaggcgtggtggcgggtgcctgtagtcccagctactggggaggctgaggcaggggaatggcgtgaacccaggaggcagagcttgcagtgagctgagatcgtgccactgtactccagcctgggcaacagagcaagattccatctcaaaaaatataaatagaaataaaaaaaatccctttgtgtaaaaacacaaataaaaagctatgtgtgtatagaaa

SEQ ID NO: 746901 - DNA, 592 bp, Homo sapiens
aaaaaggggggaaaaaaccacagtaagataccacttcatatctgttaggatggctattatccgtcccccacaaaaaaacccacaggaaataacaagtgggggtgacatggagaaactggaatgtacaatgaggcaaccactgtggaaaacagtacggcagtttctcaataaattaaataataatatgacccagcaagtccacttttgggaatgtatctaaaaggaaccaaagcggagactcaaagaactatttgtacactgatgttcacaggagcattcttcacaatagacaacaggtgaaagtaacctgagtatccatcaaacaaatggataaacaaaatatggtgtatgtgtatacatgtgtgtgtrtatatatatatatatatacacatatacacatatatacacacacaagggaatattattcaaccttaagaaggaatgggaattctgacacactatgctaagcgaaacaggccagacacaaaggacaaatgtaattccatttttatgaggtacctaaaatagtcaaattcagagacagaaagttaaaaagtagttaccagggcagggagaaaggagtgatgaagag

SEQ ID NO: 746902 - DNA, 592 bp, Homo sapiens
aaaaaggggggaaaaaaccacagtaagataccacttcatatctgttaggatggctattatccgtcccccacaaaaaaacccacaggaaataacaagtgggggtgacatggagaaactggaatgtacaatgaggcaaccactgtggaaaacagtacggcagtttctcaataaattaaataataatatgacccagcaagtccacttttgggaatgtatctaaaaggaaccaaagcggagactcaaagaactatttgtacactgatgttcacaggagcattcttcacaatagacaacaggtgaaagtaacctgagtatccatcaaacaaatggataaacaaaatatggtgtatgtgtatacatgtgtgtgtatatatatatatatatatacacatatacacatatatacacacacaagggaatattattcaaccttaagaaggaatgggaattctgacacactatgctaagcgaaacaggccagacacaaaggacaaatrtaattccatttttatgaggtacctaaaatagtcaaattcagagacagaaagttaaaaagtagttaccagggcagggagaaaggagtgatgaagag

SEQ ID NO: 746903 - DNA, 614 bp, Homo sapiens
acctaataggtagtttttcaactcttgcccacctccctctttcccctcttttgcaatccccagcgtttactgttcccatctttgtgtccgtgtgtacccaatgtttagctcccacttgcaagggagaacatgcagtatttggtttttagtttcttaattaatttacttaggataatggcctctagccacatccatgttgctgcaaaggacataatttcgttctcttgttatggctgtgtgaaatattactaatatttttcatgcatggttgatataagcaactttacaacactacacactaaaatgctgagtctttgatataaagagaaatggaaatgtgactcctgtaamaggtcaaattattgaacaaatttaaacatattatatactaattttcctgaaaattgaattatttatatttcacatccaataattacttcacttttaaacaaaatatttcattcataaactaaatgagaaaatgtgaagctatttcatgtaatgcagaaccaagagggaaaaaaaaagaaaatgtaaagctaactgtggtatataaaaaaagtaagcaaacctgttcactgttgagaatatttgttttatccatcataaaacca

SEQ ID NO: 746904 - DNA, 589 bp, Homo sapiens
aatgtatatatttgtcaaaaatcagtaaacgagtgaacacttccagaatggtggcataaggacttccaagaatccactcactgatgaaagtaatgagaatgcctgaaaaaactgtcaaaatcaatcagcagcaaacatttatcattaacagctgtctgaggcaatgaaaacagttggagaaaacaagaatctgaccaaaaatatacaaggaaaagctgggaaatgcgaggtctgcagggttttgtaaaagcttcaacatattcactagactcaataattaggtcatttccacgtgcagaactaaacacatgttcaagaaagaattgagaaggtcctaataatgactcacctctagcttaccttgaggttcactacaagcaagaagtwaaagtaaggcagagttgtaaactctgcaacagagcactaaaaacataccccactatgcacacagagcccctcagcaaaagctgggagacttagtggttcaaggcacttaagataatgtttgatcactagctgaccacaaagctaactaatcagaaacttcaagggtaacacaaggatacagacttaacagaattagttcagg

SEQ ID NO: 746905 - DNA, 575 bp, Homo sapiens
ctcctacttggatttcacccttttgggaaggttagcaacagtagagccaaactgaacgtgagagaagaaaagaacaattgttgtaatccttgcctaagtccttattactcattgtatcccattttgtatacagctaaggctgcactggctaaatctttgtagaatatctcttgttaatcaagtgtatgcattttgtgaagcttgtgggcagacattttataactagacgtgtaaatcatgtccagtaaaatatactgtccaataaaaggtataatctccataaaaccagaattaattgggaaaattgtctgggaggtttattggaaagcaaatgattttgcaaaacactaaaataattatttaagggaaacaatatttaaaaatacaaaagccattctatttgaaataaaaataatatattctgagaaaaytgatgcatggggattttctaaactcatacattcaacacccatttgcttagcactcattaagcagtgggaaaacatagatctctgcccttaaggaacaaaatatctgttataagaaaagagccaaagcctgattacacagtgcag

SEQ ID NO: 746906 - DNA, 462 bp, Homo sapiens
accgtagaaggactgccatcattttgatttatatctacactaattgtatgcatcagaaaacttataaaataatacagtgtcaaaatgtttatgctactcacaataaatgtttgtaaaaagaggaacattccacttcatatttactgtagaagctgcatataaaattaaagataatgggctcagatgaggtcagatcagggtgatgagtggtgtcgggtcttaracttgtcaacccagcaaattcagatgaaagagatttcattcccaggtgaagcttctatgttctgtgagtcctgtctaggacagtgataggcaaatctgatcttcacctgggggagagtgagggaagcaccatcttttgcattttaaacaatgtggggacttaacacaaatatctatccattgtggataaaatagcaacaaagcaaaggtctcctggcagcagtgagtagaatcaaggcc

SEQ ID NO: 746907 - DNA, 557 bp, Homo sapiens
ctcactgcagatctgatgggaaagtcaccaatccttagtacctaatgaatatgcttgcctaattttctaaaacacagctctttatacaaagagcttagttacacctattctgttaacatttatctactgctgacatctgaatatatttcttaaggatgcagggaactaaaccacatactttatatyctaagcactgatgtttgggtgttctgattccacccccagctacatgccttttgataaattacccactgatactttcatcttcccattcaaaaggagtatatataagaaagtgtttcccgaactaggatgaatttgtaagcatatactgagaacattctatttgaagataaaacaactaagaatcttaggggaatatggaaataaatagaacatccttgcactcaatagactgataatatagtatggtgaagcaaaccaaacacatatacataaaaatacaaagttaccaatgaaatgttaatcatgtaatagaaattaaaggtatgaggctgaagaggacccactacacaagcctgaatggctactgtgaa

SEQ ID NO: 746908 - DNA, 491 bp, Homo sapiens
atgaggtattcaaggacatctttgttaaaagtaatagtttttttcatttaatctctaagatgtacatggtgaaagaaatgtttgaaaaaggaaataaattactcttagtaattttaaagagatgttcctaaatacttggacttctcaaaacaggcaaatgaaaaggaggcytggagtttagaattagattgttgaaaaaaaattggggggtatattcaaatctcaaataccatagtgaattggctaatttggatgacagggaagaaatccaaataagattaaattattgcagcttcaaaaactatagattctttaaatctgtggctgccaaaagggcaaattcaaccagaaaacacaaagacacctttcttgcatttctaataattgaaatagttaatattttatgagtatttattaggaacaacgtactgttctaattactctgcaaatatattcactcatttgtttcttacaagcttatgagattggtg

SEQ ID NO: 746909 - DNA, 445 bp, Homo sapiens
gatcaaggatctagtgacaagttcaaatgactgcgttgagcttagaagttaatgattgactgatagcaatgacgcagcctgactttttctgctcttgagtctcccagtttgttaaatgattacaggatccttatgcatccttttgggctattttctcatctctaaaatgggggaaatgtggatgtgaagatacatccagcttctctayggagggatgaaaattacctattagcggcctgttttgaagagccagtcctctgtagtatcaggcacttagaagtggcagccttatcttcactatttcatctactttttggatgcaataagaccaactatttcatttcctgatcttctgatggagtgtcctttcttcccttccatatgctttctcccatcatatttctatttggcagccatcattaacatgaggtccttgcttaacaaa

SEQ ID NO: 746910 - DNA, 445 bp, Homo sapiens
gatcaaggatctagtgacaagttcaaatgactgcgttgagcttagaagttaatgattgactgatagcaatgacgcagcctgactttttctgctcttgagtctcccagtttgttaaatgattacaggatccttatgcatccttttgggctattttctcatctctaaaatgggggaaatgtggatgtgaagatacatccagcttctctacggagggatgaaaattacctattagcggcctgttttgaagagccagtcctctgyagtatcaggcacttagaagtggcagccttatcttcactatttcatctactttttggatgcaataagaccaactatttcatttcctgatcttctgatggagtgtcctttcttcccttccatatgctttctcccatcatatttctatttggcagccatcattaacatgaggtccttgcttaacaaa

SEQ ID NO: 746911 - DNA, 601 bp, Homo sapiens
taaattcactttaatatgtgacataaagttgatatttttaaaagatttggtagacatgagcttgtgtttttggggcaataatgatcattattttgctgaattcctttccgttattctgtttctttctgtactgtacagttcaggaagttaatcctcaaaggtttggtatcattgttttattaatttttttggtcagagaataagactaattagtttttctagctggctgtgtcatgctaagaggttttagcttactttaggggttataatttgatctataggataaggaaatctatatggatgagtaattttgaaatgcacattctttccttcttttattgacttttgactctgtttttatgccacgattagttacaaggtgcacaaaaactttttctagcttgagtaaaaaatgcattttatttgaaaggcactaraaaatctgaggaacataaaccagagctctgccaggaacatgactcagctccccaaactccaatgtgtggagtcttatttgaaaattcaaaatattcagatggaggaatctgacagagaaagagagagaaggagtggtgactatgaggaggggtcagagagtagc

SEQ ID NO: 746912 - DNA, 533 bp, Homo sapiens
aggtcctttaaggacttctctgcattggttattctagttatccattcgtctaattttttttcaaagcttttaacttctttgccgttggttcgaatttcctcctgtagctcagagtagtttgatcgtctgaagccttcttctctgaactcatcaaagtcattctccatccagctttgttccattgctggtgaggagctgcattcctttggaggaggagaggcactctgatttttagagtttccagtttttctgctctgtctttttcccattttgtggttgtatctacctttggtctttgatgatggtgacatacagatgggtttttggtgtggatgtcctttctgtttgttagttttccttctaacagccaggacyctcagctgcaagtctgttggagtttgctagaggtccactccagaccctgtttgcctgggtatcagcagcagtgtctgcagaacagcggatcttggtgaaccgcaaatgctgccgtctgatcgttcctctggaagttttgtctcagaggagtacccagc

SEQ ID NO: 746913 - DNA, 473 bp, Homo sapiens
ttacttgaaaaaatctctcatcttgccatgataaaaattggttcagatttaaaacacccccatctggaaccaatgtctttctctgtgtttaactatttaattgtctgctcaaaaacagacacccctattttctgtgaagaaacctgctcttcctcatgatagattctgggccacaagtacctcaaagcttccaaaggactcataagcacacatttgttttttatctgtaaaacatatccaagtggtttcttcccagcttaatggaaggtatgatttagagctaaaagactgtaatccatrtggcttttaaataggttatttctttgttttggttattttgagagtacataagtttcagctcctgagtaaattacaggcttttaaggcttcacatagctattttgcttttaagcagacaggatttcacctttattcctcctcagtttgctttcttatttacaaatgaaaaacag

SEQ ID NO: 746914 - DNA, 629 bp, Homo sapiens
aagtcagaaataaggatgaaatatatagtgtggaaacgtaaaaaaaaaaaaaaagaattttctaaccttctaatatttcactaaaatataaaaataaaataatgacaattttttctctaggagatgagcactgaaattgctactgtaggagtgttataggcagattgataatgatcataaatgaagcatggttataagagttaatgaagaacagtgatatggtaaatataggggaaagcttcaatgaatatttactgcttttaaaattgtgtaggatttaaaatgtatatggaatcaaaatatatgacaacagtttgtagaaagagtaaatgaatttaaagtgttgtggggtctttgtattatttatgaaatgcttaagggctaacttaaggctccaataagttaaaatgcatgttaggagctctaaaagaaacttgaaataataaccaaagatgaaaattaaacacctaagtattaagttaaataatayaatactagccaaataagctaaatttatacatataaatggccaaacgaaggtaggaacaagaaacaaagaaacaaagactagatggcataataaaaggaaatgaatagcaagatgtcagatttaatcccagatataacag

SEQ ID NO: 746915 - DNA, 622 bp, Homo sapiens
aaagttaatattagaataatgtaaacatttattctaatattctttttttgcactttgttgaggtagcatgcttcttttttggaaataattattagattagattagattaaatgagtatgttattcataccatcatgaatcaaaacacacaaattatgaattttctatcaatgctataaaraagtacttacgtgtaagatacaagaatctagaaactactaatagatgatagttggtaagaagtcccttaaatttagaaagagcttagactttgatgaatggaagctcaagttcaaatcttgagaaaccaaattaacaatgtcaacatccataaaatagaaacaataataacatacacctcataagttatacggctcagtgagatactatatctgaaatccatttagtggtaatgaaatatactgacttgattattgttaatatttaatttgacattattttcaaaggtttagaattcagactattgacactatttcatgtctaaaggcaatggaataaagatgacaattaagtcattgggtatgctgtaaacatagatatcgttaaaaaggatccttgtttctttgaacattagttttaggtgacatttctccttccctgta

SEQ ID NO: 746916 - DNA, 622 bp, Homo sapiens
aaagttaatattagaataatgtaaacatttattctaatattctttttttgcactttgttgaggtagcatgcttcttttttggaaataattattagattagattagattaaatgagtatgttattcataccatcatgaatcaaaacacacaaattatgaattttctatcaatgctataaagaagtacttacgtgtaagatacaagaatctagaaactactaatagatgatagttggtaagaagtcccttaaatttagaaagagcttagactttgatgaatggaagctcaagttcaaatcttgagaaaccaaattaacaatgtcaacatccataaaatagaaacaataataacatacmcctcataagttatacggctcagtgagatactatatctgaaatccatttagtggtaatgaaatatactgacttgattattgttaatatttaatttgacattattttcaaaggtttagaattcagactattgacactatttcatgtctaaaggcaatggaataaagatgacaattaagtcattgggtatgctgtaaacatagatatcgttaaaaaggatccttgtttctttgaacattagttttaggtgacatttctccttccctgta

SEQ ID NO: 746917 - DNA, 543 bp, Homo sapiens
cactggtggggatggtgctaaaacattagaaaccacctcgataagccaatcacctcccaccaggtcctacctctaacgctcgagatcacagttcaacatgagatttgggaagggacacagagccaaaccatatcagcgacaaaggaaaattttgcatagaaatcgtaaggcatatgaattcggcatagtggatgaggatctgtactctggggccagaccacctgtgtttagcccaggttccatgacttaccagctttcttactttgaataagttactttacttctctgtggctcaatttctgcctctataaatyggggggtgattgaacctactttaaggtgttgtcaagattaaatggactaatgtatttgaagcacttggaaccatgcctggcacataataaggtctctatatgacggagctattcttattatcatcatcactattaaattattagtatattttcttctctcttcacttgtgctaaaaaccatcaataaattaaaccacttaattccaatcccctttcttgcatctttaga

SEQ ID NO: 746918 - DNA, 630 bp, Homo sapiens
cctcttcccatagaggaaacaacccagcaaacaccaagataaaccaaagaacaatgtcaatcagagatgagtaactaaagacaagttataatcataattaacccaaatttattttccaggtcaacataatatttttatcccttctaagagacggtctgttctaatgggcaacagtcctccacgccgagccactctcatctcctactaacttaactgccctgcactgtccctcgactttcacctttcttgccttaggagccatccatgaaaccctcttctaatcatctcactttctccaataaaaaaagtagtttcatatgtgcckaaaataaaaggaaaaaggaactgataactccttggtatcttttagtaattcttgatcattggctcccaatttctagaattacctaagatttgcatttcttggaaatagagatcacagcctgtgtaacatagaaagaccccatctctacaaaaaaaaaaaaaaaaaaaaaaaaaaaaaaaaagcttgcccctgtagtcccagttacttgggagggtgaggcggacggatcgcttgagcctgggaggttgaggctgcagtgagccatgatcgtgtcactactgcactccagcctgggtaacagagca

SEQ ID NO: 746919 - DNA, 655 bp, Homo sapiens
tgagaaagtaaaaacttattttttagtttttagagatggggttgctctgttgccctggttggagtacagtggtttggtcataactcactgcagtctggtcttcccaggttccagtgatcctcccacctcaacctcccaagtagctggggccacaggtgcatgctaccatgcccagcgaagtttttctttattttttgtagagacggggtctcactacactgccaggctggtctcaaactcccgggctcaagcaatcttccagccttggcctctcaaagtgctgggattgcaggcatgatccacagcatccagtcctaaaaacttctttttgaattagaaggagactgttgttcatctcgactatcccatgttcatttgaacagattattagaaaaacaaattaaaygtagaattgtgaattacataatgcaaagagcatataaaaacattttttcagccatttttaaaaaatgtgtttttgaagaaatgtaattgctcatatttaagatgaagaattaaaacactaatctaagccatcagagctcattcttgacatttgaaagcaatgaaattcaaattttgccttttatccttatcttgtaccatattgattctaaattacttagagtttttcacagcatgatcaagaatgaag

SEQ ID NO: 746920 - DNA, 481 bp, Homo sapiens
ttggagaatgggcaacctagcctcaaggcactgaaaaggaaaagcttcaagaaacaagagctaatgctataatactatcttgtccaacccgcggcccacaggccacatgcggcccagcacagctttgactgtggcccaacacaaattcgtaaacatatttaaaacattatgagatgttctgtgatttttttaagcttatcagttatctttagtgttagtgcattttatgcgtgccscaagacaattctttcaacatggcacagggaagccaaaatattggactcccctgctataaatcatccgtccagtcacctgcttatttcagcgaggtgagcaatttagttggacagaagcctggtttctggcaagaaaggaacacgtggctctttttattccctttttaaaattctagggtttttcaattaatttacatctacgtagatgcacataatgatgcattttagattcagtattgtcaact

SEQ ID NO: 746921 - DNA, 481 bp, Homo sapiens
ttggagaatgggcaacctagcctcaaggcactgaaaaggaaaagcttcaagaaacaagagctaatgctataatactatcttgtccaacccgcggcccacaggccacatgcggcccagcacagctttgactgtggcccaacacaaattcgtaaacatatttaaaacattatgagatgttctgtgatttttttaagcttatcagttatctttagtgttagtgcattttatgcgtgccgcaagacaattctttcaacatggcrcagggaagccaaaatattggactcccctgctataaatcatccgtccagtcacctgcttatttcagcgaggtgagcaatttagttggacagaagcctggtttctggcaagaaaggaacacgtggctctttttattccctttttaaaattctagggtttttcaattaatttacatctacgtagatgcacataatgatgcattttagattcagtattgtcaact

SEQ ID NO: 746922 - DNA, 594 bp, Homo sapiens
aatgtttccttaagtagtgcaattaactatcaagaggcaattacaaaagtcttttgaaaatagctgaaagtgtctttacacagtcttaagcataaataacttgcgtaaaatattttatctaaccggtcatcatttctgagacatctttttggaataaatatttgattcaggtatttgatgaccttggggagctggggatttcttcagcttatttacttatatttacaactaacaatttaatgtgaggttaatactattttgattatatggccatcagcaccaccaattttctattacaaatatatcttcccaccagacagtatgttccagctctaagataatcttgcaaaggagacctgaggagtstccgggttttgcaggtggaacagaaaggtgaaacagggagaacaagaaaattactcctgtcaaattgattataataagagctaagtgccaatcctctccaatatttctttctcctatttatagaacatttgtgctactatgtaatcaaaaatgtctgtagaattggaaagtgcccacaaacagatgaatagattcaagcttttacaaagttactcagtgaagtggaag

SEQ ID NO: 746923 - DNA, 565 bp, Homo sapiens
tataagccaagtatcagatatgtcctgacaaaatgaaaaaagaacgtgattaagtcgtatgttacttactggtataggtgagttgaaaaccttggtcggtgtcagatccattggtgttgaactctagccacaggtgattggatgtgctgtttaggatcagccccagaagttcatttttagtgaacgtgcccagtggacgtgaggaactgtcttttccatcatatacctgatgaaaattcacagcatgagtccctctatgccttcaytggattcttatgttagcaatggtaataaacaatccaaatcttcaaagatgcagttttaaacaatacttaaaaaggcatatagtttacagaaagataaatgaaggacttagagctaaatcatatttgttctttaaattttatctttaccattaacactggaggcaaaagattccattcttgttcagatcattttatattcattactttaagagctctttctgtgttcatttaaaattaaataaatatttctttacatttccaggtttcattatctacctttttattccttttctcatagt

SEQ ID NO: 746924 - DNA, 565 bp, Homo sapiens
tataagccaagtatcagatatgtcctgacaaaatgaaaaaagaacgtgattaagtcgtatgttacttactggtataggtgagttgaaaaccttggtcggtgtcagatccattggtgttgaactctagccacaggtgattggatgtgctgtttaggatcagccccagaagttcatttttagtgaacgtgcccagtggacgtgaggaactgtcttttccatcatatacctgatgaaaattcacagcatgagtccctctatgccttcactggattcttatgttagcaatgktaataaacaatccaaatcttcaaagatgcagttttaaacaatacttaaaaaggcatatagtttacagaaagataaatgaaggacttagagctaaatcatatttgttctttaaattttatctttaccattaacactggaggcaaaagattccattcttgttcagatcattttatattcattactttaagagctctttctgtgttcatttaaaattaaataaatatttctttacatttccaggtttcattatctacctttttattccttttctcatagt

SEQ ID NO: 746925 - DNA, 481 bp, Homo sapiens
ttggagaatgggcaacctagcctcaaggcactgaaaaggaaaagcttcaagaaacaagagctaatgctataatactatcttgtccaacccgcggcccacaggccacatgcggcccagcacagctttgactgtggcccaacacaaattcgtaaacatatttaaaacattatgagatgttctgtgatttttttaagcttatcagttatctttagtgttagtgcattttatgcgtgccgcaagacaattctttcaacatggcacagggaagccaaaatattggactcccctgctataaatcatccgtccartcacctgcttatttcagcgaggtgagcaatttagttggacagaagcctggtttctggcaagaaaggaacacgtggctctttttattccctttttaaaattctagggtttttcaattaatttacatctacgtagatgcacataatgatgcattttagattcagtattgtcaact

SEQ ID NO: 746926 - DNA, 634 bp, Homo sapiens
ctatatctatagatagacatatctatagatagatctatagatagacatatctatagatatatgtatatctatatatagggagagggtttagtgtatctatatatgtatctatagatatatatagagagagagagagtttagtgatatatatatatcactaarctgtatataattctatgtagttatttaattttgggttaaaaaattgaaacaacgttctaagctaaaatgttagtttctgttgcttcttaaaagctaatccaataacggcactaaattgtaaaaataaaggtttataggataatgaatgggctaaaaatagtaccattttgtgaaattcttaaatattcttcgtgagtaaatatggaattgcatattttgattaatatagacttctattacgggcaagatttacttatttgttgcgtagaacacaatgaacttggtttaaaggagaaaggtagactttctgtttctgtttcttagttgagctgttttctatttctgtgcttttaaaataaagcttctaaaacatagagatctgcatattaatagttttcccaatttcacagtgccctcaaaagccccacaacaatttctacattttaataaccagagccatacacctttactt

SEQ ID NO: 746927 - DNA, 589 bp, Homo sapiens
atatatgtatctatagatatatatagagagagagagagtttagtgatatatatatatcactaaactgtatataattctatgtagttatttaattttgggttaaaaaattgaaacaacgttctaagctaaaatgttagtttctgttgcttcttaaaagctaatccaataayggcactaaattgtaaaaataaaggtttataggataatgaatgggctaaaaatagtaccattttgtgaaattcttaaatattcttcgtgagtaaatatggaattgcatattttgattaatatagacttctattacgggcaagatttacttatttgttgcgtagaacacaatgaacttggtttaaaggagaaaggtagactttctgtttctgtttcttagttgagctgttttctatttctgtgcttttaaaataaagcttctaaaacatagagatctgcatattaatagttttcccaatttcacagtgccctcaaaagccccacaacaatttctacattttaataaccagagccatacacctttacttccagccattatgttaagaaacatctctgttaaatgtgaggcattgtataggct

SEQ ID NO: 746928 - DNA, 589 bp, Homo sapiens
atatatgtatctatagatatatatagagagagagagagtttagtgatatatatatatcactaaactgtatataattctatgtagttatttaattttgggttaaaaaattgaaacaacgttctaagctaaaatgttagtttctgttgcttcttaaaagctaatccaataacggcactaaattgtaaaaataaaggtttataggataatgaatgggctaaaaatagtaccattttgtgaaattcttaaatattcttygtgagtaaatatggaattgcatattttgattaatatagacttctattacgggcaagatttacttatttgttgcgtagaacacaatgaacttggtttaaaggagaaaggtagactttctgtttctgtttcttagttgagctgttttctatttctgtgcttttaaaataaagcttctaaaacatagagatctgcatattaatagttttcccaatttcacagtgccctcaaaagccccacaacaatttctacattttaataaccagagccatacacctttacttccagccattatgttaagaaacatctctgttaaatgtgaggcattgtataggct

SEQ ID NO: 746929 - DNA, 589 bp, Homo sapiens
atatatgtatctatagatatatatagagagagagagagtttagtgatatatatatatcactaaactgtatataattctatgtagttatttaattttgggttaaaaaattgaaacaacgttctaagctaaaatgttagtttctgttgcttcttaaaagctaatccaataacggcactaaattgtaaaaataaaggtttataggataatgaatgggctaaaaatagtaccattttgtgaaattcttaaatattcttcgtgagtaaatatggaattgcatattttgattaatatagacttctattacgggcaagatttacttatttgttgygtagaacacaatgaacttggtttaaaggagaaaggtagactttctgtttctgtttcttagttgagctgttttctatttctgtgcttttaaaataaagcttctaaaacatagagatctgcatattaatagttttcccaatttcacagtgccctcaaaagccccacaacaatttctacattttaataaccagagccatacacctttacttccagccattatgttaagaaacatctctgttaaatgtgaggcattgtataggct

SEQ ID NO: 746930 - DNA, 597 bp, Homo sapiens
caaaaattacttgaatgtattaccaaaaatgaacatttactatagaccagtaatattctctttccaataactgattataaggctctttgaattcatctgagataaacaaagacccaatgtatccatatatacataggggaattagaatacaactgtaacagtggatgaagcaaggcctggcacggtggctcatgcctgtaattccagcactttggcaggtcaaggcaggcagatcacttgaggccaggagttcgagactagcctggccaacatggtgaaaccccattttatctaaaaacacaaaaattagccagatgtggtggcacacacctgtaatcccaggtactcgggaggctgaggcaggagaatcgcttgaacccaggaggcaggggttgcagtgagctgcgrtcatgccactgcactccagcctggacaacaaagtgaaactctctgaaaaaaaataacagttgatgatgcaagagaaaacatataaggacaattattacacaaagtaggtgacatatgaattcaaaaatgagaatttatgggtcaaggagatttattgcctagcttaataactgtaatgtccataatact

SEQ ID NO: 746931 - DNA, 636 bp, Homo sapiens
ttgccacggcaaaattattaataaccccctttcactcacccaaaaaattccaagttggacaatatattatatggccaccctaatattaacaaaagctctgaaaataatatcctgcctttctgcatatatataaagaatctcaaatctgctgagtagaggccagactctgcaaagccggctggtgcctgtgctttcaggggccactggagccttatcatatcagtttctggtaatcatgtgtaaagtgcattgcaaacggcgagcctaaaatcacctcccatatgcagccatcgactctgcctgcgcctaatcacagaaggctacygcaagcccagagttttcaccagagtatcccccatcactctaaaatacagcagcctcaagaaatagcagttgttttctccagtttctataactgctgtgtattatgtgtcgcactgaaaattagaaagataggtactcctgaaaaatccaaagcttagattttttctcatttttactttcagttagaataacgagctctttcttccactccactgcataagagatgacaattaaaagctgactttttctctgcaaagtacttcactgttttcaacaccaagttttatgaaagagcaaaaaaaaagagattag

SEQ ID NO: 746932 - DNA, 618 bp, Homo sapiens
ttccatctatgtggccacaaatgacaagattttgttcttttttatggcttaatagtattccattgtgtacatacattattttctttaaaaagaaaaaatacattatttatttatccatgtggctactgtgaataatgctgcaataaacagaagggtgcggatgtctcttttatatacttattttctttcctttggataaatgccagyattggaattgctggatcatgtgataattgtgtttatagttttcaaaagaaccttcatatagttctacatagtgactatactagtttacattcccaccaacagtgttatgagttccttttttttccacatccttgccagcattgtttatttttatccgtttgatattgaacatttttaaatatactttttggccttttatgtgtgttcttttgcaaaatggctcttcagatcatttgtttatttttcaatcagattatttattttgttgttgttagttgtttgagttccttctaaattctggatattagtctcctgtcagatgcatagtttgaaaatatttttccccattctgcaggtcacgtgttgattgttttatttgctgtacagaagcttttcaattggatataaacc

SEQ ID NO: 746933 - DNA, 589 bp, Homo sapiens
tacatttatcccttatctttcatcattttctttttccactggacactccttgacagaccctttttacttcttccatttccacaatcagatcactaaaatttggtttgtatcatttctcacatgttcagtatttcatcctgctccacggttttaaatagcttgtatggtaacgactctcaaacatctgtatcaagcacagrtctctttgctgaacttcatatcttttaccctagtgcttgcaacattctcacttgaatatttcctaaacttctcaaaattattatatccaaaaagggaactcttgattttttctggttttccaggttaggactttacatgcactttctctcttttagcaaaactcttggtgcttttttatcctcatgtctcatctaagacattgcctgcaaagattggcttttccctacttaaatagcttccaaatctgtaaactctattttattattatgcttgtattttttttagctgttttcacagcctgctttattttcattatatattgtcttgcatatttctaagtaagctctatggaaacaaaattcacatatatcttcatcattgctgtatc

SEQ ID NO: 746934 - DNA, 602 bp, Homo sapiens
acactaaccatttttcttttactactgcttttgctgtatcccagagagtttggtatgatgtatctctatttttattcatttgaaacaaatttttatttcttccttaattttcttgtttacccaaaaattattcaggagcagctgtttattttccatgtatttgtgtagttttcagatttccttttggytgtgatttttaattttattccactgtggtctgaaaagatacttgatatgattttgatttttttgaatttattgctgcttcctttatggtaaagtacatagtctcttttggagaatgttttatgtgcagattagaaaaatctataatccatggttgttgggtggaatgttctgtaagtgtttattcagtccattcagttcaatccagtttaagtacagtgtttctttgttgattttctgcttggatgatctgtgtagcactgtcattggggtactgaagttcgctacttcaattattatattgctctctatctcttcttaggtctagtagtatttgtttaatgaatctcaatgcgctggtgtttggtgcatgtatatttaggatagttatatcttcttgtttaattgagcccctt

SEQ ID NO: 746935 - DNA, 602 bp, Homo sapiens
acactaaccatttttcttttactactgcttttgctgtatcccagagagtttggtatgatgtatctctatttttattcatttgaaacaaatttttatttcttccttaattttcttgtttacccaaaaattattcaggagcagctgtttattttccatgtatttgtgtagttttcagatttccttttggttgtgatttttaattttattccactgtggtctgaaaagatacttgatatgattttgatttttttgaatttattgctgcttcctttatggtaaagtacatagtctcttttggagaatgktttatgtgcagattagaaaaatctataatccatggttgttgggtggaatgttctgtaagtgtttattcagtccattcagttcaatccagtttaagtacagtgtttctttgttgattttctgcttggatgatctgtgtagcactgtcattggggtactgaagttcgctacttcaattattatattgctctctatctcttcttaggtctagtagtatttgtttaatgaatctcaatgcgctggtgtttggtgcatgtatatttaggatagttatatcttcttgtttaattgagcccctt

SEQ ID NO: 746936 - DNA, 602 bp, Homo sapiens
acactaaccatttttcttttactactgcttttgctgtatcccagagagtttggtatgatgtatctctatttttattcatttgaaacaaatttttatttcttccttaattttcttgtttacccaaaaattattcaggagcagctgtttattttccatgtatttgtgtagttttcagatttccttttggttgtgatttttaattttattccactgtggtctgaaaagatacttgatatgattttgatttttttgaatttattgctgcttcctttatggtaaagtacatagtctcttttggagaatgttttatgtgcagattagaaaaatctataatccatggttgttgggtggaatgttctgtaagtgtttattcagtccattcagttcaatccagtttaagtacagtgtttctttgttgattttctgcttggatgatctgtstagcactgtcattggggtactgaagttcgctacttcaattattatattgctctctatctcttcttaggtctagtagtatttgtttaatgaatctcaatgcgctggtgtttggtgcatgtatatttaggatagttatatcttcttgtttaattgagcccctt

SEQ ID NO: 746937 - DNA, 621 bp, Homo sapiens
gcagggcgcaggacccaggcagctccacctgcagccctggtgcgggatccactaggtgaagccagctgggctcctgagtctggtggggacctggagaacctttatgtctagctcagggattgtaaatacgccaatcagcaccctgtgtctagctcagggtttgtgaatgcaccaatggacactctgtatctagctactctggtggggacttggagaacctttgtgtccacactgtgtatctagctaatctggtggggacgtggagaacctttgtgtctagctcagggactgtaaacgcaccaatcagcgccctgtcaaaacagaccattaggctctaccaatcagcaggatgtgggtggggccagataagagaataaaagcaggctgcyggagctagcagtggcaacccactccggtccccttccacactgtggaagctttgttcttttgctctttgcaataaatcttgctactgctcactctttgggtccacactgcctttatgagctgtaacactcactgtgaaggtctgcagcttcactcctgaagccagcgagaccatgagcccaccgggaggaaggaacaactcaagacacgccgccttaagagctgtaacactca

SEQ ID NO: 746938 - DNA, 491 bp, Homo sapiens
tatagtacatataatcttatttggctcttaaattacataataaaaatctagtaaaaatcagagggtttccagttcaggccatgactgatcaatgaatattgaaattactctcctgtagtaaacaggaaaaaatgaaacaaaatgtatgaagtaatcrgcgctaggcaccaggcaacacaggcatgatcaatggaagaaggaaacctctgtattttccacttgctgcaaattcaccctgaatttctactcagagctacggggagatgaagcccagatatcagtgatcttactgggcagaaaataaaaggaaactggactttctagggtagtaggagcaagggaaaaaagagtgctagaaatctgcacagggataccttgaatgttggccaaatattcggctgtgcctgtgcatagaggtttttatgcttttgtgtacaattacatattacatatgtgtgcataaaatataactttgaaaaagaaatgtaaaa

SEQ ID NO: 746939 - DNA, 491 bp, Homo sapiens
tatagtacatataatcttatttggctcttaaattacataataaaaatctagtaaaaatcagagggtttccagttcaggccatgactgatcaatgaatattgaaattactctcctgtagtaaacaggaaaaaatgaaacaaaatgtatgaagtaatcggcgctaggcaccaggcaacacaggcatgatcaatggaagaaggaaacmtctgtattttccacttgctgcaaattcaccctgaatttctactcagagctacggggagatgaagcccagatatcagtgatcttactgggcagaaaataaaaggaaactggactttctagggtagtaggagcaagggaaaaaagagtgctagaaatctgcacagggataccttgaatgttggccaaatattcggctgtgcctgtgcatagaggtttttatgcttttgtgtacaattacatattacatatgtgtgcataaaatataactttgaaaaagaaatgtaaaa

SEQ ID NO: 746940 - DNA, 576 bp, Homo sapiens
ggtccacagcctgatcattggaatgtctgaatatgggacctttgcctggcaaaagaactttgcagatgtaattgaattaaggcttttgggatgaggagatcatcttagataatctggatgtgtttcctgtaatcacaaggctccttatcagagggaygcaggaagagtccgtcagatagaaggtgatataacaaggaagcagaaggctagagagaaagaaatttgaagatgctttactgctggcttgaagatggacaaagggagcaatgagccaaaggacaagcaaggcctgtagaagctaaaataggtaagaaatcagatttttccctagagcctccagaaggagccagtcctgtcaataccttgactttaatccaataaaattgatttcaaacttcttgccactagaactataatagcatacatttgtggtagtttaagccactacttttatggcaatttgttacagtcttaagaggaaactaatatagaaacaacctaccaagaaacttctataacaatataccatccttaaaagtaacagaatacaaaattaacctcagaaataggtagttt

SEQ ID NO: 746941 - DNA, 576 bp, Homo sapiens
ggtccacagcctgatcattggaatgtctgaatatgggacctttgcctggcaaaagaactttgcagatgtaattgaattaaggcttttgggatgaggagatcatcttagataatctggatgtgtttcctgtaatcacaaggctccttatcagagggacgcaggaagagtccgtcagatagaaggtgatataacaaggaagcagaaggctagagagaaagaaatttgaagatgctttactgctggcttgaagatggacaaagggagcaatgagccaaaggacaagcaaggcctgtagaagctaaaataggtaagaaatcagatttttccctagagcctccagaaggagccagtcctgtcaataccttgactttartccaataaaattgatttcaaacttcttgccactagaactataatagcatacatttgtggtagtttaagccactacttttatggcaatttgttacagtcttaagaggaaactaatatagaaacaacctaccaagaaacttctataacaatataccatccttaaaagtaacagaatacaaaattaacctcagaaataggtagttt

SEQ ID NO: 746942 - DNA, 646 bp, Homo sapiens
aattttcagaaggaacctggaccagctcttatatgggtcactaaagcatgggtttagggattattcaagagaagattgatgttctggctgagccattcaaacttgggtaaatgtaggtttttgtgttatttaccataataagcaaatgataactccgtcagttttttgggggaagactgaccttgtttttttttggactaggaagctcatccttcactctttactgttaatattttcctctaaagttcctctaaaagtgtaataggaattcctttaaaaacaaaccacaataagattgggtatgtagcactatctaaaaaggctgtgtgctaatttttgcctctttttactrtcaatacaacttgctaagttactcatttaattataaaagtcaattttccctcatatgaacattgaatagtaaattagccagtgtctccatcattttgaaacatttttctaaatgttcagctggtacttctgattaggcaatatcatcagagcagtacatttattggaatcgtcgatatattaggattaaccatacaaaattgccagttttttgtaggtcaaaaattggtaagtaacagcagttttatatgatctgactgggtgtagttaaactttgaaaaaaaccctaaaatga

SEQ ID NO: 746943 - DNA, 533 bp, Homo sapiens
caagatacagagcttttccatcatccagaaggttctcttgtgcaccttagcagccaatttgcacaacagtttaaccataagtcctaattttttttattatttgattcaagaataaagttagtttgtcaaactgccattmgattttctaaatacacattttaaattcctgaacttacctcctcatgcactggtgataagcagctcctgaacagcctcgctgggggaccactgtgtaagtaaagcctattctgagatgctgggttcacagcccagggccctgtgaccgtattcaaagtccacttgcttggaagtctccaaagctcatctctctgatgggcacatcctgtgacgtcctctgcatattccctgtgctcttgttgttttcacctccaaagggaaggagagattacatggtgcggtgggtctgtagggagaatgagaggagctcctttctttaccctctcccttctctgctaccctgcaacggaagcaaaagggaccccacggtgggactcccatcgccaggaataatt

SEQ ID NO: 746944 - DNA, 657 bp, Homo sapiens
aaagggacaaaggaagtagtccagggtggctgctcaaaagaactggctgggtaaaaggagagaagtgttctgctccaaatttggatcttgggctcatttcattcaattgtctcaactttctttttctttctttctttctttctttctttctttctttctttctttctttctttctttctttctttcttccttctttccttccttccttccttccttccttccttccttyctttctttcattttgttttgtttttttgatacaggggcttgccctttacccaggttggagtgctaaggctgaatcatggctttctgcatccttagcctccggatggttctccaggtggttctcccaccgcagtttcccagggagctgggactataggcaggcaccaccatgcctggctaatgttttagattttttatagagatggagtctcccatgttgcccaggctggtctttaattcctgaactcaaacgatccttccatcttggcctcccaaagtgttgggattacaggtatgagccactgcacctggcaactcacctttcttgtatgaggcgaccttctgattttcctcaacatcttgctgatttattataaataagggttattaataagaactcttcctggaggaatagcagaattatgtaat

SEQ ID NO: 746945 - DNA, 478 bp, Homo sapiens
ctttgcaagtaagagaaaattaacaaacagtatccgcccccaaaaacaaacataacagatgtgtatgaatgtagtatttagaattattctagcacagcaagactttttactgtaacttcactataaatatagacataaatgcaaagtttgagacatcaagaaccaatttttaaaggtacatttcctggaattagagccactacytaccaaaaattcattttggaattcatatgtagaaatattttaaaccttaaaatttaaaaatctatccctattaaaactaaatacattattaagtgggttagtttaacaggcctccttccactctgtgcaaaaaaatagggatttttgtctggatatgtaattttgtttatccatatttgagaacgttcacctcagaaaatggcatttaaaggacttcagtaacatagttttattcttgttcagctatttctgaacaagaatctataaaatctaa

SEQ ID NO: 746946 - DNA, 632 bp, Homo sapiens
caattaatatgtctaattttaactaagctctcattactgcccagaaattattatattcaggtacagtcaactctcaaccttccatgtagccctcctgtccttcagctcccaccctatttctggtaatttctcagaatataccaatcactttctcatttcccagtaagattcaagatatcagatgtagactttgtgcagcttcattctctccatctcagtatatcttgttaattttagtctgttcgcccctttcctttactcatgcctctaatgatgatggaagtcctccctttacgaggttcaacctgggctctrttcccattcttcttcacttcctttaggatcttattccaccaagggcctctcttgatggtgttttaatttgctctctgtttgagtttctaaaaatattctctctccttataaatatccttcctttgacttgctgccctctcaagttactgccctctgttgtttcttctcttctttggaaaacatctttaaaaagtaggctaccatcatagcttccatttttcctaccacccactcattcctcagatccttggaattttaactccacccttggttctctttctaaaactattctctcaaaggtcaccaattaccccata

SEQ ID NO: 746947 - DNA, 632 bp, Homo sapiens
caattaatatgtctaattttaactaagctctcattactgcccagaaattattatattcaggtacagtcaactctcaaccttccatgtagccctcctgtccttcagctcccaccctatttctggtaatttctcagaatataccaatcactttctcatttcccagtaagattcaagatatcagatgtagactttgtgcagcttcattctctccatctcagtatatcttgttaattttagtctgttcgcccctttcctttactcatgcctctaatgatgatggaagtcctccctttacgaggttcaacctgggctctgttcccattcttcttcacttcctttaggatcttattccaccaagggcctctcttgatggtgttttaatttgctctctgtttgagtttctaaaaatattctctctccttataaatatcctycctttgacttgctgccctctcaagttactgccctctgttgtttcttctcttctttggaaaacatctttaaaaagtaggctaccatcatagcttccatttttcctaccacccactcattcctcagatccttggaattttaactccacccttggttctctttctaaaactattctctcaaaggtcaccaattaccccata

SEQ ID NO: 746948 - DNA, 520 bp, Homo sapiens
cagagatatctaaactggagtgtggaacaattactagcaccgttttacccataagggaatttcacacctaatggcaaagcaagggtatgttttctcaagattcccactgtgtaatgtagcagcatttcagtgatgcctgcaatgcatggcaagataaaataatgggaagtgcagtaaacttatccaatatctgcgtacaacttatgcgtgggaattaactccctatgcactctcagtctatgcagctaatttcctaggcagctaattccacttctagctctgaagcatattatgtgatacagacatggccaaacagagtatcattttatacggtgctcattactaactcacaagcaggycaatcatagtaacgagactcacactgttagaggcatcaaggtagcagactcctttcctgctggactcaaaccagaaagattgtgaatatgaggcttttgcagctctctcatcaccacaaggagtcgtagaatgaagcctgagcatatctcacatagatggt

SEQ ID NO: 746949 - DNA, 584 bp, Homo sapiens
ttaacaacatatagaaaagaaagttgttacaaataagaacagttttcttttactcctgacatttatcttaatgagccaaaattatcactgatccaagtgaaaacaaaagaccaattactggccaggtgtggaggctcacacctgtaatcccaacactttgggaggtcgaggtggaggatcacctgggcttaggagtttgagaccagcctgagcaacaaagccagaccttgtctctataaaaaacaaaaacaaaagatctattttcaaaattattttttctaaacttcgtttaaaaagaatagcaaggtggtatatgaaacttcttcctctgccatcacatttttatatatagagtacaatttttttctttcaacccagaggccagaattttgtaagtacacaaaaaatsaacagtaagttatctgttattactaaatctgtcaacaaccaaatgactgtgctattgtctcatgctccctacactgcagttttaaattagtgcacttgtcccataacttttaagcataaaatattaaccaaaaaataactctctcttttagagggaggacaaaacatacttttta

SEQ ID NO: 746950 - DNA, 541 bp, Homo sapiens
gatcacaaacgtttccacggaggaagtgatgtcagaacaaagacctcaggaagaaaggctgcttgtcacttgcagctgagaggccagggagttctaggcagagggccagcccacatggaagccttgaggcaggagcaaccttggctccaggaaaaggaaaggggcctgtgtgactggagcagagggggctgggaggacacaggaaggagatgacgtctgagaggtcctgagggtgcagatcacgcagggagaggtcttcaaacattctttctcccatacgtcaaaaaaatttatgaaaccatgtatttcctcacctgttttaagtaaatgcttaattttttcttcattttacaaagtaacacacttacaacatagtatcttrcatattttaaacatgacaagaagttcagctgagccccaggaagtacagggttgcccttagctgagatgtgcaagactgcaggggtgaatatgtttggaggagtttgggaagtcacttttatttaaataattaattaattaatttttgagagagtttcac

SEQ ID NO: 746951 - DNA, 648 bp, Homo sapiens
gatgagactccatcttccccaagcagttttcctgagccttgggggaccagcttgcaatgaatcagtcctaggcttctactgccccttgttgcctgtcagtagtcaactcactttattgaacttgtgtgcatgggtttctgtctcactatagtcagacattccgtaaccagttctaatttaacctacttcacaggcaaggagagtctgtaatcctcctacgcttggcagtgggaatgcacaatggcacacccactatggaaaacagtatgttggaaaacttcctcaatatggtgcctacaaaaccttacagcaaacatcatatatcatggtcaaaaagtgaaagwttccttcccagggttggggacaaggcaaagacgtacactcttaccacttctattccacatagtgttagcaattcttggctgagggtagtggctcatgtctgtaatcccaacactttgggaggctgaggcaggaggactgattgagtccaggaatttgagaccagactgggcaagatggggagaccctatctatctctacaaaaaaaaaaaattgaaaattggctggtggctgggcgaggtggctcacgcctgtaatttaagcactttggaaagctgaggcaggaggatcccttgaacccaaatg

SEQ ID NO: 746952 - DNA, 594 bp, Homo sapiens
tttttagtacagacggggtttcactgtgttatccaggatggtctcgatctcctgacctcgtgatccgcccgcctcggcctcccaaagtgctgggattacaggcatgagccaccgcgcccggcaatgctgtgtattttcttgacctcatatatcagaaggtagtgatcttaacatgtaattcagttcttatattgtgtgctggtggtaagtrgaagttttggcttttttcttaagtggaaattgtttacaattctgcaggctgtataaatgtacatattattttcttgttttatcgttggttacaatattttgttaattgaattttatgactttacatgtgagtattcagtatgtggcatgcaatataactgacacactgcactcattaatgtcacaaagtgccactgggtgcagtggcttatgcccgtaatcccaaatggccaacgtggtgaaatcccatctctactaaaaatacaaaaattagccgggcatgctggtgcttgcctgtaatccaaggtattcaggaggctgaggcaagacactcactggaacccaggaggtaaaggttgcagtgagccaagatcgtgccattgc

SEQ ID NO: 746953 - DNA, 594 bp, Homo sapiens
tttttagtacagacggggtttcactgtgttatccaggatggtctcgatctcctgacctcgtgatccgcccgcctcggcctcccaaagtgctgggattacaggcatgagccaccgcgcccggcaatgctgtgtattttcttgacctcatatatcagaaggtagtgatcttaacatgtaattcagttcttatattgtgtgctggtggtaagtggaagttttggcttttttcttaagtggaaattgtttacaattctgcaggctgtataaatgtacatattattttcttgttttatcgttggttacaatattttgttaattgaattttatgactttacatgtgagtattcagtatgtggcatgcaatataactgacacactgcactcattaatgtcacaaagtgccactgggtgcagtggcttatgcccgtaatcccaaatggccaacrtggtgaaatcccatctctactaaaaatacaaaaattagccgggcatgctggtgcttgcctgtaatccaaggtattcaggaggctgaggcaagacactcactggaacccaggaggtaaaggttgcagtgagccaagatcgtgccattgc

SEQ ID NO: 746954 - DNA, 602 bp, Homo sapiens
cttgtattcctaaaacccatatttctaataagtatgggaataatttcctccaggaagcacacatgagagaaaaatctttccaatgtaatgagagtggcaaagcctttaattgtagctcactgttaaaaaaatgtcagataatccatttaggagagaaaaaatataaatgtgatatatgtggcaaggtctttaatcagaagcgataccttgcataccatcatagatgtcacactggtgagaaaccttacaagtgtaatcagtgtggcaagaccttcagttacaagtcatcccttgtaattcacaaggmaattcatactggagagaaacctcacaagtgtaatgaatgtggcaaggtttttaatcaaaaagcatatcttgcaagtcatcatagacttcatactggagagaaaccttacaaatgtgaagaatgtgacaaagtttttagtcgctaatcacaccttgaaagacataggagaattcatactggagagaaaccgtacaaatgtaaggtttgtgacaaggctttcagacgtgattcacacctggcacaacatattgtaattcacactggagagaaaccttacaagtgtaatgagtgtggc

SEQ ID NO: 746955 - DNA, 658 bp, Homo sapiens
attacattagccttgcttactttaaactttttgactcctggtacagacggtaagactagcagaacgacattggcaagtgttagaggaaaagaggcaagtttacccaaaggtgttatggaaatctccagatgagggacagtggaaaggcccggtggaattgctgatgtggggacgagagtatgcttgtgtttttacaggagatggacaaaccatgtgggtgccctccaggtgtgtgcgaccatgaaatgggagactagcaggacccacgttggccaaccgtggacctggtccctccagtaggagtcgtgagccagctgaatttgaatgcaaagatggagcaagggccgactggagtcacactgacatccacccccataacatggggacagatcaagaaaacaaagcaggaagctgagaaaatgctggagcrtccatgtgcttggccatgttagcagtagtgtcctgtgaggtatgtttcccctgtgtagaggccaaaacatactgggcatatgttcctaatcaccctgtagtgtgacctgtactctggagtgacattcctcctgaggtatatcatgatcagggagcgtgggctctagggcccctaactccccctgatatagagcaattaaactctcacaacaatagcatcagttatacc

SEQ ID NO: 746956 - DNA, 604 bp, Homo sapiens
actatacattcttctcagcaccatatcgcatgtattctaaaactgaccacataattggaagtaaaacactcctcagcaaatgcaaaagaatggaaatcataacagtctcccaaacaataggcaatcaaaataaaattcaggattaagaaactcactcaaaaccgcacaactacatggaaactgaacaatctgcacctgaatgactactgggtaaataatgcaattaaggcagaaataaataagttctttgaaatcaaygagaacaaagacacaacataccagaatttctgggacaagtgaaagcagtgtttagagggaaatttattgcattaatgaccacaggagaaagtgggaaagatctaaaattggtaccctatcatcacagttaaaagaactagagaagcaagagcaaacaaattcaagagctaacagaagacaagaaataactaaggagcagaactgaaggagacagagacatgaaaaacccttaaaaaaaatcagtgaatccaggagctagtttcttgaaaagattaacaaaatggatagactgctagccagattaatgaagaagaaaagagagaagaataaaatagacacaataaaa

SEQ ID NO: 746957 - DNA, 623 bp, Homo sapiens
ctggagcaaattattcttatttaagctgtaccaatatcactatactaactatactgcttaatttacctcaacataatttatgtttttcccagtaatatttcctaaatacttatatgaatctaccacagttggcagaatgttattgctccaatagtacatagtctagtacaattgtaatgttttagatggcaattagagcaagttacactacataaatgaaatggtctgcaaaacttcatagcataacttgttgtgtactkaaatatttgtgatccaatttgatcattaaacattgtatgcatgtatcaaaatatcacatgtaccccataaacatgtacaactattatgtatccaaaataagtttttttttaaattgtgatccagaattcttacaagacaacaaaattttaatgtaggtgcaaaaaaaaaaaagctcaattttcatataaataaacaaaccttatttgggctaccaaacatgattaatttgagtctcaaattatatgtgtatctggcctttgccttgttgtcccaagaatatatatactttattattctccaaaccacaaaaacttatctttcataatattatatttcaaataaaatatagtataagacatatg

SEQ ID NO: 746958 - DNA, 610 bp, Homo sapiens
agagagtggaggtgactatactaaaaataaataaaacagacactaaaccaaaaagtttagaaacaaaaaagaatagtatatgataatagaaggttcaatacacaaagaagatacaattataagcagtgggggagaacaaggtggctgactagatgcagccaggtgaaacagctcccactgagagaccaagatgactggcgtgcttctaacagatcttcagagggaaggcacccagagtgtacacaaggaagacacagaagctgggctgaagggggagaaagctgggaaccctgcatggggctactgtgcactgcaccaggactcrttcctggatcccaacagctcccggggaagaggtgaattgaactggcaaggagcaacctgcactcgctacaggcctctgaaaccctggcaggcagagacccccctttgaccaccatggacacttgaattggcagggagagcttcttagagaagtggtaggggcagcaatccagttgatgtggagcccagaaggtttgatgcaggagcatccatagcagagcacatttaggagtggtcatgcccataagctcaacttgcaaccataggtggctttacttcaagggga

SEQ ID NO: 746959 - DNA, 603 bp, Homo sapiens
ctttctagtctgcatttcactttcatttaatatattcactaattcaatagttttcattttctttcacttatagaaaagagaaaaacactgacaaagaaagataccttataatgaacagatacatgaaaaggtgggtacaaagagacaacagcactctagactctaataaagacggcaaaacaaccacgtacatgatatatcagactaattataatatcctagatgaatatagtattgagtattaagaattgagtgaacaatatatttctaaggacaaaaaaggaaatacagtattctccagttggtcattcaactgaaagtactttttcatgcaatattctgcgacaacctggatcacctggttttgccattaaaaaaaagtgaaagtgtgacaatactctttcawcttttatgatgtttgtgcaccaaaatttacttaacaggttcgccaagcttagattcttactaaaatttctaataaagtggtttttcactactctgtattgttcataaattgacttaaaaatataaaagaataaaaaagaatccactagactgagttaataaatggtgatgactttatttggtagactggaaattgaa

SEQ ID NO: 746960 - DNA, 565 bp, Homo sapiens
aagtcaaactcattgaagtaaagggtagaatggtggtttccaggggttgcaggtggagacaggatgggagatgtttgctggtcaaaagatacaaagttttagttggatagcaggaacatattctggagatatactgtactgcatggtgactatagctaatgatagtgtagtgggtacttaaaaattccttaaggaatacattktaattgttctcaccccccaaaattgataagtattaaggcgatgaacatgttaattagcctcatttaattattccaaaatgtatccacacatcaaaacatgttgataccataaatacatacaatttctatttgttaatttaaaatgactaaagtgtaatatgtaactaaaaacaaatataattttttaaaaggtagttagtcattctatttattcattcagtgtttcctaaatgtcagacaaacgtgttttgcctagagatcacacaggaagaaagtttaatgaaaacggaagtcatcacaaagtattatttagtcaagagcttaaccattgaaattttacaatttattcaccagctgaaaag

SEQ ID NO: 746961 - DNA, 445 bp, Homo sapiens
tcctggcatattcagtatcagcaacagagagagtagtatgtgatgaggtcagtgaggaagggccaaggagatcaggtgggagccggtggccactgcaaggatgttggctttcgtttgagtgagatggagcaacaatgcagggtttagatcagaggagtgacatgatttgagctgggatttaaacaaattttggaaaatagggaccacgtcttagtcacttttgtaatgctagtgtcagaaaattttttggaacctgagaaatgcttaacaaacttgagcagagttgcagtacattactaaagmcaagcaaaaaaaaaaaaaaaaaaaaaaaaaagcactgtcccaggtcattgataagagcactagttgtgtttgaggtagaagataaaaagattcgtttggggaatattgtatttattattttaaagtcttaatatttacattc

SEQ ID NO: 746962 - DNA, 570 bp, Homo sapiens
accatatataccactgctggatatatatccaaaagaaagaaaatcagcatatcaaggagatatgtgcacctctgtatttgttgcagtgctgtttacaatatccaagatttagaagcaacttaagtgtccatcaacattcaaatggataaagaaaatgtgatacatatacacaatggagtattattcagccataaaaaagaatgagatcctgtcatttgcaaccacatggacagatgtggatatcattatgttaagtgaaataagcgaggcacagacaatcaaacattgcatgttctcacttatttgtaggatataaaaatcaaaacarttgaactcatggacatagagaatagaaggacagtcatcagaagctaggaagggtagtggggtgcttggaggaagagggtgatggctaatgggtacaagaaaataggatcaaatttacctagtatttgatagcacaacagggtaactatagttaataataacttaattgtgtactttaaaataatgaaaagggtagaattagattgtttataatataaaggataaacgcttgaggggatggat

SEQ ID NO: 746963 - DNA, 604 bp, Homo sapiens
tggtccaggtataccatatataccactgctggatatatatccaaaagaaagaaaatcagcatatcaaggagatatgtgcacctctgtatttgttgcagtgctgtttacaatatccaagatttagaagcaacttaagtgtccatcaacattcaaatggataaagaaaatgtgatacatatacacaatggagtattattcagccataaaaaagaatgagatcctgtcatttgcaaccacatggacagatgtggatatcattatgttaagtgaaataagcgaggcacagacaatcaaacattgcatgttctcacttatttgtaggatataaaaatcaaaacagttgaactcatggacatagagaatagaaggacagtcatcagargctaggaagggtagtggggtgcttggaggaagagggtgatggctaatgggtacaagaaaataggatcaaatttacctagtatttgatagcacaacagggtaactatagttaataataacttaattgtgtactttaaaataatgaaaagggtagaattagattgtttataatataaaggataaacgcttgaggggatggataccctgtgttccatgatgtgat

SEQ ID NO: 746964 - DNA, 570 bp, Homo sapiens
accatatataccactgctggatatatatccaaaagaaagaaaatcagcatatcaaggagatatgtgcacctctgtatttgttgcagtgctgtttacaatatccaagatttagaagcaacttaagtgtccatcaacattcaaatggataaagaaaatgtgatacatatacacaatggagtattattcagccataaaaaagaatgagatcctgtcatttgcaaccacatggacagatgtggatatcattatgttaagtgaaataagcgaggcacagacaatcaaacattgcatgttctcacttatttgtaggatataaaaatcaaaacagttgaactcatggacatagagaatagaaggacagtcatcagaagctaggaagggtagtggggtgcttggaggaagagggtgatggctaaygggtacaagaaaataggatcaaatttacctagtatttgatagcacaacagggtaactatagttaataataacttaattgtgtactttaaaataatgaaaagggtagaattagattgtttataatataaaggataaacgcttgaggggatggat

SEQ ID NO: 746965 - DNA, 654 bp, Homo sapiens
gcaggcagccttattggggtgtgatcctaacaaccctattcaaacctatcttcatgaccacttggttcacagtaaccatttcacattcctgggctgccaaaatctagaattataggatattctcaggaactattatttattgttcttcatttgaagtttcctcaagtagctcagtatgaaattgaggtwttctagaaaactccgaaactcagtacaaggtgtgataggtaagcatctgaacttctctatagtggttgtcttgctcctgtccttatttaccttgatgaagaaataatatccccacttctctattgacagctggggttggagggagatgccatagcaaatccatcttctaaactgacaaccttgttttaagacagcattacttgtgcatgtatgtatatgagttggaggcaggcaatgagaaagagtcataaaattggtttccctaattcgtagcgagactagttttcttcagccactctcaattcagcatctgagattacatgtgactgattccaagttcagaaaacagtcgtttaatgtcctcttacaatttcttaagttgtacattaccttctgacacctacaaaggatcctgctctgttgacatttgtattttcacagttcttgtccatgatggtgacttag

SEQ ID NO: 746966 - DNA, 535 bp, Homo sapiens
aagatgagaaagaatcagatcaaaaataatgaaaactcaaaaacccagagtgccccctttcatccaaatgactgcaacacttctccagcaaggattcacaactggctgaggctgagattgctgaaatgacagaggtagtcttcagaatgtggataaaaaacaaactttgctgagctaaaggagcacatggcaacccaatgcaaggaagmtaagagtcatgataaaacaacgcaggagctgacagccaaaatagccagtatagagaggaatataaccaacctgatagagctaaaaaaacactaaaataaattcacaatgcaatcacaagtatcactagcagaatataccaagcagaggagagaatctcagagtttaaagactgcctttgtgaaataagacaggcagacaaaaaaagaggaaaaagaatgaaaatgaatgaatgagacctctgagaaataagggattatgaaaagatatgaaatctacaactaactgggggtactggaaagagaaggggagaatggaacaaatttgg

SEQ ID NO: 746967 - DNA, 599 bp, Homo sapiens
ggaatattattcagctgtaaaaaggaaaccatggatgaattaagtgacagaaatgagtcacaaaagactgtattgaatatacacattttatgatttctttcatatgaaatgaaagaaatttcatatgaaagaaagaacaggcaaatccacagatatagagagtagattagtggctgcctagggctcagggaggggaacragggatggcagctgatgggtaccaggttcctttatgggatgatgaaaaagctctgaaattagctgtggtgatgataattgcacaactccgtggatatactaaaaaaaaaaaaaaatttgatttcacactttaatgagcaaattgtatgctatgtaaaatatatcttgataaagtaaagctgttaccaaaaaaaatccacgttaactgtccttgaaaatacggaattctatttaaaacactttgcaatagcaactttattatcagatcaaaagagtcttcattaagggaaagcagatcttttttttttttgtactgcgtcaacattttcttggtacccttggcttcattacaaaaataatttgcaggctcaaaagacaaatgtctaaactaaaaatcctgg

SEQ ID NO: 746968 - DNA, 638 bp, Homo sapiens
gggccaaccactagggaatgacccctggcctttcttcacatccttacttcttcccaagaaaagagaaccaatgtgtttgattggtgacttcagagcaggacctaagtcacgagctgagctctgcctatttctgttgaggatgtgcctgcctggggtgagcatgggatacagcgggcacttagccarctgggcctctgtgagcctggctggagcaatccaggactgcgggtgggagagaaagtctgtctcactctgcaggcagtaacaggaggctactgctgacttgtaccacactgttctcctccacagctctgtcagtaatagagctggcatgtggctctccatcttcctcctcctctatcatggttggtttagaacacagatggggaaaatagggttgctgtttattaactttgtattccatttattcataaatggccaccatttgttaacacctgccaatgtgtttcagacaccacgttagattttacgtatgtggtgaagaacaaaagcatggtctgcctgcctcatgaattctgtctctttcactaatgtgtgtgctgaatgagatggtaataataacagctaataattattgagtatgtgtagtatgataagctctatgctaagtatttaat

SEQ ID NO: 746969 - DNA, 619 bp, Homo sapiens
tctgggcctccagggtctgtgctgttgactttgagcctcaaacccagagcttgacctgaggtctggaagaatggaaagcagaaaaatttagtgttgccaaagagcaaagtctctgatttctagccacaattgtgcagaaagtccaggagtgtctcagaaggaacctgacaggaaaaaccctgtgaaggtacaaacaaaagggattctcgagaagacagcagaaaatgatcggagagaactagattctctgaagggctcaggcagtgcagaaactacagacagcagagctgcctcgatggctagcactgattaaaatgcaacgtcgttacctagctgtgccggagcagggggcatgcatatgtatgcatgtgagacagaaagagagacagggagagagagagagagtcagggagagagggagagagagagagagacagggagagagagagtgtgcmtgcacgcacaagagggtgggggaaagactctgtaacccaaatccagtgattaacaaatcactggaaatcagagcttcgggttcaggggaggtctatcctaatccttcctctttcaaccatctcatttctaaaattatctttatttcccaaaaggactttaggtt

SEQ ID NO: 746970 - DNA, 519 bp, Homo sapiens
atccattagaacctctatatgaagtcaattaccacccattttctgctggggatcttctctcccaaagtgtgggaactgagcctcatctaggctcttcaagcaaaacaagttctgacctgtgaggcactgccacaggccagcagggaattctcctggggctgatgcagggaaggacacaggcagaggtagggaatagcatccctaactgcaagtctcaagatttcatttatgaagcatatatttactgacctctgactgtcctctgacccccaggaatacatggcaaatgaggcagatttgtgattccctaaatatatacaggttttgggacttaaatatcaactccaaagattaaatgytatctaggcaaactaaatcatagacagaaactcgcaaacaacaaatgacactagatctcaaaagggaagttatttaatcagagctttcaggacagaatccagcctagagttgggaggaagatataaactggctccacagctcatttggaatgcaacatca

SEQ ID NO: 746971 - DNA, 613 bp, Homo sapiens
gtgaataatgctgacaagttctattttattttattctgtttcattaataagatatcctagctgtgaatcactaaactgatttcacgaccttctaatggatcttttttttttgagagacagagagagaatgctgacttgggtgttctgtacagtacatattttctaatgcagtcctcacagcccaaagaggcagaggaaagtactttttatctccgtttttatagatgagaaaactgaggctcaaggaggctaaggatttgccccagatcacagagacagatacggggctgaactcaggcacatcagaacctaaagcctcctctcatcctactaaaatcrtctcaagtgccccctttataaagtttgcacaatgctgttaaaagtggatttgctccagaaatgtcactgactaactctcttgactaggtccccatatttcctcaatgccaagacatctctgactgtaagttgacattatttagttactaattggaagaaggaggtagtgggaagaaactttgttaaaggtacacattctttccaatcattaggtttatccttggctaataaatggctctaagagtcacagaaacaggcactcagccagattatc

SEQ ID NO: 746972 - DNA, 701 bp, Homo sapiens
accaagctattgaatactaactctatgctaccctgggaaccttctcacaaacattcctacagtttcacttccagaggctactacccacatgctgccggtgggtgggggatatgcaagtgcattcagatatacttaatytgcaaaagcacaaacactgtcttaattataatctaataattctaataaactcatggttaaattcatggccaaataatgcccttacttttttcagcaatgctctacttgattgaaaatctttgttttagaattttacttttgaaatctgtcagaatagcacattcttttcaaatatcctcaataatgacataacctttaaatataggtgtggttttgggggtaaaaatgatttttattagaggcaatgccttgttttcactgatgatatcatcataagagcttctcagaggaggtcattatttataaggacaaataaataattgtttatatttgataacctaatattctctgacagtcttgataattccacgagtttagagttaacaaaacagaggctttttccagttagaaaactatctcagattttgctggttgttgcttagttcaagggcctgcagggaactccaaagaaaatattccctctagtaatacttggattaaattggtgatttggatgttttggccaattaagacactagggaattaccagcctcaaccagaca

SEQ ID NO: 746973 - DNA, 589 bp, Homo sapiens
atgccatccaggactttcatagctagagaagagaagtcaatgtttggcttcaaagcgtcaaaggacaggttgagtctcttgttaggggctaatgcagctggtgactttaagttgaagccaatgctaatttaccattccagaaatcttagacyccttaagatgtatgtggaatctactctgcctgtgctctagaaaggttacaacaaagcctgaatgatagcacatctttttacattgtagtttactgaatattttaagtgccctcttgagatcttttgctaaggaaaaaaggttccttaaaatatagtactactcattgccaatttacctgatcaccctgatggatatgtacaagtagattaatgttctctcatgcctgctaacataaaatctgttctgcagcccagggatcaagaagtaattttgactttcaagtcttatgattaaaaaaaggcatttcataactgatatggtttggctctgtgttcccacccaaatctcatgtcaaactgtaattcccactgttggaggaggggcctgctggaaggtgactggatcatgggggcagatttcccccttgctagtctca

SEQ ID NO: 746974 - DNA, 608 bp, Homo sapiens
atgggtgaaagggaaaatccttcaaatgtggctgcttttaaaaatctttcatgagtatcacgcctggttctgtggtggatacaataatgaatgaaggtggtcctggcccataaggacctgagccaacactggatccccccgaaacacacaccagagccaacactgaacatgcagagccgacaagccgactagtccaccggcagggaggcgtcacgtcctccgcttctgcaaaacacagattgccttgctggccacgagcaaacacgcagcttctccttcactttatcactcagcacccagcccctcagagctatggactgtgagctcggagatctccgcagcaccgcaccgtctttactcaggtggtgtcctaagaccacacgtcactacagccggctgcgcgctctttcggcagctgtggccgtctcagcagctattgtttgtccctgmagtactggtgccggcaggattaggcgtggagccaaaaatggaattctattcatagactggcgaggctggaaagcagctcagaactcatttagttcaaactttcagagttccaaagaaaacactaataaaatggatcaaacgactagtctaaagtcaca

SEQ ID NO: 746975 - DNA, 626 bp, Homo sapiens
aaatagaaataaagttactaaagaaaaaatacaaaataaggtttatagtcacaacatatgaaaaattacagtactacaatcttaactcactgaaagaatatcatattctccagctgctgaaaacctcttggacgaaaccactccagttttcggttcgatgaaaaatttgccatgctcattcccgtcttcgatgctgtaggagatttctgcattggggccctcatccttgtcggtggctatgacgygatagagcggctcccgtctggcatttctttctcggtctggcttttcccgctcagggagtctgattttgtagaacttttgcagaaactgaggtttgttgtcattttcatcaaggattttcacaatgactcttgcaatggttgatttggggggactaccattgtctgtcacagtaacctgtttttttaaagttaacagattaacatgttaagatatactatataaaaagtgagcatcttcttcctcatgctactccgcatgtgtgtaaagctctgcattttgcagggcacgatgacaacatacacagcagatcttcattccaacaacagggctgtaaggaggtgaggcagcacctcccatctctacagggagagagtcagggg

SEQ ID NO: 746976 - DNA, 516 bp, Homo sapiens
cacgccccatcccgcgcgctcctccacgccgcgcccccggacgcccacgccgcgccggacgccacggccaggtgacacctggtgtccgccgcgagcccgcttggattccccgcccgcagctcgaaccccgcaccacgggccgacagcgccccggtgcgggaagccgggcccagccgccgcgccctggggacggtgtcccagaggcctctcctcgtgggcgcacggcgaggccgttcattgtgtttcctctctgggatgggacttttcacccagcagggccaggctgcctgggaycaaatgcgaaatgggattggggcgagttcaccagctgtgtgccccaccgcccttatcttccttatctgcaaaatgggaataagatactatctcacctgttagcctcataattagtaaaatgtgaaaaaaccaaggactgtcttccgttgtgtattgcaccgcttaagatggtgctagatgtttccgataatgaaatgacattttcaaagaaaaaagtaaaac

SEQ ID NO: 746977 - DNA, 635 bp, Homo sapiens
ttatttagtgcagttaatctgtttatttaagatggggttttcactgagtccttcaaggttcggaaaagtgcctaagggaaaaaagactcctaccctaaagagagttcatatagtttttttttgattgcctgttaatgtcgctgaaggattatgattttgtttttgttaaagtttcatcctaaattctctaagacgaataaaggtacagtatcagtaattcgtcttccatttaagggtgaaaggctgaaccagtcaggctgtactgtggatgttttacaagttacaaatgcctcactaaaccacccttctcaraagacagtcactgggcatagaaaatgagcaggattatttgcaggatgttacacctttaacactgactgaaatccagatgggaacaagcaggaatgtgtatgatttcttaaagacacctcaggtgcctttggtctctcgtattgtatatacagtgtatatgcaatacagtgtacaatgtaaagtgtacagtgtacaataccgtgtataatagaaagcagtgccaaggtctactagttttctctacagcagcagtcaacagtcaagttagagaacaggtggggaactagagacagagtgggatagagagagagaggaatgagcca

SEQ ID NO: 746978 - DNA, 603 bp, Homo sapiens
aatattttctcctgactgttttattactattatatacaaggcacttgaataatatgctgatttttgctctgtacattaaaaaaaaatagtattaagcatcaaaatgccttccactgttgcttcccaccaaataaattggtatagatttcttaaagattcctttatgatcaccttcttctgaggcaatgaggataagagagtaagtgacagcatgtgtatttaaagattattgctgttattatcttgccttgagaaaggagatttaagactcayatctttttaaacgtacaatgaatcagagggaaattgaaacgagttggtgagattttgcaataaaatagaacaaaacatattctgatctctttaataacagttaaaatgtgggtttctctcttctctttccacttcacaggttgaggccttaccccaaagatttggcacatgacatgcaaggatagcagaaggagacattttggttagaaaaagaaaattcataaagggtctattagtatgacagcacaagctacgcttcatgtagatatttcaatcttgtattgctcttttctttgatcttgcaaccaaaatagggtcctagaaaccaaa

SEQ ID NO: 746979 - DNA, 607 bp, Homo sapiens
ttccagttttgttcttgctcctaaagaggagtacttgctcttagggcacggtactcactcctatcaagcagcctttcaaataagtacctgagctatcctcaaaggtcttttcaggctggtggggtcaaaattctaccatctctatgacactgtgtgaatgctttaatatttgttcaacttttagcctcctaggagctattttctgagatctctccctgcacacaatataacttaagaatcaaccaaagattggagacgaatcctaagacagatattgaaccttggaatagaaatttagggaaaaaagtcccaatgaaggtaatatgagtctgaagatctttgtatgatatgttaacaatttccaggattgcccacaacagaaaakcactaggcaaggagatttttatgctgaggatgtgtgaataaccttgagatgtaagatgttttatcaattaactagagagagagagagacgagaaccaggttagcacaccatcctggctatgctaaacagttttaattgtatccactagaagaaagggagctactcatttctcttttaagaaggagaggtagtggttgatatttaaaaaagcaatttgaagtt

SEQ ID NO: 746980 - DNA, 564 bp, Homo sapiens
aagatggaggatttttctatggttctcctttattttttttcctggatcctcattagaattgcctttaatatctacatttctagcaaaaacctcttcagtgcaatcaaagcttctactatgcacctcaaaactcctctagcctctggccattttccagttctgaggagtctgccatgttttgaggtgtttattacagkggcaccccacttctcagtaccaaaatctctatgaattaacttgggttacccaacataatatcacagactaggtagtctaagtaacagaaatttattttattaaagttctggagcctggaattctgagatcagagtgtcaacatggccaatttctggtgagggctctctttttctcagtgtttgcttacatagagaaaaagaaagtgagctctcttgtgtctcttcttataagaacattaattttattgaatgagggtcccatccttttggcctcattgaaccttaattacctccatataggccctacaacagtcacgttagtagtcagggcttcaatatataatttagaaggggacacaatttaatc

SEQ ID NO: 746981 - DNA, 546 bp, Homo sapiens
tatacattgtctatttcctctgctatctaaccagatgcttctcagcttcagctaacaacttctttgtctcacttcagactctgaatcaaaccatcaatcttgaggtacaggagacactgattatcatgtcattttcagagtagaattcctgaacaaatctgtttagcaacacagtcgggcagggaagtacaaaaggactacaaggtgcactatctatgtttcattatattaccaatgctaccatgttttaacagtagtttcttctctttatgatgatcaggatcacttttacrtataagaacattttcttattgcctacttgtccctgaacataaggaacccacagcatcttccagaaagctataaagttcaatgggtctcttttgttttctggtggaagtttttccccttttatggcccacaacctcgaaacctatagaacgaatgttgaaggacagaaagtacacattctccaagtgaaccatggagagtgatcttaaacagggatccttctttcatcctgtggttcatggaaccatacatttt

SEQ ID NO: 746982 - DNA, 659 bp, Homo sapiens
atagttagacagggttaacttccttgttattgtttgcagcctatatgtgaatgagtatatacccaagaaaagataaaaagttttaaaactttagaaatgtaatattgccaaattttctgtgtatatatttgggcaagtaaagtttaaaaatataaatcttgagagtgtcaccagcttaacacaagagaagaaagatgtcaacattgtccttaagtaaatcgtttttttctaacaaaagcaattgtgttgtatgaattcttacatattggctttatttttcttcatacactttcctaccttcaagaactttttaccaaaaaatgtgcattactttgctcgtgatagtaaatgagttaaaatattgtaaaaactattatttggatacaaactcaaactgtgacacattgactaagaaccctagattttcttataatcttcatgtattagcctcataaagctgaacaatttaccactgacaagtkcatgtgacccatcagttacaggaaactaacatgatataaaaacaacaaatacagtttaacaattatataacattttgaataaaaagtagtgaatgtgacaatgagatgaataagtatctttatgaaaaagtgatattagaaaattatattagaatactttgatttcagatttgtcac

SEQ ID NO: 746983 - DNA, 512 bp, Homo sapiens
gccgaggagcacaggaggtgaggacagccttggggtaaaggacagccgccgaggaagatgagctgcttccagggaacagactctgagagaagaggtgtacacattttaaccaaaagaagaaaaccaggaaattggagttgtctgratgaacaatcattcctaaggaacgctgtgaggtgaaacctgattcctgtttcagactcccccaacaccttcctgtctctgccctagtctgcaaagattcttaactatcattccttcattccactcattcatttagctactgattatcctaacagtggcgcaacattgtagtatgtgcaacataaaagacacattacagtagggcagaaaacataagacattgtcctatgaaaagtttcgtaagacgataagcagctaacattaattaatcaaacaaggagtattgtattaattcagaggcaagagcactggaatctgggatgggcttgggaacaggtgagctcacagaaggactcttgcctgtggct

SEQ ID NO: 746984 - DNA, 650 bp, Homo sapiens
agcaagttcttagagacctacgacaagacacagactcccatacaatagtagtgggagatttcaacactccactgacaatattagacataactttgaggcagaaaattaacagagatattcaggacctgaactaaacattggaccaaatggatctgatacacttctacagaactctccacaccaaaacaacagagtatacattcttctctttgctacatggcacatamcctaaaatcgaccatgtaattggacacagaacaatccttagcaaatgcaaaaaaatccaaatcataccaaacacactctcagaccacagtgcaataaaaacagaagtcaagactaagaaaataattcaaaaccatgaattacatggaaattaaacaacatgcttctgaactacttttgggtaaataatgaaacttaggcagaaatcaataagcttttgaaactaaagagaacaaagatatcatattccagaatctctgagacaagtaaggcagtgttcaaagggaaattcattgcactaaatgcccatgtaaaacagtcagaaagatctcaagttaacaacctaacatcacaactgaaaaaaattagagaagcaagaaaaaatcagccccaaaactagcagaagacaagaaataaccaaaatc

SEQ ID NO: 746985 - DNA, 667 bp, Homo sapiens
ttttgtataaggtgtaaggaagggatccagtttcagctttctacgtatggctagccagttttcccagcaccatttactaaatagggaatcctttccccgtttcttgtttttgtcaggtttgtcaaagatcagatggttgtagatgtgtggtattatttctgagggctctgttctgttccattggtctatatctctattttggtaccagtaccatgctgttttggtaccagtaccatgctgttttggttactgtagccttgtagtgtagtttggagtyaggtagcgtgatgcctccagctttgttcttttcgctcaggattgtcttgacaatgcgggctcttttttggttccatatgaactttaaagtagttttgtccaattctgtgaagaaagtcattggtagcttgatggggatggcattgaatctataaattaccttgggcagtatggccattttcacaatattgattcttcctatccatgagcatggaatgttcttccatttgtttgtatcctcttttatttaattgagcaatggtttgtagttctccttgaagaggtccttcacctcccttgtaagttagattcctaggtattttattctctttgaagcagttgtgaatgggagttcactcatgttttggctctttgtttgtctgttattggt

SEQ ID NO: 746986 - DNA, 645 bp, Homo sapiens
  misc_feature 628: n = A,T,C or G
gtgagagctacccagctgagcccagtcaaaccacagaaccgtgaagcataataaagtactgtttgaagtcactaagttttagagtggttcttacttagcagtagataaccaggacacataccaagatgaatgtctgtgttttcaacacaaagtgtcaataacactgataactatggcaaatagcattgagagcttaatgtatgctgggcaccattctaagcacttgtactaattttttttttttttttttttttgagacagagtcttgctctgtcacccaggctggggtgcagtggtaccatctcggctcactgcatcctccacttcccaggttcaagcgattctcctgcctcagcctcctgagtagctgggattacaggggtgcaccaccatgcccacctaatttttatatttttagtagagacagggtttcaccatgttgggtagcctggtctygaactcctgacctcaggtgttctgcccacctcagcctcccaaagtgttgggattacaggcatgagccaccacacctggccagcacttgtattaattcatgtaaacctaatatccaccctttgagatgggttctgttatcatcctcacttaataggtaatgacaaaggctcanaaaggttaagaaggttg

SEQ ID NO: 746987 - DNA, 645 bp, Homo sapiens
  misc_feature 628: n = A,T,C or G
gtgagagctacccagctgagcccagtcaaaccacagaaccgtgaagcataataaagtactgtttgaagtcactaagttttagagtggttcttacttagcagtagataaccaggacacataccaagatgaatgtctgtgttttcaacacaaagtgtcaataacactgataactatggcaaatagcattgagagcttaatgtatgctgggcaccattctaagcacttgtactaattttttttttttttttttttttgagacagagtcttgctctgtcacccaggctggggtgcagtggtaccatctcggctcactgcatcctccacttcccaggttcaagcgattctcctgcctcagcctcctgagtagctgggattacaggggtgcaccaccatgcccacctaatttttatatttttagtagagacagggtttcaccatgttgggtagcctggtcttgaactcctgacctcaggtgttctgcccacctcagcctcccaaartgttgggattacaggcatgagccaccacacctggccagcacttgtattaattcatgtaaacctaatatccaccctttgagatgggttctgttatcatcctcacttaataggtaatgacaaaggctcanaaaggttaagaaggttg

SEQ ID NO: 746988 - DNA, 562 bp, Homo sapiens
ggaaaatagacaagagacaagaagaggagaagcttgaagatatatttggtccaaggaagagactcttcagagggaaggtcacatcagctagaaacattaatgcgactggatgggctcaaaccaccgacttttcagtcaacttccgacagcactaacctagtgttccagagaccctgcttgttaaacagtgaaagctgttgctcaattgtgtcatccataattgtcaaatattgtcatttagtagcacaaggaagtattctctgttgccaagctagagtacccataactcttctgttttgttgaacattcttccccaccacaaaccctctttagaagactggtggctcctaaaacattgaggccaacagwcctgtccttgtgcatgtttgggcattgatccagggccaaatcagtgggagactcctccacgcacatgccaggtccccaggtgacaactgcagtctctggatctgaggtcatccactttcccattcctagctcacctcacccatcatgaagcctggtcaggattgccagagacccgagtgggcaggtgcccgca

SEQ ID NO: 746989 - DNA, 592 bp, Homo sapiens
aatatatggcaatgaaaatgaggcctagcatgactgactgcattttgctcctaacccttcctaccctgtggtgacatcttccaggctaactgctttttcttatttctgcacataggccaagctatctatgggagggatttagcttacagttyaactttaaagcacagatgataataatcccttccccaaactaactcctgagaagatagagaggttgtatacacaagtaacagtgttatgctgaagatttataagagcagtgtgacctgacaaaggacgaacaattttcaccatccccttgggctcccactgcagcccatgtctgtcattgtcagacctcttcacctcaagcgcctccttcttcctcccttccctaacgtacaaggagccggaaaatcgtattaatttaagatggttcttcaggatgttacttcaccatctgttcagtttggtggctctctggaataaagtcaccttccctgcccctacacctcaaccctcgacatcttggctgtcatgcagcaagcggtgagtgcagtaagcggagatcacaccactgcactccagtctaggtgaccctgtctcaaaaaaa

SEQ ID NO: 746990 - DNA, 592 bp, Homo sapiens
aatatatggcaatgaaaatgaggcctagcatgactgactgcattttgctcctaacccttcctaccctgtggtgacatcttccaggctaactgctttttcttatttctgcacataggccaagctatctatgggagggatttagcttacagtttaactttaaagcacagatgataataatcccttccccaaactaactcctgagaagatagagaggttgtatacacaagtaacagtgttatgctgaagatttataagagcagtgtgacctgacaaaggacgaacaattttcaccatccccttgggctcccactgcagcccatgtctgtcattgtcagacctcttcacctcaagcgcctccttcttcctcccttccctaacgtacaaggagcckgaaaatcgtattaatttaagatggttcttcaggatgttacttcaccatctgttcagtttggtggctctctggaataaagtcaccttccctgcccctacacctcaaccctcgacatcttggctgtcatgcagcaagcggtgagtgcagtaagcggagatcacaccactgcactccagtctaggtgaccctgtctcaaaaaaa

SEQ ID NO: 746991 - DNA, 632 bp, Homo sapiens
atttactaacgtaccataggatgaccatacttcaaaagctgtactctcatggccactgcatcgaattttgagcatattttatggaaaactattgagctcactcttttcatgatcgcagtgtgctgtgtgtcatgagggcactaactcagagtgtccttttactcccttaccagtatgtcacctggccaattcactagctcactttctctctgtctctgtctctgtctctstctctctgtctttctctttcattgttttctacctggccctgttctatcccaacataaagacaataatttgttacctcattaatggatctgtcctttttcttttcaaactcttccttatgttagccatgaaatctagctggggctgtgtggtttctgatttcccctggcttattctttactttttcccactgttccaggctcaacagggagctgctggatgagaaagggcctgaagtcttgcaggactcactggatagatgttattcaactccttcaggttatcttgaactgactgactcatgccagccctacagaagtgccttttacatattggagcaacagcgtgttggctgggctcttgacatggatggtgagtacctttctatgaaggtgataaggatc

SEQ ID NO: 746992 - DNA, 592 bp, Homo sapiens
atatgggaagcaaaaggtcttttcaatatttggccacatcttgatggtggccctccagatcagaaatgcattgcccgatggaccaggaaaccatgccagggcattttgtgaaagataaaacatgacagttttcagtacaatgctgaaccayacatagatgttcatgtctctgtgcacattgggctgactgtgcttggagaatgggaagtgggaaatatctgaacgaacattttgtatttacagaaaatgacgaagatgaggatgaagatgttcaagttgaggaggctgagaaagtactggaatcatctgcccccaggtaacactgaatactcaggagcaagtaatgggtggtaacatatgaaaatgtctaggaggcacaccctctctggcatctatgatgggccaaaagcccgcattcgcttggccacagtatgtgaaattcaacccagcttagacacagggtgcggcagctgtcgtgtttctctatgtgtgccaagtgtcatgtctgtaccatacagggatagctgagtcttcatcctcctcagctcctatctgtccagtgcactgaacaccagctgctctcttcctctct

SEQ ID NO: 746993 - DNA, 592 bp, Homo sapiens
atatgggaagcaaaaggtcttttcaatatttggccacatcttgatggtggccctccagatcagaaatgcattgcccgatggaccaggaaaccatgccagggcattttgtgaaagataaaacatgacagttttcagtacaatgctgaaccacacatagatgttcatgtctctgtgcacattgggctgactgtgcttgsagaatgggaagtgggaaatatctgaacgaacattttgtatttacagaaaatgacgaagatgaggatgaagatgttcaagttgaggaggctgagaaagtactggaatcatctgcccccaggtaacactgaatactcaggagcaagtaatgggtggtaacatatgaaaatgtctaggaggcacaccctctctggcatctatgatgggccaaaagcccgcattcgcttggccacagtatgtgaaattcaacccagcttagacacagggtgcggcagctgtcgtgtttctctatgtgtgccaagtgtcatgtctgtaccatacagggatagctgagtcttcatcctcctcagctcctatctgtccagtgcactgaacaccagctgctctcttcctctct

SEQ ID NO: 746994 - DNA, 592 bp, Homo sapiens
atatgggaagcaaaaggtcttttcaatatttggccacatcttgatggtggccctccagatcagaaatgcattgcccgatggaccaggaaaccatgccagggcattttgtgaaagataaaacatgacagttttcagtacaatgctgaaccacacatagatgttcatgtctctgtgcacattgggctgactgtgcttggagaatgkgaagtgggaaatatctgaacgaacattttgtatttacagaaaatgacgaagatgaggatgaagatgttcaagttgaggaggctgagaaagtactggaatcatctgcccccaggtaacactgaatactcaggagcaagtaatgggtggtaacatatgaaaatgtctaggaggcacaccctctctggcatctatgatgggccaaaagcccgcattcgcttggccacagtatgtgaaattcaacccagcttagacacagggtgcggcagctgtcgtgtttctctatgtgtgccaagtgtcatgtctgtaccatacagggatagctgagtcttcatcctcctcagctcctatctgtccagtgcactgaacaccagctgctctcttcctctct

SEQ ID NO: 746995 - DNA, 597 bp, Homo sapiens
tgtctttccagagattacatactagaatgtcatctcatgaaggcagcaactttatctaaatcactgcatctccagcacaagaacagcatctgacatgtaaaagacactcaataaatatttgttcaatgaatacatttatgtcacacaatcacacgattaacttccataactgagtaccaataaccaaacagaaaargcatttttgcaatgaaaccctagcagagaaccatgatacactattacttggcaatgacttctaattggattccctaactactagaaacttctaggcacctgctgtccacagactcagaagttgtagctcagattatgtacctagaggaaaattaacagagcatgcttctttgggccagtcccattcaaaggacaaacaagacataaaccaaacttcagagttaaactatttagatgcagggactatactgaagaattcctaacaatatataacatgatgaactcaggagctctcttatgatccagttttaatcacatctcaaaacttgacaagacaaaaaaaaactcactggaaagatgaacactaatgaataggcttatgctttaaggcaagatagatag

SEQ ID NO: 746996 - DNA, 490 bp, Homo sapiens
ggtcaggctggtcttgaactcctgacctcgtgatctgcccgcctcggcctcccaaagtgctgagattacaggcgttagacactgcgcccggccacaaagctcttcttatctcacctgatccccataatacttgacaagtgttctcacccagtctctgtagaaggcaggccagagaaaaggtggcaaaatgtcctgaagcaataargatgggcttcgcagcgcacactgagtggactggacctagatggggcagggaggtgccgcgtgccctggtctgcatggaaggcacttacgctctctggaattctgggatgctgaagatggcctgcatgacagagctgagatagcagctgttgcccaggttcttcagacccgtgtagccaggaccatacattggcttcagtttcgtgcccgactcctggatcacttcccactcactgaccctcagcttgatgtcattgtcctggagcccattctctgtctgagacaa

SEQ ID NO: 746997 - DNA, 568 bp, Homo sapiens
ttctaccataggtatatatccaagagaaatgaaaatatgtgtccacacaaaaacctgtacacaactgttcataatagcattatttagaataatcaaaaaaatggggccgggcatggtggctcacacctgtaatcctagcactttgggaggccgagaccagcagatcacttgaggtcaggagttcgagaccagcctggctaacgtggtgaaaccctatctctactaaaaatacaaaaattagccaggtgtggtggcatgcgcctgtagtcccagctactcrggagactgaggcaggaggatcgcttgagcctgggaggcagaggctgtagtgagctgagaacacaccattgcactccaacctgggcaacaggagagaaaccctgtctcaaaaaaaaatttttttaataaaaaataaaaataatggaaacaacccaaatgcttatggacataacaaatagaatgtaaaacaaaatgttgtatgtacatacaatggaatgttatttgccaataaaaaagaatgaaatattgatacatgctacaacatagataaactttgaaaatatattct

SEQ ID NO: 746998 - DNA, 668 bp, Homo sapiens
atgcctgtaatcccagcactttgggaggccaaggccggtggatcacttgaggtcaggagttcgagaccagcctgaccaacatggtgaaactctgtctctactagaaatacaaaaattagctgggcgtggtgacaggcacctgtaatctcagctactagggatggtgaggcaggggaatcgcttgaacctgggaggcggaggttgcagtgagcagagattgcgccatttcacaccagcctggttgacagagcaagacttgtctcaaaaaaagaaaactactgataagccttcaggttggtaattttgatttttcttttcctgcccccaatctttatttataggcactgtaaacactgccaattagaaatttggttagaaaacgggtacytatttgtaacttttaaacaagtagactaagctaggttaactcctctgggaacctttacttgatgaaaagctgacccagcagagttctgtgttatctgtcccttgttagcacatgccctttctgagtctggcagaatgaagggagaatgacacctctgcatctccagggtcctgaagaattgctgcttccatgaacaggatggtgactggcagatccccttccttcagcctttttaagccttcttcaaatgctccaggccagtccttgaaggggttttcag

SEQ ID NO: 746999 - DNA, 589 bp, Homo sapiens
tgttttgtgttggtaatagtttggagtaaataggaaaatcaaagctacagaaaatattttgagatttagctttatttcatgtgtatgtatatgcatagcatgacaaatataaatagctatttgctggtgttaccatgcatyttaaaatagactgcaatgttattgctctgctatttggaagctcaagcaccctgaatactaggaatgatgcaggaatgatttccctgcacaagatctctctgttcatctctagaaatataagtatttagtcttcttgaagagggctgaaccttaggctccttcaagattcccaggagactctggatttctccacatccattgtttctttcccagtatataaaaagatgagaaggtcataattggccaagagaggtctattttttgtttagttaattaattcgagatttaaacattcctgtacttatgcattcaataataattcaagaaacgcctattgagcaccaacttaccagaggctcagcagagagcaaaacagaccaaacctccatcctcaaggagtgtgcatggtagtggatggagacagacacaaatgggagaaatatgttgg

SEQ ID NO: 747000 - DNA, 588 bp, Homo sapiens
aatgaatttggaactattatagactgggcccctcgaggccaattatattatgattgtacaggccagacctactcatattcacaggccccatccgtctggcccattaatcctgcctttgatagtgatttaactaaaaggctggaccaggtttatagaaggttagaatcaccctatccatggaaatggggtgaaaagggaatttcaccatcttgaccaaagttagttagtcctgttactggtcctgaacatccrgaattatggaagcttactgtggcctcgcaccatattagaatttggtctggaaatcaactataggaacaaagaatcataagccatattatactatcaacctagattccaatctgacaattcctttgcaaagttgtgtagaacccccttatatgctagttgtaggaaacatagattaaaccagattaccaaactataacctgtgaaaattgtagattgtttacttgcattaattcgacttttaattggcagcaccatattctgctagtgagggcaagagagggtgtgtggatccctgtgtccatggactgaccgtgggaggcttcgccatctgtccat

SEQ ID NO: 747001 - DNA, 533 bp, Homo sapiens
ctagatccaaaagattcatttttactgtgattgcagtgaatatgggtcttattgcagtcacagctactcagaattgtggaactctgagacccaaatagatcaaaaattggcaaaccaaattaatgatcttatacaaactgtcatttggataggagataggctcatgagcttggaatatctttttcagttacagtgtcactggaatacatcagatttttgtattacaccccaagcctataatgagtctgagcatcactgggacatgattagatgccatctacaaggaagagaaggtaatcttactttagatatttcaaaattaaaagaacaaatttttgaggcatcgaaagcccatttaaatttggtgccaggaactgaggcaatcgtaaargctactgatggccttacaaatcttaaccccatcacttgggttaaaactatcaaaagttccactattgtacattgtgtattaatccttgtatgcctgttctgtctgttgttagtctacaggtgtatccaacagctctgaagag

SEQ ID NO: 747002 - DNA, 626 bp, Homo sapiens
gtaggtgtatttttctccttcaaatacttggaaaggtttttggatagcaataggtgtgtttcagaagatttttgccttactaatcatattttttccttttcctaaattctatatttttgccatgcatttggttttcattcaggaaataacctcatcttggtaaattggtggtgggaactatgctctatgaattgtacatgacagttatttaggtatatgtgatgttaattttatgtattactgaaatgcaactcttggctaaccttcttaaatcaaagttactggataactgactgttcttaggatgtaagccctttgatcttagaaaacacgctgtgacattyacattgtagattctcaacacatacttgttgaatagaaataaattacatcccaaccctagtggttgagaataattttccattaagaaggtctggcacaatctacaagctgctgaactcacatcagaattttaattggattctatggtgattcgccaactcatttctcacattgatttatcttcccaattccttaaaggaaataactccttaaactccttaaaggaatcctgggaaataaaacaatctttcaattcatattacatttttctatgccttacattt

SEQ ID NO: 747003 - DNA, 604 bp, Homo sapiens
tatataccaagcgatgggattgctgaattaaatggtatttttgcttttagctttttgaggaatcaagatactattttccacaatggtcgagctaatttacattcccatcaatcttggagtaagtaaaattaacatgyactgggacaactctcaaaagcttcctagaggaagaaaaacctgggattttatggaaagtgtaactaattcagtaatcattttctggttacctactatgtactaggaactgttctagacataagtgatacataagtcggaattcctgatatcatggaccttacattctggtagtggaaaaggaaaaggtgtacacaataatgtaattggctaatctcaagtcctgataagaaagaaaatagaatgatgtttttatgagaataaaagataggatcctctcagaacacacgaatggcttccctgggctgataaatgtgggagaataatacagtcacttccttctggttctgtaactagagacacagggcgtgatgtctgctctttgtaactcgggacccttgagaaggtaggctgctcacaggcaccgcctgctcctcctcattccctctgctgaagcaaaaacaaaaaa

SEQ ID NO: 747004 - DNA, 610 bp, Homo sapiens
ctttgtagtttcacagcgcaatgaccaagtcgtgctgagttctaattcatttatttacaaagagttctatttctactccctagaatgtactatagaagtaaatttaaaatggtatcttgttcctaaggagcgtacaagctttggggagtgtaaatatctctaataccaattagaatgcgggtgaaacccatttttaaaatgtgtaaacaaggtgactgttggtatcctacatatgttaaacaatatattcaaggatattcrataaaatataacttgccatttctccaacatgtccctttataattttttttttttttttttgagacagtctcgctgtgtcccccaggctggagtgcagtggcacaatcttggctcactgtaagctccacctcccgggttcacgccattctcctgcctcagcctccctagtagctgggactacaggcgcctgccaccacgcccagctaattttttgtatttttagcagagacggggtttcaccgtgttagccaggatggtctcgatctccttacctcgtgatccgcccacctcggcctcccaaagtactgggattacaggcgtgagccactgcgcccagcctacaaaattt

SEQ ID NO: 747005 - DNA, 511 bp, Homo sapiens
attagcttaatatgtgtaaattattataagaaagtgatctaaaaaaggtgctgaaaaggtcactgcaaaaactcatgaataaatattagatttaaaattcagtctcaaatgaaacttcgggttctgttttgctcagctaaattctgtattttgaaatttattttacataaaatggtgaccagctcttttgcatacagggtgtgaaaaacacaggrtaacagtgcaacataggaaggtcaactgacataggaggtaaaggaatcctggcaaagagaaagggctgatggtggaaaagattgccagaagtcagattctagacaccactgaagaacaaacatacactcattcctctaagctgatttcagagaggtcctccctgctcaggaacacatccagctcttttttcaagggtgtgattagcaggaagagatgactgcactttatgaataagaaagcttcatttgagaaacaaagatcccaccagctataactgcaataacaaccttgacat

SEQ ID NO: 747006 - DNA, 557 bp, Homo sapiens
attttaaattatttgatgtggacacagtatcttttccattgaaaatgagacaaacactttaatgccctttgaggtttccttttaggccacgtgcctacactatctatctgtctgtctgtctatttatttattattattttttgagactgagtctcgctctgtcacccaggctggagtgcagtggcatgatcttggctcactgtagcctctgcctcccgggttcaagcaattctcctgcctcagcctcccgagtagctgagattataggcacgtgcaaccactcctggctaatttttgtatttttagtagagatggggtttcaccacgttggccaggctggtctcaaactcctggcctcaggtgatccacccacrtcggcttcccaaagttctgggattacaggagtgagccagcatgctcggttatactatctatttaaagaataattgtaaacatgtagtaactaaaaataagagtttattaccaagatatatgattttatttttgaagctaagtagcttacaaatctgtgttctctacactctttcctcttcgtt

SEQ ID NO: 747007 - DNA, 557 bp, Homo sapiens
attttaaattatttgatgtggacacagtatcttttccattgaaaatgagacaaacactttaatgccctttgaggtttccttttaggccacgtgcctacactatctatctgtctgtctgtctatttatttattattattttttgagactgagtctcgctctgtcacccaggctggagtgcagtggcatgatcttggctcactgtagcctctgcctcccgggttcaagcaattctcctgcctcagcctcccgagtagctgagattataggcacgtgcaaccactcctggctaatttttgtatttttagtagagatggggtttcaccacgttggccaggctggtctcaaactcctggcctcaggtgatccacccacgtcggcttcccaaagttctgggrttacaggagtgagccagcatgctcggttatactatctatttaaagaataattgtaaacatgtagtaactaaaaataagagtttattaccaagatatatgattttatttttgaagctaagtagcttacaaatctgtgttctctacactctttcctcttcgtt

SEQ ID NO: 747008 - DNA, 497 bp, Homo sapiens
agagggacctggaccctacctgctgtgggtggaggggccacctggaaagattgagggatgcaagcagcatctaggagcaaaggctaccctgggctgaccgccagaaaggaaacggagatctcattgctacaaccacaggaactgaattcagtgaataacctgaatgaacaaagacacacatccatctccaaaattttcaaaagggaatacagccttgtcagccccttgctgtcaatctgatgagactcaggacagagaaactagccaagcctacgagactctgacctgcagaactgtgagtygataaatgggtgttgtttttagctgctaagatggagactattcgttatggcagcaatagaaaactaatacaagagagttggcaagatggctgaataggaacagcttcagtctgcagctcccagcaagaccaacgcagaaggtgggtgattattgcatttccaactgaggtgcccggtttatctcactgggactgg

SEQ ID NO: 747009 - DNA, 454 bp, Homo sapiens
actggcaaattggatagagtcaagacccattggtgtgctgtatttaggagacccaactcacatgcaaagacacacatacgctcaaaataaagagatggaggaatagttaccaagcaaatggaaagctaaaaaaataaaaataaataaataaataaataaataaaaacagcaggtgttgcaatcctagtctctgataaaacagactttaaaccaacaaagatgaaaaaaagacaaagaagggcattacataatggtaaagggatcaatgcaacaagaagagctaacttkcctaaatatatatgtacccagtacgggagcacccagattcataaagcaagttcttagagacctacaaagagacttagtctccaacacaataatagtaggagactttaacaccccactgtcagtattaggcagaacaatgagacagaaaattaacaaggatattcag

SEQ ID NO: 747010 - DNA, 646 bp, Homo sapiens
aacagtaataatgataatgataataaattgtttactacttactgtcaggaattatggtttatgatcacatttaatactcccaacaaaactgcaagatgtaggtattactatcctcatttcacagatgaggaaactaaaggtaaaataacttaaatattttaccagctaaagcaagtagagttggaagtgagatatagacctgattcaaaattctgtttcccctaaaacatactgcttcttaataatatttttgtatcaccaaagtcactgtttaaagaaaaaatgtggaccaatcaaggcaacacaatgcgaccccatctctacaaaawataaaaaattagccaagtgtgatggtgcatgcctctggtcctagctccttgggaggctaaggtgggaggatcacttgagcccaggaggtcaaggctgaaaaaccatgatcgagccatggcactccagcctgggcaataaagtgagatcttgactcaaagaaagtgtaattacttacttgcatcaaatatgtatttaaaaaatagagtatgttttactcactcccctttggaatttaatatgcaaaagtattttaaaatatatttatgaaaagtatgctgatttgggcagtgattaacactccttcaataaaatttag

SEQ ID NO: 747011 - DNA, 646 bp, Homo sapiens
aacagtaataatgataatgataataaattgtttactacttactgtcaggaattatggtttatgatcacatttaatactcccaacaaaactgcaagatgtaggtattactatcctcatttcacagatgaggaaactaaaggtaaaataacttaaatattttaccagctaaagcaagtagagttggaagtgagatatagacctgattcaaaattctgtttcccctaaaacatactgcttcttaataatatttttgtatcaccaaagtcactgtttaaagaaaaaatgtggaccaatcaaggcaacacaatgcgaccccatctctacaaaatataaaaaattagccaagtgtgatggtgcatgcctctggtcctagytccttgggaggctaaggtgggaggatcacttgagcccaggaggtcaaggctgaaaaaccatgatcgagccatggcactccagcctgggcaataaagtgagatcttgactcaaagaaagtgtaattacttacttgcatcaaatatgtatttaaaaaatagagtatgttttactcactcccctttggaatttaatatgcaaaagtattttaaaatatatttatgaaaagtatgctgatttgggcagtgattaacactccttcaataaaatttag

SEQ ID NO: 747012 - DNA, 532 bp, Homo sapiens
attagggattaccatgatcagtgataagaactgcggagtcctcctggggatcctctaattaggtctactctgtcttaacgttttgttcacttgccatcataattaatgttctgccttgccatcataattaatggagaacaggaagaaagccttcacattaagcttatatattttcttttttctcttttttttttttgagacggagtctctctctgtcgcccaggctggagtgcagtggcgcaatcttggctcactgcaagctccgcctcccgggttcacgccattctcctrccccagcctcccgagtagctgggactacagtaggcgccgccacaatgcccagctaattttttggtatttttagtagaaacagggtttcatcgtgttagccaggatggtctggatctcctgacctcgtgatccgcccgcctcggcctcccaaagtgctgggattacaggcgtgagccaccgcgtccagcaagcccatatgttttcttagtgtctcccaggcagcaacgagacttctctattg

SEQ ID NO: 747013 - DNA, 598 bp, Homo sapiens
ggcctcccaaattgaccatgatctggctccaaagcagtgagattcattgaaaacaaggttttacagcaggagcagacaaacagaagcccatgggtcaaatccagcccatcacaagttcgtgtatggccagtgggtttaaactagttttatatttttaaatggttgggggaaagctcaaaagaagcacagtcttttgttacttatacaaattatatgaatttcaagtttgagagtccataaataacattttattggaacrtaggctcattgtttgcatattgtctgtggctgctttggcacggcatctggggaactgagtacaatctattcttgttattggcaacatttatgttacataaagttaccattaatactgaattagtgaatactgaaccattgctcctaggggaaatatagggttagtttgctgtaggcctccggtcacatttttgtctactgatcaataagtaattatattttatatgtgcttctgtttaaagggactctgtttaatatataatgctggcttgtgaacatggaactcacggaaacagcactagaactcaggcctgaacgaagctcatccaacacatgggtt

SEQ ID NO: 747014 - DNA, 624 bp, Homo sapiens
gtgaatactgaaccattgctcctaggggaaatatagggttagtttgctgtaggcctccggtcacatttttgtctactgatcaataagtaattatattttatatgtgcttctgtttaaagggactctgtttaatatataatgctggcttgtgaacatggaactcacggaaacagcactagaactcaggcctgaacgaagctcatccaacacatgggttttctccttgacgcacctcacagcttcttgtgcttaggaactttaggcagcacctcagcactatacttgcgagtcactgaaatgcaaaatcactaaccaaaagcacaaaagtgcaaaacacatgggactaagtagatcctgaacaggcaacttatttacagtgtgagagttgaaacaaaaagatagaacattgctctgttcagcattggctggaaacgtgggtgtcaggtgacatatgtttttccaggaataagtgcaaaggcaccaygagtattcatgttgaggctacaaataaattttagtgagtaggtgaatttggaaatacagaatccacaaataatgaggatcggctgtagttgcagcagagtctatacagatcacaaagtctaaagtatatgcgttgtgccc

SEQ ID NO: 747015 - DNA, 620 bp, Homo sapiens
ggtaagctattgattattgccacaattataaaatgcctgtttttactgatgataatattctttattctcaagcctacttttctcatatgaatttagcctttttggcttttttttgtctttgttagtatttgtatgatctatcttctttcgtcattttacttttaacctgtgtctataaatttcaagcagatttctcatagaaggcatataggtgagtcttatttttttatccagcttgatacttttttctttttcattggaatgtgaaatgatttatggtaaatgtaattactgatatgatttggtttacatctcttattttgctatctgtttactatttgatccatrtgttctgtttttgttttccattcttctttagaaatgactatttttaaggattcggttttatctcatttattagcttattagaaatacttctgtgttttatctttagtagttatttactttagtggtttgtctatggattgctctatgtatatttaatatcattatatattcaaattctaatataccacccatgtaagaatcttacaacagtgtacttctatttgttcatctcattgttttatgaggttattacatattttacttctacatgt

SEQ ID NO: 747016 - DNA, 620 bp, Homo sapiens
ggtaagctattgattattgccacaattataaaatgcctgtttttactgatgataatattctttattctcaagcctacttttctcatatgaatttagcctttttggcttttttttgtctttgttagtatttgtatgatctatcttctttcgtcattttacttttaacctgtgtctataaatttcaagcagatttctcatagaaggcatataggtgagtcttatttttttatccagcttgatacttttttctttttcattggaatgtgaaatgatttatggtaaatgtaattactgatatgatttggtttacatctcttattttgctatctgtttactatttgatccatatgttctgtttttgttttccattcttctttagaaatgactatttttaaggattckgttttatctcatttattagcttattagaaatacttctgtgttttatctttagtagttatttactttagtggtttgtctatggattgctctatgtatatttaatatcattatatattcaaattctaatataccacccatgtaagaatcttacaacagtgtacttctatttgttcatctcattgttttatgaggttattacatattttacttctacatgt

SEQ ID NO: 747017 - DNA, 624 bp, Homo sapiens
ctgttgtgcaatgtgagatgggagaaaaggctgtctggggctgtgtgttataatttttgtttaaagcactattaatctgattcttcaggtatttttggctgcaatgagcttttttttttttgtaatatccagggtttaagctataataatttattttttaaaatgactacgaacattttaagtcctgaataatggacytgtgcttgagttttgggcaaatacctcctcatagtttggattttactagtatagaggtcatatgtgaaatgttctatgaatgacttggaaccacttgtatgaaatcaggtacaaactgataaggtgttcagaaactattgatattaggtctatcaggccttagaaggagtggcccttggttgttgtacttctatctattcaatctaattttatagattttttttaggcatgtttgctgctctcacatttatattaactgcttctaataagattcatgccgggctgggactctaattacatgagtttattcaaattacagataaatcagtagatattaaatctgaagaagtctcagaaagaccactctctacagataggtaaaaagaatttaggtgtaaccaccttttaaatgatgagaggtctttc

SEQ ID NO: 747018 - DNA, 650 bp, Homo sapiens
aaaatctgtggtttagtgtaaccaccttcatcagttttctttgctagatcttctggataacttgctataacttctaaatcagcacttgctgcttcactttgcacttttatgttatgaagacagcttctttccttaaacctcttgaatcaacctctactagcttcaaacttttyttttgcattttcctcaactttcttgtcttcacagaattgcagagtcggggccatgctctgcaaatgctgtggctggtttttgttttgttttgtttttaagagacagggtctcactctttgttgcccaaggtagagcacattggcatgatcatagctcaccacagcctcaaactcctgggttccagcaatcctccacttcagtcttccaagtagctgggatcacaagtgtgctccaccacaactggctaacttttttatttttgtgtgtggagatgaggtctcacaatgttgcccacacgggtctttaattactggcctcgagcaatcctccaatcttggccttccaaagtgctggaattacaggtgtgagctccaccatgcctggctagtggctggtttgatctatccacagcactcagaccttctccctagcagcaataaggctatcttgctttcttatcattcatgtgttcacta

SEQ ID NO: 747019 - DNA, 587 bp, Homo sapiens
gaaaagaggtttatttggctcatggttctgcaggctgtacaggaagcatggtgccagcatctgcttctggtgaggcctcaggaagcttccactcatggtggaaggtaaagggaaaaacaggcatgccacaaggtgaragagggagcagggaggagggagatgccacacccttttaaacaaccagatctcacgtgaactcagagcaataactcattcattaccatggggaggacaccaagccactcatgaggaatctgcctgcatgacccaagtacctcccacacagccccacctccaacaatgggaattacatttcaacatgagatttggaggagacaaacatccaaaccatatcatgtgtgtacctatgaaaataatgcccaagtcaagatattaaaaattttgactatcccccaaaatgtatcttatgtccctttgcagtgaatctcccccatagaggtaaccactgttctgatttatatagccataacaattataatctttaataaatgaacacatatattctgagtcatctggatgaccgtctcataactgatcattgtgcctattttatctttacagtcaag

SEQ ID NO: 747020 - DNA, 587 bp, Homo sapiens
gaaaagaggtttatttggctcatggttctgcaggctgtacaggaagcatggtgccagcatctgcttctggtgaggcctcaggaagcttccactcatggtggaaggtaaagggaaaaacaggcatgccacaaggtgagagagggagcagggaggagggagatgccacacccttttaaacaaccagatctcacgtgaactcagagcaataactcattcattaccatggggaggacaccaasccactcatgaggaatctgcctgcatgacccaagtacctcccacacagccccacctccaacaatgggaattacatttcaacatgagatttggaggagacaaacatccaaaccatatcatgtgtgtacctatgaaaataatgcccaagtcaagatattaaaaattttgactatcccccaaaatgtatcttatgtccctttgcagtgaatctcccccatagaggtaaccactgttctgatttatatagccataacaattataatctttaataaatgaacacatatattctgagtcatctggatgaccgtctcataactgatcattgtgcctattttatctttacagtcaag

SEQ ID NO: 747021 - DNA, 613 bp, Homo sapiens
agaaaatctttggtttagaggctgcagagatataactttttaaaaaaactgattttaagtatgtcatttagttttcctactctaataagcagtttacaaggttgcaaccttaccattccagttttcaaagaaataagtatatttgaaacatctgaattccttagatgtgcaratggttatggaagatttaaaattatttatgaacgataaaagcactggctttttcattgaagcattaagtttgatctccagagactctcaaattccaaagctgtttctcacaacctcacctcgagactgaatcccaaactaatcctttctcaactacccaaaaaaaaaaaaaaagaaaagaaaagaaaagaaaaagaaagaaaaaccaccaccacactactagcttttccttacatgatactcctttcaaatgctagatcctgctaggcttctactggtcctttgtcacagaagtccaaattccatcccagctgcccaaatccgctcagactgccctacttactaacagtactttgccacactaagctagggaagaaatggaaatgaggccattatctgtaagctggtgattttaccctcacagatggagaacaaatgatat

SEQ ID NO: 747022 - DNA, 559 bp, Homo sapiens
ttattagagtttacatgtaacacttattttttcctgcttaacagaaattagaaaagagcatctttagctgttttggaagaaactccttgtccacaatgataaaactgcgttctcagcatacaaatgcttgcctattttaaattaactggtatatgtcacagcaggacagaatgtatctcagttcatctaaaagctgtatcaagttcttaagaaataagtagatgaaaagtcaaactaaaatgtactctattttatatcacttgagattgaaatctgatctgtcaggagattcatctagatagttctgacacttgcagcagtacgaaaatataggctctakaaatagtagtataatgtgatttgtgttaagcttatgaaatatggtccatagaatattaaaatatgatggtagataaatgattattgtgaagcttcttaaattattctttgctgatttctcagtgagatgactgaaagtagccagtggagtattgtgtctaagaattagtagcacaaagaatcagtggtagagctgagatagcctgtatatccattatcc

SEQ ID NO: 747023 - DNA, 593 bp, Homo sapiens
tgtatattttatcattatttcacaataaatccatactatttgtgcactaaaattttctaaaagcaagaacatcaatcaagatcatatttatgacatgtgaaatatattttaatttgaggtataaatatacaaatggcatacacaattcatttggcactgttgacrttatttctccatgctggcttttatatgtatttatttttttgagatggcgtctcgctctgtcccccaggctggagtgcagtggcacaatctgctcactgcaatctctgcctcccaggtccaagcaattatcctgcctcagcctcctgagtagctgggattacaggcgcccacaaccacgcccagctattttttatatttttagtagagacagggtttcaccacgttggacaggctggtctcgagcccctgacctcgtgatctgcccgtcttggcctcccaaagtgctgggattacaggcgtgagtcatgctggctttttaaacagtgtttcttcctgtactacatgattcacgttctcctattcacttctcacctctccggtcagtccttctgtctgcattactggccttttttcttctgctgattctc

SEQ ID NO: 747024 - DNA, 549 bp, Homo sapiens
ctgtctgactgcacccgggctgctctttccccaggatggaaccacacctctggccatagccaagcgcttgggctacatttctgtcaccgacgtgctcaaggtcgtcacggatgaaaccagtttcgtggtatgtctgcctctcccccgcacccaccccagacacactcagcctggcgcacaggcgtgcctggggttactctggaagtggggtgcgttctggggctccsggacgcgggtcggaggcgccgcgcccgacgggtgggagcttgtcctccttccagcggggctgtgctgccacctagcggcccgaggactaggggcgggaccagctttccgggcagcagtggagtggatggggtttggggagatgggaagccagttttcccgggtcccgtccccgtggttcctgcccggcagcttccaggctgagcgcctcctccgtctgtttttcttcatttgtgggaaaccccacaggcatgaccagggaaccgctgggctggtaaaaaatgtgtgcggctctagtttgggttgaattatctgctttttctc

SEQ ID NO: 747025 - DNA, 601 bp, Homo sapiens
aacagcatttggatcaccgcagtagcagcccaaggagacacacaagtagctgctttctcggactgtattattttctgaaagtaagaaactttccctgggcagaactctttctagttcccatggggatgggcaggataggygagaggccgagcccccacttccaggtctctgggcagggcggggttaggcagcagcgggtgtcactcacacagtgactttcacttgtgctttcagtgctcaggacatgggcacctgccggcttccttctagcccggttggacagctccggcagctggtttggggaggtaaaattataggagcgtgatgtcacccgggccactcagggcagagcctggctgctgggcagaagggcacttgggccgggctgcttcagccgagagggccattcggtgtcctgcccacagagagagaaacagtgagagaccaagagagcaaaccagagagatagggagggggaatgcaaggggtccctgggggactcaggagtcccagtggagaatgagaggcaggccccccgtggtggccggggccctggctgccagaggaccgggctggtgaggaggcgaggatgtggactttc

SEQ ID NO: 747026 - DNA, 640 bp, Homo sapiens
gatatcaataaatatatgttgaatgtgtaggtgtataaaagctgaagataggtgagtaaaaattaataatgatggctgccttaaaaaatcaaattaacaaagtaccttttctatttttttacagtgttaatacagcttttgcagggttcagaatatgcttcttatcatctttcaccatcttccttgctttttaaactgtgaacatttaatatataatttttaattcattccaaagaaagctataagtggaaggaaaacatgacccagwttttgtcaattcaaacttatttcgacagttgtgaaacccttgaattctcaaacaaacaaccaaaagatagcatatacataggggaagatttgttgttgttgttgaaataattcctatacagaaacacaaaatattatgagtgttagtctttgaagaggaagtgtcagggaataggcaaaggaaaggaaagatgctgaacacctaaaaaaaccctgaagaattttatacacaaggaaatatcaaaggagagctagagagccataccaataaaatagaaattgatagatgaatagatgaggctattaaaaaggatttgtagaggctccagggaatgcaataatttggtcaagtagagaagttatacaatatatt

SEQ ID NO: 747027 - DNA, 582 bp, Homo sapiens
tctgtgtctagctaagggtttgtgaatgcaccaatcagcactctgtatctagctaatctagtggggaggtggagaacttttgtgtctagctcagggattggaaatgcaccaatcagcaccctgtcaaagtgggccaatcagctctctgtaaaacagaccaatcggctctctgtaaaatggaccaatcagcaggatgtgggtggggccagctaagaacaaaatcgggctgcctgagctagcagtagcaaccggttggggtgcccttctgcattgtgaaggctttgttctttggctctttgcrataaatcttgctgctgctcactttttgggtccacgctgcctttatgagctgtaacactctctgtgaaggtctgtagcttcactcctgaagccagagagaccacgggaaggaacgaacaactccagacgccccgccttaaaagctgtaacactcaccgcgaaggtctgcagcttcactcctgagccagtgagaccacgaacctaccagaaggaagaaactccaaacacatctgaacatcagaaggaacaaactccggacacgccgcctttaagaactctaac

SEQ ID NO: 747028 - DNA, 604 bp, Homo sapiens
aaaccagaaatcagtaacaaaaggaattttggaaactatatgaacacatggaaattaaacaataagctcccaaatgaccagtgggtcaatgatgagattaagaagaaaattgaaaattttcttgaaacaaatgataatggaaatacaacatacaaaaacctatgggatacaggctgggtgcggtggctcatgaccrtaatcccagcactctgggagcctgaggtgggctgatcacttgaggtcagtaattcaagcctagcctggacaacatggcaaaaccccatctctactaaaaatacaaaacaaaacaaaacccatgggatacagtgaaagcagtactaagaaaaattatagctataagtgcctacatcaaaaaagaagaaaaacatcaaataaacaacagaaaaatgcatcttaaacaactaaaaaagcaagacaaatcacacccaaagttagtactagaaaagaagaaagatcagagcaaaagtaaatgaaattgaaacaaaaaatacaaaagatcaatgaaacaaaaagttgatttttttaaagataaacaaaattgacaagcctttagccagactaaggaaaaaagagagaagcccca

SEQ ID NO: 747029 - DNA, 679 bp, Homo sapiens
aggatcctaagggcaaattggctctctgttcaatccacacttcaggcgatggcttccctctctgcttttctatttaccttccagcatctaaaattaagtttcctgtcactgatgtcttctctatcaatccctgtgaccttgttggtttatatattatatttctttaacagagtcttaggaaggagagtacataaycctccacgtctaacgctttacctttaataaaaagacagactgagttaagtcatatttttaaaatacagtcattatatgattccttttataggaaatatccagaataggcaaatcatagagacagacaatagattagtggttagcaggggcagcggggaggatggaatgagtagtgactgctcaatggctatggggcttcctttcagggtgacagaaacattctggattaaatagaggtgacagtgtgaatgtacttaacgccactaaattatacatttttaaattgttaaaatggaagttttatattacatgtattttaccacaataaaaaaaatacatagtaaaaaatatacagtgaccatggagagcttacaaaagattttcacaaacagtatattcaggttatgctgccattagagtcctgttgttctgtaattggtggtaatatcctttaccatggaaatttaaaaataccagccttccc

SEQ ID NO: 747030 - DNA, 572 bp, Homo sapiens
atttatattcctttgggtgtatacccagtaatgggattgctggatcaagtggtatttctgcttctggatctttgaggaatcaccacactgtgttccacaatggctgaactaatttacattccaaagggaactcttatatactgttggtgggaatgcaaactagcacaaccactakggagaacaatatggaggtccttcaagaaactacaaatagaactaccatatgattcagcaattctactaccaggattttttccaaaggaaaggacatcatatatcaaaaatacatctgcatcttcatatttattgcagcactacgcacaatagccaagatatggaatcaacctaggtgtctaataatagataaatggattaagaatatgtggtatatacatgccatggagcactatttagccatataaaagaataaaattctgtcatttgcagtaatatagatggaactggagaacagtacgttaagtaaaataagccagtaacagaaagttaaacattacagttctcactcatatgtggaagctttaaaaagcttgttttatagaagtaaaaagtag

SEQ ID NO: 747031 - DNA, 583 bp, Homo sapiens
aggaattttggaaactatatgcacacatggaaattacacaataagctcccaaatgcccagtgggtcaatgatgagattaagaagaaaattgaaaattttcttgaaacaaatgataatggaaatacaacatacaaaaacatatgggatacaggctgggtgcggtggctcatgaccrtaatcccagcactctgggagcctgaggtgggctgatcacttgaggtcagtaattcaagcctagcctggacaacatggcaaaaccccatctctactaaaaatacaaaacaaaacaaaacccatgggatacagtgaaagcagtactaagaaaaattatagctataagtgcctacatcaaaaaagaagaaaaacatcaaataaacaacagaaaaatgcatcttaaacaactaaaaaagcaagacaaatcacacccaaagttagtactagaaaagaagaaagatcagagcaaaagtaaatgaaattgaaacaaaaaatacaaaagatcaatgaaacaaaaagttgatttttttaaagataaacaaaattgacaagcctttagccagactaaggaaaaaagagagaagcccca

SEQ ID NO: 747032 - DNA, 594 bp, Homo sapiens
tatgcagccataaaaaacgatcagttcatatcctttgcagggacatggatgaaactggaaaccatcattctcagcaaagtaacacaagaagaaaaaaaccaatcatcgcatgtctcacttataagtgggagttgaacaatgagaaatcatggagacagggaggggaacatcacgcaccgggggtgggggactggaggagggatagcattgggataaatacctgaagtaaatgatgagttgatgagtacatcaaaccaacatggcacatgtatacctatgtaacaagcttgcctgttgtgcacatgagacccatcttatgagaaaggataaaggaagtcttcaagttcaaagaaaaaaagatactaatgagtaacataaaaacatctgaaagtataaaactcactgaaaaaagtaagcacatagttaaattcagaatactctactactgtaatgstgatgtgtaattcacttatatctgtaatataaaggttaaaagataaaactattaaaaatagaattgctataataatgttttaagcaatatgaaatataaaaagatgtaaatcatcacacaaaaatgtaaaatattatgga

SEQ ID NO: 747033 - DNA, 610 bp, Homo sapiens
aatagagaggctgagacaggaggattgcttgtacctgggaggcaaaagtttcagtgccactgcactccagcctgggtgacagagtgaaactccaccccaatacattttttaaaataaaataaaatatgtaatacattatgttgactgtagtcaccctgctgtcttatcaawtactagattgtatcctatctaattatgtttttatgcccattaaccatccccaattcttcagccctgttacccttccaagcctctggtaacctcttaatactctctatctgcatcacattttctttttttttcactttttttttttaatttccaatttttattttaagttcaggggtacgtgagtaggatgtggaggtttgttgtataggtagatgtgtgacatggtggtttgctgcacagattgtcccatcacctagttattaaacccagcatccattagctattcttcctgatgctctccctcttcccactccacaccctccgacaggccccagtgtgtgttgttcccctcaatgtgtccacatgttctaatccttcagcttcaagtgagaacatgtggtatttgattttccattcctacattagtttgctgaggata

SEQ ID NO: 747034 - DNA, 569 bp, Homo sapiens
attcagataattctagaagtacatagcttttatgtggctgctaaatatatggctaaaattaaagactgtctatttcaatcctctatcatggtttcattgcttcgagcactcttagcagtcaccaccaaaaaaagcaatgtgccctttgttaataatagccattctgacaggtgagcaatgaaaaaaaaaaaaagacaagtgttggtgaggatgtggagaaattaggaaccttgcaaactcttcrtggaaatgcaatacagttcagtcagttcatactatttggaaaacagtatggaagttcctcaaaaaataaataaataaaaagaaaactaccatttgggccagtactcatatttctggatatataaccaaaatacttgaaatcaaaatcttaaagagatatttacactcccaatgtttattgcagcactattcacaacagccaagatgcagaaacaacctaaatgtccattaatggatgaatgcacaaagaaaatatggtatatacatacaataaatattcacccttagaaaagaaagttctttaatatgagataatatgagtaggc

SEQ ID NO: 747035 - DNA, 644 bp, Homo sapiens
agagctacagataaaggttatatatctccatagatagctactctatgttcaccttatgttatataaagtgctgatttactgagagctagttgaaaacttaacggactattcccctacctgcttcttttctcttgcaagatgtggatacagcaatgtcacgataccctctctttcccctccagcccgcattttccctttaaatactgaagttttcaaaatcatctttggaaaaaggtatggataacaaaggtatggatcacagatygttcctatggatttgtgatttttcttttacaaggaagtccttaacattggcaaaataaacctctaaagtggttgatacctgtttcagagactttttggtttacaaattggtgactaacaaaggggactctgagtggaggtggccctaacctttgacaaatcttctgttggtgcttggtaccagcctgggtaccaaacctcaaaccttggtacccaagctggtaccaagattttattgctcaaaccaataggacaatttgctgaggtactgaaggttttatttaccctccagagaatcctgatctcccctaatttggttgagatctaaggttgatttagctgtatgactccttttctgaagttttactcacttccaatag

SEQ ID NO: 747036 - DNA, 605 bp, Homo sapiens
ataaattaaacattaatatcaaaggcacactgatgcaagaccggcattggggccccaggttttcttagatcattaatcttcattttaaggaaaaaaaatagaaaagtttataaaatggtttgcaaacatatcttatggtaaagatattaacagtttaatagatttgtttataatatctgagagatttttaactggcatcatgctatctttattagggattattatttagataagtaactctcctctaataaagaataaaggcttttactttttttwaaaaaaaaattgagttatgtaggctaaattaatgacttattttacaataatctgcgatcccttttgattatatcaagtgtcttaaacttttgctatttcacaaactttccaaaatcaaatgctgaatttattctttttgatctcattttttttgatattaggttttcctgaaatccaaaacagatatatttgcttacattggtataataaaaccataggaagcattgtcaactatgaaataatgtctaatatgttttggattatatttataaaagtgtattattagcatgagttccaaaattatatgagatttctgtgactctgataag

SEQ ID NO: 747037 - DNA, 574 bp, Homo sapiens
actccattatttatttcaaatttatgtatttatttatttattttgagatagagttttgcttttttcacccaggctggagtgtaatggcacaatcttgcctcactgcaacctctgcctcccgaattcaagcgattctcctgcctcagcctcccgggtagctgggattacaggcacccgccaccaggcayggtatttttagtagacacggggtttcaccatgttggccaggctggtctcgaactcctgacctcaggtgatctacccgcctcagcctcccaaactgctgggattacaggtgtgagccaccacacccggccaagatggtgaaaccacgtctctactaaaaatacaaaaattaaccaggtgtggtggcaggcacctgtattcctagctactcaggaggctgagacaggagaatcacttgaacgtgggaggaggaggttacagcgagcagagatcgctccattgctctctagcctggacaacaagaaggaaactccttctgaaaaaaaaaaaaaaaagaagaaataaaagtaagcaaatattaggagaatattgttgaaagttatagaat

SEQ ID NO: 747038 - DNA, 576 bp, Homo sapiens
ctcctaacctcaagtgatccatccgcttcggcctcccaaagtgctgggattacagatgtgaaccaccacacccagccaggggtcagcaaacttcttccataaaggaatagatagcaaatattttaggctgtacaagccatatggtttctgctgcaactattcagctctgctgttgtagtgctgaggagcatagctatattccaaaaaaaatttacttatggactgaagtatgaatttcacattttcatatattatagaatacttatttttatttttatttatttttttaatgagatgaggcttcgctatgtccaggctggtcttgaactcctggactcaggtgattcacctgcctctkcctcccaaagtgctaggattacaggcgtgagccaccgtacttagcccctattatttttttagagacaaggtctcctctgtcacccagactggagtgcagtgtcttgatcatagctcgctaaaaccttaaactcctagattcaaatgattctcctgcctcagcctcctgagtggctaggactacaggcacgcactcctacacctagctaattttttatc

SEQ ID NO: 747039 - DNA, 576 bp, Homo sapiens
ctcctaacctcaagtgatccatccgcttcggcctcccaaagtgctgggattacagatgtgaaccaccacacccagccaggggtcagcaaacttcttccataaaggaatagatagcaaatattttaggctgtacaagccatatggtttctgctgcaactattcagctctgctgttgtagtgctgaggagcatagctatattccaaaaaaaatttacttatggactgaagtatgaatttcacattttcatatattatagaatacttatttttatttttatttatttttttaatgagatgaggcttcgctatgtccaggctggtcttgaactcctggactcaggtgattcacctgcctctgcctcccaaagtgctaggattacaggcgtgagccaccrtacttagcccctattatttttttagagacaaggtctcctctgtcacccagactggagtgcagtgtcttgatcatagctcgctaaaaccttaaactcctagattcaaatgattctcctgcctcagcctcctgagtggctaggactacaggcacgcactcctacacctagctaattttttatc

SEQ ID NO: 747040 - DNA, 637 bp, Homo sapiens
gcgtatgagagagggaccaaaaaatagtcagatgacaatgacaacaatatatcattctgaggagtatgattgattgattaaatctgtgtacctgagatccaataagagagaaatcatcccaattctatatttttggttcccaaagccctacttggtctggtctccacccatgtcccccatctcatctcctaccattttccctttcccttgctcagtgggctccagcagagaaaaaaggaagagtgcaattgagcgtgccatttcccagaccattcatgcatackcattcattcattcattcagcacatgtaagaaatccctaccacacatcaagcattggttagatgtggaggaacagagctaaataggggactacagtctagtgcaggaggcagacagatgataaagaaatataagaggggtgatggaaaccttgcctgggacacttgggaaaggctgaacagccttgagctcagtcttcaaggagaagtccaagttcaccaagcaaaaatcagggtcgtagttcttggctgaggggacagtgtttgcaaaggcaagaaccctgaaagagcacaggcagatcagagggtggggagcaatgtggtgtggatgggcccaggagcatgctgggaaatga

SEQ ID NO: 747041 - DNA, 637 bp, Homo sapiens
gcgtatgagagagggaccaaaaaatagtcagatgacaatgacaacaatatatcattctgaggagtatgattgattgattaaatctgtgtacctgagatccaataagagagaaatcatcccaattctatatttttggttcccaaagccctacttggtctggtctccacccatgtcccccatctcatctcctaccattttccctttcccttgctcagtgggctccagcagagaaaaaaggaagagtgcaattgagcgtgccatttcccagaccattcatgcatacgcattcattcattcattcagcacatgtaagaaatccctaccacacatcaagcattggttagatgtggaggaacagagctaaataggggmctacagtctagtgcaggaggcagacagatgataaagaaatataagaggggtgatggaaaccttgcctgggacacttgggaaaggctgaacagccttgagctcagtcttcaaggagaagtccaagttcaccaagcaaaaatcagggtcgtagttcttggctgaggggacagtgtttgcaaaggcaagaaccctgaaagagcacaggcagatcagagggtggggagcaatgtggtgtggatgggcccaggagcatgctgggaaatga

SEQ ID NO: 747042 - DNA, 619 bp, Homo sapiens
atacaccatcacaatactgtttaactccaatggacaaactgtaatttaaaatatcaagttatttcatataaattccatttgtaaatatatatactactaatagtgtttgtactttagttgagaagatcagtcaatatattttttttttttcacaagcaaacaaatctctcgtcttcttgccaaggactaacctttccaaatcaatgaatttgggagctgaaagaacttataatatatccaaaataaacctattatatgagagatgaggaaacaagaggttcagaaaagttaaatggctcctctaagtcagcagctagctgatggcagagctgagcctagtacccagattcttctcataaggctcaaartgaagtattcctacataaaaatattaacagtatcagctgctgacaaaaatgtggaacaagtagaatttttatgtctttccagtagggatgtagaaacaatttggtaatttcttataagttaaagatacatactatatgacctagcaatccccctcctaggtatttacccacaagaaatgaaacttatattcaccccaaaacctgccatgaacatttacagtggctctgttcataatcacccgaaactggaa

SEQ ID NO: 747043 - DNA, 547 bp, Homo sapiens
gaaaagatgcttaacattattcagcattagtgaaatgcaaatcaaaatctcaatgagataccacttcacacctactaggatggctataataaaaaattggaacacagcaagtgttggtgaggatgtgaagatattggaagcytcatatgttactggtaggaatataaaatggtacactggagaacagtttggcagttccttaaaaaaaaaaattaaacagttaacatatgactcagcaattccagttccaggcataaactcaggagaaccaaaaacatgttcatacgaaaacttgtaaacaaatgttcacagaagcattatttataatagccaaaaggcaatccaaatatacatcaactgatgagtggataaacaaaatatataatcatacaatggaatattatctgctataaaaaggaatgaagaagtcaggtgtagtggctcatgcctgtaatcccagcactttgggaggctgtggtgggatgatcacttgagcccaggagtttgcaaccagcctggtcaacatagcaagacctcgtctctacaa

SEQ ID NO: 747044 - DNA, 547 bp, Homo sapiens
gaaaagatgcttaacattattcagcattagtgaaatgcaaatcaaaatctcaatgagataccacttcacacctactaggatggctataataaaaaattggaacacagcaagtgttggtgaggatgtgaagatattggaagcctcatatgttactggtaggaatataaaatggtacactggagaacagtttggcagttcyttaaaaaaaaaaattaaacagttaacatatgactcagcaattccagttccaggcataaactcaggagaaccaaaaacatgttcatacgaaaacttgtaaacaaatgttcacagaagcattatttataatagccaaaaggcaatccaaatatacatcaactgatgagtggataaacaaaatatataatcatacaatggaatattatctgctataaaaaggaatgaagaagtcaggtgtagtggctcatgcctgtaatcccagcactttgggaggctgtggtgggatgatcacttgagcccaggagtttgcaaccagcctggtcaacatagcaagacctcgtctctacaa

SEQ ID NO: 747045 - DNA, 674 bp, Homo sapiens
caccacgcctcctgcaacagctaaggccaggccaaacttgccaatggactcaaacactttggcagccatgtttccttctgctggaccctctcacacctaaggggataaaaacaaaatacaatcaaacttgatgccaaatcctcagagaaggccctctctgacacacaacagtcacttttcaacctggctatttatttccccattcctgaaagtgctaaatcatccattgaaggatacctaataaataatgctttatagcttggaaagtgtactatcaattcttctgctttttttttttttcagtttcttttctttcytttttttttttttggagacagggtcttgctctgtcacccaggctggagtgcagtggtgcaatctcagctcactgaagcctcgacctcccaggctcaagcgatcttctcacctcaacctcccaagtagctgggaccacagaagtgtgccaccatgcccggctaattttgttcattttttgcagagatggggtcttgctacgttgccccaggtggtctcaaactcctgggctcaagtgatccccctgcctcggcctcccaagtgttgggattacaggcatgagccatcatgcctggctgatttctctttttttctcaaccatttaaagtaaggtgtctgggacacttggttcaataatg

SEQ ID NO: 747046 - DNA, 607 bp, Homo sapiens
ttactgatgccatggcaacacctggaagttaccgccccttcccatggcaatgaccggataccccttttctagaaatgtctacagaatctgccccttattttgcatataattaagagtgggtataactatgactgcagccctgcctctgagctgctactctggacacactgcctatggagaagtcctgctctgcaaaaagtagtacctttgctgctgctggacactgccacttcaataaaagttgctgtctaacaccaccagctcacccttgaattctttcctgggcaaagccgagaaccctyctgggctgagcctccaccaacttcatggagtcctgtggcaaacgtttgagccttctctggcttccttccaaccacttcctttccctgtttcttccccatttcatggcctcatcatttaatttttggcctgagccaaacaataaggaacagaaatctggaggaagaaaaagaagaaacaaaaactcaatgtacagcacttcaatacccatggcccaatgacctgttatttggactaagttatattaacctctttaagaaagacctgaatcgaattcacctttgaatcccctgaagcatgtagccta

SEQ ID NO: 747047 - DNA, 590 bp, Homo sapiens
ttttaaatgtcttattaccagaacttaaagacctttaagcagatggtaaggaactatgttttcattatttattggcataatattcaatttaaaagtagcctaaatggagagatctgctcctgtttttagggaccactgtgaaaaagtgaagcatcaggtttaagccacaacttcacaaatgttaatgaaaagtgatttcccttgtttgaaatctgtagtgatttgtttcctgtaacgacaatcttccctctcatgttattctgtttggttttgtttttttaagcaaggttaaaaaagtggggaagggctgatgcttataaagagcataacaattagtacttcactgaggagctttyttgcaaatccttgatggtgaaattatatctgaggatcattatttccagaattagcagaaatgcttgtttgagacttataaacaccttccaaagtactggccaggttgacaataaatgagttctggtggaagatgatcaatcagggtatcatgtccataattagtccatgaaacttttcttttcagattggtatcagtaaaaagtttttttttttttttaagttttaactttgtg

SEQ ID NO: 747048 - DNA, 624 bp, Homo sapiens
ccatctggggtctggggcaactcacaaccctgaaggcaagaacaaaagactggctggcttcacaaactgctgattgtagagccctagggcttgagtgagaacataaatggtagccctgtcgtggtaacagtgagccttgggcaataccmagtgctatgcttgtttcaggtctaacccagcacagacccagtagtgatggtcacagggctgcttgtgtcaccactcccccagctccaggcatttcagcctagagagagggagagactccatttgtttgggagaaaataagggaagagaacaagaatctctgcatggtaatgcacagaattcttccagaccttatccaacaccatcaaggtggtacctctgtgaatctgcaagaaccacattactggacttgtaatgcccccaaatgcagttatctctgtggtggccaaaaacagatcacggcacaaaagtcccttcgaatacctgcaaagtctttcccagtaggatgggtacaaacaggcccacactgtgaacactacgataaatatctaactcttcaatgtccagacactgatgagcattcacaagcatcaagaccattcagaaaaacatgacctcaccaaacgaactaaataa

SEQ ID NO: 747049 - DNA, 622 bp, Homo sapiens
taatataacacccatgtacctgctagccagtttgaacaaacttcaactttttccttttttctttaaggaagaaaactttacagataaagtccccatgggatcttttcctatctcattccaccattcctttctcagtggtgaccgctatccagaagttgttattattcccatgaatgtatatacatttactacaaatgctgactatctccataaacaatacaatagttttgtttacttcacaggcatgaagttctgcggcatgtatcactctttttttwaaaaaaatttacttaataggcattagaagtttatctattttgatacattctagtttacccattttaactgttacatagaagtgtggattcaattgtgtgtccagacccctccccaaatttgtatgttgaagccctaacccccaagtgctgtatctgatggaacggatacagcactcggaaggaatcaaccctgctggcaccttgatcttcgacctcaagccaccagaactggtaaaaataaaataaaataaaataaatttctattaagccatcaagtctgtggtactttgttatggttgccctagcaaactaatatgcacggtattccattgctttatttattc

SEQ ID NO: 747050 - DNA, 430 bp, Homo sapiens
cagcataatgtcctccaattccatctatcttgtcacaaatgacagaacttctttcttttttacagctgaatagtataccactgtgtgtatacaccatactttatccattcaaccgttgttggatgattaggttgattccgtaactttcgaatagtgctgcagtgagcatgggcatgcagaccacatgtcygcttttgatcttttgaacaaggactcagaccccagtgactcacacattttcttattaaaaaaaaagtatacgtataaattatatatgtgtacatatatgatatatacatatgttatgtgaccatatctatacacacatgtatatacacacatacagcaagggtctccaaagacttcaaactatatgtatgtatatatatagatagatgtgcacaccactgcacccggccaacttttgtgg

SEQ ID NO: 747051 - DNA, 536 bp, Homo sapiens
agccaagaagcaatgtcaccccaggagcacacctggtgcccagatcttgatttctaacatcattcttcaacaaaagaaatcagagttctctggggaaatggctggcactacatctggggcacagactatctgagatgatcctggatcatcttttaatgtcrgaaagcaagaaagtcctcaaaactaagccaaaatccacaaaacatgatgatgggagtctatcaaaggaacgcagaagccaacccaaagagctcccagagacaaagactgggacaatttaaacaacaaataaagtagtgttagatcataacctaaaataaatatccgagtccatattgtcataaataaattattcaatacatagataaatggaaaaaatagacaaatattctcccttcaaggagatagcacataactcttcattccttaagtatggactgtgcctaatgaatttctttccaaaaagtacagtaagaaagcagggggtggggagttggaggtaggggtagggtgaagagtaaatttttggtagagaa

SEQ ID NO: 747052 - DNA, 641 bp, Homo sapiens
tccattcatgaaggtggagccctcatgacctaaatatctcttaaaggccctacctcccaataccatcacaatggcaattaaataccacatgagtttggagaggacaagcattcaaaccatagcaagatggggtacgcatgtcagagacagaagccccacagtgggatgataaagaaggcgatttgaagaagaggcttttccaagtaaaaataatgtgcattgtatcatgtcccttcaccaagcaccagtgaagtctcaatgagatcgcaatatgcctgataggttgattggctttcttatggcaagagggacttctagttcctgactggagaggagctgaaacaaaatcaaatgcatgcgcccacacttttctcacaagattcgtgtgagggttgctaatctaagtacttartacctgggaagtattggacacggaaaccttattgactctacaggtgctctgggttggagtgggctggggtaaggtgggcggatttaaccaataagattctggaggaatggggactgaatgctagttcattctgtatagtatataaccagtcaggagagctcaagatatagatgctgtcattcttccaggctgtgcctgtggcagacatgaccaatggattgcagcactc

SEQ ID NO: 747053 - DNA, 554 bp, Homo sapiens
aaggtaacaattgcctgttgttcaagagcagctgcccactgccccccggccccatgaaggctgagggctgtctagtccgggggtccctgcaggcattttggattggcttccatacctgcctctcagctgaggccagctgagcacacacaaaagtagactctgaagatggcccgagttccagcctcacctctgccacgtatgagtcatgtgacgttggacaaatccctcatcctcatggggccctaactttctcatttgtaatggggggtaatagcagtatttacctcaagaaataagagctgtgaagattaaattaattagaacagtgcctggcacacaagaatcactaaaataagcttagctctcattgcttgacgttwccataaacactcaagtgtctgtctagaatggcaccataattcctgcctcacgggccacagagtgtctctaggggcacagatgagcccagctacctggggggtccttgctgggtgagggagggtctctgtggtccaccctaggccttggaagtggatttccgtagctgcagcact

SEQ ID NO: 747054 - DNA, 428 bp, Homo sapiens
cagcttctatgggactaccgagggctggggtggagtgaggggtgagggcagagacactccatgaaaaagggatctgtccagcaaggaccgatgagatggagagactcaaaataaccaagcctggtcctgccttcaaggagctcacgtctggcagaggcgagagaaatgttggagaaacagatgtgaatcccacagattccccgagcgtgcaaatccctggcaccacccagtcagccccttgcagtttccccaggcgggcagcagacacgcagcccacgtctcygagggctggctgcgtgagtgaactgccttgaggtcgcctgggctcccacggaccccgccttcgccctctgtcctctttgtgtgtttcgtgacaggagggacgtgcgacgtccacatatttttcctggagcaggagaggggtggag

SEQ ID NO: 747055 - DNA, 428 bp, Homo sapiens
cagcttctatgggactaccgagggctggggtggagtgaggggtgagggcagagacactccatgaaaaagggatctgtccagcaaggaccgatgagatggagagactcaaaataaccaagcctggtcctgccttcaaggagctcacgtctggcagaggcgagagaaatgttggagaaacagatgtgaatcccacagattccccgagcgtgcaaatccctggcaccacccagtcagccccttgcagtttccccaggcgggcagcagacacgcagcccacgtctctragggctggctgcgtgagtgaactgccttgaggtcgcctgggctcccacggaccccgccttcgccctctgtcctctttgtgtgtttcgtgacaggagggacgtgcgacgtccacatatttttcctggagcaggagaggggtggag

SEQ ID NO: 747056 - DNA, 641 bp, Homo sapiens
agcacagggttagtaattccaaggacacaggctggactcccggacggcctcccttaccagcaggggacagagcctgagccccatgctcggttgatgaacgaagaatgcttttcactgcccaagtgaggcccaggggagcatccacaggaagggtgggaagcacccaggctctggcccaggcaggcccagcctcaccaagaccactagctgggggacagggacagagatggagagggggcaggacctagccttatggacttggagctttgctagctggggagcagccctcagttctggctgctgttggattggtaaatatttggacactgtgagcttcagaatttctcctaaagtaggcaggggctcagaacyatggagatgtggatactgacggtgaatgcgtttgtcccttggggctgataacatggcctgtgcagagatcctgtggaaagggctgctcctctggaactgcatgcacaaaagggcctcccatgcagacccacaggcgcaaggagattgctgagctgctttgggcaaaagcaagcgggaggggaagtaatgcgcttgtaacaaagtgactgagccccaagataagggtgacttcaagagaatcagtgccacccctccatcccagtggcagg

SEQ ID NO: 747057 - DNA, 641 bp, Homo sapiens
agcacagggttagtaattccaaggacacaggctggactcccggacggcctcccttaccagcaggggacagagcctgagccccatgctcggttgatgaacgaagaatgcttttcactgcccaagtgaggcccaggggagcatccacaggaagggtgggaagcacccaggctctggcccaggcaggcccagcctcaccaagaccactagctgggggacagggacagagatggagagggggcaggacctagccttatggacttggagctttgctagctggggagcagccctcagttctggctgctgttggattggtaaatatttggacactgtgagcttcagaatttctcctaaagtaggcaggggctcagaactatggagatgtggatactgayggtgaatgcgtttgtcccttggggctgataacatggcctgtgcagagatcctgtggaaagggctgctcctctggaactgcatgcacaaaagggcctcccatgcagacccacaggcgcaaggagattgctgagctgctttgggcaaaagcaagcgggaggggaagtaatgcgcttgtaacaaagtgactgagccccaagataagggtgacttcaagagaatcagtgccacccctccatcccagtggcagg

SEQ ID NO: 747058 - DNA, 608 bp, Homo sapiens
agcagaaagcaacactgagcagaaatcaaccagtgcccccagaaggaacatttacaccagccttagccagagggtaattacccatcccagtggttagaacctgagttccagcaagcctcaccaccatggacaaaagggctctggtgtactaaataaacctgaaaggcagtctaggccactaggactgtaaattctgggcaagtcctggtgctatgttgggcttggagacactgtgagaaaccagccaggatagccaagggaatgcttgtgcatccctcccccaaccccaggcagtgcagcttacagcaacaaaagtgacaccttccttcctccagaggagaggagaaggaaggctcaagaggaactttctcttgcaacttggataccagctcagccacagtaggacagggcmccagacagagtcctgagacctcattccagaccacagctcccaaatgacatttctagatgtaccctgggcaagaagggaacctgcagccctgaaaggaagggaagagtcttagcaggatgcatcatttgctgattaatgagcccttggaccctgaataatcagcaactgtatccaggcagtgggccttaggtgagaa

SEQ ID NO: 747059 - DNA, 632 bp, Homo sapiens
ccagctaacatcataatgacaggatcaaattcacacataacaatattaaccttaaatgtaaatgggctaaatgccccaattaaaagacacagactggcaaattggataaagaatcaagacccatcggtgtgctgtattcaggagacccatctcacatgcagagacaaacataggcccaaaataaagggatagaggaagatctatcaagcaaatggaaggcaaaaaaagcaggagttgcaatcctggtctctgataaaacaaactttaagccaacaaagatcaaaagagacaaagaaggccattacataatggcaaagggctcaattcaacaagaagagctaactatcctaaacatacattcactcagtacaggagcasccagattcataaagcaagttcttacagacctacaaagagacttagactcccacacaataataatggaagactttaacaccccactgtcaatattagacagatcaatgagacataaaattaacaaggatatccaggacttgaactcagctctggaccaagcagacctaatagacatctacagacctctctaccccaaatcaatagaatatacattcttctcagcaccacatcgcacttattctaaaattgaccac

SEQ ID NO: 747060 - DNA, 547 bp, Homo sapiens
tcttggctgcaagtgtgtgcgagcatgtgagtacgagtgagtgagtcagtgtgtgtaagcaagtgtgtgcgtgtgaatgtgagtgaatgtgtgtgatgtgtggtgatgagagtgaatgtgactgagcatgtgtgatgtgtctggtgtgtggtgagtgtgagtgaatgtgactgaattagcatgtgtgatatgtggtgagtgtgagtgaacgagcatgtgtgatgtgtgtggtgtgtgtggtatgtgagtgtgagtgaatgagagtgtgtgatgtggcgtgygtgtgtgaatgagcatgtgtgtggtgtgtacaagtgtgaatgtgagtgaatgtgtgtgtgtactgtgtgtgtgtgatgtgtggtgtgtgtgtatgagtgaatgagcgtgtgtgtggtgtgtacgagtgtgaatgtgaatgaatgtgtgtgatgtgtgtgtgtgtgaatgagtgtgtgtgtgtgaatgagtgtgtgtgatgtgtggtgtgtgtgtatgtgtgtgtgtgcacgtacatgcgcggatccctgtgagtctgggactgagt

SEQ ID NO: 747061 - DNA, 564 bp, Homo sapiens
ccaggctggtgggggcagatccaggctcctatcctggacttcctgactgcacctggtcatgtccctttgtactacacatggcttttctctgcattcaagggacactgtaactgttaatatcagtccacagtcccctctcaaagcagcctcaaaaaagcttgaaagtccaactattactagtcattgcccctgtgctattctttgtgtagaaggatgatgccatgagttttggcttgatgtttatgatgtatttatgttaactcaaattctctttcattgacctatcctctttgtgactaatgaaacgcctttgcaaaagggccagttttrgaggggtgggtgttctgtcagcagtaacatctcagatctgtttatgccttggagggaccatgtcctcaggctagatctcgggggctcagtattctagtaccataaatatttttagaactgtctttttgagttctactttcatgcacatttgtgactaaatttaatatttttaactggcatactttattttgttatgtgttatttaactgcaagttgatctttaactggccattt

SEQ ID NO: 747062 - DNA, 537 bp, Homo sapiens
caaatactaaaaatgtccagcaccattttttttttttactttttacaatatcatccctgtgtctaggtgtgtttatttttgttttctaatttttattaatcagattgcttttctgtcatcacctgatgtatatcagcataatgaggaccaggaagttggagttctggagaggcagtgtgggagatcagagaaaggacaaggatattagtttgaaacttgaaaccttcaaagagagttgccttagttaaaatgctctagtgatataattgagtggcctggggacaacaagagctactgcccaraatttcttactgcctcatctgtgctttagtgtctgtccactttcctctctattgccgctacctcagtgataaatttattgagcattttacatgtaataacttatttaattctcataaaaaccctgggagggaaattctattaatattgctattttataaattgtgaacttgaagcttggacaggtgaagcaacttgcccaagatctatgttacagcttgtatgcaggagagtcag

SEQ ID NO: 747063 - DNA, 563 bp, Homo sapiens
tgtgggagatcagagaaaggacaaggatattagtttgaaacttgaaaccttcaaagagagttgccttagttaaaatgctctagtgatataattgagtggcctggggacaacaagagctactgcccagaatttcttactgcctcatctgtgctttagtgtctgtccactttcctctctattgccgctacctcagtgataaatttattgagcattttacatgtaataacttatttaattctcataaaaaccctgggagggaaattctattaatattgstattttataaattgtgaacttgaagcttggacaggtgaagcaacttgcccaagatctatgttacagcttgtatgcaggagagtcaggattccagctcacacatacattccaagcccacactcattttgttttgttttgtcttttgttattttattttttcttttacctttttatttttacctaatttcagacttaaaaagaagttgcaagaaaaaaatcctgtatactcttttcacccagatttcccaaatgttaacatatcaccatatttgctttatcaattttgt

SEQ ID NO: 747064 - DNA, 528 bp, Homo sapiens
tttatagcaatgcaaagaacagcttaataaaacccttaaaagagaatggacatgatctttatgtcctcttcttcccctttcctgtggagttgaatgtgaatgtggtgatgagctatcttggaccatgaaagatgagggcagagcactaggaagggcagagctacaagatagaaggaggcaaaatctccagctctgttgtgtcatcatgctagccttcgactacctaacatrcataagagagaattgcactactgtttaacttaggccagtatatttgggggtctttttctttctacggttgttggcaagaggtaaatattttgatgattgcttactaaaggcttattgattacttgagtaaattaagaacaggtgtttcaatattcactcatagcatgtgctttgatcacattttacttgtaaagaatttggtttccttcttagccttgggcataattcactctgcaggaagaacggcagctttatggccccatctatgtttttcccatattcattcacattgatagt

SEQ ID NO: 747065 - DNA, 639 bp, Homo sapiens
attagaattgggatgcttggggaaatttcaataactccaaatcccctgaaactcctagggcaggtagaagcagtccccatctcctgtcagttaaggctgatcctgtgatgcttgaagacattgtaatgacttcaaagaacatggtgctaagactccccctgccttgctctrctacttcacctggcatctgaaggtagatcccagtatgctcttggggataaattcaacaaaccaaatccagatgtggacttatacatttcaacattttacaccagcaaaagaccttggatatgtatgagggaatttgtcctaaggatgctagaccaaagaggggaaattatattttacatcaggttgaaaatgtctatattggcgcacttacaataaattctggatttaacgtactaggtcaaactagcccaaatagctggaagtagatttagtaattttcttggactttttttattattaaagctggaccaaatggtagtctatagcaaatgaagtgaagatatcagaaatgctttggtttaatataaatcaagaaatccaaagtcttaggaaaatattggagttgggggtggatttaatcacatgtgacttattcatcctttcaaaacatctagtccttcctgaaaa

SEQ ID NO: 747066 - DNA, 492 bp, Homo sapiens
gaactatactataaattctgcagggtaaaaactatgagttacaaatatatgagtgtgcatttaagtatacattttatacatatagagggaaggtgatatgctttgttgttatcacgacacaattgctacaaattagttytggtggcacaatttggtcaggggtgaggctttaccttaatgtcaccaacatcccttgaaaaattcaagacctctctcttctgctgtcggggaaatgctgagaaataaatgcccaatccaacaacaacaacaaaaaaaaaaaaaaaaaaggaaggctgttcacaaggcatacattgcaccagggtaaggtagaatcatacaatgcaggttagactatttcaactgaaacaaacaacacactaaccgttatcagcaattggtctcaccagacattgatgaaagacaccacttatactgatccagctttcatgaagcttcccagttctaatggtttttaccacagtgtatctcatg

SEQ ID NO: 747067 - DNA, 619 bp, Homo sapiens
atgttggttgcttgggcattatcgacactgctatgttggtgttaaatgtgatgcaggcccgctttctcatggattgaggccatgagagaaaatactaaaagtctaaagctcaccacataaatcagaaactacttcatgctgtgactgtgataartagatctgcaaatatctaccaggacaaatttagaagagtcttggggcactgtgttatacctgaattaaaaggtggctttgttaaaaatgaacttttctccaggctagtatgtttgttgttttatgtttaaaaatgaagtgtagcaaaacccatgtaaggcattaaagataatttgctattgaaaaccaggatgtattttgctaaggggtggtcatcaaattgatgcaggatttttctcagcgtcttcatcagacttgtgacaggggggctccatttactcagctctccatgctcaaccccttgtgggagggagcacatgagcaagtgaatttggatctgcccagggtctctcttcgcgctggcaggagcaagctccatacagtacccatggccagaccaggcaccagtgagatactgcaggacccagcaagccactctgggtgccagcaagagcaagctccatgg

SEQ ID NO: 747068 - DNA, 619 bp, Homo sapiens
atgttggttgcttgggcattatcgacactgctatgttggtgttaaatgtgatgcaggcccgctttctcatggattgaggccatgagagaaaatactaaaagtctaaagctcaccacataaatcagaaactacttcatgctgtgactgtgataaatagatctgcaaatatctaccaggacaaatttagaagagtcttggggcactgtgttatacctgaattaaaaggyggctttgttaaaaatgaacttttctccaggctagtatgtttgttgttttatgtttaaaaatgaagtgtagcaaaacccatgtaaggcattaaagataatttgctattgaaaaccaggatgtattttgctaaggggtggtcatcaaattgatgcaggatttttctcagcgtcttcatcagacttgtgacaggggggctccatttactcagctctccatgctcaaccccttgtgggagggagcacatgagcaagtgaatttggatctgcccagggtctctcttcgcgctggcaggagcaagctccatacagtacccatggccagaccaggcaccagtgagatactgcaggacccagcaagccactctgggtgccagcaagagcaagctccatgg

SEQ ID NO: 747069 - DNA, 619 bp, Homo sapiens
atgttggttgcttgggcattatcgacactgctatgttggtgttaaatgtgatgcaggcccgctttctcatggattgaggccatgagagaaaatactaaaagtctaaagctcaccacataaatcagaaactacttcatgctgtgactgtgataaatagatctgcaaatatctaccaggacaaatttagaagagtcttggggcactgtgttatacctgaattaaaaggtggctttgytaaaaatgaacttttctccaggctagtatgtttgttgttttatgtttaaaaatgaagtgtagcaaaacccatgtaaggcattaaagataatttgctattgaaaaccaggatgtattttgctaaggggtggtcatcaaattgatgcaggatttttctcagcgtcttcatcagacttgtgacaggggggctccatttactcagctctccatgctcaaccccttgtgggagggagcacatgagcaagtgaatttggatctgcccagggtctctcttcgcgctggcaggagcaagctccatacagtacccatggccagaccaggcaccagtgagatactgcaggacccagcaagccactctgggtgccagcaagagcaagctccatgg

SEQ ID NO: 747070 - DNA, 646 bp, Homo sapiens
tgcatgttggttgcttgggcattatcgacactgctatgttggtgttaaatgtgatgcaggcccgctttctcatggattgaggccatgagagaaaatactaaaagtctaaagctcaccacataaatcagaaactacttcatgctgtgactgtgataaatagatctgcaaatatctaccaggacaaatttagaagagtcttggggcactgtgttatacctgaattaaaaggtggctttgttaaaaatgaacttttctccaggmtagtatgtttgttgttttatgtttaaaaatgaagtgtagcaaaacccatgtaaggcattaaagataatttgctattgaaaaccaggatgtattttgctaaggggtggtcatcaaattgatgcaggatttttctcagcgtcttcatcagacttgtgacaggggggctccatttactcagctctccatgctcaaccccttgtgggagggagcacatgagcaagtgaatttggatctgcccagggtctctcttcgcgctggcaggagcaagctccatacagtacccatggccagaccaggcaccagtgagatactgcaggacccagcaagccactctgggtgccagcaagagcaagctccatggggcagtgcccaactgtgtgtttag

SEQ ID NO: 747071 - DNA, 580 bp, Homo sapiens
tattgaaaaccaggatgtattttgctaaggggtggtcatcaaattgatgcaggatttttctcagcgtcttcatcagacttgtgacaggggggctccatttactcagctctccatgctcaaccccttgtgggagggagcacatgagcaagtgaatttggatctgcccagggtctctcttcgcgctggcaggagcaagctccatacagtacccatggccagaccaggcaccagtgagatactgcaggacccagcaagccactctgggtgccagcaagagcaagctccatggggcagtgcccaactgtgtgtttaggggggtacctgtgacccccaaggccccacagggggtattacaatgatccttgagttctgccgtccacagacagctacgtgttaacagctcagttggccccttgcctcatcatgtsgggcagctgtccaccagtgagggcaaagggccattgtgacaacctttttatgagtacctgcacttggtgggtcctgagctcttgtctggcatccaagaagaattaggcttctagttaacatcctgagctctccatctctgccagagtcctcc

SEQ ID NO: 747072 - DNA, 618 bp, Homo sapiens
tcttttcaaaaaccagctcctggattcactgattttttgaagggtttttttgtgtctctatctccttcatttctgctctgatgttagttatttcttgccttctgctagcttttgaatgtgtttgctcttgcttctctagttcttttaattgtgatgttagggtgttaattttagatatttcctgctttctcttgtggrcatttagtgctataaatgtccctctacacaccgctttaaatgtgtggggacatcgtttttagagttaatgaaaaagaacacaagacatctatatattcattaactgaaatcaattttattgtccttcctatatttcataatagggttctcataacatcctggatatggataaaattcaggtcccagtgttcccatgctactctgagccatttgcttgtatctcatacccccatgatgcaaggaaccatgtctcacatgaggggaactcatgaagacttgtcaatgggacagaaggaccctccaacctgagagtgaggttctcttttactccagtgtcagaggttgcttggctctctacagagattcagctggacttctagattcacaattgaatttagaaacattcagaatatagctatg

SEQ ID NO: 747073 - DNA, 563 bp, Homo sapiens
taaaatattccactttcaaaggccctttttaggtaattgctgaactcaaactcacaatcaccacataaggcatctactgtaatacctattttgtagatgaaaaaactgaagcctaaggtctaaatggattgctcagggttaaacagagagttactgagaaagtcagaattggaaggaagtttcctgatacccacmcaattcagcatgcttccaccatgatgcctttctacctcctgttgccctgcacccaactggagctctatccattggcacctttacatcatggcgtttgtgaggatgacaagagtatgcacattagcataataaaaagtgatgtgcaatggcttgacagatcccacagatttcctaatgaaaaagggatattgaatttgaaattcataattttgacgagggaaaccattctacccttttgtgcaagcaaggctacaagaaatatttcctgataagcatggtgaggcatgggaacctgacagggctcatatgtcatctaccagttatgactttttgaccttaaaccatttcttttgtgtcctggctcttat

SEQ ID NO: 747074 - DNA, 616 bp, Homo sapiens
ctacgaggaatttatttcatttcatctgtgatgaagccattttagggattgcattgcaagtgtgtgcatgcatgtacacacacatatgtattaacacatcagaactgtatattaagttaaaggaaatgaggaatggcatgaatattaattcccttttctagacactgccattgaaaatcataggacctgaaacatagagcatttttgctcatctctgaagtctgttgctcatctccagtgtttcaatctctgtccccacaagtaggaggctgtagttgctctcatatctactcmtccccagggtcagaaaaatgggtagtgttgtgtgcgattataccctcactactgtgctgcatttcactctgctcagagtactattgctcccatgggaagactccttcctgtgagctagacatccattactgagcccagagcccatgccttccttcttccctagagccctgctcatattgagcacagcctagggatgattgtgagtagcatttttctcattgtgcttctaagagcctctctaagggctgataaagccatgatactctcatcggttgcacacattgggtttctgagtgagcctgtccaaagtttgacaatgatt

SEQ ID NO: 747075 - DNA, 628 bp, Homo sapiens
  misc_feature 1, 2, 3, 4, 5: n = A,T,C or G
nnnnngtaaatactgcaaatggccctcaaagaagtcacaacaatttctatccccacaaaaaaacaaatgagaatggcagtttcatttgccagctttactaatgagttaatttttatttggggagagagatttttattaaaacatttgttagaacacttgataaaataagaaacttagccctttatttgtctacaccccctttcatttgttgtatttctttttgtatttctttcaattagaagtttgaagtttttattaaacatgttttatcactatttctctttamagcttttgaattttactttctgactctaaaaagtttcccacatatcaagaatgcatttatttactcatgtttgtttcctactgtggtttgatgtgcttttttttatttaatatttgatgtggaatttattttggtgaaagaaatatggtatgcagctaaatttccaaattgtgaatcggatgtctcaataacatttattgatcagtccatcttttcttcattgatttgaaatgctcatttcatcatataaaaaaatctgaatgtatttgactttatttttgagttttattcttttacatttcaagggcttaatttaacttctcaagcaacaaactattctga

SEQ ID NO: 747076 - DNA, 616 bp, Homo sapiens
gaaatgttcatgggggtaatgattatgtaagtgtgtttatctgtgaaatctcattgaacaacacatttaagatgtacacatttatggccaggcgtggtggctcacacctgtaatcccaacactttgagaggccaagatgggcggatcacttgaggccaggagttcaagaccagcctgggcaacatagtgaaaccccgtctctacaaaaatacaaaaaaattagctgggcgtggtggtacacggctgtaatcccatttactcaggaggctgaggcaagagaattgcttgaaccagggaggcagaggttgcagtgagctgagatcacaccactgcacttcagcgtgggtgacagaatgatactgtctaaaaaaaaaaaaaagtacacatttattgtatatgtgcggtggttaattttaggtgtcaacttgactggattaaaggggttggcagatacacgcagcttctttatctgggctctrgtgtcttgctggcaattgtccagtcaggttctgctagactcacataggctttttctctgttgtctctgtttggttccctgacttgctgaattgattgagtatatgaaacactgcaatttcagataggcactgatagg

SEQ ID NO: 747077 - DNA, 664 bp, Homo sapiens
catagagacggggtctgactacgttgcctaggctagtcttaaactctgaggctcaagcaatcctcccgccttggccttctgaagtgctgggattacaggaatgagccactgtgctcagcccaaaagggattttaattttgcaaaaggaccaaccttaaaagagctttgaataataagtttctttagtgcaattctttttttttttttttttgagatggagtctcgctttgtcacccaggctggagcacagtggcgcaatctcggctcactgcaacctctgtctcccgggtttaagtcattctcctgcctcaccctcctgaatagctgggattacaggtgcccaccaccacgcccagctgatttttgtatttctagtagagatggggttttgccatgttggccaagtttgtctcaaactcctgacctcaggtgatctgcctgccttggcctcccaaagtgctgggattacaggtgtgagccacygcgcctggccagtgcaattcttttatgtttttgttccccacctctgttccgattttccattccttaggtatagtactttatgagctttttgtattaaccccctgtgttccttcatgcagatgcaggccaattagacgatacatattattactctctctcccttttcttaaaaggagataga

SEQ ID NO: 747078 - DNA, 597 bp, Homo sapiens
ataggcattcaaaatatgtttggggtgaatagagatgaagaaattgatattttaaaatcacaatgttaaatcttaaaacattatggtttctaatcttaatttctatctctttttgttaaaatgacaaataataccaaaaagccaattaaagaatattttaaaattccactaccatccagagaaaaatattgctagcattttgatagacagccttctaaaattagcacatcatatctctgtgcgcacacgcgcatgtgcacacacacacattttctctatgaatacagcttttcaaagagttccactttcataattcattyattcggcaaacatcttatgaatatttgctatttgccaggtacacttccagttgcttagtgtcaagcagtgaatgaaacaaacaagaacacctgccatccttgtcttcatggagttcacctctcagtacagacacaaagacaaaataaaaaataactgaataacatgcagattataataaagaacaaccagtatgaagaaaattaaaagagaatgggaagtggaagtcctggaggaagtaatcctcttattcacatagcaaatgttctgaacttcatg

SEQ ID NO: 747079 - DNA, 572 bp, Homo sapiens
agttggacagaatactacctataaattatccatgaggaacatttgttttagccaaacctagttagttaactaataaatccagaatgtagaaggatggtttaaaacgatatttctctgagaaagaataatttagttttgtgagtctctacttttttstctttttctttaattaatcattaatttttaaatcaatacatgtatactgagcctaaaaatttagacaatcaagatattatccatccataagtatgtaaagactccatatgcatagatttaaattttttagaaatagcacagtcattgcaaacatacactctgaatgtactttgtctataatcttacttagctatcaactctcttcagaaaaaaatggattctatttggttctagttgaagtcttacaagttccaaataaagctttattgtgtttggggacctccgaagttgaagtactgatcccttcagccatttgccatttgtttcctactaatgcaatgggtaactcgtgtgtgtgtgtgtatgtgtgtgggtgtgtgtgtgtgtggtttgttttgaaccaacaatatactgtt

SEQ ID NO: 747080 - DNA, 572 bp, Homo sapiens
agttggacagaatactacctataaattatccatgaggaacatttgttttagccaaacctagttagttaactaataaatccagaatgtagaaggatggtttaaaacgatatttctctgagaaagaataatttagttttgtgagtctctacttttttctctttttctttaattaatcattaatttttaaatcaatacatgtatactgagcctaaaaatttagacaatcaagatattatccatccataagtatgtaaagrctccatatgcatagatttaaattttttagaaatagcacagtcattgcaaacatacactctgaatgtactttgtctataatcttacttagctatcaactctcttcagaaaaaaatggattctatttggttctagttgaagtcttacaagttccaaataaagctttattgtgtttggggacctccgaagttgaagtactgatcccttcagccatttgccatttgtttcctactaatgcaatgggtaactcgtgtgtgtgtgtgtatgtgtgtgggtgtgtgtgtgtgtggtttgttttgaaccaacaatatactgtt

SEQ ID NO: 747081 - DNA, 572 bp, Homo sapiens
agttggacagaatactacctataaattatccatgaggaacatttgttttagccaaacctagttagttaactaataaatccagaatgtagaaggatggtttaaaacgatatttctctgagaaagaataatttagttttgtgagtctctacttttttctctttttctttaattaatcattaatttttaaatcaatacatgtatactgagcctaaaaatttagacaatcaagatattatccatccataagtatgtaaagactccatatgcatagatttaaattttttagaaatagcacagtcattgcaaacatacactctgaatgtactttgtctataatcttacttagctatcaactctcttcagaaaaaaatggattctatttggttctagttgaagtcttacaagttccaaataaagctttattgtgtttgrggacctccgaagttgaagtactgatcccttcagccatttgccatttgtttcctactaatgcaatgggtaactcgtgtgtgtgtgtgtatgtgtgtgggtgtgtgtgtgtgtggtttgttttgaaccaacaatatactgtt

SEQ ID NO: 747082 - DNA, 503 bp, Homo sapiens
tatgagtataatttggttactgaggtttgtgtttttttcttcactataaatcactaaattaccctccaaaagtctgcatcaatatacactctgtcaaaatttgtgattatgttcaaaacaattttctattctagtgattcatggcataaatatttgtgcagtagttgtctctggtgctcaatacaaaatctgtgcagtggagccaaaaaatgagtaatattcccattcttatactcattaatcttatttttaatattaggaaaatttctgaaagccaactacaatatgctgttggtaattttcttcatttcctcttgcaattgacatgaaacacacagagygtaaggaagattttccatgtcaaatacagagtgactaaggaagatgctaccagtagaagataactttatgtacctgacaatttttaaaaccaccatcaggtttgtcagtggtaagattacctgccaacatatattccattatatccagtgaaacgtcaatac

SEQ ID NO: 747083 - DNA, 612 bp, Homo sapiens
tgatgcctccagctttgttcttttggcttaggattgtcttggcagtgtggcttcaaagagccaacattaggttttgttgattctctctattctttatttcattcatctccactataatcttcataagtttctttcttctatattccttcagtgctyagccaggccattaacagccctgccttagctttcacctcctattttcatggagtcagaaggtgagcccgtgatgaaagctgaggttattttctgcttttaacagagtatgtgtatagccctgggcatgtaattagtcttcttgatattctggtataaacagatattttaaaagtaaacatatctcttttcctaacctcttcttccctggagtttggttatattgcctgttatattccttatctcaggtttccagtgacctttaaagacttttggcaaatgttatcccagccctgagaatgtattggttcagacaaattaactgtagccctcaagctagtcattcagggagctttgaaagacaggtcaaaacacagccacagttctttgataatagcaattgcattgctcattttggcactagcagcctgaagaaggagtgtggtctgctgctgtctt

SEQ ID NO: 747084 - DNA, 529 bp, Homo sapiens
tctttccttcactctcactttggaggtagatatattgggcttctctggccatccagtcatctcaggaccgtatgtgagttcttcacagggtcctccagagcctttctcatgtacagttctctgacttgggacatccacccatctccattgcccgaaaagtaaaacctgycctaaccaatatcacatacatggattattgtccctcagcctataattctgtgcctattttaaaatcgtcacactgtattgtgacctcagtcacatcaaagtcatatctccatatctccttccccacacgtgtaagacatttctcactacaccaagacgccttcaaaaagcagaacgcagagggattacacaatatccttgtgttcaactgacaaatagatcttaattcaaagagattagatgtgtcactaggggtaggtagttttatgtaaattcagagaatattaattacagaagagactacagaaatatttcagaagatcttaaaatattttaggtatattttagaaatattttagac

SEQ ID NO: 747085 - DNA, 628 bp, Homo sapiens
aagccccaaaacatggatttatgttcaacgtacaagaaaattccttagaataaatgatggctgatataatttaacaggcaaatgccctatgctaaaataagactgctaatctgatttttaaactatgcatgaaatattaagtctagtgcccaaaatagcgtgattcggaaagcctcttctctcttccaccacactgagctaatgggagtatagaataaacacacacgtatttaagtattttgtgaagtacagattagtttatcaatgcaatgaacattaatacttgaacactcaatttaaggtaatattagtgtaattttctgtatcttaaaagaaagacaatataagttttccttaccatttgttaacgataatacttttttaaatttcattcaccactgaaaaattttgtgacagattcrgcctaaatgagatcaaagctaaaggctcaaatactacagtagtgttcttttcacagttaggtttcaataaaccaaatgtaggaggaagataacggatacgaaaacctgattttaaggtcaaattcatgctaatatgtaaggttatcttcttggctgttaaactgataaatgaatattgatcatgcaggaaatcactttaaaagtta

SEQ ID NO: 747086 - DNA, 631 bp, Homo sapiens
tactgatcactttgaggtcaaaatattgaatcaaatataagataaaaatgtaaatgagtaaaaaaaaagaaagggaaacaagaaaaaaggagggaagaagacatgaagacgacatttaagaacacttttctcctttgccatcctcttgaaaaattaacaagacttgcctgacgtactatatcgattttcaaatctcctctttgtgccaaatttccaagtggaagaaagtaacattcttgaaaattttaataggatattgtgttgtaaaatattgtttaaaagtcaaactagttgaatgaatcctgagctgtaataaataactcatctgattcatataggaactttaaaatgaaaaacatagagtacatataattcatatagacagttctgttaactataagcaagtaggtagttattttattaatttatattgggaacaaaatcatgattratgtcatttaaccagcaagcatattaaattatcccacatctttcatctaaacaaatttgggtaggttttttgtttttttttaagaaactatttttattttattttaaaattaggctgttgtctttgcctatattattatacaacatgctacctcctactttgtagaccacatcatgacta

SEQ ID NO: 747087 - DNA, 631 bp, Homo sapiens
tactgatcactttgaggtcaaaatattgaatcaaatataagataaaaatgtaaatgagtaaaaaaaaagaaagggaaacaagaaaaaaggagggaagaagacatgaagacgacatttaagaacacttttctcctttgccatcctcttgaaaaattaacaagacttgcctgacgtactatatcgattttcaaatctcctctttgtgccaaatttccaagtggaagaaagtaacattcttgaaaattttaataggatattgtgttgtaaaatattgtttaaaagtcaaactagttgaatgaatcctgagctgtaataaataactcatctgattcatataggaactttaaaatgaaaaacatagagtacatataattcatatagacagttctgttaactataagcaagtaggtagttattttattaatttatattgggaacaaaatcatgattgatgtcatttaaccagcaagcatattaawttatcccacatctttcatctaaacaaatttgggtaggttttttgtttttttttaagaaactatttttattttattttaaaattaggctgttgtctttgcctatattattatacaacatgctacctcctactttgtagaccacatcatgacta

SEQ ID NO: 747088 - DNA, 636 bp, Homo sapiens
acccacttagcttggcaggctctactcggctcacactactggcctggatcccacacctgccaagtgcgagccaggtgtggagcagcaaggggtgtgtgagggagcaagcattgggtccagcaactgcacagtcacgcatgctggctgacacagcaggatgggcacctccaggtgctggaacaggtgcctgctctctgcaaggctgtggctggaccaggttcaccacaggcagcttcaacagctgcccccagggaacgcagtggaagcctggggactccaggaaatgcaaagccccaaagagggagtcacagtcttggcttggggagctcccaggtctggagagggccacagctctcctctccccttcaccttcaatgtggcgagcaaggggcatgtttcagccctgtatgtgttacagytctttcagccctgccgttccacatttctcgagttcttttcctgcatccaggaagaatgaggtatgcagataagtggagggtgagcaaggtgaagaggagctttactgagtgacagaatacctcagaggaggccctggagtgggtagctcctctctgcagctggttgtcccagtggctgctcagctctggctgagcctggggcttctataggcattca

SEQ ID NO: 747089 - DNA, 636 bp, Homo sapiens
acccacttagcttggcaggctctactcggctcacactactggcctggatcccacacctgccaagtgcgagccaggtgtggagcagcaaggggtgtgtgagggagcaagcattgggtccagcaactgcacagtcacgcatgctggctgacacagcaggatgggcacctccaggtgctggaacaggtgcctgctctctgcaaggctgtggctggaccaggttcaccacaggcagcttcaacagctgcccccagggaacgcagtggaagcctggggactccaggaaatgcaaagccccaaagagggagtcacagtcttggcttggggagctcccaggtctggagagggccacagctctcctctccccttcaccttcaatgtggcgagcaaggggcatgtttcagccctgtatgtgttacagctctttcagccctgccrttccacatttctcgagttcttttcctgcatccaggaagaatgaggtatgcagataagtggagggtgagcaaggtgaagaggagctttactgagtgacagaatacctcagaggaggccctggagtgggtagctcctctctgcagctggttgtcccagtggctgctcagctctggctgagcctggggcttctataggcattca

SEQ ID NO: 747090 - DNA, 554 bp, Homo sapiens
acccagccagactgggacagcacctgggctcagccccaacttttctgagatttgagcgggtgccgggaatggagagagggaaggcagcgaaagcagacacttctgaaacttgcggggggagatgcctgactctgcagggcattgtggcttgtatggctgtagctgcacccaggaatgtgggtctcctgcctgctctgtgggctaggaggcccagatctaccgccgtgacttgggcatctgcagctgccccaggagggcaggtttcctgcctgctcccaggccccccactttgagatgtcaccrtcaacgagggaggcctgggttcacaggcacaacctgagtgtctgtagctgtgaccaggaggacagggatcctgcctgctttgtggagtgggatgcccgggtccacagccatgacgtgggcagctgcagctgcataccgggagttcccaccccaccaactcggaaggggcggggctcccacttgtcccggctaccaccaggtctatggagggtgcagccccagcggggcttcccggctgcagctgatgtgat

SEQ ID NO: 747091 - DNA, 554 bp, Homo sapiens
acccagccagactgggacagcacctgggctcagccccaacttttctgagatttgagcgggtgccgggaatggagagagggaaggcagcgaaagcagacacttctgaaacttgcggggggagatgcctgactctgcagggcattgtggcttgtatggctgtagctgcacccaggaatgtgggtctcctgcctgctctgtgggctaggaggcccagatctaccgccgtgacttgggcatctgcagctgccccaggagggcaggtttcctgcctgctcccaggccccccactttgagatgtcaccgtcracgagggaggcctgggttcacaggcacaacctgagtgtctgtagctgtgaccaggaggacagggatcctgcctgctttgtggagtgggatgcccgggtccacagccatgacgtgggcagctgcagctgcataccgggagttcccaccccaccaactcggaaggggcggggctcccacttgtcccggctaccaccaggtctatggagggtgcagccccagcggggcttcccggctgcagctgatgtgat

SEQ ID NO: 747092 - DNA, 563 bp, Homo sapiens
agttagggtacccttggcatccgttttcacttgtaccatgaggtagcgaaagatacggcttctgagtatgccttttgagacttcctgaaattaacctactcaggtcactcacccacaaatatctcgatcttcttctcataatgacagattcctgttcgggttcatttttattctaatgtctaatagttacctcctcaatgtgggacttcatatttcagagcgctaatcctcaagcaactcctatacacttgcacctctatctacagtctccacacaaccrcttgaagtttgggacatctgaagcccaatcttttaaacttttttttttattaattgttctcagattgatctacttattcctttagtctaagcaggaaatcttcctctagaaagtgtatcattggagacatatatatatatatatattttattcttaggtcagtaatagattgttcttttcctcttgcttctcctatacaactgcttttcccctgacatccttgttgctgttggtgattagccatacccaccctgattttagcttctgtggcatatcttgtcac

SEQ ID NO: 747093 - DNA, 606 bp, Homo sapiens
aaatacaaaattctcaataaaaaagcaataaaggaaacaacaggtttcagatgatatacttttataatgtagattcttttttttacctttttcagaatgtcatcgacaagtttcaaaaatatctcgtccacattgaagttatccttggcacttgcttcacagaaccgcatcccagtgatctgctgtgcaaactgagaagagacacacacctatttcctctgtgtggggcctcacagacgcagcgtgcgagcatgaggtctctgggctcagcttcaagggaagggctgggattaaggggtagaaagtcccactgacgctcaaagataaagttcacaagtgtagcaaattcttacattataagcaactagcaaaacaaaagacaataaaaatcctgaaggtgatgccgggaccttccagtcaaatcagttgcctaagtttctaaragtgtaacatatctgacatttaaatgtgaatagcatcgtttctccatgattcaatccttagcaaaaaccaaggaagtttaaagtacgttaaagtaaattataaaagcaactttatggcttaaaatatgtttctctgtataaaatgtcaggttagataataatg

SEQ ID NO: 747094 - DNA, 563 bp, Homo sapiens
cgtggtagtgtacacatggagtcccatttactcaggaggctgaggcaggaggatcacatgagcccaggagtttgaatttatactgagctatgattgcaccactgccctccagcctgggcacagagcaagatcctatctcttaaaaaaaaaaatggcaattcggatcatagcctctctcaaacagccttctccmcattttcacccacatccagaaaaagaggagtagctatatttttcccctctttagaatgttggaaaatttcttgctgaaaacagtgaagcaggttatgatctagggtctccctaattactagtaatctagggacaaagctattcctaatcaaagtgagcattattgaatacatttattagccatttctatttcatcttatttgcttttccattttctctcctttgtccatttttttgttctgttagatttttttgttttttgcacataaactggagcaaaagaattctacctgattccccaacccccaaaataacatccctgtcccctacggcgtgttgtggcaatcaagatgacatataggagatgtaca

SEQ ID NO: 747095 - DNA, 602 bp, Homo sapiens
taacaaaaagaacagcaagcatacagaagcttgggaattaaaacttactatgaaggggcatacaacttagcttgtggcagtaggagtacctgggcgtgctagagtcaagtcctgcctctccatctttcttttgcacaggaatcccctagagagcttaatgaaatgcagattctggttcagcaggtctggaatgaacctgaatttgtgcaattttaacwaactcccagttgctgcaatgctgctggtccagggtctgcagtgtggggaacaagtcgctgtatcaggccatgcacagcagccagcatacttttctgcagcaatgggagtgccattaacccagaaagttggtcaatgcaagtccagcttctcctctactgggttaagaatcccagtatataagtgaggaagctaagcacagagaagctgaatgacttacaaaatgggcaagtgcacagtatatgagcaggaattcaaacacgggcctgtttggctccaaagcccatactctttccacttcacatctaagaaagccaaaagcagagcaccgaagagcccaggcatccacagagggacctggaggaagtggatggcagccctgccca

SEQ ID NO: 747096 - DNA, 632 bp, Homo sapiens
taaggttggtctcggaggtcgggcccactggaataaactgagtccagtacctctacatagttacgttcaactgggctgtctgataccaggagcaaggtggtggggtttagggtgttgcaaacttcactggttatgcggggattttcacagagcaagctttggcatctagttagtctagcattcattagctaataatgtcctttgctgtttattaaagtcaccacagcatgggggacttaatgtttaggttttgcctaagagtgagcttatctgcttcttgtgctaacagggccattgctgccagagtccttagacatgggggccagcctttggaaaccccgtctagttgttttgagagataggccagtggccttggccagggccctacagtctgggttaaaactccaactgccattttttctctttstgatacacagggtgtaaagggttttgtcaggtcaggtagccccagggctggggccgacatgagttttttttgttttgttttgttttttttaaattcatgaaaagcttgttgctgttggttgtaatagatgtagtttatctaatctagatttttattaactgtcacatactaaaatattgacttaaatcctgtagctatttgattt

SEQ ID NO: 747097 - DNA, 632 bp, Homo sapiens
taaggttggtctcggaggtcgggcccactggaataaactgagtccagtacctctacatagttacgttcaactgggctgtctgataccaggagcaaggtggtggggtttagggtgttgcaaacttcactggttatgcggggattttcacagagcaagctttggcatctagttagtctagcattcattagctaataatgtcctttgctgtttattaaagtcaccacagcatgggggacttaatgtttaggttttgcctaagagtgagcttatctgcttcttgtgctaacagggccattgctgccagagtccttagacatgggggccagcctttggaaaccccgtctagttgttttgagagataggccagtggccttggccagggccctacagtctgggttaaaactccaactgccattttttctctttgtgayacacagggtgtaaagggttttgtcaggtcaggtagccccagggctggggccgacatgagttttttttgttttgttttgttttttttaaattcatgaaaagcttgttgctgttggttgtaatagatgtagtttatctaatctagatttttattaactgtcacatactaaaatattgacttaaatcctgtagctatttgattt

SEQ ID NO: 747098 - DNA, 561 bp, Homo sapiens
aagtgtgtaaatatagagggcgttcctgtagtcaggtgtttctatttcttatgatctgtgatatttatacatagcacagtgctcagcagcacagatttgggagtcaggatgcttggatccagtccttactctgatactgaatagaattgtgatcttgagcaaatcccttgaatctatgtaaaagtattataattctaccttatttttgagattcctgagacaattaaggtttttttttttttaatgaagccctggagcactagatgtacccttatcattattattattattttcaggtgttggtcaggttcagcgacattaatatctctttgtctttatcttcatctctcaaaatcmtctgcttgcctttatgcaatactgtttttcttaaatgtaattccttacacaggaagactgaggattaccaccaaattttgaaagtaaataaaagctcttaattatcaaaaattttaatggaactgtgaaaaccacctaatatcaactttctaaactgtataacaaaagtcagttctgtttattctacaaagtgaatatttttga

SEQ ID NO: 747099 - DNA, 561 bp, Homo sapiens
aagtgtgtaaatatagagggcgttcctgtagtcaggtgtttctatttcttatgatctgtgatatttatacatagcacagtgctcagcagcacagatttgggagtcaggatgcttggatccagtccttactctgatactgaatagaattgtgatcttgagcaaatcccttgaatctatgtaaaagtattataattctaccttatttttgagattcctgagacaattaaggtttttttttttttaatgaagccctggagcactagatgtacccttatcattattattattattttcaggtgttggtcaggttcagcgacattaatatctctttgtctttatcttcatctctcaaaatcctctgcttgcctttatgcaatactgtttttcttaaatgtaattccttrcacaggaagactgaggattaccaccaaattttgaaagtaaataaaagctcttaattatcaaaaattttaatggaactgtgaaaaccacctaatatcaactttctaaactgtataacaaaagtcagttctgtttattctacaaagtgaatatttttga

SEQ ID NO: 747100 - DNA, 561 bp, Homo sapiens
aagtgtgtaaatatagagggcgttcctgtagtcaggtgtttctatttcttatgatctgtgatatttatacatagcacagtgctcagcagcacagatttgggagtcaggatgcttggatccagtccttactctgatactgaatagaattgtgatcttgagcaaatcccttgaatctatgtaaaagtattataattctaccttatttttgagattcctgagacaattaaggtttttttttttttaatgaagccctggagcactagatgtacccttatcattattattattattttcaggtgttggtcaggttcagcgacattaatatctctttgtctttatcttcatctctcaaaatcctctgcttgcctttatgcaatactgtttttcttaaatgtaattccttacacaggaagactgrggattaccaccaaattttgaaagtaaataaaagctcttaattatcaaaaattttaatggaactgtgaaaaccacctaatatcaactttctaaactgtataacaaaagtcagttctgtttattctacaaagtgaatatttttga

SEQ ID NO: 747101 - DNA, 556 bp, Homo sapiens
acgcagacacttttagagttgtgagcccttaaaagggacaggaattgctcactcggggagctcagttgttggagacgtgagtcttgccgaagctcccagctgaataaagccgttcctgctttaattcggtgtctgaggggttttgtctgcggcttgtcctgctacagttacatgaagtgacgctgctataaagccccccagggggacaccagcatccttgcctcatacatgtattttggacataggtagcaggagtgggactgtagggtcacaggtaccgattactctagtacaccctagaaagtcatttatcaaagtggatgaaattaagtatgttcccagagtcacatgtgatagctccagttcctccacaayctcaccaaccctctgcatttttctctctgataacgtgtctattttggtgggtgtagaagtgagaaactctggtttgaatatgcattcttctgatcatgtgtgattgagtgcactttcatatgctttactatgccaaacttgctgaggtttctgtgaatttgacagacgaaagtgagtacat

SEQ ID NO: 747102 - DNA, 464 bp, Homo sapiens
tgaaggaaacaagagcttcttcttatgctactaaggagaactctgcctttcacccctagcttatctttttattcaaggccttaattgagcttggtgaagccacccgattctattgcctctctagttagtattttcctcattatttctccaatgtcagatatcagcattttcttccaccagtatamcatccaacttcatcaactgtgattgttttaacaactaaacaaccatctcatgctgggattgtatgtcctctgcctaccaccagcagtaccttctgccacagattggactctctaggaagcagactctagataaagactatcatatagaaggtttatcaggaggttcccttggctccaacacctggggaagaaaggggactgaggggagagaggggaaagaaggagactgggcagaggaagaaattgagatatgatgcagactaaataaagcttcagttg

SEQ ID NO: 747103 - DNA, 464 bp, Homo sapiens
tgaaggaaacaagagcttcttcttatgctactaaggagaactctgcctttcacccctagcttatctttttattcaaggccttaattgagcttggtgaagccacccgattctattgcctctctagttagtattttcctcattatttctccaatgtcagatatcagcattttcttccaccagtataccatccaacttcatcaactgtgattgttttaacaactaaacaaccatctcaygctgggattgtatgtcctctgcctaccaccagcagtaccttctgccacagattggactctctaggaagcagactctagataaagactatcatatagaaggtttatcaggaggttcccttggctccaacacctggggaagaaaggggactgaggggagagaggggaaagaaggagactgggcagaggaagaaattgagatatgatgcagactaaataaagcttcagttg

SEQ ID NO: 747104 - DNA, 589 bp, Homo sapiens
ggtggtgccaagagacaccctaagggatcttgggtattccaggcatattagaccttacctccttgtgtagcagtccagtttccccttggttgtcaggaacaatcgccctaaccagtacagcaactcctttacttttgaatcagaggtatgaggcagcyggccatctcaactttaacagagtcattattttgtctcctggtagagtcattcctcccttaggctctgctgtctaggggtcttagttccaaactccttgggaataaaacaatttagtagatcactaggggataatagtaaagttatttgtattttcaccccttaattcttacacccttgaaacctggttatgggagaaacagttatattggacagtgatttaaagactacatagaatcctagaagccttagcttgagccctgcaaggtattgccaatagctgacgccgtaatttagttttcaaaaggccatttccacctttcaggccagtccacatacctctccctgataccttattgtatccagttttctaattttattccttctacacttgtattccttctacacccctgaccattcagccaaaacattg

SEQ ID NO: 747105 - DNA, 640 bp, Homo sapiens
atctatttgtttaaatattttttcttcttgtcatcagagtttttgaaatttatacctctaccataagatatcatgtagtgttggacttgaaacttctagaatcatctggctatcaragagctgcccaacctccagccccatcttagggcagacatgaataaggcttctttggtctaaataagctaaatccagagctctgggcattaaagaaactgaagtcagattttagaattgttctgcaattagttccttgacctggtggtcctatttttaatagcagccaatttaggagtttcctaggtttattcagagctctctttcaggtaactttgtccctatactcttcccgttcttgtcagtatcactcatttttttgctctcacaagaaaatatatagtacttagaggtaaatgtaaaacttctatacttgggtctcaagatcatatcacaaaagagtgaaatgaattagacactgtaagaaattgaccattcaaaaacaggaatgttattgcctaccaactcaatataagtgactagaataatgttattcagtctaggaatctattaatagaagaatagtgctaggacaaaggaggtaatgggcttcctctagcttgtactggcaaagccataattgagg

SEQ ID NO: 747106 - DNA, 601 bp, Homo sapiens
cccagcctctagaactataaaaaataaatttctattgtttataagccacccaattataaaacagcatccaattgggatgctgttttgttacagcatcccaaacagactaagatataaatatactataagctctttcagggtgagcgtattatctttatttgggttcgtggaattaaaaaaatacctggcacagagtaagcgttcaatcaacatttgattaaaaaaataaatcagccatgtctcccactatatgttaaagaatgacagagaatgaaataactttttttctgtcaaagggaagatttttgaagaatgtacagcggaaaaatcagtgacaatatgagcacagagctgcttggcytctctctcatacttgtccaattcctctgaagatcccccaagggtcagagagaagtactaaagctagtttgtatcttgggtgactaaattaatgggctatatgtacagagaaccaaaaaataacatttgagatagaagtagaaaatgtataataattgcagctctctgcgatcatggaaaacaattgattcaatctttgaaacgactgatattcatgacttcttttcaaagtaattattaa

SEQ ID NO: 747107 - DNA, 375 bp, Homo sapiens
  misc_feature 366: n = A,T,C or G
aaaaaaaaaaaaaaaaaaaaaaaaatttaccttcacatgatctaatcaggttcatacattaattctgaaaaaaaaattatagaatttatatactttacaattactcttctcaaatagttcttaagaatcttcttaaagaatattcttcaagattgagtaaatcagattttaaggacagaattttgcagaactattcagctataaaaaaggatgagatctagtcatttgcaacaacrtggatggaactggagatcattatgttaagtgaaataagccaggcccagaaagacaaacattgatgttctcacttatttgtgggatctaaaatcaaaacaattgaactcacggacatagagagtagaaggncggttacca

SEQ ID NO: 747108 - DNA, 554 bp, Homo sapiens
gctaatccacttgagatggggaccatattaagagaaagagttactttggggtgtcaggggaaattgggagtttcatttttgacttatgaaatttgagttgcttgttagagactccaggagatgtgtaaataggcacttggacaagaggtttggaattatggaaagaaagctggtcttatagatgtatttaaggcactgagcctcctcatagggggtgaatataggtgaagaagaggactgaggactgggtcctggttctcttgaccatttagatatcagggagatatggmtgaaaagcaaggaatgctaaaaagacatttgctgtgaaaacgatcatggaaataacccagtagctgaagggagtgtgggaatgctggagttttgatttgtttttaggttgataccatacctgtgcatttttctcctgatagaaaatgtctagtagggaaacgatgatgcaggagagaaaaggcctcctagggtgatgtttttgagtaggtgagaggcgtgggatctgggacccacatggaagacttggcctcacattgctagaa

SEQ ID NO: 747109 - DNA, 606 bp, Homo sapiens
atcctaatgtagaatcttggctttagaatgcttacatacttccagtgatgacagggacctcgttacttcaaagggtaacttgttccattgccaagcacttccaattattaggaaacccaaatctcatccacttttttttctgacttttgcatattgctcctcattctgctatgcatgactacatacaaaagtctaatctttggtctgttagtccttgaaatcatytgaagagagttatctatcaaattcaccaaagatttttcttcaccatactaatacacatcaagagaactaagaataccttaacgatttaggaagaaatgtaatttaccaggaattggctaaaaggtgttcaatgtagagccgtaggagctgcatgcattttcaagcattccattacactagcctaagggtctagtaaaatgcctttgtagttagtaaaggaaatctataataccaaagagtgaatattacatataatacttgaggcaagaaacagagaacattttcatttacaaggcaatctgttaaaacaacaaagagcagcacaacagacttacccctggaaaaaaaaatcgttactgaaattctaataatcaagtctgg

SEQ ID NO: 747110 - DNA, 589 bp, Homo sapiens
gtttttcttcagtaaaatggtatgggggatattctttgctatgttagacttaagaggttgatcccatatctggcagatggcattctccaaaggcgaagcaacacacctgaaggtaatgttccagtccagtctcatagtgatctgaagaagaagataactggaatcaggaggtgtggtgatttaccaaatgagcaggtgtagactttgaaaatcactgattttagagtacatgacattgctatatgacaagttgactataatgatgtatttgattagaaataatcttgccaaaagcaatttgatcaatattaattacttagaaaacaaactaagaaattgtagaactagataaaaaaattccatctcyatatttatataaatatatttatatacatatatttatataaaaatatatatatttatatgtatatttatataaatatacatatatttatacatatattgatatatttatatatacatttatatatataaatatatgtacacatttatatatgtatacatttttatataaatatatgtacatttatatatttctacatttatgtttatataaatgtacgtatac

SEQ ID NO: 747111 - DNA, 589 bp, Homo sapiens
gtttttcttcagtaaaatggtatgggggatattctttgctatgttagacttaagaggttgatcccatatctggcagatggcattctccaaaggcgaagcaacacacctgaaggtaatgttccagtccagtctcatagtgatctgaagaagaagataactggaatcaggaggtgtggtgatttaccaaatgagcaggtgtagactttgaaaatcactgattttagagtacatgacattgctatatgacaagttgactataatgatgtatttgattagaaataatcttgccaaaagcaatttgatcaatattaattacttagaaaacaaactaagaaattgtagaactagataaaaaaattccatctccatatttatataaatatatttatatacatatatttatataaaaatatatatatttatatgtatatttatataaatatacrtatatttatacatatattgatatatttatatatacatttatatatataaatatatgtacacatttatatatgtatacatttttatataaatatatgtacatttatatatttctacatttatgtttatataaatgtacgtatac

SEQ ID NO: 747112 - DNA, 534 bp, Homo sapiens
ggtgcctctcctctctgcatgctgagagagtgacctgcccgggactctgtccgttttctgaaaattttatttctaattcataaataataattgcatatattatatacatgatgttttgatatatgtgtatattttggaatgattaaatcccackaattaacatatccagaaactcacatgcttttgttttatggtacaaacatttaaaatctacccttttagcaattttgaaatgtacattacattatcattaactatggtcaccacgatatgccatagagctcaaaaacttactccttttaacaaaaactctgcacactttgaccaacatctctttatctccatctcttccccacagcctctggcacccacctgagtccttctgaattggacttttttagattccacatgttggtgagaccctgtggtatttgtctttctgtgccagcttgctttacttagcacaacatcctctaggcccatccatgttgttgcaaatgacaggatttaggactctatcctttgttgaaaaat

SEQ ID NO: 747113 - DNA, 534 bp, Homo sapiens
ggtgcctctcctctctgcatgctgagagagtgacctgcccgggactctgtccgttttctgaaaattttatttctaattcataaataataattgcatatattatatacatgatgttttgatatatgtgtatattttggaatgattaaatcccactaattaacatatccagaaactcacatgcttttgttttatggtacaaacatttaaaatctacccttttagcaattttgaaatgtacattacattatcattaactatggtcaccacgatatgccatagagctcaaaaacttactccttttaacaaaaactctgcacactttgaycaacatctctttatctccatctcttccccacagcctctggcacccacctgagtccttctgaattggacttttttagattccacatgttggtgagaccctgtggtatttgtctttctgtgccagcttgctttacttagcacaacatcctctaggcccatccatgttgttgcaaatgacaggatttaggactctatcctttgttgaaaaat

SEQ ID NO: 747114 - DNA, 579 bp, Homo sapiens
acaagtctatgagtatattaaaagccattgagtagtacactttaaatggggaattatattatttgtgaattatattcctttttttttttgttgttgagacaaagtctcactctgtcacccaggctggagcgcagtgttgcgatcttggctcactgcaacctgtgcctccttggtacaagcaattctcttgcctcagcctcctgagtagctgggattacaggtgcccgcctccacacccagccaatttttgtatttttagtagagatggggtttcaccatgttggtcaggctggtcttaaactcctgacctcaggtgatccacccgccttggcctcccaaagtgctgggattrtaggcatgagccaccacgcttggtgtgaattatatttcaataaggttgttttaaaaagaaggtaagtgccaagaactagttaggggactcttatagcagtttatataagaaattgtggtagtctagattagggaggtgaaagtagaaattgacagaagcagatagatcaaaagatatttagggccaggcatggtggctcacatctgtaattccaacactttggaagg

SEQ ID NO: 747115 - DNA, 589 bp, Homo sapiens
aaaagaagatattcatgcgaccaacaaacatatgaaaaaagctcaacgtcactgatcattagagaaatgcaaatcaaaaccacaatgagataccatctcataccagtcagaatggcaattactaaaaagtcaagaaacaacagatgctggcaaggttgcagagaaaaaggaacacttttacactgttggtgggaatgcaaattagttcaccattgtggaagacactgtggtgattcctcaaagatcyagaagcagaaataccatttgacccagcaatctcattactgggtatacacccaaaggaatataaaccattctattataaagataaatgcacatgtatgttcactgcagcactattcacaatagcaaagacatggaatcaacccaaatgcccatcaatgaaagactgcataaagaaaatgtggtatatatataccatggaatactatgcacccatgaaaaggaacgagatcatgtgcctttgcagggacatgaatagagttggaagctgttatcctcagcaaattcacgcaagaatggaaaaccaaacagtgcatgttctcacttgcaagtgagagctcaacga

SEQ ID NO: 747116 - DNA, 589 bp, Homo sapiens
aaaagaagatattcatgcgaccaacaaacatatgaaaaaagctcaacgtcactgatcattagagaaatgcaaatcaaaaccacaatgagataccatctcataccagtcagaatggcaattactaaaaagtcaagaaacaacagatgctggcaaggttgcagagaaaaaggaacacttttacactgttggtgggaatgcaaattagttcaccattgtggaagacactgtggtgattcctcaaagatctagaagcagaaataccatttgacccagcaatctcattactgggtatacacccaaaggaatataaaccattctattataaagataaatgcacatgtatgttcactgcagcactattcacaatagcaaagacatggaatcaacccaaatgcccatcaatgaaagactgcataaagaaaatgtggtatatatatmccatggaatactatgcacccatgaaaaggaacgagatcatgtgcctttgcagggacatgaatagagttggaagctgttatcctcagcaaattcacgcaagaatggaaaaccaaacagtgcatgttctcacttgcaagtgagagctcaacga

SEQ ID NO: 747117 - DNA, 608 bp, Homo sapiens
tcagagtttgtcaatttttgaaagacatcttcgttgtcaccagtttttaaaatttatttttattttttagagacagggtcttgctctgtcacacaggctggagtacagtggctgctcacagcttactatagcctcgaactcctggcttcaagccatgttcctacctcagcctcccacagtgctgggattaaaggtgtgagccatcacgcctggcctgttttcagtattttttttttttttttgagatggagtcttgctctgttgcccaggctggagtgcagtggcacaayctcggctcaccaaaacctctgtctcctgggttcaagcgattctcctgtctcagcctcccgagtagctgggactacaggcgcacgccatcatgcccagctaatttttgtatttttagtagagatggggtttcactatcttggccaggatggtcttgaactcttgacctcgctatccactcgccttggcctcccaaagtgctgggattacaggtgtgagccaccacacttagcctgttttcagtttttagccactataagcaaacaccagtgtctagcgtttttctgtgagaacaagttttccaattgatttgggtaatg

SEQ ID NO: 747118 - DNA, 613 bp, Homo sapiens
ggaaaggaaaaaatcaagattacccctatttgcagatgacatgtcttatatagaaaatcctaaggaagccataaaaaacaacaacaacaacaacaaaaaaactattagaggccaggcaccacggctcatacctataatcccagcactctgggaggccaaggcaggcagattgcctgaggtcaggagttcgagaccagtctggccaacatggtgaaaccccgtctctactaaaaatacaaaaaaatgagccaggcatggtggtgtccmccttaatcccagctgctagggaggctgaggcaggggaatcacttgaaccagggaggtggaggttgcaatgagccgagatggtgccattgcactccagcctgggcaacagagcaagactctgtctcaaaaaaaaaaaaaaaaaaaaaaaaaaggagttaagaaacctccctgggcggggcatggtggctcatgcctataatccagcactttgggaggccaaggccagcaaatcacctgaggtcgggagttcgagaccagcctgaccaacatggagaaaccctggtgctactaaaaatacaaagttagctgggcaaggtgatgcatgcctgtaatcccagctattcca

SEQ ID NO: 747119 - DNA, 624 bp, Homo sapiens
acgctgagtgctttgaactaaaggagaaacaaggcctctctgaccttctctgttcccctagtctcttgctcctctttccctcccaaagcaggcatgaagaggctctctctaaagttcccttaactcactaaagaaagttcctgtgaaaggaatgcaattgtcatgaggcccctccttacaataatatcatcaaatagcgaagattaastaacaggaaaggagaaaaaagattgacactacctattcttctgtggactgctacctgagaaacttcatctgcacaaaaacagcatttgttcctcatgtgtttcttcccttcagcaccccataacctgtggccgcctgactctagatgtcccagtcccctatatctttttgtagctgaggatactgtataaacttcaaccacccaactcttctgggagtctcatactttgtaggacccacgtgcatatccacataataaacttgtggtatcttttctcttgttaatatatctgctgtcaatttattccagagactcaaattgtcaaactttcagagggtggaaggaaaattcccctcacccctataaaactatcaattttattgtcttctgaggttcagctccaatcatagctttag

SEQ ID NO: 747120 - DNA, 624 bp, Homo sapiens
acgctgagtgctttgaactaaaggagaaacaaggcctctctgaccttctctgttcccctagtctcttgctcctctttccctcccaaagcaggcatgaagaggctctctctaaagttcccttaactcactaaagaaagttcctgtgaaaggaatgcaattgtcatgaggcccctccttacaataatatcatcaaatagcgaagattaactaacaggaaaggagaaaaaagattgacactacctattcttctgtggactgctacctgagaaacttcatctgcacaaaaacagcatttgttcctcatgtgtttcttcccttcagcaccccataacctgtggccgcctgactctagatgtcccagtcccctatatctttttgtagctgaggatactrtataaacttcaaccacccaactcttctgggagtctcatactttgtaggacccacgtgcatatccacataataaacttgtggtatcttttctcttgttaatatatctgctgtcaatttattccagagactcaaattgtcaaactttcagagggtggaaggaaaattcccctcacccctataaaactatcaattttattgtcttctgaggttcagctccaatcatagctttag

SEQ ID NO: 747121 - DNA, 615 bp, Homo sapiens
ggagtttcacgttacatatatgcagtacaggctttgaccaaagacttgggagcccctgtgtgcagctctgtcctcttcagtaccctactccacaagttccaattgggtcagcagtcgtgcattctattctttgccttcccagagagacccttcttggactctactttcctcataaaagttgggaaataggccccaagtacaaagttggcaagagtatgrgaggctaaatttcatgtgttactcttctctcatgggtcattgtgatattgtgaaacatatatttggtctttgaccctgtttcctggcatacaaccaaaatctttagactgttttgtatgctaatgattgactaatgacaagcagcccctatgtagctttgaggagtgtaagcgcaagtgcaagggtggggctggtaatcagaaaaaaacaagtcatggttacagggttgatattttcaggcccactccacaacctccagagatggggaagggactgaaggttaagctgatcaccaatggccaatgatttaatcaatcatgcctacataatgaggcttccattgaaacccaaaggagtgggttcagagagcttctggatagctgacacgtggaggtt

SEQ ID NO: 747122 - DNA, 715 bp, Homo sapiens
ggggccagccacagacaccctgtgcagcttcctccttccgggtgcaggcgggcctgggcagtctgagtcctacctcagcccccacctcacctccctgcatcctcctagcatctctgcagggctagcccagaggttggcggcggaaggcccacagctcccctggctccatgggcaatgaccgracagcccttcacctctctgggccttgttttctcaaactgaaactggagaggatgaccccagcctgggaccttcgagggcctcaaaagggctctgggccttgcgtggtgagtttggtcacccacacacccatcttcccaaatgccaggcttcactcactacagcgttctttcttttcccttcagtatttctcaaagttacccaaaccacatcccctgggaagcctggttcagatgctcctccaagaagcctcccttgaaccccagatagaagggagcatcattcctgtgacctcaccccaccccatcctctatacactcgagactgttgtagccatactaggtgctatgaaggggaggggatttgacctcggcaggatgatcagggaaggcatcctggagtacgcatgagatcagggatggctgggttaacagggcaaagtggaaaggaagggagggtattccaggcagcaggaacagaatgtgcaactgctctgaggcagctggaagcatggtcagcaaaaagattggaaatt

SEQ ID NO: 747123 - DNA, 606 bp, Homo sapiens
gttcctccatgaggcaagggcccatctggcatttggggtgggcagctgttcctcctgcctccctggcttctctctccctctggtaacacaatccctattccccttagagaaccaccatgacaccacacttagtcagttctggaacttttaatagaattggtgtgaaaaggtcgggcgtggtggctcatgcctgtratcccaggattttgggaggccaaggcagctggatcacctgaggtcaggagttcaagaccagcgtggttaacatggtgaaaccccatctctactaaaaatacaaaaaaaaaaaaaaaaaattagctgggcgtggtggtgcacacctgtaatcccagctactcagaaggctgaggcaggagaatcagttgaacccaggaagcagaggttgcagtgaaccaagatagcgccactgcactccagcctgggcgacaagagcgaaaaccccatctcaaaaaaaaaaaaaaaaaaagagttggcgtgaaaaacaaatctctttctcctgctggacttaaatctaagaggatgtggtctggaactgctggggaccctctcagggttagatgaagtccccatgcagaaaaagcagaacca

SEQ ID NO: 747124 - DNA, 682 bp, Homo sapiens
ccccaaccccgttgggatgtggtgtgcgctcacccaggatgaggtgcagcttggcatccgtctggaaagcgtagtgcagcgtgaccaggaagggcgcctggcgcaccagctccagcaccgagcgctcggtgcgcgtgtgctcytgcgtcttggcgcgctgcaccagcgccgccttgcgcagcaccttcatggcgtacagcttccccgcgtcgtgcccgcccgccttccgcaccaggaacaccttgccgtaggctgtgggagcagcgagtgggtggagggtgggctgtgagcgggagattggtgcaggcttggggggtgggggcgatgccaacccaggagggtgtgcaaatgaggcgaaggagctggggcaacaggcaggtgtgcaaaaagctggcagagcccttctaaggaaagggtgtgcacaccccgggagggtgcccagcaaaaccagggaaaggatgtgcaaaccaggctggggagcatgcatctccagggggcctgctgcgaggcatgggggcggggcatatgcaaacctgcgagagatcagatggatgtgaaaagatgccagtgcaaggaagggaggcagaggtgtgcacctggctggggaagggatgcgcaaaccagcgctggggcatttgcaaaatgtgggagggggatcccatattggaagaaagggaggagc

SEQ ID NO: 747125 - DNA, 621 bp, Homo sapiens
atcactccctttacccccttaagcccttgtcaaccatgaatttacttcctgtctctttgaatttgacttttctgggcatttcatataaatggactcatacaatatgtagccttttgcgtttggtttctttcaattagcatayggttttcaaggattatccatgatacgtagcatgtatcagtactccattccttttttttttttgagatggagtgttgctctgtcacccaggctggagtgtagtggcatgatcttggctcactgcaacctccgcctcctgggttcacgccattctcctgcctccacgccattctcctgcctcagcctcctgagtagctgggactacaggagcctgccaccacacccagctagtttttgtgtttttagtagagacgaggtttcaccatgttggccaggatggtctcgatctcttgacctcgtgatctgcctgccttggcctcccaaagtgctgggtaatattacaggcgtgagtcaccacacccagctttcattcctttttaagttcaaataatattcgattatatagatatactcagctttttttttgaaggatattttctctgggtataaaacgtttggttgattttttttttttttttt

SEQ ID NO: 747126 - DNA, 577 bp, Homo sapiens
gtagggctctttctctgaggtacttatttatttgaattcatcatgtttaaggtctaagttccttattcctgtgaccattttatacttttgcataataataaataataataataataaaccttccttaacatttcctaccacgagggccacggtctttgaagaaaaggagaaatatatattcttacccgtttgatcttactgtaacagccaagtaaaagtgaaaattttaaatctgaattgatcaaaattctggttgacttgcagagtaaagtctaagaaagawtttaccttttaatctaaagccgtagagataatggcctttgtgtcagaagtccgtttgctaaaatacatgggctttcctggaaaaggaaggtaggcatggatgatgaggtacgatgccaagagggctgggagtccattcaaccacatttctgctgagaatcctgtttctgatactctccaactctgcttacttaacactgagaatactgcactaccaaagagggcaaatcgaaggaccgctatatacccagaggttgagaataatgctatgtgatgttaaaagcattttatttca

SEQ ID NO: 747127 - DNA, 624 bp, Homo sapiens
tgtttgagtatgtattggaggggaattggactagagccagagaaactacctagtagacaaaaagtaatctagttacccaggtacagcccgattaaaggctgcaggtccaaggaccacagagagccaatctatagatgacactaaacttgacaaaaatatagtgccagttaagccagactttcacttatggccttaggtaactgatgaaaagtaaaatgatcctgcttcttgcaacatcggctatagatttgagcacaaaataggacaccatgtcttgtttctcctaacgtatgtcttgttgatttttgttggaggtagaggtgaatactataaggggcaacttagacctcgtatttgaccacaagaccagccaactgaagcctcttgaagtttgaagtttctttttaccatctgtttccttctaaactggaataatgcargaggtagtatggtaacatggaagtgaactgtactttaccatctaaatatacctcctgagatacggcatagttcatgaaattgatgtagtgaaaaaagccacttttagtatatccaagtaaagtatctagatgcccagtaaatactagtgactaatgttatctggtaatgaatgaagaagacttt

SEQ ID NO: 747128 - DNA, 509 bp, Homo sapiens
atgcttacaatgaacattctttctatttccaatatttttattcatctcaaattcagtatggcttaagatgggaggtgcgtttctaacttgattagcttgccaatttattttcaaaaacgttacccagttaccatgtattaaagaatcactcttttcctctaaagaccccaaggtttgtcttttctaatctatttatttgtgtttaaattaacccttgctgtataagaaaaccccacaaagctcagtgacccaaacactaagaatttagtcttgtttaggagcctgaaagtcagttagagtgctttctgatcactgctgagctcartcacatacctacagctagcttcaaggtgggtggaaaactcgaggatcctgggtgagttctttcatgtactgggggtctggtggtcctagaatagcctaggatggctttggttggaaccaaagagaagaaagagagcaagcacaaaaggataagtcctaatgtgtaagaatccctcaagtctatg

SEQ ID NO: 747129 - DNA, 644 bp, Homo sapiens
aaatgaaaataaattcagtcaacaaagacacggagaaattacatcattatatataaagttcagtatgtttacttggtagatttcctttataaaatgggatttaaaagaaggtagatccacaaaatagagtgttgtctggaagtagaggatgaaggatagtatggagctggaagggtaaaattttattccaggtttatagaaacagtgagtaacagaaaaagagctattttctacattatgtaagagacacgactgagggtgtttagaaggaaaattttgtaataaattaggaaggttcaagattcaatcatggatgtgactggagaatacttcatgtatagagaagatactcaactaaaatttaaaaaattgagggtcaatatttttaattgttaatcaaatatagatgtattaattgtttatcaaagaccttaaactstggtaggtattcaagagagatccaacttctataggatgtgcttctacacttagtcatttataacctgggaagaaaaatgacattgaagaagctgctgtgataaagagtgatatacactcaaaatttgatgaataaggaaatcattaaattctgaaatcagtacacaatggattagagctatagcattcaccttaaaaacaatgaa

SEQ ID NO: 747130 - DNA, 491 bp, Homo sapiens
ctctgccatcagggttgaagcagtgccctgcatcccaggaaatggtgccttggctgcccagagaaaccacgaccccatttggtaagctgaagtagcacccagtatcatgagaaatggaacctgggctgcccagaacagtaatgccccacaggtctatggtgaagtggattatcaccctctgggaaatcagtgacctggctaagctaagcatctgtgcatcccagggctgagctgatgcagtatgctgcatcccagggaaacaagagcagtggctgagctgagacaycccaccctacacaatgactctagtaccctgcttgcctgaagctagactaacccccacgagtccgagttgcagagacacccctttccttgggaagtagagtcatcactgtgcctttaggccacctgccacccttagggcccaaatgacagctgagctccaccattctagggtacttgctgctgctgcacccagcctcacagagtct

SEQ ID NO: 747131 - DNA, 621 bp, Homo sapiens
caacaaactaaatacacttccttatagctgatcctcttactgagttaacattttcaataacaaatcagttactttgaagaatttgtatcaatcaagaatttaaacacaatccagaggctttacctgtttgtggaggaagggcagagtttgcatggcaatggaccgtggtctggtgcagctggcatacatccctcacatgcctatcagggaagacttgagaaacttcttatcagtgacttagtactacgtagttttttctgagtatctcacragttaggtttggaagcaattgcgttggtgccagtaaatcttatcgtgggctttatttggagaataatttagtgctgctgtcattgaataataaaattgctaaggctgtggaaataaacgttaggaggaaggagagagtaatttttctattgtttacacctgaaagctagttaatactcatggtttttgtttgtttgtttttgtttttgctgcatttctttggtacatttatacttgtttcattttgctgatatgggaacatgtgatttatatttttaattcatgagtaccctaaaagttgatatttgagatattggaaagacaaagttaattttgttatttctttagttg

SEQ ID NO: 747132 - DNA, 595 bp, Homo sapiens
catgatcttctttaacttttcaaactacatgacaggtattatcctgttttgctcatcagggaaactgaggttcaaaaaggataagggacttatccaagatcacaaaccaaaatgtggtggagccaggaattcaaatgagttccaactctttccattgtctttattacatgttttatagcctgggtccatatattttcaagtaaaaacactaattaggggtacctctgagttcaaaaaacattgcaaccataacacacaaccagatggtcataattaggtaagctgactctgctccttaattcagtctctctttatatacacatcccaccttgactctaggcaattttatcagattaatacctgatcaagaataaagttcctctttgtccgggaagcaatytggaccagcttactaaggcactgggaggcttgctgaactaaaaggtctcggcttttggggtccatctctggctcctcgagacccttcatctgattagtttgagaggaagtgaaaaaaaaaaacaaaacacaagttatattgcaagttaaagcccaagagttattggtaaatgtcacctcttcaaatactgaatct

SEQ ID NO: 747133 - DNA, 637 bp, Homo sapiens
catcacttattcccctgaaggtagtcccctggctacaagcacccttgaatttgagacagatggcataaatactacatcaccttggtacttagggcagggtctgcaaattcagttaatagacagtcttggatatagggcctgcagggattgcattttccagaacaggaaatagaaaactgatatgggccacaagggagtgataccatgagagcagcatcttcayacattatttttccaattatccacagatatttgctattcaagtggggcatgggaattactaaggtaattactagctgtcccaacaactgctatgtggacccttcattccaaaaaaagggaagaagatatgaaagagagaaaatatgcaaaataaacaatattctaaccaatgccttttggatgaattagagcagaaaagaacagaaatgtggaaaacaggagatgcttgcagtgactcacaaatgagcagatgagggcctgaaccaagaaggcagttgtttaactgctttgataatggcaagtatgagacattgtagaagaaaaaattaggataagtttttgatgagttagacatgggacgtgcaagagaaaaaggaacagaaagaatgatgaggttattagcttgagaagcagg

SEQ ID NO: 747134 - DNA, 617 bp, Homo sapiens
atataaggtcaactgtggaactgaggcatataatcacttgcatagtagaataagcatacgcagcacacctgagcaatagcgttactggtatttctgtgctatgagagcctggatgtggctgccttaacactacagacccttgactggagcttcattcatcaatgtccttggatgtccacctatgaagtgcacaaaaagagcaaaagcaaatttgactaaaatgggaaggggaaatggtgtaggagtaaacagwaaaaaggaaaagaaagccaagataaatgtaagaaagtaaaaggagatgttgagtaaaggatatttgtccatgggatgcaactataaataaaccagggagaaaaaagatttttatgtacttaagaatggaaatcaatgaactggactgagtattgtatcaaaactgtaaggcatatgattgtgatggaagacacctcacttccttttcctgagagaaagccacaggtaatcaccctttgtaaaataaatcattttgtatatatgaaaagagaatttgctgtttgaaggaatcccatgatggttcctcatataaagtaagagttcacttcataaagcaaacaatcactcccatttgtgaaatggat

SEQ ID NO: 747135 - DNA, 517 bp, Homo sapiens
gagacacagaggacgtaattagaaaatactatatacttctaataggagttcctgaaggagaagacagacggctaggcaatgtttaaagaaataatagatcaaatgtttccatacttataaaaaagatctaagtccttacattgaaggaacaagctgaaaaaaacacacacacgaatgayggtaaaactacagaatatcagagataaagtcttaaaagcaaccagagacaagacatatgactacaaaataataactattagactgacagcagatttctaatcagcagcaacagcatcttaaagacttgattaggccaggtgcggtggctcacccctgtaatcccagcactttgggaggccgaggcgggcggatcacgaggtcaggagatcgagaccatcctggttaacacagtgaaacgctgtctctactaaaaatacaaaaaattagccaggcatggtggcaggcgcccacagtcccagctactcaggaggctgaggcaggagaatggcgtgaaccc

SEQ ID NO: 747136 - DNA, 550 bp, Homo sapiens
tggccaagttttgtttctttcataccaattcctgtaccttttcctacctgttactgtgctggctagacttgtacagcgttgtatagaagtggggattaatgagtgttatttctaattttaaagagcgtgcttcttatatttcacagatatctacagtacattctgtgttctctagattacctttatgaagcaaggaggttctctttaagattttttttaaaaaaatttatcgggaatgctgaatttaatctgatgttttaccagtaatgattgagatgaacatttgggatttctcttttgtttccttaatcttgtgaatgatatttataccttcataatttttatttttttatttttatcattattrttattattattattttggtgacagagtctcactccgttgccaaggctggagtgcagtggtgcaatctcagctcactgcaacctccacctcttgggtttgagagattctcctgtctcagcctcccaggtagctgggattacaggcgcctgccaccatgcccagctaatttttgtatttttagta

SEQ ID NO: 747137 - DNA, 586 bp, Homo sapiens
tggagttaatctcaaactcagccactgctttaccaagtttatgtaatattctaaatcctttgttgtcatttcaccaatgttcacacagtatcttcaccagaagtaggtaacatctttaaaaaccactttctttgcttattcataagaagcatctccttatccattaatgttttatcatgagattgcagcaatttagtcacttttcaggctccatttcgaattctggttctcttgctgtttttaccatatctgcggttacttctactggtcttgaactcataaaagtcatccatgatggttggaaccaatctattccaggctccygttaatgttgatatttgatctcccatgaatcacgaatgttcttaatggcatccagtatgatgaagcctttctagaaggtttttagttactttgcccagatccatcagaggaattactatttatggcagttatagccttatataatatatttcttaaataataagatttgatagttaaaattactcattgatccatgggctgcagagtggatgttatgctagcaggcaggaaaacacattaatctccttgtacatctccatca

SEQ ID NO: 747138 - DNA, 550 bp, Homo sapiens
tgtgcactccacgtatcagcccaatgcctgaggcaacagagagcttcttcctgtaaacaagtatcaagtgtatacctagtcacactggctacagctggctaagtgatcttacccgtaagcgccatctactggcttgtaggttgaaccctacagcccratataaaatctgcccaaagaagtacataggctatagaagcaaagccaaaagatgctacccagcattctctacaatcatatcccctagggagttggggaatggaaagggaaagaaaaaaaaaatattacagggacaggaacaaaaaaagaaaaaaatcctacctgcatgaaaataattacaaaaatcaaaagtgccagtgtctccagatgagaaggaaccagtgcaagaattctggccaaacgaaaaatctgatcgtagtgacaccactcaataatcacactagctctccagcaatggcccctaaccaaaatggaaactcagatatgacagataaagaattcaaagcatgaattacaaggaagctcactgggatccaaaaaaaggttgaaaatc

SEQ ID NO: 747139 - DNA, 624 bp, Homo sapiens
atacccatagatagacataatattacatatttggtgattagaatgtaaatttaattttacagttccctttgtacttcattatatcatacgccatttttaatgttcctgcacagacttcaaaatcatagtttttggtgtctccaaattcaatttccataattcattaactaattcatttcaaagcatttattgcacatccartacacaccaggtcctgataatagagatttaaagaaggatatggctactctcgggtttctcacagtcatggaatcaaatgcctgataatatagtgtgtttaagttatctttatagaaatatgaacagagagttttgggagcttggaggatgaataggggaatctaattctatggagaaattagaaaagtcttgttgaaggaagtgacatttgatgtaactcttgaaggacaggaaattttccagatgaagaaatagtaatatttacgaaggtttaaagttgtgcaagagcctagagtgtttcaggaacaatttaatgacttagaaatttgagattaaataaggacaacactggatgaagattaaaagataaaccgggctagattgtgaaatgtgctaaatttcaaaataaggaattttgttttc

SEQ ID NO: 747140 - DNA, 624 bp, Homo sapiens
atacccatagatagacataatattacatatttggtgattagaatgtaaatttaattttacagttccctttgtacttcattatatcatacgccatttttaatgttcctgcacagacttcaaaatcatagtttttggtgtctccaaattcaatttccataattcattaactaattcatttcaaagcatttattgcacatccaatacacaccaggtcctgataatagagatttaaagaaggatatggctactctcgggtttctcacagtcatggaawcaaatgcctgataatatagtgtgtttaagttatctttatagaaatatgaacagagagttttgggagcttggaggatgaataggggaatctaattctatggagaaattagaaaagtcttgttgaaggaagtgacatttgatgtaactcttgaaggacaggaaattttccagatgaagaaatagtaatatttacgaaggtttaaagttgtgcaagagcctagagtgtttcaggaacaatttaatgacttagaaatttgagattaaataaggacaacactggatgaagattaaaagataaaccgggctagattgtgaaatgtgctaaatttcaaaataaggaattttgttttc

SEQ ID NO: 747141 - DNA, 624 bp, Homo sapiens
atacccatagatagacataatattacatatttggtgattagaatgtaaatttaattttacagttccctttgtacttcattatatcatacgccatttttaatgttcctgcacagacttcaaaatcatagtttttggtgtctccaaattcaatttccataattcattaactaattcatttcaaagcatttattgcacatccaatacacaccaggtcctgataatagagatttaaagaaggatatggctactctcgggtttctcacagtcatggaatcaaatgcctgataatatagtgtgtttaagttatctttatagaaatatgaacagagagttttgggagcttggaggatgaataggggaatctaattctmtggagaaattagaaaagtcttgttgaaggaagtgacatttgatgtaactcttgaaggacaggaaattttccagatgaagaaatagtaatatttacgaaggtttaaagttgtgcaagagcctagagtgtttcaggaacaatttaatgacttagaaatttgagattaaataaggacaacactggatgaagattaaaagataaaccgggctagattgtgaaatgtgctaaatttcaaaataaggaattttgttttc

SEQ ID NO: 747142 - DNA, 620 bp, Homo sapiens
tctgcttttggatcttcttcattttctcttgttgccaccacgtaagaagtgactttcacctcccaccatgattctgaggcctccccggccatgtggaactgtaagtccaattaaacctctttttcttcccagtctcaggtatgtctttatcagcagcatgaaaatggactaatacagtaaattggtacgaacagattgaggcattgctgaaaaaataccaaaaaatgtggaagtgactttggaactgggtaacaggcagagtttggaacagtttggagggctcagaataagacaggaaaatgtgagaaagtttggaacttcatagagacttggtgaatggctttgaccaaaagcctgatagcgatatggaaaatraggtcaaggcagaggtggtctcatatggaaatgaagaacttgttgggaactggaacaaaggtgactcttgttatgttttagcaaagagactagaggcattttgccactgccctagagatttgtggaactttgaacttgaagatgatttaattcagaaaatttgcagcctgacaatgtgatagaaaaagaaaaatccattttctaaggagaaattcaacctggctgcaaaaatttgcctaagtaac

SEQ ID NO: 747143 - DNA, 665 bp, Homo sapiens
caattgtttaaaatctctgttgaaatgtatacagagaggaatcttcttttgttttctttttttttgtgggtctgcaaaactgagagagaagaaaggtgtcaaaatcaactatctgaacctctattatttttttaaaagtgaaaacagggagcaatgcctgtgacaaaagtaaccccaaggatctggacttccacaaaaacattgacaagaaagacagaatcaactttgtcagaattcaggaaaagagtcaaatatttgcagcaacaagcaaacattgaatcaagaaaagagcaacttaaaaataatttgtrcttgcccttttcccaccccattttcagcatggtggcaatattgaagatgtcagtctgcatccccagtgttgcatactggtccctggttccagatagagacactgaggacggtaaagatcacctgggtaccatcgagcagaccatccaaaggcaaaactccttatctgagaaatttagaaatataatgaaaagaacaaagaccacctgctgggcatcaagcagaccatccagaagtaaaactccctacctgaggaattagaagtaattagacttccctattatctaaagctggcatctggtaccaggcttttttttaaaatatatatatattttaagttctaggacacatgtgca

SEQ ID NO: 747144 - DNA, 583 bp, Homo sapiens
gtgagactccgtctcaaaaaaaaaaaaaaaaaaagagtatgagtgagtagtaacagacaccagcactagttgcacttcaatagtagaaaatgtttttgcacaaggctcaattaaatctgagactgagatgaataaaaaacctgtgtgctaatttgtttttctgatcaagctttgkttaagattgggttctggaagttactgtgggggaaaagaaagaaaagaattacctcagtgtaattacaaagaatgagcaaattctttaggagctatgatataccaggatttagtaaccacaaaacaatgaactgaccaagaaaatgaaactatttttatggaattcacataccagaaacagcactgtccaacccagcgtatatgtccagtgagccttcatcattgttcttaagaggagaagctgcaagaaaggcaaagattagttaaaaatgactttaggcactgagatttttccattcctacactaaaggaccaggaaaagaatgagatttaacagttttgctttaaataagagataagccaggcatggtggctcacgcctgtaaactcagcacttagggaggctgag

SEQ ID NO: 747145 - DNA, 549 bp, Homo sapiens
ggttgggtttgaggtgtaatcaaggtgctggactgtcctccaggctctgaataaaggagaggtaagctccttacagacattagctcattagccaagcaagtggacacagagctgttcccatttcatggcaagtgtaaaaatccggaggaaggcaggaagagacagttctgacttcctgtgcaatccacccattyggccttaaacaagtaaagaccaaatgaaaatgatgtgagagttattttttagctggacatgtaaccagattctaatcaccttctgaattgatatttaattacactgtagtgtgtagccgatctccagagagatagaatgtttggcacagttactcttgagtatctttttgtcaacatcactgctttcactgcttctttcagtcaatatattttgtttccagcttccttcctaggcctttaattcctgctgggacaggaatctctcaattcactcttaagccttgtcgaaacctttcttcctcccatctcccactccatccagaaatagaattgtcctcagcaacagaggttggca

SEQ ID NO: 747146 - DNA, 631 bp, Homo sapiens
tgtcctgactgggataaaaggtgtgtgcacacatgcgggaacacacacacacacacacactgttattcttgctgtggatggcccatgctgtgtctacagcacaaggtcaaggtctggtccgctgtcagataatttgctgtccaagtttgcactcatgcatatgcaagccttttcacctcttctgagattttctttctttaggataaggctttggggccagggtaacaagaacagaaaaggaagagacaggaaatgtgaatgaaaagggctttggggttttggttkgtttgtttttggagacagagtctcattctgttgcccaggctggggcgcagtggcactatctcagctcactgcaacctccgcctcctggttcaagcgattctcctgtctcagcctcctgagtagctgggatcacaggcacctgccaccacacccagctgatttttgtatttttagtagagatggggtttcaccatgttggccaggctggtcttgaactcttgacatctacccacctcagcctcccaaagtgctggaattacaggcatgagccattgagcccagctgagagctttggttttaatgctattccctaaagttttattctacaagagcaaattattgtcct

SEQ ID NO: 747147 - DNA, 555 bp, Homo sapiens
aattcaactggaagggaactattaaagcaattctgaaacaggccccagacaatgaaataaccatcaaaaagctaaggaaaaaggtatggcatatgaacaaacccacgtgtctaacagctggggagaacttatttctaaatgtacaattgtttgtttttttcttttttcacctaaaacactgaaaatctgtgtgtgtgtctcagtgattttcaagctgctccaaagccccacacagcctcagccagggtggtgcctarattttgggcttgtttataagactttgaagagaggctccatttatttaatttttattgtttggaaattattttctagatatttgctctcttttgcctatcccagagcagtggtttcttctcctttatttcactttgtttctcaggatgactcacacatggccaaacccctgcacgtggctgccgcctgggttttccaaggagagcacgccggtgtcgcttgctcctgggtttcttttattttttcctgttgttctatttctgggttaaagacagaacattttaagataattttccaggt

SEQ ID NO: 747148 - DNA, 602 bp, Homo sapiens
tgtgtaccccttctgtgttattattcataatatcctagggggatgtttctcttaatgtcacaaagagtgtacaaaatgtcacaggaggtgtacacgttgtgacgttatctgtaataccctagaaggatgttactcgtaatatgtcacaggggtgtacatgctttgatgttatttataatctcatagagcgatatgacttcaaatatcacagtggatgttcacacatagtgtataccctgtgacagtattcataatatagtagggagacacaactcctgatatcacagtgcgtgtaccccgtgtgtgtacacccttgatatkagtcgcgatatccagggtaaatatgactcctcatatcacacagtgtgcacaccctgtgatatttttcatcctactttagggagatattgcttctaatatcacagtgggtgtaccccacgtgtgtgtactctgtgacagtatattctatatcctagggaggtattactcgtaatgtcacagtgggtgttcaccctgtgatatcattcttgtttgaccttgctgccttttttaacccacactacaaaaggaatggaacagataagaaggtcttgagattagac

SEQ ID NO: 747149 - DNA, 602 bp, Homo sapiens
tgtgtaccccttctgtgttattattcataatatcctagggggatgtttctcttaatgtcacaaagagtgtacaaaatgtcacaggaggtgtacacgttgtgacgttatctgtaataccctagaaggatgttactcgtaatatgtcacaggggtgtacatgctttgatgttatttataatctcatagagcgatatgacttcaaatatcacagtggatgttcacacatagtgtataccctgtgacagtattcataatatagtagggagacacaactcctgatatcacagtgcgtgtaccccgtgtgtgtacacccttgatatgagtcgcratatccagggtaaatatgactcctcatatcacacagtgtgcacaccctgtgatatttttcatcctactttagggagatattgcttctaatatcacagtgggtgtaccccacgtgtgtgtactctgtgacagtatattctatatcctagggaggtattactcgtaatgtcacagtgggtgttcaccctgtgatatcattcttgtttgaccttgctgccttttttaacccacactacaaaaggaatggaacagataagaaggtcttgagattagac

SEQ ID NO: 747150 - DNA, 472 bp, Homo sapiens
ccttaccctcggaggccgctctctgccccgccgcctactcttcacctgcagcagctgccttcaaggccactcgcagcgatccgctggccgcggaatcatcacgacaacgcccccttggcttgccggaaccgccttcctgcttccgttggcgtcacttccactggggggggcgtggccgcggtgcgcaggcgcgctgggtggttcagaagcgaattctgcmccgcgaagcctgagaggcaggtagctgcggcgctgggctggcggcggcgagtccacgtgctccccgcggccggttgaaaccgttggcgggcgctggctgagaggtgaggggtggtggcccagaggtccgacctgggaggctggggctcagagagtgagtaggggagggacgggatttccaccgtcagcccctctgggttacgcatggaggaaggagttccattcagatctcactcctgctctggggaagtgg

SEQ ID NO: 747151 - DNA, 472 bp, Homo sapiens
ccttaccctcggaggccgctctctgccccgccgcctactcttcacctgcagcagctgccttcaaggccactcgcagcgatccgctggccgcggaatcatcacgacaacgcccccttggcttgccggaaccgccttcctgcttccgttggcgtcacttccactggggggggcgtggccgcggtgcgcaggcgcgctgggtggttcagaagcgaattctgcaccgcgaagcctgagaggcaggtagctgcggcgcwgggctggcggcggcgagtccacgtgctccccgcggccggttgaaaccgttggcgggcgctggctgagaggtgaggggtggtggcccagaggtccgacctgggaggctggggctcagagagtgagtaggggagggacgggatttccaccgtcagcccctctgggttacgcatggaggaaggagttccattcagatctcactcctgctctggggaagtgg

SEQ ID NO: 747152 - DNA, 472 bp, Homo sapiens
ccttaccctcggaggccgctctctgccccgccgcctactcttcacctgcagcagctgccttcaaggccactcgcagcgatccgctggccgcggaatcatcacgacaacgcccccttggcttgccggaaccgccttcctgcttccgttggcgtcacttccactggggggggcgtggccgcggtgcgcaggcgcgctgggtggttcagaagcgaattctgcaccgcgaagcctgagaggcaggtagctgcggcgctgggctgrcggcggcgagtccacgtgctccccgcggccggttgaaaccgttggcgggcgctggctgagaggtgaggggtggtggcccagaggtccgacctgggaggctggggctcagagagtgagtaggggagggacgggatttccaccgtcagcccctctgggttacgcatggaggaaggagttccattcagatctcactcctgctctggggaagtgg

SEQ ID NO: 747153 - DNA, 501 bp, Homo sapiens
cttttaaggcataagatcattcttctgcaagatttaaatattcccctccccatcctatcttttgctgactacatactaaagttgtatatctggctctttccagtcacctgtttgctttcaaaatcaagggggaaagtctcctttcaattaataatacaatcattgttcagtcgatttataaactgaagaaaaactctatattgattacaaaagaaagaaacacttcttcagtataactgagatgctttatgttatccttatttgatagaggtagaagtaaaagtaactattaytcctaatgctgattcaagaaatgtctagagtctacatttccagtccatttaactacattttaaattccaaaggtttccagacacaccagaaaataatggaacaccaatacagaaacactacacgagtctgttaaaaacctagcttctgagtctgggggagcttttctataggaagtacagtcatgtggaggtcagaaacaagttttgt

SEQ ID NO: 747154 - DNA, 501 bp, Homo sapiens
cttttaaggcataagatcattcttctgcaagatttaaatattcccctccccatcctatcttttgctgactacatactaaagttgtatatctggctctttccagtcacctgtttgctttcaaaatcaagggggaaagtctcctttcaattaataatacaatcattgttcagtcgatttataaactgaagaaaaactctatattgattacaaaagaaagaaacacttcttcagtataactgagatgctttatgttatccttatttgatagaggtagaagtaaaagtaactattattcctaaygctgattcaagaaatgtctagagtctacatttccagtccatttaactacattttaaattccaaaggtttccagacacaccagaaaataatggaacaccaatacagaaacactacacgagtctgttaaaaacctagcttctgagtctgggggagcttttctataggaagtacagtcatgtggaggtcagaaacaagttttgt

SEQ ID NO: 747155 - DNA, 501 bp, Homo sapiens
cttttaaggcataagatcattcttctgcaagatttaaatattcccctccccatcctatcttttgctgactacatactaaagttgtatatctggctctttccagtcacctgtttgctttcaaaatcaagggggaaagtctcctttcaattaataatacaatcattgttcagtcgatttataaactgaagaaaaactctatattgattacaaaagaaagaaacacttcttcagtataactgagatgctttatgttatccttatttgatagaggtagaagtaaaagtaactattattcctaatgctgattcaagaaatgtctagagtctacatttccagtccayttaactacattttaaattccaaaggtttccagacacaccagaaaataatggaacaccaatacagaaacactacacgagtctgttaaaaacctagcttctgagtctgggggagcttttctataggaagtacagtcatgtggaggtcagaaacaagttttgt

SEQ ID NO: 747156 - DNA, 600 bp, Homo sapiens
gaatgtctaaatctttgttagatatcaagctattaagtaaaacatcttctatcctcccattaataaatatgtcttcatttttatctagaaggcttgctgcccatcccacttttctttccatctgcaggaacctccagcacggtgaaggaatttccatgcatgcactctagcccacttactcaaactctgcctgctgtgtagaccctacacaactatgaacagctccccttttaatggccctctaaaatagtgttgggtctgcagggatgatctgacttctagaggactgactggcaaagaacctggcacaggccctggatcaactgtcaggcttattttgggcrgagagtatctggagtatgtctccaatggggagagtggttgcaccctggattggacactcttcagcagctagaatgagcccctcaaatatgctaggcccctgtcagaaactctcagctctccttgctagtgtcaaagggtggtgctgtaagttataatgctttaaaaccaaattggctcctaagaaatatgtcattagattatcaagttgttgataaaatactggtggtaacatttattaagctcggaacataaact

SEQ ID NO: 747157 - DNA, 598 bp, Homo sapiens
tgcaaataagcacatgaaaggatcctctttggttataagaaatgtaaactaaaacatagtgaaataccactgcacacccactaaaaaagcgaaaattaaaagactgaccatatgaagtgttggcaaggatgtgaaacaactataaccagttccacactagcggtaggaatgtataagcactttagaaaactggccgggcatggtggttcatgcttgtaatcccagcactttgggaggccaaggtgggcggatcacctgaggtcaggagttcgagaccagcctggccaacatggtgaaaccccgtctctactaaaaacacaaaaattagctgggtgtggtggcacacgcctgtaaccccagctacttgggaggctgaggcagaagaatcacttgaacctggaaggcagaggttgcagtgagctgagatcrtgccaccactgcacttcagcctaggcaacagagtgagactccatctcaaaaaaaaaaaaaaaagtttggacaggcatgatggctcatacctgtaatcccaatactttgggaggctgaggggggcagatcacttgaggtcaggagttcaagaccagcctggccaacatgg

SEQ ID NO: 747158 - DNA, 612 bp, Homo sapiens
ccaaatccatgggcttcccaaacccctgatcacttgggagaagaacagagtcccaattgacacggacaatgagaggtgagccacgtgtgggaaagacagagggaggacaaagaggtggccagtgactctggccgtagagaaggatggcccgcggctctgggagctgcagttggtgcccacaggtgcctgagatagtggtgtttctgcaaccacagtttagactgggtatccacatgactggctgggcccagattrtaggctcatggatgtgtctgaggatgtgtgcgatcgttgtcaaggctggaattgagggtgtgtccacctttgaaagtcccagtgtgtgtctgctgatgttgggatggtgcagtgcttaggtcctgggctgtatcttggatgcccagagtctttgtggctgattatgtcaatggctgtgctggtggccaactatgtccctcccctcaacaggtacacattgctgcccaagggggtcctgcagatcacaggacttcgagctgaggacggtggcatcttccactgtgtggcctcaaacatcgccagtatccggatcagccacggggccaggctcactgtgtcaggtgagggtccttcagc

SEQ ID NO: 747159 - DNA, 643 bp, Homo sapiens
aatatggggctgcactgttctaggccctttgtgtgctaatttatttaattcccacaattccattaataggaattactagccctgttttacagatgagtaaacgaaatcccagaatgattaattaaattggccgagggtacacagtaagtggggaagctgggatttcaacccagttctgcctgacccaaaaaattcactggcctgaatgyctctagcaggggctcacacccctggagaacctatcagtatttatgcctcagaaataaaagcagatacctggaggcatgtaatgtgagagtaggggagtgtagagaacagaggacagcttagaaccctggccaaggtgggagccacttctgggtgggccaggcaggattacatactccatgacccagctgctgctgggacatcccagttacaggaggctctgtgtagacaagtcttgctctacctgtgaggcgggcaagagctggctgggaatgggttcctgagtgaagaggaagctgggaggtggctggggctgctggaggtagaggtgggagttgcttcttcctgaggaggaaagacaaattcccccctcctctttgctccctttccctttcttgtttccgcataatgatgctgattgctccacatctgtcat

SEQ ID NO: 747160 - DNA, 623 bp, Homo sapiens
ttaattgtggtaatttgttgtagtcttaattgtggcaattcatcatagtcttaatttgcatttaattgtattttcctgatgactaataattgccctagaaagttccttcttacccgtgccagtcaatccctttctgcatccccattcccccagagctagccattgttttgattagtttccactgcaaatgagttttaacctgttytacaccattatataaaaggaatcacacagtgtacactttttagtgtggacttctttctctcagcatgtttttgagatttatccatttatggtgtatattatagtttgttgctttcagaagaaatttttaccacaaagattttcaaatttttctcaacttatttctttttatttaatttgtatatgaaaaattttagcctgttttttacatttctcatctaattgcaggttattttcaacttacaattataggtttgccaagttttggatctctaatgttttgcttatttctggtttttgtcaagcccatgcacttgacttctgctagtcccttgaaggctgtaccagagtcaagggccatcttcttccttttaaagctcacatacattgccatctttttattagctgacctaagtgta

SEQ ID NO: 747161 - DNA, 621 bp, Homo sapiens
ggcaaggtttggtatctctctgcagatagcttgtcttagtacctcagcaagtgcttctggcatggcacctcagcttcactatctagtgaaccaacactattccatctccaacaagatctggatttttgtcttggtgaggttgcagagatcttacttggatgcttttatctcagtcccaacgttgtgactgctccttatatctgctattcttgtattctttagaattatctttcttactgcattgctccaatatctctctaatagtgaataactttctatattttaaaatttaatttaacttaattatattttattttttgagttgggaccttgctatgttgcccaggctggtcttgaactcctgggtccaagcaatcctccctccttggcctttcaaagtgctggtattacaggtgtgagccactgygcctggcctaaatttctatattaaattttccctgtttaaattactgtgtgcattctttctcctcattggaccctgcctgatatatctgacaaagttggactcacagcaggactctccaactgggagctggggccagatgggagagccagtcattgctccagttgccttctgaggcaaaaaggaaggagaaatac

SEQ ID NO: 747162 - DNA, 585 bp, Homo sapiens
agatttaggacacgtacacacatgagaagtttaggagcggaggtttaaaaggcagaagagaagagaaagagaaacagcttcctctacacagagagggatctccgagcaaaaaggaacagctggtggtgaatgcaccaagttttataattcagtttgaagaggcggtatctgatttacatagggctcacagactggttggatcagttatgacgtttacgtggtgcgccaggaaggctggtctccccaccctaatcttctcatgcaaatggacttcccagttgacctgcgccatcttgtctgctccttacaatacacgtggctggcagagaagggaagatggagcctctgttttgaaaatgcctagtccttagttcctgstagcatgcacccgtgcaagctcccagtttgcaggctgctctttgttagaaaatgatttggggctgcttttcattaaaaagaaaagccttaggaggactcccatgcccttactatctgcctaagtaatcccttcttaactcctatgtcagtttcagcccctaagatatctgatggaatggaagtgccaggagtggaagatgaaccagc

SEQ ID NO: 747163 - DNA, 594 bp, Homo sapiens
agttgaggctgcagtgagccatgatcacacaactgcactctatcctgggcaatggagtaagactctgtaaataaataaataagtgatggacctctgaaaaggtccttgaggtttttttgcaggttctgggcatggtagatcctaagggggagtgagatggagaatggacaagtcaatagaactcagaacgccagactttctgaagttcttcctcagtcttcttctctgagacttctactccttggtcctagctttgttcctaggcgctgtgccgctgtgtcayccaccctgccctgtacaatatgcaggaagcaagcgaggagggggtgcctcagagagacagtaaggaggaatgaggacaaggtggaattggcatgggcacgtcctacagagtgagaggcaggccttagggcaccacgtcgctctcacgtaggaatgtgtgtccagcagcgcctagccttcagcttttcacaagaactcaggaaattgaattttctatgcgaaatcttccaacttggacatgttggctcaaaaatgttaataatcttgtgtaggccaaacagcatgtctataggctgggtctggcccagacat

SEQ ID NO: 747164 - DNA, 540 bp, Homo sapiens
ggccaaatcttgtcagaaaagaacttcctgctgtccttgaagtatttggaagcaggtgctagatggtgagcaggagaggttgccaagttggggaagtggtggttgtcctggagcaggggtttccacatctctcacagtggctgggaagtagcaattcgcagtcactgcctttctagtagcccacgtgtgtgagtgtgtgtgttagatacatttatccctcagtatccgcaggggattgctgtatactttttttttttgagacaaggtctcattctgtgacccaggctggagtgcagtggcaggaacatggctcactgcagcctcgacctcctgggctcaagggatcctcctgcctcagcctcctgtgtagctggaaccacaggcataaacaaccayacccggctaatttttattttatttcatttttgtagagacagggtctcaccatgttgcccaggctggtctcaaactcctggctcaagctatcctccttccttggcctctcaaaatgctgggattacaggtgtgagccaccacatc

SEQ ID NO: 747165 - DNA, 538 bp, Homo sapiens
tctgggggtgattttcctttgtgggtcaaatgcctctagaggaagtgcatacatccgccattttgcttcttcctgtgcatgcttgagcctgctcgcccaactcctgagatcttatcaggaggctacggaacaccagctttgggtgttttctatctgttgggagactgtcttcctatwcattttcagaaaggcagtttaacaactgctccaaccatcatctgatagtcacctggcattcctggggggccctttcttgctcttctcatgtctgcctaactacctactctaacaatataacatagaaaagatgtgttaatcaactgtttatattattcatttatttattttgagacagagtctcactctgctgtccaggctggagtgcagtggcctgatctcagctcactgctacctccacctccctagttcaagcgattcctgtgcttcagcctcccaagtagctgggattacaggtgtgtaccaccatgcctggctaattttttgtatttttagtagagatggggtttcaccatgttga

SEQ ID NO: 747166 - DNA, 612 bp, Homo sapiens
aagaaaatttttgcaaatcacatatgggataaggaattaatatccatattatttaaagaattcttacaattcaaaaaaaccccttaacagcctgatgctaaaatgagaaaaggagaattgtctcctgagaaaatatacacatggtcaataaacacaggacaagatattcaatatcagtaatcaacagggaaatgcaaatcaaaaccacaatgggataacatgtcacacccattagaatggctattatcaaaaaacagaaaataagtttgtggagagtatcttagtccattttctgttgctataaatgaatacatgaaattaggtaatttactttttaaaaatatatatatgtatgtatatatatatatttcttacagttctggaactgrgaagttcaaggtcaagcagttgcatcttatgaggaccttcttgctggtgggactctggagagtttcaaggtgccacagggcatcacatgatgaggggacagagtgtactagctcaggtctttctccctcttcctttaaggccaccagtcccacttcttgataacccattaatccattaatccgttagtccacgggtgaattaattcattcctgagggcagagc

SEQ ID NO: 747167 - DNA, 589 bp, Homo sapiens
gggttgtctatttgctctgctgtagtttcttccgctttcagaagctctttagtttaattaggtccctcttgtctatatttgttttattgcgattgcatatggagatgtcaacatgaaatctttaccaagacctgtgtccaaaatgatatttcctatgtttccttctagggtttttatagttttaggtctcacatttaagtctttaagttgatttttatatatggtgcaaggaaggggtccagtttcaatcttctgcatatggctggccagttatcctagcaccatttattgaacagggagtcctttccccattgcttgttactgtcaactttgtcaaagatcagatggttayagttatgcagttttatttctgggtactctggcctgttccattgatctacgtgtctgtttttgtaccagtaccattctgttttgtttactgtagtgtattatcgtttgaagtgaggtagtgtgatgtctctgacttccttctttttgcttaggattgctttggctatttgggcttttatttttggtttcatcttcattttcaaatagtttattttttctaattctgtggaaaaaaatg

SEQ ID NO: 747168 - DNA, 573 bp, Homo sapiens
gccagttatcctagcaccatttattgaacagggagtcctttccccattgcttgttactgtcaactttgtcaaagatcagatggttatagttatgcagttttatttctgggtactctggcctgttccattgatctacgtgtctgtttttgtaccagtaccattctgttttgtttactgtagtgtattatcgtttgaagtgaggtagtgtgatgtctctgacttccttctttttgcttaggattgctttggctatttgggcttttatttttggtttcatcttcattttcaaatagtttattttttctaattctgtggaaaaaaatgatgctgatagtttgacagaaatagcattgaatctgtaaattgctttgggtagtatggccattttaacaatactgattcttccaatcmatgagcacggaatgcttttccatttgtttgtgtcatctctgatttgttttagcagtgttttgtaattctcattgtagggatctttcacctccctggctagctgtattcctaagtatttcattctttttatggctattatgaatgggattgcattcttgattt

SEQ ID NO: 747169 - DNA, 573 bp, Homo sapiens
gccagttatcctagcaccatttattgaacagggagtcctttccccattgcttgttactgtcaactttgtcaaagatcagatggttatagttatgcagttttatttctgggtactctggcctgttccattgatctacgtgtctgtttttgtaccagtaccattctgttttgtttactgtagtgtattatcgtttgaagtgaggtagtgtgatgtctctgacttccttctttttgcttaggattgctttggctatttgggcttttatttttggtttcatcttcattttcaaatagtttattttttctaattctgtggaaaaaaatgatgctgatagtttgacagaaatagcattgaatctgtaaattgctttgggtagtatggccattttaacaatactgattcttccaatccatgagmacggaatgcttttccatttgtttgtgtcatctctgatttgttttagcagtgttttgtaattctcattgtagggatctttcacctccctggctagctgtattcctaagtatttcattctttttatggctattatgaatgggattgcattcttgattt

SEQ ID NO: 747170 - DNA, 633 bp, Homo sapiens
cctcctggtcatacataaggtatgaccacctcctatgctgaaccaaatgactcatttctggcaaatagaatactaaaaatgtgatggatatcacttctgggattagggtacagaaaggctctgccttccttccctgttactcacygtcttcttttgcttcttgcattgaggaagacaactgctatgttgtgagcggctctatggagaggcccatgtggagggaagtgaggaaggcctctggccaacagtccaggaggaagtgaagccctcagtccaacagcctgtgtggaactgaaccctgcaaacaactctgtgtgtgagcttggaagtggatccatattcagtcaaaccttgagatgggacaccatgctctgctaacacttgattgtggtcccagctaggccactgctgaagtcttgactcagagaaacgatgatatagtaaatgtttgttgtttcaagttggtaagttttgggataattttttatatagtgataattttttatatactttaaaataacacattgccctatcctttggttacacttttctcttggaactctgcttgcccatatattacagaaatatttttcagatcatgggctgaaaggtggattatggatgcaatgttta

SEQ ID NO: 747171 - DNA, 514 bp, Homo sapiens
cacttgtttctctgtggataaattcaattataaattacaatcgaattgackttttcatagcatccttcactctccaagtatctcaagtcctctgtgaattataaagtaattacagtgctcaaaggacagtttcataattgtgtccatgagcacagactttcctctatgttcgagaagggctcattcccagccgggaacattaagttggattttattgagactggggactgctagtccagacagctgggtgatcccctgcgctattttgaaaagtatcctgggatctttaatttccacctggatggtcagggaggtgagagaacggccctcactgggtgtgaccttgtatcccacttggggtcttgaaccaggggacccccaaccccagaggtgagacatgcaatatggtcaattatacaacctcttaattattttttgctgaatctcaagtgagttctcatggcctgctctctcccgggtgggttcagaaggtggccaagaagaaatgttagaa

SEQ ID NO: 747172 - DNA, 592 bp, Homo sapiens
tttctaaagtacaccacttgatatctttcacagctcaaggtaaattctgcagcacgaacttatagaatttttttcttttacctggggtgagaacataccttttcctagtgctattttttttttctgggctacctttcatctgtttacatgaattccacttcttctcgctgtgttaaagaaatcccctaagctgtctacataggtgtgaaacttttggttgtgatttccttgaagttagttggaactggaacatttttttctgtgtcctgaatggctcacacattccctaacacagaatggatactcagcgaacagttgttgaatcagtgaacggtaatggmtcagttctgtcagacaatggattgaattatttttacacctttaattcactcatggactgaattaacctactcatgggctgtttggggcatcaagtgatatttatacatttctgaagaatgtggaatcaccagggttaacagtgtttgcaggtggcgttcgattgcaggggcccaaggaaccacggctgaattccgcatggacataggccattttccaccagcaaagttatgagaactttttttgttttggt

SEQ ID NO: 747173 - DNA, 648 bp, Homo sapiens
aaactggatcctcgtctctcacctaataataaaaatcaactcaagatggatcaaaggcttaaattaagaccagaaaacataaaaatctagaagataacactggaaaaacgcttctagacattatcttaggcaaatactacatgcccaagaacccaaaagcaaatgcaacaaaaacaaagacaaatatatgggacttaattaaattaaaaagcttctgcacagcaaaagaaataatcagcagacttaacagacaacccacacagtgggagaaaatcttcagaacctatacatctgacaaaggactaatatctagaatctacaaagaactccaacaactcagcaagaataaaacaatcccgtcaaaaagtgggctaaggacacgatagacmaattctcaaaagaagatatacaaatggccaacaagcatatggaaaaatgctcaacatcactaaatatcagggaaatgcaaatcaaaaccaaaatgtgataccaccttgctcctgcaagaatggccatagtcaaaaaatcaaaaaataatagatggcatggatgtggtaaaaaggaaacacttttacactgttggtgggaatgtaaactaggatagccactgtgaaaatcagtgtggagattccttaaagaactaaaagg

SEQ ID NO: 747174 - DNA, 585 bp, Homo sapiens
tgtaaacactcagatgagtttctccctccctctgggagagcacccagcgcagggtcgaccacagagtcggggcttgatgagggcttgcagagcgacagttgtcctttcccagttggtatgagtgcagtagaagcctcgttcttcctggctgggagtctggagctgacatcctcaaatgtggctggaaggggacagcagtagaaactgagggaggcagtcttcagtgggcctgggtttcttcattttatgtttcaattttttctcatttcaaggaaatcttcccttgactctaggaccttctagctgcattcctgtctctctcctccccagacttctccaaagtttgcgccctttcctcrcgggccaaacatgcattcaaccctctctagtctggttttcgcctgcatctgtccccacgagcactctcactgagaccccccacccccacaccgtgactccctgttgttcagtcagcccctccttccttccttcctgggcactctgctgtgttggagacgccacgcagccctgcctctcaggacttcactttccctggttcttgggatgtcatgctctgctcttgtc

SEQ ID NO: 747175 - DNA, 526 bp, Homo sapiens
tgggtcaggccaatcccagagaggcaatacatagagaggcctggagctagatcttagggacccctgctggcttctcgcagtggttcaaacaaggacttaattttcatcacgaggtcttactccggctactggccactgcactctccaccacagcaaatctctctctatgcgaagctaggcctcccacaactttggcttttcccccaaccttggtgtgggatcaattctttcccaaaaccagaggtgaaaaaggaaaggagagasggggaggaaacaggatggagggcagatgggaggaaggaaaggggggacagaagaaaggaaaaacattcattttgcttttaattgattgtaagcttcatgaggacagagaccatagctgacttattcccccggagtctaaggcaaccaaggcagcccgtgcaatgcctgatatactataggtgctcaataaatattatggatgggggaacagatggactgatagctggtggatgcataggtgtacatgtagatggatggacat

SEQ ID NO: 747176 - DNA, 576 bp, Homo sapiens
gaaagttctgctcatagtattagtgctggcttaggaagcttggctttcttgccattgtaatgagtgttgtaactcctggtctctgtgggtcaggccaacaacagcagagtagagttgatgtggattttgagggcgttatggggagatgacatttcaggaaagaataattgacttaaagctattgcttttttcttaaaggcagggggcatggcagaacagaaagaaaagaataataatccatatttgcccaaaaatctatcttcacagttttaatgtaccactgtctatatatatatatatatatatatatatatatatatatatatatgaaatttgtgcttcagtgaatwtatttccactgtgtttgagtagactctaaataatttataaatgaagacttttattgaatctttcatcaggccttcagtagaacctccggggtttgttcaccttctgatatcccaagagaaataatatctccagattcttgttgatttttttgagctgtgtattttatgccatagtactcttaacatcatctggaaaaaggttaccaagatttacatttggaagatc

SEQ ID NO: 747177 - DNA, 634 bp, Homo sapiens
atgctattcctttatagaaaggcaattttaatggtgacctgttgtgtagagtgccacatcttacattagttcacaagataaccctctgctactgtcttttgggtgcaggcgggtggagcagctggtgttgtacatgaaagcagcacagctgcttgcggcttctctgcatcttgccaaagcccaratcaagtccgggaaactgagcccatccacagctgtgaaacaaggtatgggaaaaggcagcgtgtaactccaggggtcagtccttaagttgctctttcccatcacactgtgagagagtgtctgatgagtactcactgttgtttttatttttcagtattcttaaagggaaaagatgctgggttgttagctttttgcagttcaattgatagaagtctgaagtgcattattctcaatcttttcatattgaaagagataacatgaaaaaatcctatttctggtcctttttttgaatgatcacatagtgacaccttccctatatatcagcaggaaagatacatataactgtgtctttatttctggaggaaaattaaaattagttcccatctcaattttttttcagttgtcaagaatctgaacgaacgatataaattctgcatcaccatgtgcaaga

SEQ ID NO: 747178 - DNA, 634 bp, Homo sapiens
atgctattcctttatagaaaggcaattttaatggtgacctgttgtgtagagtgccacatcttacattagttcacaagataaccctctgctactgtcttttgggtgcaggcgggtggagcagctggtgttgtacatgaaagcagcacagctgcttgcggcttctctgcatcttgccaaagcccaaatcaagtccgggaaactgagcccatccacagctgtgaaacaaggtatgggaraaggcagcgtgtaactccaggggtcagtccttaagttgctctttcccatcacactgtgagagagtgtctgatgagtactcactgttgtttttatttttcagtattcttaaagggaaaagatgctgggttgttagctttttgcagttcaattgatagaagtctgaagtgcattattctcaatcttttcatattgaaagagataacatgaaaaaatcctatttctggtcctttttttgaatgatcacatagtgacaccttccctatatatcagcaggaaagatacatataactgtgtctttatttctggaggaaaattaaaattagttcccatctcaattttttttcagttgtcaagaatctgaacgaacgatataaattctgcatcaccatgtgcaaga

SEQ ID NO: 747179 - DNA, 655 bp, Homo sapiens
atggtgaatggtgccacttccacccctttattcctggacctgtggatcctggctatgggagaaacagtaccatatattggatgttgattcagagcatacacggttttctggagaactttgccccagccctccaaagtattgtcacccagttggcattgtaattgtaacttcaaaaggcctttccaccattctatcaatccagctgcttcaggatgaygggaaacatggtaagaccagtgaattccatgagcatgagcccactgccacacttctttagccataaactgtgagtgccttggtcagaggcaatgctgtgtggaatactatgatggtggaaaaggtattctgtgagtacacagatggtagtcttggcagaagcattgcatgcaggataggaaaacccatatctggagtaagtgtctattccactgaggatgaacctctgctctttccatgatggaagaggtccaatataattaacctgccaccaggtagctggctgctcaccccaaggaatggtgccatatcaagggctcagtgttggcctctactgctgtcaaattgggcactcagcagtggccatagccaggtcagccttggtgagtggaaatccatgttgctgagcccatgcataacctccatccccgtcaccatg

SEQ ID NO: 747180 - DNA, 651 bp, Homo sapiens
ctgttagaaacagccaggtaacatcttgaatgctttgctgcttagttatttcttcctccagataccctaaattatctctctcaagttccaagttccacatatctctagggcaggggaaaatgctgccaatctctttgctaaagcatagcaagastgacctttattccagctcccaataagttcctaatctccttctgataccacctcagcctgagttcattgtccatatcactatcagaattgtggtcaaaaccattcaacagtcagtaggaatttcaaaactttcccacatcttcctgttttctcccaagccctccatactgttccaacctctgcctgttactcagttccagagttgcttccacattttcaggtatctttatagcagtaccctactcttctagcatcaattttctgtattagtccattttcacactgctataaagaactacctgagactgggtaatttataaagtaaagaggtttaattgactcacagttccatattgctgaggaggcctcaggaaacttacaatcatggtggaaggggaagaggaggcaaggaacatcttacatggtggcaggagaagagagagagagcttgaagggggaactgccacacacttttaaaccatcagatctcgtgagaag

SEQ ID NO: 747181 - DNA, 651 bp, Homo sapiens
ctgttagaaacagccaggtaacatcttgaatgctttgctgcttagttatttcttcctccagataccctaaattatctctctcaagttccaagttccacatatctctagggcaggggaaaatgctgccaatctctttgctaaagcatagcaagactgacctttattccagytcccaataagttcctaatctccttctgataccacctcagcctgagttcattgtccatatcactatcagaattgtggtcaaaaccattcaacagtcagtaggaatttcaaaactttcccacatcttcctgttttctcccaagccctccatactgttccaacctctgcctgttactcagttccagagttgcttccacattttcaggtatctttatagcagtaccctactcttctagcatcaattttctgtattagtccattttcacactgctataaagaactacctgagactgggtaatttataaagtaaagaggtttaattgactcacagttccatattgctgaggaggcctcaggaaacttacaatcatggtggaaggggaagaggaggcaaggaacatcttacatggtggcaggagaagagagagagagcttgaagggggaactgccacacacttttaaaccatcagatctcgtgagaag

SEQ ID NO: 747182 - DNA, 651 bp, Homo sapiens
ctgttagaaacagccaggtaacatcttgaatgctttgctgcttagttatttcttcctccagataccctaaattatctctctcaagttccaagttccacatatctctagggcaggggaaaatgctgccaatctctttgctaaagcatagcaagactgacctttattccagctcccaataagttcctaatctccttctgataccacctcagcctgagttcattgtccatatcactatcagaattgtggtcaaaacmattcaacagtcagtaggaatttcaaaactttcccacatcttcctgttttctcccaagccctccatactgttccaacctctgcctgttactcagttccagagttgcttccacattttcaggtatctttatagcagtaccctactcttctagcatcaattttctgtattagtccattttcacactgctataaagaactacctgagactgggtaatttataaagtaaagaggtttaattgactcacagttccatattgctgaggaggcctcaggaaacttacaatcatggtggaaggggaagaggaggcaaggaacatcttacatggtggcaggagaagagagagagagcttgaagggggaactgccacacacttttaaaccatcagatctcgtgagaag

SEQ ID NO: 747183 - DNA, 658 bp, Homo sapiens
tagaagaagcccaggttcctctgtgagtaggttgtccaggacatggaccctgcttcactctccaacaccagtgcatactgtattgtgatgtgcatgagaaatgatcttttactatgttaaaacaccaggattctggaattgtttgttatagaattygtcttccctgatatactcacaaaatggaggtgacctagaaagttcacaagatatgacatatctgtcattctctggctactaatagatcctatcagtgcatgtaagaaaagggtctagtagaaaaggaaacacgttcgtagctgtacatactgcttattgtaattgtccacttattcatgcatttaacaaatatttattatgtacttactatgtgccaagctctgtgtaagtattgggggtgcacaagtaagcaaagtagacatgggccctgcccttgtatagctgacagtctggtgggataccaaacatgaaacaaattattcttatatgaacagctattatgaaagaagacattatagaccactgttgggaacaggggtgtcacctagacaccaaggagatctattttttttttcctatttagcacatcaaaaaaccaggaaatgggagcaggagagcctgtgttgctaggaattagacggaatcatgaacatcactctgt

SEQ ID NO: 747184 - DNA, 627 bp, Homo sapiens
cacatgttctcaatagaaatccagactccagtccttgtacttgaacatttaattgtttgaaagtaacacattttattatgaagaaaaataatctatattcaaaatttagcaagtataccctggcaaaaaaatatataaagttgttttcaaattttcccattcaagaatggtgayatttaaatatattttctccttgactttttcccgtatctattaattatattaattaatatattaataccatattattacatattatatcatgttataataacatatcttataatccccatgcctttaaaaatgtcttattgttctgtcactcaaacagttattttggactctcatttgctgttttgacttctaatgttgcaaaatcttcttgagccaataacatttataattaagggagcagagttcttaaaattgaaaatgaaacctgtttggttatgaaatatcagagagttacaactttttccttaaatagatgtgagttgactttcattaaagggggaataaaagaaagaacaaacattttaagcaaacgttctaaacaaaggttgcaaaatcttactatctaaggcatggctcctcaattggatcttactgagatttactgataggtca

SEQ ID NO: 747185 - DNA, 640 bp, Homo sapiens
ctgaaggagaagaagaatcattaccacaaccgacagacagagaaatacaagtggaggaggactctgaacaggagtagcctctctggcaagggacccagtcagcctaaggccgtcctgcacagagggagccaggagctggactaaccaagtaatttgtgggtgcaaaatgaaaatgaggggctccttgttaaaaactataaagaattttaagatggtaccagcagagaattaaaccaagcaaggagcccttctgagtgtgaggaggccytgaaagactgcacaattctaacaaacccatgaagccaggcttgggccagagaagaaaacaaacaaacaaacaaaaaccaaaaaataacacacccaaagcttcactttcttctctcagaatcctttctgttgttccaacttgctgaatggagtgaggatccaggaggcaagttaacccatttatgtaggcaggccaacatgctgagacagagtgggaagcggggatccagagggacagagatgacattcaatacatccagtcttttcaatcagcgaaagctgtttatcaaataccagtttaaaaaatttcacaatcccattgcaagtggtgaagaattgacttctgtagatctgcttgaaataaatggaaacg

SEQ ID NO: 747186 - DNA, 488 bp, Homo sapiens
ttaggaagtctgacaatgccaatattggagagaatgtacatgaacaagaatttactgatttgggtgaatcatacaatttctttggaagacgttagtattgctgcacaatattacatattcacatatccgtttgcctataaagtgtacatggacacaaaaagataagtacaaaatatttatagcagcctgctaatttttttaaatagaaaaatccctaagaaccatctttcatgcgcatccatgtgaagasaccaccaaacaggctttgtgtgagcaacaaggctgtttatttcacctgggtgcaggtgggctgagtccaaaaagagtcagcgaagggagataggggtggggccgttttataggatttgggtaggtaaaggaaaattacagtcaaaggggggttgttctctggtgggcaggagtggcggggtcacaaggtgctcagtaggggagcttttgagccaggatgagccaagagaaggaatttc

SEQ ID NO: 747187 - DNA, 640 bp, Homo sapiens
atatctagtaaatagattagtattcataaatactatttcataatgagctgggatgtagcaagagcaactaaaagtttgaatgatcacagttggcaatataagttgaaatcattttctgttcttgtcttaaaactgagattgcatccaggcctgcgatgctatctacttatttctgtcttgaactccagttgggtctgagaaaccttccagaaatgaacacatttgctatgttgaatatacagayactcccttttaatattctgaggataaagggaacaggaatgaattagcaacaagatttataatttacccattgatataattaaagtcaaatactcttggttctgtaaaaagtctctaagttttatttttctgtggtaactcctttctgtgtgtcctttacattttctctgtgttagaaggtgaatacaggtaaatgcagaacatgatgtatctctataattgagtgtaggtcaattcactaatagcttaggtgacacttgaagcttggtagagaagggttaaaacttccataagtccttatgtgtataagtgtgggcataaagctactctagtgacaacaaatctggggtgtgagaaatgtcaaaagtgggtcaaaaatggggtgtaaagaacacag

SEQ ID NO: 747188 - DNA, 511 bp, Homo sapiens
ttttttttttttttttttgagacggagtcttgctgttcacccaggctggagtgcagcggcccgatctctgctcactgaagcctccatctcctcggttcaagtgattctcgtgcctcagctccccgagtagctgggactataagtgcctgccaccccgcctggctaatttttgtatttttagtacggacagagttttaccaggttggacaggcttgtcttgaactcctgacccaaggtgatccgctgcctcggcctcccaaagtgctgggattatgggtgtgggccaccaagctmggccatgtttctatttcatgtagctgaatgcaatccttactagttaaccctgggtgtagtaaaagttgtggatgtcaatggagaacttgactttgtagaaggtaaagattgatcatcaccagatagaacaaatgtttctataggatatcataatataagatcagcttagagatagggaactcacgagggttgcttgtgtgtctggaagaatgagaaa

SEQ ID NO: 747189 - DNA, 615 bp, Homo sapiens
atactctgttctgagattcacctgcttatagtagaaactcagtatttctttgtgggcaattaatggcaactatcagcctagtctgtagcagcctgttgtggcactacattttttaaagacgggtttgttgaggtatattttacatgtagtaacatttacttctattgtaatatgtccagtgttataattttggcaatcacatataatataaacatgattatatatatgatacagttaagatatagaacatttccatcagcccaaaaaatttgcttctttatattcaatctccctctcccacaccctgaccatagaaaccattgatttgatttctgtccccatagttttgcctttaccagaatgtcatataaatggaatcactcaacacgtagtattttgagtctggmctcttgcacttagcataatgctttcaaaagtcattcatgttgttgcatgtaacattagtctgttcttctttatcactggaaagtatttaatcatatgaatgtactaaatttgtttatccattcaacagttagtggatatttgtggccatttccactttggatgaagttgctattgcatttaactaacagagacgaaaaggaaaaaata

SEQ ID NO: 747190 - DNA, 612 bp, Homo sapiens
tgtatatgcttattttttcctcagccagtgcacctttgaccatttaaaaaattgctggttacatgattttattatatatactttagttatacttattgtagaaatttattctaatcctttatttagtgccttttgttaaaatctttcaatgtggcaacctctctggctgtctaatgttgactcttcagtgtcttcaactattacaattctttttccagtcatgytaagatgcatattaataagattttgtcttttcaaacacagccaatcaagaacccagaatggacagttattgctcattttttaatctctaaaattagaacttaccatgaattcttttaaactaatggttatatactataattttcttaatgataatatattctgaaaagctgatgtttttgttgataatgatcataccacattttctaaattctgaataccagaagacagtacacaacatgaactaataattacagtgaataatatagaaaacaatgataggccccatgagtttagttttctttgataggtctacgtaatttcatactgacttgctcatgagaaaattaatgaaactaacaatctaaatgacaaggaagctggtaacta

SEQ ID NO: 747191 - DNA, 591 bp, Homo sapiens
atggacacagggaggggaccatcacacaccggggcgtgtcgaggggtaggggactggcggagggatagcattaggagaaatacctactgtaaatgacaagttgatgggtgcagcaaatcaacatggcacatgtatacctatgtaacaaacctgcacattctacacatgtaccccagaacgtaaagtataaaaataataaaaaaaacttagtacagtgctgttaaatccttgagatgggtattattttatgttcagtcaagttttgctggcaactataatcttccttctctaagggaaacaagagatgttcaggggcaaggagggatttctgtcccttgtagttatgatggaaatgctgattggatggtagttaagccaccaaagaatgatgaccctctgttrtattgtataaatctttagactatgtggcataaagtcctcactttcaggaagcagaaaaacatagattcgaagttagacttatcccactctctcagaatagcagcatcactttgactcaacgaacctagaaaatggccgagtcagcctccgattcaaaattcaaatttgtaattttgaaattccctaata

SEQ ID NO: 747192 - DNA, 600 bp, Homo sapiens
  misc_feature 594, 595, 596, 597, 598, 599, 600: n = A,T,C or G
aaaaaagacagtgtggtataatcatgaagagtatatgcttattgcagtcatctctgagcactaatcccagttccacagtagatagctgtgcaatcttagtgcaattacttagcaatttggtgtcaccatttctttctctttctttccttatttctttctcttccttccttccttccctcccaccatccttctctctttctytttttctttctttctttctttctttctttctttccttccttccttctttctttctctctttctttctttcagatagagtctctcttcatcaccactttattctttgtttgtttcattgaggtagagtctctctctgtcactcaagctgaagtgcagtgatgcaatcatggttcatggaagtcttgacctcccaagctcaaacaatccctcctccttgtctcccaaagtgctaggactatagggataagccacacacttggcccatcttttcttatctctaaagtaggactgataacaaggctgcctggtacatagtaagcactcagcaatattgctattatctttacttgacagtaatttattctatcaattcacatgatcaatattataatnnnnnnn

SEQ ID NO: 747193 - DNA, 600 bp, Homo sapiens
  misc_feature 594, 595, 596, 597, 598, 599, 600: n = A,T,C or G
aaaaaagacagtgtggtataatcatgaagagtatatgcttattgcagtcatctctgagcactaatcccagttccacagtagatagctgtgcaatcttagtgcaattacttagcaatttggtgtcaccatttctttctctttctttccttatttctttctcttccttccttccttccctcccaccatccttctctctttctctytttctttctttctttctttctttctttctttccttccttccttctttctttctctctttctttctttcagatagagtctctcttcatcaccactttattctttgtttgtttcattgaggtagagtctctctctgtcactcaagctgaagtgcagtgatgcaatcatggttcatggaagtcttgacctcccaagctcaaacaatccctcctccttgtctcccaaagtgctaggactatagggataagccacacacttggcccatcttttcttatctctaaagtaggactgataacaaggctgcctggtacatagtaagcactcagcaatattgctattatctttacttgacagtaatttattctatcaattcacatgatcaatattataatnnnnnnn

SEQ ID NO: 747194 - DNA, 618 bp, Homo sapiens
gaggtttgctttctagaaaaggatctcaaaagcatgcatttttattattatcattagataaatattgttcatggttgaaacaaatcttatgttcattatgataatccttcttgaactcttctcccccaggagttagtttaaatattttaccatatttcataattttggttgaacatmtaagttttattatgctcaccaatgagtccatgaaatatcagtccctgtaatttcacacatgttctaacatgtcatatagttaattgcttatttctgaaaaaaaaaattatcttggagccttccaagttgctgctcactctgaaacattttactctatacagcctttgtttggggcatctaactttctactttgaagagagcttgttactttccttatctcattttttctggagactgtcctctactaatgtcctaaagaatgtagatggggagcacagttttaaggactttgaaaatttgaaaacatcacaattctacctacatctttgactaatgacgaaggtttgtgtaaaaatttaaatagataattattgttctttaaatactgtaggaatttctcctttgtttacttaattcaggagttgcattaagaagcctcac

SEQ ID NO: 747195 - DNA, 317 bp, Homo sapiens
gaatctgctttgctttctggcaacctggttacattaaagaatattgagtttctagtccttactgcagagcatgggtgggtagtatttccagccatgaatttactagatttctctctctctgtctctcgataggtaggtaggtaggtaggtagatagrtagatagatagatagatagatagatagagttttatatactctgggattatcataacaacttttactttcttaagtgaaaataacattttctatacaaactatgtttaatctgttaatgtattgagcccatgaaaatgtccacagatagacacatgaataa

SEQ ID NO: 747196 - DNA, 642 bp, Homo sapiens
caagaggccattccttctgcctcaatattctccatcatccccttgatgtgcaggacatcacacatctccctgttagttcctgtccagtcaagttgactcttcctcttcttcttgacctctgttaagtgccccatagtttagttagtcctacctcctcttctcttctcaatctacaactcactttctaagtgagtttatcaagtcttgtggctttaaattcaaattatatgccaacrattggcaaattattatttttagtccagattgtctcccaaagactaaactcaccagtctaacatgacctcttacctggatatataagagctatctcaaacataaaatgttccaaactgattctcacaaagcctgcatatcttcagccccctaaatcttagcttacttcaattgcatcatttcagcgactcagagaggaaaactttggtgttatccgtgacccctctctttctcttatgcctcacattcagaccatcaggaaatctggttggctctactttcaaaatacacagagtcaagttcctctggaccatccccactgtcacatcaatgtctaaactcctgtcatctctcagttggacaactgccatggcctctggcaataatcttggacatcaaggattacca

SEQ ID NO: 747197 - DNA, 642 bp, Homo sapiens
caagaggccattccttctgcctcaatattctccatcatccccttgatgtgcaggacatcacacatctccctgttagttcctgtccagtcaagttgactcttcctcttcttcttgacctctgttaagtgccccatagtttagttagtcctacctcctcttctcttctcaatctacaactcactttctaagtgagtttatcaagtcttgtggctttaaattcaaattatatgccaacaattggcaaattattawttttagtccagattgtctcccaaagactaaactcaccagtctaacatgacctcttacctggatatataagagctatctcaaacataaaatgttccaaactgattctcacaaagcctgcatatcttcagccccctaaatcttagcttacttcaattgcatcatttcagcgactcagagaggaaaactttggtgttatccgtgacccctctctttctcttatgcctcacattcagaccatcaggaaatctggttggctctactttcaaaatacacagagtcaagttcctctggaccatccccactgtcacatcaatgtctaaactcctgtcatctctcagttggacaactgccatggcctctggcaataatcttggacatcaaggattacca

SEQ ID NO: 747198 - DNA, 642 bp, Homo sapiens
caagaggccattccttctgcctcaatattctccatcatccccttgatgtgcaggacatcacacatctccctgttagttcctgtccagtcaagttgactcttcctcttcttcttgacctctgttaagtgccccatagtttagttagtcctacctcctcttctcttctcaatctacaactcactttctaagtgagtttatcaagtcttgtggctttaaattcaaattatatgccaacaattggcaaattattatytttagtccagattgtctcccaaagactaaactcaccagtctaacatgacctcttacctggatatataagagctatctcaaacataaaatgttccaaactgattctcacaaagcctgcatatcttcagccccctaaatcttagcttacttcaattgcatcatttcagcgactcagagaggaaaactttggtgttatccgtgacccctctctttctcttatgcctcacattcagaccatcaggaaatctggttggctctactttcaaaatacacagagtcaagttcctctggaccatccccactgtcacatcaatgtctaaactcctgtcatctctcagttggacaactgccatggcctctggcaataatcttggacatcaaggattacca

SEQ ID NO: 747199 - DNA, 648 bp, Homo sapiens
cctggtgggatgtgtttgggtcatgagagtggatcccttatgaatggcttggtgccattcttggggtaatgagtgggttcttgttctattagcttcctcgagatctgattgttaaaaacagactgccacctccctcccctcactcttgctccctttcttgccrcatctgctccctctttgctttctgctatgactggaagcttcctgaggggtcaccagatgcagatgtcagcaccatacttcttgtacagcctgcagaactgtgacccaaataaacctcttttctttataaattatccagcctcaggtattcctttatagcaacacaaaatagactaagacaataagttactaacacaacactctccaagcatttgtttctgtttctgttttttgagacagggtctcactctgttgccgaggctggaatgcagtggtgtaaacacggctcactgtagtagccttgatctctcctgggctcaagcaatcctcccacctcgacctcctgagtacctgggaccacaggcacatgccaccatgcctggctagttttttaaattttgtgtagagacgcagtctccttacgttgttcagcctggtctcaaactcctgggctcaagcaatcctcccgccacagcctctcacagt

SEQ ID NO: 747200 - DNA, 563 bp, Homo sapiens
tcatcccttcccctcaagtctgaaaggatcccaaccaccccctcctgcacccgaggcagtacacagatggtgcctttgcttccaagccctcctgaatccacttccttatcacagggaccggctcccctcccacactggtatgaacatgaccacatcccaaactcagggkggtggcacggtgctgacactcagtgactcagtggccacagccctgcagggagctcttgccaagctcctccctcccaggcttctggagcctcctcactgtcagcctccactcaggcccttggtgatcttcccccactgctcggcgccagtcccttttctgccacttcctcccatgaaggggaaatcctggtggttccctggagattccctgattgcacgcttcactcgaagctgcaggctgctccctagtcagggcccctagagcctgacatccagcctgtcattaaggaaccaacttctgaaaagtatttcacagccacaaattctaactgatgaacacaggttctccattacctaagacgtgtgcaccctcccttcgaactcacacacctcac

SEQ ID NO: 747201 - DNA, 534 bp, Homo sapiens
tatggccatctaagctgaattttcttttgacaaaatttacttttttgtaagtattagtgattagtaaataaatgggtacacacatatctggtatctgtaatacagataatgttatctaataaaaacaaaaatgatgtccagttcaaatgcaagcttattccatcagtaaaatgctgatgtagaaaagttgacaaaataattccaatttttcttcttaagttgtatgtcccctcatcaacacccaaaacaaaaataaaagaaagaaagaaagaaagagagagagagggaaggaaggaaggaaggaaggaaggaaggaaggaaggaaggaaggaaggaaggaaggaaggaargaaagaaagaaagaaagaaaaaaaagaaaagcataaaaatatcactgtgtagcaatcagtttgggcagaatctccctacccactcccctggcttcatctcttgtccttctacaaatcacccttcagaagcagctagaaggatcttaaacctttcatcaaacactgccattccccttattaaatc

SEQ ID NO: 747202 - DNA, 605 bp, Homo sapiens
ccaaggtgggggcacatcgggtgtctcctggtgctttctgctggcactaacattctaaaacatgaagcattaagtacagcaacatggatcttccttttttaacatggaaaatacgttttcatagagcaggagggaaaagaactctctaaaaaacagagctgaataggcttagcaagaaaagaaattcaggagatggagaggaggagctctaaaacatccacaaaaaaataaaccatttcatagcaatgctgaccattttaattgattctcgacgacagaagaacacaagaaaaggtagatgatgtaatgcgatggctgctgaaggcaaaagtcacaaaacaaatttagcccttcgaataccacagtagccaygggtcaatataaaaagcttcaacggtcaggagcaaaactggggtgaaggggctactcccccatacatgtaatttgtccaagccctgccatagccaccacctccctggatcctcaaagcaaccctattatgcaagacatgctgatccaggtgcatctgacgattcagaaaaccaggaccaagccgtggggcaccgagcctgagctaataagcagcagagtcgaccctggcacga

SEQ ID NO: 747203 - DNA, 479 bp, Homo sapiens
gtagatgacacagctagcaaataaatgaagctggatatgagcccaaagcagggaactagaaatgagaagttaataccctggataagtcacagcccaaaaagaatgtgggaaggaagagtttgcagttgaggttagcagcatcaatgctttataaaggaaacttcgtccttttgactgcagtgcctgtctgctccgtatagtgagcctgacagactatctccctagaaactacsgagtaatatcaaattactatatacattaaattatttataaattaaataaaaataaataaattacatatacattaaatatacattaaattactttgtattactttaatataaatattaaatgttactttatacctttgaagtaggaaaagtttgctcataatgttgagtgctgacatagacacttaaggcatgaaggtagctttaattattggtttagtggatgaccatatatatcaaatcaaaagc

SEQ ID NO: 747204 - DNA, 663 bp, Homo sapiens
gctctacctagttccaaggtctaacaattttaaactgaatgttcacatagccttttgggattattcttattgttgtccataagacttacctgacttctccaataaccccaggagaagaatgtggtattcattagtttgccatatttacttagtatacctctatttcttaacctctttaagcctggttttcccacttgaaacatggagagaatagtaataataatacctatctcagagagatttttacagaatgcaataaactaatgcttataaaacacttaacataggacctagaacaaagtaaggctgcaataacatcagctatgattattattatttcataccacacactttttacttgcctaatgtgataaatcatttggaaaagtgttgccattattctcttctctgtaccagggctctatgccatgtggctttgtagcaactcccatcaggagatgaagattacttcccttacacttgaaactgggatggttctgtsaattgcctgaaaaattgaatgtgatgacaaaagcaaaattgtgctagttttgggcctaggcttcaagaggccttgtgtacttttactctatgacaaggtcattctagcctgctaaaagatgagagacaatgagggcaaggccagtgagccagctgtccccg

SEQ ID NO: 747205 - DNA, 621 bp, Homo sapiens
tctacacatctcatatttctttataaaacatttaaaactcctaagttaaaccatgtgtgtgtgcatgtgtatacaagtaagtcttgagacatttgggaagtctctgttaactttgtcaacttcatttaaaaatcagttcctcatattctaaggatgtattgttagatatatkcccattaaaaacaagaataaggcaaggattctggcttaacccttatctataacattattttaaaattcttctgaattatatgaaaatacaataaggctcaaaaataagggatttacctattaaacaagaggagaaaaataattatgagcaaatgacatgagtttccacttggaagttaaatagaacttaccagaaactgttaatatgtgagtacaaaaaagaaagcaattaagagtggcttaaacatagtgacagctttatgtcagctgtactcaactaaagttaagatgtcataataaaatcttggtaaaaatataaattatttaaaatttaattattataagaactataaggggctggctgtagtggctcatgcctgtaatcccagcactttgggaagccggggcaggcagatcacttgggcccaggagtttgacaccagcctggga

SEQ ID NO: 747206 - DNA, 620 bp, Homo sapiens
gaagatctgaaactgaaaatactgccaaatcaaaaaatgtatgaatgccaacataatgctaaaagcaaatgcccattagaacattttcaactttagatattttgatttggggtgctcaactggtaagtatatgatgtaaatattgaaaaattcaaaagaaaatatttgaattctgaaatactcctgatccaaatcactttggataaggaacatctgtagtcaacccataatatttgttttatatattcaggtgctccaatgtttagtgcatttatatttaaaattggtatattctcttgatgaactgacctcattatcattacataattatcttctttgttgattttttgccatttttgmcctaaagtctgtttttagcttacctctgcttttttttttttgtaattatttgtctgatttatcttttcctcatctctttattctcagttaagtgtggccttaaagccaaataaggtttttttttttaattcttccagctaccgtatgtattttgattagggaatgtagtctttttaaatttaacataattattggtaggtggaggcttagtactgttattctattaaatttttactaatttatagttcttttgtttcttc

SEQ ID NO: 747207 - DNA, 605 bp, Homo sapiens
taaacttttccgaagtattttattattttggtgctattataaatgaagttatcttgatttgctttccagatagctcatttttagagtattgaaaagcaattgattttatgtgttgatttttttatgctgtaacttgactaaatttctatattacttttaacagtttggggaggagatatttagggttttctacatattatattatgtcatctgtaaatagagataattttacttctcctttccaatttagatgccttttatatttttcttgctgaattgctctggctacaacttcagtactatgttgaataaaaacattgaaagtaggcatcctggacttgtccctgatatcagaggaaaaactttcagtcttttwtcactgagtatgatgttagctgtcagatattttttctttttcacttataaacactgttttatttcagcagaattttaaaattttgatgaattagttatattttattggaagtagatgaaaactaatacatgtccatataagggatatatgtgtatgtactcatcatatatgaataatgacataaagacacaaagatagatacatacatacatagatacatacatagaca

SEQ ID NO: 747208 - DNA, 527 bp, Homo sapiens
agtggttactgctagtatgtcaaaagtccactggtatttctattttgactctctatcatcagacttttcaaaatgcacttattattctagcagttctttcatcttaaactttatattgaaataatgtttgagtcacatgagttgtaggaaaaatacagatttcccctttactctttkcttagattctccaataacgtcttgcaaaactatactataatatcacaaacgggttagtgacattgatataatccattaacgttattcatatagtcccggttttacttgtatgtgtgtttacacacacatgcatatatgagtatgcatgcatttgattctgtgcaattttatcttctgtgttggcttatgtatccaccaccccagtgaagatgcactcttatatatacatgcacacacacacacacacacacacacatataaatgtctatatatatatatatatagcaagtgtcattacacatgtaatatcattaaattgttagtactaaaaaaattcagagattttctag

SEQ ID NO: 747209 - DNA, 691 bp, Homo sapiens
tttgcctccctctctgattattttaaactttcattttgttttcttcatattaatactacagtcaaatagagcattctttcttcatgtctacttgttgtgtctagttttcttctagtgcttccttttgttttattttttctcctcatctgctttctttgttttcttggakattccaataatgtaattcaagttcaatttttactgaagtgttagataaacagaattttcttctatagatccaaatggtatatagttatagtctaaatgggactataactataaatggtagttatactcttaaagataaaaaaatattagtgatggtaacaacatataagcaataacattatataggacaagttatacttttgtatatattatcgcatttgagttttgttaaggtaggaagagcagatggaattttataagttcaaaaatttggggttttataaatgaacagatttaaattatataaagagcattaaatgtttaaagcattggctggatgcagtggctcacgcctgtaattccagcactttgggaggtcgaggtgggtggatcacctgaggtcagaagttcaagaccagcctgcccaacatggtgaaactctgtctctactaaaaatacaaaaaattagccgggcgtggtggcgggagtctgtaatcccagctacttgggaggctgaggcagg

SEQ ID NO: 747210 - DNA, 691 bp, Homo sapiens
tttgcctccctctctgattattttaaactttcattttgttttcttcatattaatactacagtcaaatagagcattctttcttcatgtctacttgttgtgtctagttttcttctagtgcttccttttgttttattttttctcctcatctgctttctttgttttcttggatattccaataatgtaattcaagttcaatttttactgaagtgttagataaacagaattttcttctatagatccaaatggtatatagttatagtctaaatgggactataactataaatggtagttatactcttaaagataaaaaaatattagtgatggtaayaacatataagcaataacattatataggacaagttatacttttgtatatattatcgcatttgagttttgttaaggtaggaagagcagatggaattttataagttcaaaaatttggggttttataaatgaacagatttaaattatataaagagcattaaatgtttaaagcattggctggatgcagtggctcacgcctgtaattccagcactttgggaggtcgaggtgggtggatcacctgaggtcagaagttcaagaccagcctgcccaacatggtgaaactctgtctctactaaaaatacaaaaaattagccgggcgtggtggcgggagtctgtaatcccagctacttgggaggctgaggcagg

SEQ ID NO: 747211 - DNA, 691 bp, Homo sapiens
tttgcctccctctctgattattttaaactttcattttgttttcttcatattaatactacagtcaaatagagcattctttcttcatgtctacttgttgtgtctagttttcttctagtgcttccttttgttttattttttctcctcatctgctttctttgttttcttggatattccaataatgtaattcaagttcaatttttactgaagtgttagataaacagaattttcttctatagatccaaatggtatatagttatagtctaaatgggactataactataaatggtagttatactcttaaagataaaaaaatattagtgatggtaacaacatataagcaataacattatataggacaagttatacttttgtatatattatcgcatttgagttttgttaaggtaggaagagcagatggaattttataagttcaaaaatttggggttttataaatgaacagatttaaattatataaagagcattaaatgtttaaagcattggctggatgcagtggctcacgcctgtaattccagcactttgggaggtcraggtgggtggatcacctgaggtcagaagttcaagaccagcctgcccaacatggtgaaactctgtctctactaaaaatacaaaaaattagccgggcgtggtggcgggagtctgtaatcccagctacttgggaggctgaggcagg

SEQ ID NO: 747212 - DNA, 665 bp, Homo sapiens
ttttataaaatgtgtaacgggatccactgataattcatatttctccaaaatatcaagactcagatgtttgtattgggtgatggatggaattagatctgcagttaggacagagtgctcttctgtaccataagtaagtgcatcagaaataagattccactcatattcatggtccattgagtacttggcaaaatattgggtatttctataaatattctctcatttagctatcagaacaatctctgagttagacgttattattctcattgtagcagatggagaaactgaagctcaaatgtcaaccattaaaaaatgcacccagtagatacacatagcatagatccagaaatcattcctaggggtttggatttcaaatcttatacttgtttaaagaacaactgcagcaatattctataactgaaaatgataaaaaacaacaatatttatatataagtgtaaatatttataagtctagaattctaagagtactggaggccaaacccagayattctacttgggaattcttctgtgggtaaaggagaggagcaagcagagagttactatgataagagtgaaagggagagagaaaagattgtaatgtcaaggataaaataggtggaacattttgcggatatctttccatatttccaaaaatagtatgcattgct

SEQ ID NO: 747213 - DNA, 589 bp, Homo sapiens
ctatcattgcaatgatttttaaggatttctaacattttaaaaattatccatcatttgtatttgattgtaaattatttccacagacaacgccccgcattattattgtcctctgaaatgtcttaccccgtctgagtagctaccttgrgacagtgtggggtatattttatacacaaaatcctgatttgaaagctagaaagaacctacagaaccatcacattcattttatgggtaatattattgtggcaaagagaaagacagagacttgtgcaacctcacacaggactttggtgggaaacctattacataaagtaacagagttagcaggccttgactattttggaaatgcacttaggatctgtgtgctggctgagggtaatgcacaagcatcatgtggcagaaacataacaactggtgcacatctcgcagtctgggccaccattgtggtagccagcaaacagcgcacacagggctgagcttcagaaggtgaccctgaacaaatgcaatttgtggaagaaataagccaagaaaggaaacatatgaagtttgagggcacaaacatcaaaacaaacaagcaattaaaaattaaaat

SEQ ID NO: 747214 - DNA, 566 bp, Homo sapiens
ttaaacacacacttgtttccactgggtaacagtaagaaatgaggaatttcatttaagccttactgcttcctacaaattgcataatattagattacaccaacatgcaattggccaagtttttaaaaacctgacttgtttttggttgtggaaaacactgttaataaagaagagttatttttgctatgggatggtggctttggagtgttgatttgactgctctgttgactttgaagtaaattcaaagtaaatacattttggttgcatctgagaacaggtgcrttttgagattctccgtgttggtgtagttgggcagggctgcctcacaatgtgctgtgcatgtgacatttgctcccgtgtcacgtttgcctaatgctctgtcacatgaatgccgttcaagctctgttttgctactaagaacttaaaagtaatagtcaacatttgagatgcaatggtcagaggatattgtgctgttgccatctaaaatgttactgtttcttacttttaagactattaacacgtttacaaacgtgccttataacacagtacttattgggtttgtgtatttt

SEQ ID NO: 747215 - DNA, 649 bp, Homo sapiens
ggggtgctctcctttggccctaatcctcctacaccatgcaatgctaaggtgtcttcccatgaaatgtgcttctcaagacagaggctgcatcctcctcctgggtgcccccaacacggagcacagcctggcacacaggtggtccttaatgtgaacaaagtgaaccaaatacactctggagtagacaagtccctgtgtaaggcaggaacatgagcacagttcactccctagggtacaaaaagttacccacatcaagcctgcacacactgtacagcagctggagccaggcactgcaacaagccaggaagggagggctgcaggcccagccatggtgccagttttcaccccaccctaacacacatcagatcacttccgagcccccatttctcacctgctaagtgaggaagggattgttatgagaactggatttggctrtgtgggtagcatttttaaaaccgtctgggccatatactaattctcattaaagcaaacatgattgtttgggatctcccaaaagctaactctccaagctgcttcaaatcagagaggtcaccccggaccacagtgataaaatccagaacttttgtagtagaggaaggagtctctcagccagatcacaaagaattcttccctcccttatcagcattaatgg

SEQ ID NO: 747216 - DNA, 380 bp, Homo sapiens
ccatggaggccacggatggggctggagcatggactaggtacccctcccaggcacacacaaaagccactccctggtaccctgttttttgtttgtttgtttgtttgtttgttctgagacagagtctcactctgtcgcccaggctgagtgcagtggcgccatctctgctcactgcaacctccgcctcckgggttcaagcaattcatctccctcagccttccgagtagctgggattacaggggccccctatcatgcctggctaatttttgtatatttagtagagataaggtttcaccattttagccaagctggtctcaaactcctgacctcaagtgatccacctgccctggcctcccaaagtgctgggattacaggcgtgagcc

SEQ ID NO: 747217 - DNA, 373 bp, Homo sapiens
ttgtgctaaagaagaatgttgaatcctacagacttccaagctgatgtagttgcacagaaagcagcgtgttatacattacgcttttgtactaagtccactaagtgagtcaggtttcctgattcagtgcaatcaggtcccaggctaatggagcagcagaagcaggcagagggttgtctgaggccagacccgcagcaggcaggctcaygcagacaggggcacctgggctcatccgaagcactactgcttctcctggctgcatgggagtccggtgattttacagcccgtttggtagctaattccagcaagagtgaaggtctttggcagttgccgtctagcctatgctctgctttttgtgctctactaaaaacggtgg

SEQ ID NO: 747218 - DNA, 494 bp, Homo sapiens
aaccaaaggatacacaattaatttcatgtatgatgaatggagttaactggcattgtttccactagaaattttactacttcatcagtgatctgaatagctaagaatctcctttgatccaataaaaagagtagggatacatacacacacacacgctctcacttttacacacacacacatcccccaaattcattaggttgtargtcccaacctccactgatctggtttggctccatgtccccactcaaatctcatcttgaattgtaattctagcgtgttgagggagggacctgtaatccccatgtgttgagggagggagatgattggatcatgatggtggttcccccatgctgttcttgtgatagtgagtgagttctcacgagatctgatggttttataagtattggacagttcctccttcacacactctctctcctgccaccttgtgaagaaagtgtctgcttctctttccaccataattgtaaatttcctgaggc

SEQ ID NO: 747219 - DNA, 494 bp, Homo sapiens
aaccaaaggatacacaattaatttcatgtatgatgaatggagttaactggcattgtttccactagaaattttactacttcatcagtgatctgaatagctaagaatctcctttgatccaataaaaagagtagggatacatacacacacacacgctctcacttttacacacacacacatcccccaaattcattaggttgtaagtcccaacctccactgatctggtttggctccatgtccccactcaaatctcatcttgaattgtaattcyagcgtgttgagggagggacctgtaatccccatgtgttgagggagggagatgattggatcatgatggtggttcccccatgctgttcttgtgatagtgagtgagttctcacgagatctgatggttttataagtattggacagttcctccttcacacactctctctcctgccaccttgtgaagaaagtgtctgcttctctttccaccataattgtaaatttcctgaggc

SEQ ID NO: 747220 - DNA, 503 bp, Homo sapiens
tgtatcagtgcagtattctgaagccaagagatcctcctctccccgcaaggcaaaaggtttgttctccttttacttctccctcagccaaacttctctgagacgcctatggcttgttactcactgccaagcttatggtgggaacaggaaggacctgcccctcctcagtgayaggtgacatttgcttcaacccctttcagagaaagagtggatttagcccgagaactggggtgaggatggggtggggatgtttcctttccctcccactgccatataaagcttttgcttctgagagaaccatctggtgaagtagatgaggcttcatggctaatatggtttggctgtgtccccagccaaatctcatcttgaattgtaattcctataatccccacctgtcagtagggaccgggtgggaggtaattgaattatgggagtggtttcccccatgctgttttcgtgatagtgagtgagttctcacgagatctaatggttttataagcctctgg

SEQ ID NO: 747221 - DNA, 545 bp, Homo sapiens
gaagttataattttgaagatttgacttttttcaagttgttagggtgagagcaatgttctctgttctcttgcagctgaatgaattttaagcagaagccaggattaaatcttaagtcctcattgtgctgtaatctttcatgtttctatgatccaggcagaaaatgggaaaaaggcaagagttccagaaatttacgggaataagcagtatyttacccaaacaaagggatatgctcatttattttattaatgatgcattaataactatgtcctatgctttgccacatgttcaaaaatttctccttagctagccttttcatgtggaattaatcacaaacctgaagccaaagccgcttcagtttggtcccaaaacactttactcaacatctcccatatgctctgctccaccttgggcttcagccacatgagttggcaggcctgggaggggagtcagatttcctgcgatggaatccagactgtgccacttattagctctgtgacctggggctacttaacctctctgccgctcagcctcctcatttgtaaagt

SEQ ID NO: 747222 - DNA, 623 bp, Homo sapiens
gtcaccaagcacacactttaccaggaaagtggctgaggttggatacaagaggtaaaggttctcaccctggggtgtggtgggctgggaatggtttgcagccagatgaactggtttgaatcccgggtacgtctcttaagkggtctttggtttttgactgattttcacagactagattttgtcatctttagtttgagaaccaataattagctttttaaaaaaaaaaaaggaaaaaaaagaactatatctgagttccaaatggcaagattttcaaaaggaaaggttgttttatacataacagagctttatataaatgcaagatgttaccattttcacattgcaatatacagtggatataaaaatctacaactttgggtaaaaaaatgtctgtaactcatttcagttctgttatgaacaaggcttttaatgtctgtgagcctcactttagtcatcttaaaatataaatactcactttacaggttaataatgagagttcatggcatggcgtctagatgttcaataaatgttagttgaatctaaaatgaaagcaaccaaccctcaatttccttcctttattgtcttccccaaaaccatacaaataagcaaggcagaaactagagatgaaa

SEQ ID NO: 747223 - DNA, 456 bp, Homo sapiens
cttatatttgtaacagtattatccacaatagccaaaacttggatacayaaatgtccatcaactggtgaacagataaacaaactgtggcaaatctacatttggaaatactgcttagtaataaggaattactcaacatgaatcaatttcaaaaaagtaggcaaattgaaagggataaaacacaacagactacatactgtatgctcctcttatatgatattctagaaaaagcaacactataatgaactatactgtggctagagttcaggtaagaggttgatcttagggacatgagaaaacttctagggttctatagcttgattatggtgatggttactcaactgttcattacaaaaactcaagctgtaaacaaaatagaataaattttgttataggtaaatgataccacaataaagctggaaaaaaaagtaaaacaaaaggcaaagatgggtaagaagt

SEQ ID NO: 747224 - DNA, 456 bp, Homo sapiens
cttatatttgtaacagtattatccacaatagccaaaacttggatacacaaatgtccatcractggtgaacagataaacaaactgtggcaaatctacatttggaaatactgcttagtaataaggaattactcaacatgaatcaatttcaaaaaagtaggcaaattgaaagggataaaacacaacagactacatactgtatgctcctcttatatgatattctagaaaaagcaacactataatgaactatactgtggctagagttcaggtaagaggttgatcttagggacatgagaaaacttctagggttctatagcttgattatggtgatggttactcaactgttcattacaaaaactcaagctgtaaacaaaatagaataaattttgttataggtaaatgataccacaataaagctggaaaaaaaagtaaaacaaaaggcaaagatgggtaagaagt

SEQ ID NO: 747225 - DNA, 552 bp, Homo sapiens
tcaaaatggaggaccactgacccagtcacttgctacacaaagcgtggccacagaccatcagcatcagggtcacctgggagcctgccaaaaattcagaatctctagctacaccccagacctactgaaccacactctgcattttaagaaaatccccggccagtggtggttcatgcctctaatcccagcactttgggaggccaaggcagggctcaactccttgagaccaggagttagagaccagcctgggcaacatagtcagaccctgtctctctaccaaaaaaaataaaattattatccaggtgcggtggcatgcacctgtagtcctagctacttgggaggctgaagtgggagtacagcttgagctcaggagtttgaggctgcagtgagccatgactgcaccactgcattccwgcctgggcaataaagcaagaccctgtctccaaaaaggaaaaaaaaaaaaaaaaaaaaaaggatcccccaggtgaactgaatttttgtggacaaaagttttttggcaattaaagtgaggaaaaggttttcatcaaatataac

SEQ ID NO: 747226 - DNA, 560 bp, Homo sapiens
gttccgaatttctttcttagttttttatctcaaagatctgtccaatgttgtcaatggggtgacactattattgtgtggctgtatacattttttcataggtctagaagtacttgttttatatatcttgatgctccattgttgagtgtacatatatttaggagagttaagacttcttgttgaattgaactctttatcattacataatgcccatcttttttttaaaactgttgttggtttaaaatctgttttatctgatataagaatagcaacagaaattggacccmtttcttacaccttacacaaaaattaactcaagatggattaaagacttaaacttaagacctaaaaccataaaaccctagaagaaaacctaggcaataccattcagaaaataggcatgggcaaagccttcatgacttaaacaccaaaagcaatggcaacaaaagccaaaattggcaaatgggatctatttaaactaaagagcttctgcacagcaaaagaaactatcatcagagtgaataggcaacctacagaatgagagaatatttttgcaatctatc

SEQ ID NO: 747227 - DNA, 599 bp, Homo sapiens
ctaaagagcttctgcacagcaaaagaaactatcatcagagtgaataggcaacctacagaatgagagaatatttttgcaatctatccatatgacaaagagctaatatccagaatctaaaagaacttaaacaaatttacaagaaaaaacaaccccatcaaaaagtgggcaaatgatatgaacaggcacttctccaaagaagatatttatgcagccaacagacacatgaaaaaatgctcatcaacactggtcatcagagaaatgcaaatcaaaaccacagtgagataccatctcatgctagttagaatggcaatcattaaaaagtcaggaaacatcaaatggtggagagaatgtggagaaataggaatgcttttacactgttggtaggagtgsaaattagttcaaccgttgtggaagacagtgtggtgattcctcaaggatctagaaccagaaataccatttaacccagtaatcccattactgggtatatacccaaaggattataaattactctactgtaaagacacatgcacacatatgtttattgtggcactgttcacaatagcaaagacttggaaccaaccaaatgatagactgaataa

SEQ ID NO: 747228 - DNA, 599 bp, Homo sapiens
ctaaagagcttctgcacagcaaaagaaactatcatcagagtgaataggcaacctacagaatgagagaatatttttgcaatctatccatatgacaaagagctaatatccagaatctaaaagaacttaaacaaatttacaagaaaaaacaaccccatcaaaaagtgggcaaatgatatgaacaggcacttctccaaagaagatatttatgcagccaacagacacatgaaaaaatgctcatcaacactggtcatcagagaaatgcaaatcaaaaccacagtgagataccatctcatgctagttagaatggcaatcattaaaaagtcaggaaacatcaaatggtggagagaatgtggagaaataggaatgcttttacactgttggtaggagtgcaaattagttcaaccrttgtggaagacagtgtggtgattcctcaaggatctagaaccagaaataccatttaacccagtaatcccattactgggtatatacccaaaggattataaattactctactgtaaagacacatgcacacatatgtttattgtggcactgttcacaatagcaaagacttggaaccaaccaaatgatagactgaataa

SEQ ID NO: 747229 - DNA, 620 bp, Homo sapiens
gatacacacgttttatgatcaaatctagattcaatttttctttcttcatttcctagaaatcataagtttggaatattttaaaatattatttcctgaatataccatatgttcaactttgaatcatgtttattgaatatattatctaattttagtttcatactttaatgaagtgattaaatgaatttgttataawttaatattttaccccatctcatatttcaacttccggaagactttgaaatagttacagaatataggggttgactttttctaccaatgcatcaaggcagtagagctcaaaatcaagtcgatataagaatcacagcagataggaaatgaacaattgtcgggctttataagataatgaatattatggatatttgaaggtttgatagaatcaatagtcacttactaccctaaaataattttcccagttcccagacatatttttaaaaattcctctatagataaaataaaaacctagatggattctctacttgttattgttaataattttgtacttgcaaatgacagaaaaaccttgcaaaattttcttgtatggagaatattttaattacataagtttcttatttccaacctttgtttaaatgcctacatat

SEQ ID NO: 747230 - DNA, 620 bp, Homo sapiens
gatacacacgttttatgatcaaatctagattcaatttttctttcttcatttcctagaaatcataagtttggaatattttaaaatattatttcctgaatataccatatgttcaactttgaatcatgtttattgaatatattatctaattttagtttcatactttaatgaagtgattaaatgaatttgttataatttaatattttaccccatctcatatttcaacttcyggaagactttgaaatagttacagaatataggggttgactttttctaccaatgcatcaaggcagtagagctcaaaatcaagtcgatataagaatcacagcagataggaaatgaacaattgtcgggctttataagataatgaatattatggatatttgaaggtttgatagaatcaatagtcacttactaccctaaaataattttcccagttcccagacatatttttaaaaattcctctatagataaaataaaaacctagatggattctctacttgttattgttaataattttgtacttgcaaatgacagaaaaaccttgcaaaattttcttgtatggagaatattttaattacataagtttcttatttccaacctttgtttaaatgcctacatat

SEQ ID NO: 747231 - DNA, 620 bp, Homo sapiens
gatacacacgttttatgatcaaatctagattcaatttttctttcttcatttcctagaaatcataagtttggaatattttaaaatattatttcctgaatataccatatgttcaactttgaatcatgtttattgaatatattatctaattttagtttcatactttaatgaagtgattaaatgaatttgttataatttaatattttaccccatctcatatttcaacttccggaagactttgaaatagttacrgaatataggggttgactttttctaccaatgcatcaaggcagtagagctcaaaatcaagtcgatataagaatcacagcagataggaaatgaacaattgtcgggctttataagataatgaatattatggatatttgaaggtttgatagaatcaatagtcacttactaccctaaaataattttcccagttcccagacatatttttaaaaattcctctatagataaaataaaaacctagatggattctctacttgttattgttaataattttgtacttgcaaatgacagaaaaaccttgcaaaattttcttgtatggagaatattttaattacataagtttcttatttccaacctttgtttaaatgcctacatat

SEQ ID NO: 747232 - DNA, 620 bp, Homo sapiens
gatacacacgttttatgatcaaatctagattcaatttttctttcttcatttcctagaaatcataagtttggaatattttaaaatattatttcctgaatataccatatgttcaactttgaatcatgtttattgaatatattatctaattttagtttcatactttaatgaagtgattaaatgaatttgttataatttaatattttaccccatctcatatttcaacttccggaagactttgaaatagttacagaatataggggttgactttttctaccaatgcatcaaggcagtagagctcaaaatcaagtcgatataagaatcacagcagataggaaatgaacaattgtcgggctttataagakaatgaatattatggatatttgaaggtttgatagaatcaatagtcacttactaccctaaaataattttcccagttcccagacatatttttaaaaattcctctatagataaaataaaaacctagatggattctctacttgttattgttaataattttgtacttgcaaatgacagaaaaaccttgcaaaattttcttgtatggagaatattttaattacataagtttcttatttccaacctttgtttaaatgcctacatat

SEQ ID NO: 747233 - DNA, 566 bp, Homo sapiens
catggtaagcacttctatgaaaagatttgctaggtaattttacctgaatgtatctgctctctcacagaatttatttttttcttattttgtaaatctatacatagactgaaacttgattgtcctacaacactaaaataagattgaggaaggtttgctgggttttcaagtgctgtattgattcctagaaaatatttatttctatgcattaatagttttatgctacctwctgtggatattatatctacttctcctcatacttaagtgacgatgaggcattataattaaataatcaaatgtgagctatatttagttatgtaacaagttaatgaaatatttcatgtaaatgagtggctagatggagaagtttttgaaagatcaatggggattgtgatgattatggaatatatatcaacaatgaaatgagtataatgctgattttcactacagagaatggtaatgcaattatgaccaataatataaaaacatgtttaaaattatctaaaagatatgttttatccttaaaatgcaataaggaaagggtaaaatatgccctatttgaatccctg

SEQ ID NO: 747234 - DNA, 566 bp, Homo sapiens
catggtaagcacttctatgaaaagatttgctaggtaattttacctgaatgtatctgctctctcacagaatttatttttttcttattttgtaaatctatacatagactgaaacttgattgtcctacaacactaaaataagattgaggaaggtttgctgggttttcaagtgctgtattgattcctagaaaatatttatttctatgcattaatagttttatgctacctactgtggatattatatctacttctcctcatacttaagtgacgatgaggcattataattaaataatcaaatgtgagctatatttagttatgtaacaagttaatgaaatatttcatgtaaatgagtggctagatggagaagtttttgaaagatcartggggattgtgatgattatggaatatatatcaacaatgaaatgagtataatgctgattttcactacagagaatggtaatgcaattatgaccaataatataaaaacatgtttaaaattatctaaaagatatgttttatccttaaaatgcaataaggaaagggtaaaatatgccctatttgaatccctg

SEQ ID NO: 747235 - DNA, 586 bp, Homo sapiens
ctttacagtttgtttggatattcacttaaagtgctaaggtaaggaaggaagccttccaggtattgctatataaaaaaacctgaaccccatgggcaatatctgcaggtttgtagtgccaagagtagaaaaaagttatgcagatcttgcttctcactgaacacyggcttaaaaaggtttgtttctctctgtatttgtagtgcactctgctttcattacacatggtggaatgacacagaaaaatattttgatttaattttacaccagtctatcaattttaagttgtgctctatgaatatacattgtagaggataatctctcactattaaatcaatcaaatttgaaagattattaaataatgtatgtgagaatgcctagaatagtgcaccttatgtcatataggctttcggtttatttaatccaggtatgaaacataaggaggggggataacaccaaggatgatcctagattttagacatttgtccactaattttacacgtgaaaagatggaaattcacagtgtttatctgactgcttaaggtcacacccttggggtaagaattaagagcctaggaaacatgtccagttt

SEQ ID NO: 747236 - DNA, 485 bp, Homo sapiens
ccaaatgcaggtgggataccggattccattttagcactctattacttgaggctgtcattcagttcttgttgctgtccctttgctatacaagacttaagtttttaaaagtccttttataaagtgcaaattacttacatagaaatgcttcattcattcataaatactgaacagcctggcactgctctcagaaaatgtaattggcatctatcttgtataaaaaaaggatagtggtttgtcatttcttaatatttaacgagatttcytaagtgttgcattaggtcctgtgtttttattccttaaatggggccatggaatagcagaagtgattccttacactgaaaactttgaaagggcaagctctggtatagattctacaaaatatgctaagatgtaagatgtcaggtgaccagaacattcttgccctccttcttggcctaacattacgcatttcagtctcttgcagataaagttattttcatgatgat

SEQ ID NO: 747237 - DNA, 640 bp, Homo sapiens
cagcatccttattatttagtgagtcacgaatgaggaacatttgcaggcatgctttggctgcatcgagggtggaatctaaacgttaaatctgatcagatacagacaacagccagacctttctattcctttcatggcgtggcatgtgacagtattattgaagatggacgcattgctcccaaagcgatgctcagactttgcttgttgttccacaatgctacctgtgagctgcctagccagcaatcccacagttttgaaagctcaatttcttggggcagaatgaaaagacattgaatatctgagcgactgtcttgaaataatttagcaaaactagatttgttttagagcacacaaaacatgaaakatataaaggggaggacctggcatgaacgagtggccactatttcccaagcattctccatatatttttttcatttaatagttacaattaccttgtgaagtaggtattaccatctcccatttccagatgaggaaacaacactcaaatttgcacaattaatcaggggcagggccactatctgaacccagcaccggctgactcagaaacttgagctgtttgtttgtaccggtgcatctcaaactacacaatagtatcatctggagttaaaaatacatcattgcc

SEQ ID NO: 747238 - DNA, 414 bp, Homo sapiens
tggacaagcacaaaagcacactgctggggtattttaatgtctttgtttgatatctgtgaattcaaaagagcttttaagccgtaaatagaaccctacctttgtcatctttaaaatctccgcatcaggtaggttagtgttgaatgtcacatcttttatgtaggttattgcaatttcatccccatccatctccatatacattttccacttacaatcctggaattaaaaacaaaattacagaatytgagaaagtgaaacaattttttttttagtctcaatatttcctaacacataaaatattctaaatgaagtattattggagtggcttttttttttttcctttttcaataaaaggacatgaaattagattcctatgtatatctaaataagccccagttagtgcagccttgagacata

SEQ ID NO: 747239 - DNA, 621 bp, Homo sapiens
ctttttgaagacccagctcttcctttcattgatttcctttattggtttcctgttttaaatttcattgatctatacttgaatcattgttcttttcttctggatatttttggttttgtttgcccttatttctcagagttcttgagttggcagcttttattactgatttgatacttatcctctttcctaatatatgcatttaggttattaatttccctatcaacagggagtgtctggcacattttaatatgttgtatttttattttcattaagtattgtgtattttctaatttcccttggtacttcctttttaaggattatttagaagtgtgttgtttagtttccaagtgttggaagattttcctcttagttttacgttattcatttttagtttgatttcatcatggtaagagaacacattctgtgtgatgtacattcttttaaatgtcttagggattgttgctctgacctaygatatgatgtatctgcttatgtttgctgagcacttgaaaagagagtgtataatgttgttattcagtgaggtattctataaaagttacttagctcttattggttgatgatgttgagttcttccatatctttgttttctgtctacttgtatta

SEQ ID NO: 747240 - DNA, 660 bp, Homo sapiens
cagggatccaaagaaggcctttagtaacttcaccaagcattgcctaaatagatattctttattttaaatcttgaaacaaaaatgctgtgcaggctcccaaatgctagtccagggggcccctgccaacctgcgcactcgtgctgatgtgctgatgcaattctgcgtggatctcaagacagagcttctcsggccctgcctggggcctccatgtggattctgagtggacgcgccattgcctgggaaggaggcttacgctgcttcccttgggtaattcaggcctggacatgaacttgcacatcacactgtccatgtgagcccactgcaaggtgacttgcatgctgcactcacttaactttccagcacagctagagacctgctcgacaccacagaagggctgggccaaaaccaaggactgggggcaatgccctaagtcttgatgttatcatactggaagaacccttcagtgcttactgtaagtgctaggctccactagtctgacttttgttcacttaaatggactccgtttagcaatgtaaggtcacactgttaccctgtttacaatactagataatgcatttaggataaaattgaatcctgaagcttagacttaacaggcaaaacagaacaaatttgactgttcagaaagtttcagtgaagagc

SEQ ID NO: 747241 - DNA, 630 bp, Homo sapiens
tatctgtttatatatttatcttcctaccctcaaaatgacaaaggcaaaaacatgtcaagctgtattttttttctcttgcacccaaattcaatgtggaattgagctataatttttctatgattggaagtcacgaagcaccaaagacaattgaatttaattgtgactgaatatatctgggattctgttgatgagctggcaaagtctgaatgagaccaaggtaktataataaaaccaaggtatacataattcaaaagtcatgatgtatttattccatacattatttttctatcatctgagcaaaattcaataattatgttaataacaaaattttcacaaatttgtcttctattgacagtaatgctctaaagcaggggtccccaacccccaaggtgcagaccagctctctgttaggaactggggcacacagcaggaggtgagcggcaggtgagcaagcattactgcatgagccccacctcccatcagatcagctgaggcattagagtctcataggcgtgtgaatcttatcctgaacagggcatgcgagggatctaggttgcatgagaatctaatgcctgatgaggtggaacagtttcatcctgaaatgattccccgacaaccatggtctatgga

SEQ ID NO: 747242 - DNA, 562 bp, Homo sapiens
atgagtccctccacatttcagatccttttgtcctttgtgcctggaagtcggtcagctcactctgaccttctgcctgtccctcatctgtcagagcagctgttggaaagtgaagcagttggatctagacaacaggggaagagttgtttgctttcgtgctggggaacgaagaaacccacacagctccttttgtgggttgtattaaaatgcatctgcaggcattattattcctaattataagtagcttaataatgtctctgaagcagagggtatatggagatggccaggagtcttgaattcgtrttgtagctcagctggaaaagggaaggattctttggcataaatacatgggtgttcaaattgatggctcaggggtccaggatttacagagccaagctttgggaatggttgtgggtggcacccactttcactgtgtccatggctgagtaacacccttggcctttccacagggcgtctgctcagcaacaccttccctgtcctgggcattcagttttgtgaggcagttttttatttttattaaaaatttttttttttgcaacagagt

SEQ ID NO: 747243 - DNA, 562 bp, Homo sapiens
atgagtccctccacatttcagatccttttgtcctttgtgcctggaagtcggtcagctcactctgaccttctgcctgtccctcatctgtcagagcagctgttggaaagtgaagcagttggatctagacaacaggggaagagttgtttgctttcgtgctggggaacgaagaaacccacacagctccttttgtgggttgtattaaaatgcatctgcaggcattattattcctaattataagtagcttaataatgtctctgaagcagagggtatatggagatggccaggagtcttgaattcgtgttgtagctcagctggaaaagggaaggatkctttggcataaatacatgggtgttcaaattgatggctcaggggtccaggatttacagagccaagctttgggaatggttgtgggtggcacccactttcactgtgtccatggctgagtaacacccttggcctttccacagggcgtctgctcagcaacaccttccctgtcctgggcattcagttttgtgaggcagttttttatttttattaaaaatttttttttttgcaacagagt

SEQ ID NO: 747244 - DNA, 625 bp, Homo sapiens
aggagcttctgtggggttctgtctgagctctaaattcttcctggaagttttggataaggaaacattcttgacatccttgcacttggacacagtactgctgatgctgtaactgaagttttaaactggtaataggttggcctggactttttrttaattgaaagtgaccacaaatccataagatttgttcaaatgtcattatgggtcaggaagaagagatttggaagaatttgtctgaagataagcaattggacaaaaaaccccacaaaaccatcttatgtttacgccctgctgacttcagactgttcaatacaatgattacacatttaagaacatagaggcatacatcccatataaattttagtgttagtattcaattcagtagtatattaaaagaatactacattatgaccaagtcagctttactacaggaatgtaaaggtggctctttatgaacaagtgcattaatgcagtttgtcacagcaagaggtcaaaagaaaatttttggcagtagtttggaaacctgttcacacaagacatttttatttccttagcatgggtgccacacagaaaccaatagaacaaacgccatacttgtttgggatggctatttatgctgctttgatag

SEQ ID NO: 747245 - DNA, 625 bp, Homo sapiens
aggagcttctgtggggttctgtctgagctctaaattcttcctggaagttttggataaggaaacattcttgacatccttgcacttggacacagtactgctgatgctgtaactgaagttttaaactggtaataggttggcctggactttttgttaattgaaagtgaccacaaatccataagatttgttcaaatgtcattatgggtcaggaagaagagatttggaagaatttgtctgaagataagcaattggacaaaaaaccccacaaaaccatyttatgtttacgccctgctgacttcagactgttcaatacaatgattacacatttaagaacatagaggcatacatcccatataaattttagtgttagtattcaattcagtagtatattaaaagaatactacattatgaccaagtcagctttactacaggaatgtaaaggtggctctttatgaacaagtgcattaatgcagtttgtcacagcaagaggtcaaaagaaaatttttggcagtagtttggaaacctgttcacacaagacatttttatttccttagcatgggtgccacacagaaaccaatagaacaaacgccatacttgtttgggatggctatttatgctgctttgatag

SEQ ID NO: 747246 - DNA, 625 bp, Homo sapiens
aggagcttctgtggggttctgtctgagctctaaattcttcctggaagttttggataaggaaacattcttgacatccttgcacttggacacagtactgctgatgctgtaactgaagttttaaactggtaataggttggcctggactttttgttaattgaaagtgaccacaaatccataagatttgttcaaatgtcattatgggtcaggaagaagagatttggaagaatttgtctgaagataagcaattggacaaaaaaccccacaaaaccatcttakgtttacgccctgctgacttcagactgttcaatacaatgattacacatttaagaacatagaggcatacatcccatataaattttagtgttagtattcaattcagtagtatattaaaagaatactacattatgaccaagtcagctttactacaggaatgtaaaggtggctctttatgaacaagtgcattaatgcagtttgtcacagcaagaggtcaaaagaaaatttttggcagtagtttggaaacctgttcacacaagacatttttatttccttagcatgggtgccacacagaaaccaatagaacaaacgccatacttgtttgggatggctatttatgctgctttgatag

SEQ ID NO: 747247 - DNA, 620 bp, Homo sapiens
atattataaactactatttgttacttggtagcttcctgaaaagttttcagtcatttttttcttacatagggctctgatgcagttgctaagtttctactattttttccccagttttctcaatcctgcaggtcattcccattgtccattcatttaaagaaaatagttgttaatagctaatactaactaagsttctactaagcccaaggagtgaaggaactagtgcctagtcatgggctttttactaaacaaatattataaatgaatgtctacatggcaacttataaaagagagtagagagctcatagttcaaaccatgcattccattgcaaaggcagataaggcctggatgtaaaaggtagagttgaacagcacatctaagtaacaccaaaggcaaactttctccattttttaagggaagggttgaaagtagctaatatctctttactatgataggaaaatcccaaagatgtttttgttctgagttgaaacaagttctaagtggagttgttattcacactttattaaaaagatgaaggatggaaatgtgcaatatacgattcaggagggaaaggtcaattaaaggatttaggaataaaaaaataatagtttggaaatagacc

SEQ ID NO: 747248 - DNA, 631 bp, Homo sapiens
atgataataatactgagaaagttaaattgaatatagttggaaataaacttcatgtttccaaagcttctctacaaaggacaacaaattttgaaacaaaatttcaaagaacaacaattttctcttgacagtgaaatatctgattagaaaaaaacagggccgggcatggtggttcacgcttataatcccagcactgtgggaggccaacgagggtggatcatgaggtcaggagtttgagaccagcctgaccaacatggtgaaaccctgtctctactaaaaatacaaaaattagctgggtgtggtggcgggcacctgtaatcccaactacacgggagcctgaggcagagaatggcttgaatccagaggcagagtttgcagttagccgaratcccgccactgcactccagggtgggcaacagagcaagactccatcaaaaaaaaaaaaaagtataaattttccaagtatttatatacaaatgataacaccaaaaccaaaaaccaaagcttattcactcttaatctaagtaagcaagtttggatagacccccactaagtatgagcatagtctttaatgctacaatgtaaacaaatatacttatgtcatataaactactttattattctggcaagttgg

SEQ ID NO: 747249 - DNA, 599 bp, Homo sapiens
aattaccgtcagtatagctgatctggctactaacattactaaacatcttagttgtcaaccccagaggccagtgctgatcacctaatataaacgttgtttttcaaaagaatagccatccatctggtggcaggctcactacattggacccctttcatcatggatgaccagtaatttattcatgcagagaaagatrtatatctgagttgcaaatatacctttttcccggtaacacttctgtttgtttgttttctggtgatataactaaatacctgagactgagtgatttataaagaaaataaatttttattttattgctctggaggctgggaaatccaaggtctagggtctgtgtcttgtgagggctttcttgctggtagggtttctctgcagagttctcttatggcccagagcatcacatggtgatgggggctcatgaaagaaagtcaaactgtccttttataacagatccactcttgtgatgaccaacccactcccacaataatccattaatctattaactcattaatccattaatccacaaaaggatgaatccatttatgaagggtgggccctcatgatgcaatcacctcttaaaggcc

SEQ ID NO: 747250 - DNA, 599 bp, Homo sapiens
aattaccgtcagtatagctgatctggctactaacattactaaacatcttagttgtcaaccccagaggccagtgctgatcacctaatataaacgttgtttttcaaaagaatagccatccatctggtggcaggctcactacattggacccctttcatcatggatgaccagtaatttattcatgcagagaaagatgtatatctgagttgcaaatatacctttttcccggtaacacttctgtttgtttgttttctggtgatataactaaatacctgagactgagtratttataaagaaaataaatttttattttattgctctggaggctgggaaatccaaggtctagggtctgtgtcttgtgagggctttcttgctggtagggtttctctgcagagttctcttatggcccagagcatcacatggtgatgggggctcatgaaagaaagtcaaactgtccttttataacagatccactcttgtgatgaccaacccactcccacaataatccattaatctattaactcattaatccattaatccacaaaaggatgaatccatttatgaagggtgggccctcatgatgcaatcacctcttaaaggcc

SEQ ID NO: 747251 - DNA, 610 bp, Homo sapiens
agcactagagtagggagagagggagaggacaagggcttaaaaacttcctatctggtactgtgctcactcctcagcatcacacaatctacccattccaagtgtacacttttagtcaatgatcaatcattccggggcttgtcaatagaatgtgttcacacttagaatgttgcataattatggtggttgccttattgtggatgcaataacttgagtaatatactaaatagagatccagaataataaaattttggaggatcatatgaaagtatggttaargtagttcaactaaagaaataaaacaagaatacactggttttcatcattccacagaattcattttttctcaaggagatattttctatcttcatttattctctttgccacctacaagtttctgcagcaacatgtgtctttttgctagataatagtttcagttttctctgttcttaagtttaattagaaatttcatagagatagttagatgtcgtttttgccaattttcccctgaattcagctagcgtctaagacgtgatacacggaaggataaagtacttgataatttcctcaatataagaacagtgatctgctcaatactgatagctatagtgaa

SEQ ID NO: 747252 - DNA, 605 bp, Homo sapiens
tttcactatagctatcagtattgagcagatcactgttcttatattgaggaaattatcaagtactttatccttccgtgtatcacgtcttagacgctagctgaattcaggggaaaattggcaaaaacgacatctaactatctctatgaaatttctaattaaacttaagaacagagaaaactgaaactattatctagcaaaaagacacatgttgctgcagaaacttgtaggtggcaaagagaataaatgaagatagaaaatatctccttgagaaaaaatgaattctgtggaatgatgaaaaccagtgtattcttgttttatttctttagttgaactacyttaaccatactttcatatgatcctccaaaattttattattctggatctctatttagtatattactcaagttattgcatccacaataaggcaaccaccataattatgcaacattctaagtgtgaacacattctattgacaagccccggaatgattgatcattgactaaaagtgtacacttggaatgggtagattgtgtgatgctgaggagtgagcacagtaccagataggaagtttttaagcccttgtcctctccctctctccctactct

SEQ ID NO: 747253 - DNA, 552 bp, Homo sapiens
aatgatttagggaatttaactcattaacttaaataattagaaattaattgacatggggcgatgaaggtaaccaaagaatgccatgtcatcctaacttatatcaaggcaatgcagaatcaattttcagtgttccagcagtatgatamcaaccagtaatttaactattatttataaaattaaacatagagaccaacatacagatgtcaatcatttgcctttatgtggactgcttacttaagttacctgctcacttgaaaatatacaagatgtatgtttagtaagaaatccttcactaactaacttatccttaagtttttaaaaatatgtctattgttataatgtccatatgcctttaaaacaattattttcaaataacttgacgaagaatcagatgacaaagttagtaatttagcctaccgagttattcattacccttcaagattaacaaattctgaatacacagaagaaaacaggaagaaaaaaggaattctctattgcattgtaaataaatgacatagacttattctcttcttccagatttaaaactcacag

SEQ ID NO: 747254 - DNA, 531 bp, Homo sapiens
taaaaatgtaaaataaaacaaattttattaattaaattaaaacatgtatttaaaagctgttgtttatcatggtgtatcatatctgatagttttatatgttgtctgctagcagaacggaaaattgtaaaacacttttggtaaacaatttaatatgttttaatgtacttatcagatttttgaaaagagaaaaatattagaaagtcaaatagggagatggtatgtacttactatattatggtatgtatataaaatattctatatttgaaatatgcatatgcatataataatgtaaagtgaaaaaaatctctccctggacacagactgtatttggagtttgtaaacgatcytgtttctacctctgaccccatgaccttgtgggcccactcactggcactcctccccaaaccctaactcctattgcaataggtcccaatagcattatagcctaccagacggacagcatatatgtctccctctctaaaagacaatgatatcatggttattattaatgtatgatggtagatatacaac

SEQ ID NO: 747255 - DNA, 654 bp, Homo sapiens
  misc_feature 1, 2, 3, 4, 5, 6, 7, 8, 9, 10: n = A,T,C or G
nnnnnnnnnntttaagtataaaataaacaaagctttatcattcagggccctaattatattagtccataaaaaattctggttacatccctgccaaccaataccttgtagagtaggtgataatcagcaacacaaaattttaacaattctraaaagcaatacataaattattttcttgtgttattctggttacaaaccatgatacttatttacttttcagaaattttaggaattttgtgatgaaagaatttggcaacagagtaaattgaatgttggtattataaactgagctaggaaacaaccactcgaattctatcttatgaaagagattgagaattcatataatttcttccttaaatgttggtagaagtcaccagcaaaccgatctgggcctggtacttttcatttctgataatcttgaatttttgaaactagagaatatagtggtgatttcttttcataagcttttaattaaaaacatcaaaggacttctgcttccagccaagatattgtaacaaataacaagacctggatttactttcccatctgaaacaacaaaaaaaagttgaacagaatacgtcaaacaatggtttttaagacatttgagattaggcaacaaaggacaatgatcactaccagatgaaaaacaaaatgagg

SEQ ID NO: 747256 - DNA, 584 bp, Homo sapiens
atacgataagctagttaacctcaattctaataagaaaacggcctattaaaacagtgcctaaatatccttttttagaaactatgattagaaaatcctaatatgtgtcaagtatgtacctgtggagaaacaggatactctcatacattatcagtacaacctctatagattacaaaagtgcaaatgcatatacgtttaacccagatatcctacttctagaattttttctagatatatccatgtaagtacctaacgataaactgtacagtggtttttatggtcaaccatatgcattagcaaaaagttggagataacataaatgctcagtacatgyacgctagcaaaagttatgtacatatctgtataaaacaaagtggaagctctctgtgtattagtagggaacaatctatcagacatagcaaaaaaaagcaaaagttatagttattatataattcaaaaattatagttagtgaaaaaagtaagagtgcaccacatttttaaaaaaatcaaaagttatagttattatataattcaaaacttatagttagtgaaaaaagtaagagtgcacgacattttaatcactagcc

SEQ ID NO: 747257 - DNA, 518 bp, Homo sapiens
aaaaccaatcatgcctttccaacagtcccccaaagtcttaattcatttcagcattaaaccaaaagtccacagtccaaagtctcatctgagaaaaggcaagtccattccacctatgagcctgtaaaatcaaaagcaagctagttacytcctagatacaatgggggtacagatattgggtaaatacgccattttaaatgggagaaattggccaaaatacaggtgcactgtaacaaaggggttacagggcccatgcaagtccaaaatctagctgggcaggcaaattttaaagctccaaaatgatctcctttgactccaggtctcacatccaagtcacactgatgcaaaaggtgagttcccatggtcttaggcagctccacccctgtggctttgcaaggtgcagccttcctcccagctgctttcagagtctggccattgaatatctgtggtttttccaggtgcactgtgcaagctgttgatggatctaccattctgggggctgaaggatggtggtggccctc

SEQ ID NO: 747258 - DNA, 603 bp, Homo sapiens
ccagctactggctgctcaatctaagctgggctaccttagcaaagtataagcaaccttccacatttgcagccactttggccagtcaactgagtttatgcatttctgtttacacagtgtcctgattgcacacctattaaacgggtttagatttataaatccctttttgatgttctattttgtagtccttcaaactgctgcattcagcaacctgggtgaaggtaatttctcaagatgtagcatcacacccggtgcttgacctgtcgattccaagactcaaagagcaaatggcaagttgaacacttattatcatgaattaagaggtaaaaatctttgtsaatacagcagactagcttttcagcgtctagagaacacaccccaagggcttgtttttatactgtccttgagctaagaatggatttttatattttttaaagagttatttaaaaataaaatattatgtgactgaaacatatgcagctccttaaagcctaaaatattactatctggtcctttaacagaaaaagcttaccaaactctgtcagaggatatattccgggatttctttttaagatttccacaagttagttttccaaaacctaccat

SEQ ID NO: 747259 - DNA, 608 bp, Homo sapiens
ggaagaaattgcaagtgatctatttgacaggagttaacatccattccattatctttttaagtgtttcactgtcaagtcaggaaggcagtaaaaatgcccttcagcagttgaacacagcgtccacctttggctcagtctcacagacaaacacccagaatctgtgcttctcagctgtggtgcctgtgcaaatgctggaactcaaaagaatatttggtagtagacacgcatacgctgcctaataaaattatgtaagtttaatataaacrgaacttaaaacgtcatataaaatgttacttaatttgatcagaaaactgagttagattttataaaggcattatatataattttaataggaaactatgaaatttatgtgcacttggtgtataaatgaccgaattttgggcgagtcagtaaaggtcacatatgactgtgagacattgttgatgaaatgctcccacaggtcgcatattgcacatgcattttgatttgttattttatctgaggtcgattttccttttttgaaatggagttttggtcttgctgccctggctggagtgcaatggcgccatcccggctcactgcaacctccatcttccaggttcaaacga

SEQ ID NO: 747260 - DNA, 517 bp, Homo sapiens
tggagtatagcaacttgattagtttccttaaccttccatttcccaagtcatttcctgcagaatgccatgttatgttcctttcctaaaacgtggcagtatttatgccattaggagctcaggctctgggggccgactggaaaccaaattgggcttaattactggatctgctactagctatgtgacttggagttgtattcggcttcagttttctcacctataaaactggaataataatgggaccttctcataagattaaatgggataaagcagatttagcacagtccccggacatggcagagtatcaaacattrtaatggttttaattttttttcttttttgagacagagtctcgctctgtcgcccaggctggagtacaatggcatgatctcagctcactgcaacgtctgcctcccgggttcaagcaattctcctgcctcagcctcccaagtagctgtgattacaggcacctgccagtatgcctggctaatttttgtagttttagtagagacagggtttc

SEQ ID NO: 747261 - DNA, 578 bp, Homo sapiens
ttgggaggaactgaggctgcttttaggctaaaacaaagacagtcagctctccatattcatggtttctgcatccatggattcaactaactttgtatcaaaaatatctggaaaaaaaaggttacctctgtattgaacgtgtacagtctttttttcttgtccgtattccctaaacgatacagtayagcaacaatttacatagcgcttacattgtactaggtattttaagtaatctggcaatgatttagattatacaagattatgtgcaaatactacaccattttttttctcagagacttgaccatctgtggattttggtatccatgggaggtcttggaagcaatccccttcagataccaagggatgactgcagtttcagttcattagcccactctaacatagtcataagaacaggcactactccccatatgccacaaagtaagaggaccaaaaggagatcacgatgtatgattcaaataagtaaatgtaataataaagaaaatgtggctaaaaaaaaagaaacttcaaagtgtgatattgttaatgtgtctcaaatatttggcagaatgatttgaagagac

SEQ ID NO: 747262 - DNA, 613 bp, Homo sapiens
aacatatacatttaaagtaatagcacaccaagatgtaatagtacaccaagatgtaaaattgacaatgcaatcactcattccctaattaaagagcctttccgacaaatcttcattcttagattttcaccgtttctgtttcctgatgaattaaagtgtgaggaaaatgggctgagggctactgggttttacactaagaaaacatttttaaaacagtaattatttacagtgggttctagcttttgggcatctcaaccaaatgagaataaaaataacactgtcctttcatgcaggtgagtcttccctaacaaaacaaatgtgtgcatgcacaaacacacagacacacatgcacacacacacacacacacggagtcctaaggtagagttgcamccagggtatgtttcaattcaaggcagcctccctaacccccatctctacccataggacagagaatttccagttacttttgaactcaataattcagttctggcttcagcttagagaaaatacccacggatcaaaatatctgagaagcagaactcccgaatctgtggaaaaggcacttgtcaattttcatggaaagtaattatacagaccaatcatgattttcaccac

SEQ ID NO: 747263 - DNA, 612 bp, Homo sapiens
actcctgtattacttgtgctcctcaaaagcaaatgcctatacatgtatcactcgcatcacagcacgacctgagatctatttctacttctacccttagcttatttgagcattcattgttaaacagaaatggtttacctgggactggcttttcccctcttctgtgtgaccctggttgaattataccattaatctgggcttcctttttctcatttgtaaaataagggagttgagcctgttggtgtaaaagaccttcccagcactgacattctgtgattctattacaggttcccttcatgctctgaggctctgggaatccctgctaggtaaatgacgaagggtggggtggggggatctctttccagagaaagagagcaaaatgtaaygttccacactcttacctgaagtccactatttcaactgaagtaaaataacgactcagagagggcgatgtactgtacacatctgtgagctaaaacaaacagaagcaaattaaaccacacacattaccgacagatcatattacacatcacctgacaaagcaaaactgcttctaaggcagaggagattccactccagcctggaatcaacgttatctggaagctctggatcaag

SEQ ID NO: 747264 - DNA, 580 bp, Homo sapiens
cttctgtgcacccacaggtccaataccacgtgtaagccctcaagccttggggcttgcaccctctcaagcaatggtctgagctctacattggccccttttagccatggctgggatgcaaggcaccaagtcccaagactgcacaaagcagcaaggctttgrgcctggcccatgaaaccattttttactcctaagcctccaagcctgtggtgggaggggctgccatgaagatctctgacatgccctggagacattttctcattgtcttggagattcacatttagatccttgttacttatgcaaattcctgcagccaggttgaatttctcctcagaaaatgggtttttcttttttattgcattgtcaggctgcaaattttctagactttcatgctctgcttccctttttgatataagttccaattccaaaccatatctttgtgaatacataaaactgaatgcttttaacagcacctaagtcatctcttgaatgcattgctgcttagaaatttcttccaccagataccctaaatcatctctctcaagttcaaagttccacagatctctagagcaggggcaaaata

SEQ ID NO: 747265 - DNA, 436 bp, Homo sapiens
ttttttgttgttgtttttatttatttagagacaaggtctggttctgttgcccaggtttgaatgcagttgcatgatcttggctcactacaacctccacctcctgggttcaagccatcctcccacctcagcctcctgagtagctggcactacaggcactcaccactatgcccggctaattttttttttttttttttttttgtagagactgggtttagccacgttgcccaggctggtcacaaactcatgarctcaggctatctgcctgcttcagcctcccaagtgctaggattaatgggggaggctatacatgtgtggggctgggggtgtatcagaactctgtaccttcttctcaattttgctgtgaacctaaaactacgctgaaaaataaagtctttaaaaaaaaaagtgtgcataatggtaactattgttctttcta

SEQ ID NO: 747266 - DNA, 436 bp, Homo sapiens
ttttttgttgttgtttttatttatttagagacaaggtctggttctgttgcccaggtttgaatgcagttgcatgatcttggctcactacaacctccacctcctgggttcaagccatcctcccacctcagcctcctgagtagctggcactacaggcactcaccactatgcccggctaattttttttttttttttttttttgtagagactgggtttagccacgttgcccaggctggtcacaaactcatgagctcargctatctgcctgcttcagcctcccaagtgctaggattaatgggggaggctatacatgtgtggggctgggggtgtatcagaactctgtaccttcttctcaattttgctgtgaacctaaaactacgctgaaaaataaagtctttaaaaaaaaaagtgtgcataatggtaactattgttctttcta

SEQ ID NO: 747267 - DNA, 532 bp, Homo sapiens
acacaaagagcacaagtaaaactaaggaagatgtgtgaactgtatcaatgtcaatagcctggttatggcattatgccatagttttgtaaactgttaccactgggggaaactgggcaaagtgtaggaaggatctctctgtataattattacaacagcatgtgaatctacaattatcccaataaacatttttattggggggaaaaaaaagttcatgttctcaagtgtgaactcagacagtgcattctttcaccgggaatataaaatggcccactctttccagaaggcwtttggcaatgctaccaaaagtgagaaactcacataaccttttatccaacaattccatttttagagtattaactgtaacgaacaaattgtaatgtgttgaaaattaagggacaaaagcatttattcagcaatggcttttatacttaaagactagaaacaactaaatgtggtacatacacactatgaagttctacctagtcatcaaaataatcttttggaattaaacagtgaacctggaatgatagtc

SEQ ID NO: 747268 - DNA, 591 bp, Homo sapiens
gtcaggagattgagaccatcctggccaacatggtgaaaccctgtctctactaaaaaaacaaaaattagccaggcatagtggcatgtgcctgtaatcccagctactcagggggctgagacaggagaatcacttgaacctgggaggcagaggtttcagtgagctgagatcacrccactgcactccagcctggcaacagagcgggactccatctcaaaaaaaaaaaaaaaaaaaaagagttccagtaaaggtttgtttttaaaggaaaaaagaggccttttccctattttgatacatacattgtgcctgaaaagaaatcagtcatgattacttttgctataactatgtgttgaatgagatagtcatcattgaatgttgttataataaactacttgaaaaaaagttttaaaattacagtcctgataaggtgtgcatgtggagcaaactgttaaaacaaaagtctcttggtgccttagttttctcattggaagctgatttcttcttccctcatcccccacccttgctgaccatggcaggtagctgctttaatcactaagcatttattatgataggcaattcgctcctttaaaacaa

SEQ ID NO: 747269 - DNA, 584 bp, Homo sapiens
acatgcggcagtttgaatctaagccttatcttgctctcaagagacataatagcaaatagaaacaaaccccacaaaaatgcaamtgcctccttccatcaggacagtccttcatgtgtgggcccagaaaaggaagaactaggggacccagagctacctgcgcaataacatggccttttcgcttttaatttcagcagatacctatgaaacggttattattaaaggtactcttcacaattcttaggataggaagatgaataaaacattcttattcttaaataagggttcaagcagcagaattccaagaaaacagcaaatataggtacaccttgctctatgtaacagatgagtccccagatatctgtgttcaaacagaatggttacagatcaaagtatatatcaaatgcaataggaagatgaggattttaagaaaacttgaggctaatcctcttatgagaaattaagtattcttttctgtaatgctaataaggacatccttttgtctttattgtaaatatagactgccctagctgtgattttcttatgtcaaatctgggtagacccatacccataatatgtgcatatat

SEQ ID NO: 747270 - DNA, 501 bp, Homo sapiens
ccgtggccttttcaaaaggtgtttctggacctctcttgaggccatgtgatatgagtggttctgggtccttgtacctgggcacaccatagctttgaactggtcatagctcctcagccacattttgatcgatgtttgtgctaagtgcacaaaccatcatgccaatatctgacagatcaatggagccccctgaatgccaggctatgaggtcagtgggaagctacaagagggtgtttgctcagagcctgcatggggttccagttctctccctccatctccatcctcctgcccccaccaccacccgcatgccccctgctgcccctagctgctaaggactcygtttaaactgttgcgggaccccaggggaactggccagggctcctaggaaagcccagggcaacaacccaggagaaagagctgttctcccagctccccgggctgctttgtttgtttctccctttcccaggatgtcccattctcagctaatgaacagtttaagtgtgc

SEQ ID NO: 747271 - DNA, 640 bp, Homo sapiens
catgaatgttcatggagttttcattcacaatagccaaagagtagaaacagcccaaaagtctataaactgataaatggatacataaaatgaatgtggtatatccagaaaatggattattatttggctatgaaaaggaatgaagtactgatgtaaggttcatgaataaaccttaaaaacattatcctaagtgaaagaagccagtcacacacacacacamaaaaaccacattgttagacttcactcatataaaatgtccagaataggccaatataaagaaacagagaatagaccagtacttgcttaggacttggaggagaaggaaataaggaagggtctcaggtttctctctggggtgatgagagtgtcataaaattgactgtggtgatggttgtacaaccatgtgaatatactaaagaacattgaatagtctgctttaaatgggtgaactgtatggtatgtgaattacatgtcaataaactgatcttggagaaaaagaaaaaccccgtaaaggtgattggaaaggaatggccagagatataaagagcacagcatgtcacagaatgtttcatgaaggaggaggtggtcatcagtggccaatttggtcagagagcaagtaagacagaaccaaaaagtgcccagc

SEQ ID NO: 747272 - DNA, 640 bp, Homo sapiens
catgaatgttcatggagttttcattcacaatagccaaagagtagaaacagcccaaaagtctataaactgataaatggatacataaaatgaatgtggtatatccagaaaatggattattatttggctatgaaaaggaatgaagtactgatgtaaggttcatgaataaaccttaaaaacattatcctaagtgaaagaagccagtcacacacacacacaaaaaaaccacattgttagacttcactcatataaaatgtccagaataggccaatataaagaaacagagaatagaccagtacttgcttaggacttggaggagaaggaaataaggaagggtctcaggtttctctctrgggtgatgagagtgtcataaaattgactgtggtgatggttgtacaaccatgtgaatatactaaagaacattgaatagtctgctttaaatgggtgaactgtatggtatgtgaattacatgtcaataaactgatcttggagaaaaagaaaaaccccgtaaaggtgattggaaaggaatggccagagatataaagagcacagcatgtcacagaatgtttcatgaaggaggaggtggtcatcagtggccaatttggtcagagagcaagtaagacagaaccaaaaagtgcccagc

SEQ ID NO: 747273 - DNA, 640 bp, Homo sapiens
catgaatgttcatggagttttcattcacaatagccaaagagtagaaacagcccaaaagtctataaactgataaatggatacataaaatgaatgtggtatatccagaaaatggattattatttggctatgaaaaggaatgaagtactgatgtaaggttcatgaataaaccttaaaaacattatcctaagtgaaagaagccagtcacacacacacacaaaaaaaccacattgttagacttcactcatataaaatgtccagaataggccaatataaagaaacagagaatagaccagtacttgcttaggacttggaggagaaggaaataaggaagggtctcaggtttctctctggggtgatgagagtgtcataaaattgactgtggtgatggttgtacaaccatgtgaatatactaaagaacattgaatagtctgctttaaatgggtgaactgtatggtatgtgaattacatgtcaataaactgatcttggaraaaaagaaaaaccccgtaaaggtgattggaaaggaatggccagagatataaagagcacagcatgtcacagaatgtttcatgaaggaggaggtggtcatcagtggccaatttggtcagagagcaagtaagacagaaccaaaaagtgcccagc

SEQ ID NO: 747274 - DNA, 528 bp, Homo sapiens
ggactgggccccagctgcccactgtagtaagcaacatatctgcaaacatttgttggctttcttcctgcactgtctcactttctcttctactttacttttgcttcatgtgatcacctcctaaatcaactgcatccaagcccttatcttaggtctgcttttggggaaatctagactaagacagagagtgctaactgggtggaactgcgattttaaagagccagctgtgaatctattcataaaatgaagacccaaacaaaatttacatcactttacatgatgttccagtaatctactgctgtgtaataaatcaccccaaaacaaagtggttttaaacaacaattattttgctattatgttctctcacagatctagtggctgactrggctcagctaggcagtttgtgctgggactcactcacctgattgcagatacaagtagccataggacagatcatgtctaaggcttcctgacttacacgtctggaatttgatgttggctgacagctgagacttctgcctaggctgtcag

SEQ ID NO: 747275 - DNA, 625 bp, Homo sapiens
tttgggcctcaaattcctcatctgaaaaacagaagcggtggtcagtggttttcaaacctacctgtatgttacaatcacctggctattttattaaatccgcatgtgcagaccagtatcccagagaatcaataaaatctctggggaagggacatggctattagagagttcagttcccccagatgattccaatgtgagccaaggctgaaaaccactgagtaggaggatgcttyctagttccttctaacacacaacgaatcccaaggtgagctgcatatcggaatcatctgaggaacttgtagagcctaccattaccagggcccatcctggctcaattcaatcacagccttagcggtaccaaagcactggtattgctttaagagctcgccagatgatttctgatgcatcaccatgactgagactcactgtcaagacacgtgtttgacagaacaactagccttagacttattgaaatagcaaggttttgtctggttacaagcaggttgttgacaataacctagaattacataaaaatttctaggaaaacaaaatatacacaaacccccccacccacttcctgtgagctaagcaatattccaaggacacctactgataattaaggaataat

SEQ ID NO: 747276 - DNA, 625 bp, Homo sapiens
tttgggcctcaaattcctcatctgaaaaacagaagcggtggtcagtggttttcaaacctacctgtatgttacaatcacctggctattttattaaatccgcatgtgcagaccagtatcccagagaatcaataaaatctctggggaagggacatggctattagagagttcagttcccccagatgattccaatgtgagccaaggctgaaaaccactgagtaggaggatgcttcctagttccttctaacacacaacgaatcccaaggtgagctgcatatcggaatcatctgaggaacttgtagagcctaccattaccagggcccatcctggctcaattcaatcacagccttagcrgtaccaaagcactggtattgctttaagagctcgccagatgatttctgatgcatcaccatgactgagactcactgtcaagacacgtgtttgacagaacaactagccttagacttattgaaatagcaaggttttgtctggttacaagcaggttgttgacaataacctagaattacataaaaatttctaggaaaacaaaatatacacaaacccccccacccacttcctgtgagctaagcaatattccaaggacacctactgataattaaggaataat

SEQ ID NO: 747277 - DNA, 654 bp, Homo sapiens
ggtacacattcttaaagataatagaatgaacttaaatttgttatactacttgaaggggtcacttatcttttcactataatttttaagttacattttcccctcaaaaatacattgctgacttaataatactgtcaactggaaacagttcatgaaaataacaagacactcaattacaggagtgatttttagggtaatgtcgagagtaagtttcttctgttcactcaggagtctgtgtgcttttctcttaggctacaactttatgaagttagttctcacatggcactctgactgcacacttaaactgcctagcttcaacatttttaatayacacataaaaatcatagaggactttaaaaagttgacttcttaaatctcaaatgcccaaatggtggtcactcaggatgtgtgctactctgcacttcaaatgtggttgctctaaattgaaataggctataaatgcggatacacactgaatttcaaatagtttaaaaaaatgtaaagccgggcgtggtggctcatgcctgtggtcccagcactttgggaggctgaggcgggtggatcacaaggccaggagttcaagaccaacctgggcaagatggtgaaacaccgtctctaccaaaaatacaaaaaaactggccaggcgtggtggcaggc

SEQ ID NO: 747278 - DNA, 641 bp, Homo sapiens
taaaaatgctttcctgtaacagtttttaaatatcactttaggaaaaatgcaagagtatattcaaaaataggagcactgaaaataaattaagaaaaattcctaaaactatgtattatttaacttaattgtagcttttagattgtaagatcagaatcactgtcagctgctcaaaagacaaaataacccaccatttaggaacattcattcattcacttagctcatatttattgagttcagctacctgcacgcacccatctgggcaacagtgacacagcagtgaatgtayagaaagatatctggataaaccaatgcaacggagaaacagatagaagcagacaaatacacacataaagcaaatcttaaaacataactttggttttattatactcaaccttgttataataacatcagaagtagtttaaaaagtattatgtatataaacacatattctgtctatgaggagctcaggaaacaaacatacccaacacttgagtttcatcataggagattattaacatagactgaatgacaagaacggaattccactccttaaaaattgtatcaacagtcatttaactccttgagcagcttagaagctggcagatgattagcaggaggctatactaccagctcagtagatg

SEQ ID NO: 747279 - DNA, 644 bp, Homo sapiens
ctagctagatagataaaaggttgaatgagggtggctagaatccgcctctgaacagccccaggaagagatcattacacgtccccagctgtctcagttatttacccttgaagacaggaaactgtacgcagatgagtttgggcctcctctagttctagaattccccaactattaaagggtaaataagagatggctactgatcaatcagctaaattgaaagctcagaacccatgctattacttggggcaagataagtagaaaaaaaaaaaggcacaaattcaaaggaagatttgccttacctaggctgatcaaacagctgtgttgtgggctcccagatgatctctcccacctcctctaccacrcaggagaatataaatagcactcagtttacctgtggctagccacaagcagaagtctggtcacatgactgggcaagctgggagtaaccatcaagtagacatgaacactcagagggcaggtttgctctctcgctacagctcactaggttggactctgtcaggaccctctgctcctaaccctgactgattcattttgctctgggctatggggaggaagttggggggcacttataaggaactattcaagttcctcagggctagaaaggtcacagtaatagaatttgctct

SEQ ID NO: 747280 - DNA, 559 bp, Homo sapiens
ttagctgggtgtggtggcacacacttgtagtcccacctactcaggaggctgaggaggcaggatcaattgagtctcaaagatcaaggctgcagtgagctatgatcatgccactgcgctctagcctgggtgaaaaagcaataccctgtttcaraaagaagaagaagaaggagaaaaaaagaggactttgtcttgcaacttggaaaccagctcagccatagtaggacggaataactgggcagaatcctgaggctcccattccaggccctagctcctggatggtatttttagacatatcctgggcaaaaagggaatgggctaccttaaagggaaagacccagtcctggaaggatttgtcatctgctgacaaaagactccttgggccctcacgagttagcagtggtagccaggaagcactcgccaagggccttgagtgagactcagagacatgatggcttcagatgggatacagcccattcccagctgtggtggctacggggagagactccttctgcttgagaaaaggggagggaagagtacgggaactttgttttgcagctta

SEQ ID NO: 747281 - DNA, 559 bp, Homo sapiens
ttagctgggtgtggtggcacacacttgtagtcccacctactcaggaggctgaggaggcaggatcaattgagtctcaaagatcaaggctgcagtgagctatgatcatgccactgcgctctagcctgggtgaaaaagcaataccctgtttcaaaaagaagaagaagaaggagaaaaaaagaggactttgtcttgcaacttggaaaccagctcagccatagtaggacggaataactgggcagaatcctgaggctcccattccaggccctagctcctggatggtatttttagacmtatcctgggcaaaaagggaatgggctaccttaaagggaaagacccagtcctggaaggatttgtcatctgctgacaaaagactccttgggccctcacgagttagcagtggtagccaggaagcactcgccaagggccttgagtgagactcagagacatgatggcttcagatgggatacagcccattcccagctgtggtggctacggggagagactccttctgcttgagaaaaggggagggaagagtacgggaactttgttttgcagctta

SEQ ID NO: 747282 - DNA, 542 bp, Homo sapiens
tccagctttgctctgttgctggtgaggagttgcgttcctttgcaggaggagaggcgctctgatttttagagtttccagtttttctgctgttttttttccccatctttgtggttttatctacctttggtctttgatgatggtgacgtacagatgggtttttggtgtggatgttctttctgtttgttagttttccttctaacagacaggaccctcagctgcaggtctgttagagtttgctagaggtccactccagacactgtttgcctgggtatcagcagyggtggctgcagaacagcggattttggtgaaccgcaaatgctgctgcctgatcgttcctctggaagttttgtctcagaggagtacccggtcgtgtaaggtgtcaatctgcccctactgggggatgcctcccagttaggctactcgggggtcagggacccacttgaggaggcagtctgcccgttctcagatctcaagttgcgtgctgggagaaccactactctctttaaagctgccagagagggacatttaagtctgcagaggtt

SEQ ID NO: 747283 - DNA, 542 bp, Homo sapiens
tccagctttgctctgttgctggtgaggagttgcgttcctttgcaggaggagaggcgctctgatttttagagtttccagtttttctgctgttttttttccccatctttgtggttttatctacctttggtctttgatgatggtgacgtacagatgggtttttggtgtggatgttctttctgtttgttagttttccttctaacagacaggaccctcagctgcaggtctgttagagtttgctagaggtccactccagacactgtttgcctgggtatcagcagcggtggctgcagaacagcggattttggtgaaccgcaaatgctgctgcctgatcgttcctctggaagttttgtctcagaggagtacccggycgtgtaaggtgtcaatctgcccctactgggggatgcctcccagttaggctactcgggggtcagggacccacttgaggaggcagtctgcccgttctcagatctcaagttgcgtgctgggagaaccactactctctttaaagctgccagagagggacatttaagtctgcagaggtt

SEQ ID NO: 747284 - DNA, 538 bp, Homo sapiens
gaaactcagtgaaacataagagaataaaaacagaccattcaatgaaattagaaaaataaatcatgatctgaatgagaaattcaataaaggagatatcatttaaaaaatctcaataaaaatcttaagagctgaagaattcaatgaaataaaaaataccacagagggttcaacagcagactagatcaagcagaagaaagamccttgaaggtttctgaaatgactcagaagagaagaaaaagaaaaaagaatgaagagagcctatgggacaccactaagcaaacaaatattcacattgtaggaatcccaaagggggaagaaacagaaaaggtttatataaataaaataattggtaaaaacttcctaaatcttgggacttaggaagagagagagatctacatacaagtcaatgaagctcaaagatctcagataaactttagaaggttctctccaaggtacactataatcaaactggcaaaagtgaaaagacaatgaaatagttttaaaaacagcaagagaaaactgtctagtcacatataag

SEQ ID NO: 747285 - DNA, 623 bp, Homo sapiens
atcttaattgacaaaacaccatgtgaacaattttaaagtccaatcatggtaaagattttcagtaaactaagactagaaagaaatttcctcaatttgataacaaacatctatgaaatgtctatagctaatattgtacttaatggtgaagagtaaatgcttttcccctgagactgggaacaagaaaagatgtcagctctcttcacaactactcaacactgcagtagtcccagctattgcaataaaaggagataaaaaataaaaaacatacagactggaaagaaagaaataacaatagacctaataagtgagtttactagcaaggttgtaaaacacaaggtacatatacagaaatcaactgcattgctatgtattagcaatcaacagaaaaaaattaaaacaaaatatcattgaatataccatcaaacatatgaactacagataaatttcacaaaacagatgcaaaggcmagaatctaaataaattgagatatatgtcatgttcatggaaagaaatgctcaatatcattaagatgtcaattctcctccaaattaatccataaattcaatgcaaacccaatttaaacccagataggctttaaaaaatatttttgtagaaattcaaaa

SEQ ID NO: 747286 - DNA, 566 bp, Homo sapiens
ttggagttcctagcaggcagacagcactcattatttttctaaacccagagactgggacttagcaggtatttaatattttgagaatggtctattcttgatgcctactctggcaggaccttatgcttatataactcgctaccacacgctatgaagctcaatggttctatttacagaacacttggagaaagccagcttagcctgtggtgtccatctagtggttgatagaggctgtggtctcaattccttttcactgtgagtcattgtgttggtttaaagctcctggctggtgatatttagggctaaggatgttggcttttgagaatgaggctgatcaatagcctagtgtrgagagaaaacaggatgtaagcatttggtcttccacagtggctttttaggggctgctgtcttccctccttggtggcaggaattactccatcaacaaatatgggcacagatgcctgcggggagactccgttcttcagaaattgaggaactcattcatgctgaattaattaaagtcatccctcagtatccatgagggattggtttcaggacccccagaaaat

SEQ ID NO: 747287 - DNA, 587 bp, Homo sapiens
aagagtatatcttgatatttttcagtttaacatgtggagaagtggctgtttattggatggcaatatatcattcttactgtgtttttactatgtggtcaaaaattgtcacagctactattttaaaattacctttggctcaacaaggcctgatcatgtttccagaactggcaaaatatcacatactacacaaatatatagaaataaataaagctctaaaaactaaccatttcaggttcgttttgaacctagtccttatttgagccttctggtttgatttctatttggttgattacgttkttcaaaagaacacatttaatatgagtatatcttgatttaatgtaacagtgtttctcccacttcagtcttacataaaatttctgcgtgatttttgccaaatctgtgagccacttgtgttttttatttgtattttccttaaactagctcaaattttaaatctacatttaatatccatgaaactgttaatttatatatggctagttatcattttccaatatgtttctaatatatctaataagcaataaatatgacttttaaaatataaaaatattcatgtgccatccaacaca

SEQ ID NO: 747288 - DNA, 616 bp, Homo sapiens
ttcctcttacttatgcaaatgggtgggttttcctatggtgtgtggtcatgtacagagccttacagttgagaaatgcatcttgcatgatagaattgaaggaaccacacacacctgcttatcatactgctcatgaattccttctatagcttactgaggactcatctttcagcctctgcttgaatatttcttggacaaaatgttgttccttcataaggcagccctttacttttttgctgttgttgacggcttcagcagttaatggagttctttattcttacatttccaatcaccggatataattcagcctyctgaagccccagttttcattctttttcatgttgtaacatatcccttaaggtttctttatttccaagtaaaaatcctggattttttccatggtccttttgtaacactttgatatcctccaagctcagtcatatttggtcacaatgcgatgctctcccaatcatgactagtggcttgaggtagagccctccttggcaaggtccagatcgctacaggtagacactaaagttttaagacctctccatatctgtgagctgaaagctccctgctgtttccactggagctcgattgtgtttttattgtgttcagg

SEQ ID NO: 747289 - DNA, 624 bp, Homo sapiens
cagacaatataggtaggcaaaaatagaaattcggcaaaagaaataaaaggtatccaagtcaaaaagaaagaataaaattatctctgttcacagattacatgattgtgtatgtagacaaccctaaagattccacacttcaagaaaactgtcacaaataataaattcagcaaagtattrggataaaaaatcaacacataaaaattagttgcatttcaactcactagcagtgaacaatctgatatagaaattaagaaaatttcatttataataacatcaaaaagaatgaaatactcaggaattaaccaaggagatgaaagacatatactgaaaattatgaaacactgctgaaagaaattaaagaagacataaatagaaagatattccatgttcatggattagaagacttaatattatttaaatgacaatattagttagccaaagcaatctacaagtcaatgtaattcccacaaaattccaataacttatttgttttagataggggcttctctgacccccaaactagggtgtagcagaatgatctcagctcactgcggcctccacttcctgaactcaagggatcctgccacctcagcatccccagtagctgggaccacagccatgtgg

SEQ ID NO: 747290 - DNA, 645 bp, Homo sapiens
tccacttcctgaactcaagggatcctgccacctcagcatccccagtagctgggaccacagccatgtggcaccaggcccagctaatttttgtactttttttggtaaaggcagagtcttgctgtgtttcccaggctgatctcaaactcctaggctcaagcaatccacccactttggtctccgaaagtgctgggattacaggcatgagccaccatacctggccccaacaaccttttctgcagaaatagaaaactccatcctaaaatttatagggaacctcataggaccctgaatagccaaaacaatcttgaaaaagaagaacaaaattgaatgactcacttaatgatttcaaattttattacaaagctacaaaaatcaaaacagcatggcactggcataaagagacatatagaccaaaggaattgaatagaggcccagaaataaaccttcatatatatggtcamgtgattttcaataagaaaagtgccaaaaccattcaacgggaacaagacagtctttgcaacaaattatactaagaaaaagaaaaccaggtatcctatacaaaaggataaagttggacccttacttaacaccatatataaaaattaactcaaaatgaaccaaagacctaaaagtaagacctaagtt

SEQ ID NO: 747291 - DNA, 622 bp, Homo sapiens
ttaaaaaaaaaaaaaaaaaaaagaaggaaaataaacacaaaataaaattagtagtaattctgcaaaaaaaaaaggaaattagtcattcttaaaatgacaaatatttattaattccaaatttacaccctgctttctttctgtattcttcttcattttcattttgtaatctttttagactattttgaaaagtaggtaaattcgacatgtgtacttacatactttgcataactaagttgaagagacccctgtatgaatattgtcaccaaatctgtagctgtgacatgaccattacctgacagtgtagcagtgattgtaagattccattgattttaagatgcttcttgatttccagagatggtaaaaatttgaraaaaaatatgctcttataattgatgacttaagtctatgtatttattccagatttcttcttttaaaggctttaaaaagtgtagctttcttttatagtctgtgtggttttaattatctaggaattgattaatcattttcttggccttgctaataacctcagttctccaccattgtgccttctgattgtttccttgcttgtcagctctttgaccaaaaagtagtggtctggtgaaacagttaatagataatagga

SEQ ID NO: 747292 - DNA, 602 bp, Homo sapiens
cacatagtgagcataatatccagtaggtagtttttcaatccataacccctgcctgccccttcttgtagtccagtgtctattgttcccatgtttatgaccatgtatgctcagcgtttagcttttcttacttataagtgagaacatacagtttttggttttytgtttctgcattttcttaggattatggcttccagctccatctatgttgctgcaaagaacacaatttcattctttttatggctgtgcagtgtcccatggtgtttaagcacaacattttctttatctaatccaccactgattggcacataggttgaatccaagtctttgctattgtgaatagcattgtaattaccatacaagtgcatgtgtcattttggaataatgatctattttcctttgggtatatactgggtatgctggttagaatggtagctcctttttaagtgctttaagaaatctccaaattgctttccagaatggctgaactctggaagtgtatatgcattctctttcttcctcagcctctccagcgtctgttgttttttgactttttaatgattgccatcctgactagtatgagatggtgtctcattgtggttttg

SEQ ID NO: 747293 - DNA, 592 bp, Homo sapiens
atggccaaggctatagtcttatcttgttgtatattttggggttccttgaaaaaaattgtattccactcttgctgtgtagactgctatataaatgttaattaaatcctattgatttatgccacctgtattctgctgttgtggccatccactgaactttgtatgtgttattgtatttttgagtactaaatttttaatctggttcttatttgcatcytctttctttgctaagactttctaattcttttctgaggttttctattttataaaatttgtttctagtgtgtttgtagttgcttgttgaaacaattttattatggctgctttaaaatatttgtcagatatttctaatatatctgatatctctgtattggaatctatttactgcctttttaatttagatctttctggttcttggtaaaatgactgattttcaatggaaagcttagcatattttaattgtgctataagattatggatctcttatttaaatcttctgtcttaactggcttttttctgatttcactctggcattacaagaaggagacaattcctcattactgtcaggtaaaggcagaaaaccaaatttcccact

SEQ ID NO: 747294 - DNA, 603 bp, Homo sapiens
tgcgggaccccactgaaaatcggactgttcaacttacctggcagccactcccagagcccctggaactctggcccaaggatctctgattgactccttcttggcttaccggctgaagactgacgctgcctgatcgcctcggaagccccgtagaccatcacggacgccgagctttaggtaactctcayggtggagggtaagtccatccccttcttaatcaatacggaggctacccactccacattaccttcttttcaagggcctgtttcccttgcctccataactgctatgggtattgacggccaggcttctaaacctcttaaaactccccaactctagtgccaacttagacaacactcttttatgcactcttttttagttatctccacctgcccagttcccttattaggctgagatattttaaccaaattatctgcttccctgactattcctagactatagccacgtctcattgatgcccttcttcccaatccaaagcctcctttgcgtcctcctcttgtattcccccaccttaacccacaagtataagatacctctactccctccttggcgaccaatcacacaccccttaccatctcattaaaa

SEQ ID NO: 747295 - DNA, 603 bp, Homo sapiens
tgcgggaccccactgaaaatcggactgttcaacttacctggcagccactcccagagcccctggaactctggcccaaggatctctgattgactccttcttggcttaccggctgaagactgacgctgcctgatcgcctcggaagccccgtagaccatcacggacgccgagctttaggtaactctcatggtggagggtaagtccatccccttcttaatcaatacggaggctacccactccacattaccttcttttcaagggcctgtttcccttgcctccataactgctatgggtattgacggccaggcttctaaacctcttaaaactccccaactctagtgccaacttagacaacactcttttatgcactcttttttagttatctccacctgcccagttcccttattaggctgagatattttaaccaaattatctgcttccctgactattcctagactatagccacrtctcattgatgcccttcttcccaatccaaagcctcctttgcgtcctcctcttgtattcccccaccttaacccacaagtataagatacctctactccctccttggcgaccaatcacacaccccttaccatctcattaaaa

SEQ ID NO: 747296 - DNA, 625 bp, Homo sapiens
atcaccatgaaagtactctgaaaagtcaagcatgctctgtgagtataaggaataagggagacagtgattggctctgcagcacctattcagctcctctggctgctcatggctctcccgtgcccttggaaatgctcagttaggaaaaggcctgttgwtgtgtctggatgtgatgactaggatctcaatggccatctagggagaggattcaacctgcaccatataagggaaacagcagaggtagagaaggaagctgaagtgcctaccacatcatgactggggctaccctatctctggacttcctatggaaaagaatacatttcttgatggtttatatggatccaaattgtgtttttctattatttgcagacaaaataatctcacagacataagaagttattaaaatccataaaacagtgctttctgaccatttaaactagtaagtggcagagctgggtttgattccacttaatagccacatgtctttgggcaagttgtttgacctctaagtgaaacagcctcattgtctggagtcacacccgaggttcattttctcatggccacggagaacaataatgaggacacataaagattgaggttgagagcggaagtttaatatgcaaaagaa

SEQ ID NO: 747297 - DNA, 625 bp, Homo sapiens
atcaccatgaaagtactctgaaaagtcaagcatgctctgtgagtataaggaataagggagacagtgattggctctgcagcacctattcagctcctctggctgctcatggctctcccgtgcccttggaaatgctcagttaggaaaaggcctgttgatgtgtctggatgtgatgactaggatctcaatggccatctagggagaggattcaacctgcaccatataagggaaacagcagaggtagagaaggaagctgaagtgcctaccacatcatgactggggctaccctatctcyggacttcctatggaaaagaatacatttcttgatggtttatatggatccaaattgtgtttttctattatttgcagacaaaataatctcacagacataagaagttattaaaatccataaaacagtgctttctgaccatttaaactagtaagtggcagagctgggtttgattccacttaatagccacatgtctttgggcaagttgtttgacctctaagtgaaacagcctcattgtctggagtcacacccgaggttcattttctcatggccacggagaacaataatgaggacacataaagattgaggttgagagcggaagtttaatatgcaaaagaa

SEQ ID NO: 747298 - DNA, 484 bp, Homo sapiens
taccagtttctcttttcttccagtcttccaatcaaaagtctggctagcttggcagtgatagtgatcatgaaccagtattcagaattttgcttgttctagaaaggcacttcctcatcaacccctaaccttggatgaggctagctgctcccaatctaatttcagcagttcagatttcaagcaaagtatctacacaactaataatctcattctattaacattcccctaatcttctatgtctagtgtgtaattwgaggaagcagttgggccctgaaagctcttggcagacctcttgtctgataaatattttagtactttcagtagccttttaaaattggcagttcttgctctaaagattcattcaagtacatgtgataatttgaaattaacatgctgccagattttgcgtttatacaagtaactttgatagtcagtaccaacaaagggattttgtcagccatgaatggataaacacagctgttttctt

SEQ ID NO: 747299 - DNA, 649 bp, Homo sapiens
tgtaagatgttatcaatgtgggaagcagggtgatgggaacacactgtactatttttacaacttctcgaaagtctaaaagtaattcaaaacaaaaagctaaaaaggaagtatttagatccaaccaatgccccaatttaaagataatccaaactacatctggatcccaaaggaggtctgaaccctccaagaacactagactgtgctgtgctgcagcaagtgaaaggctgtatcgacacctaagaggctgatctgttctcaccaaggaacaggmttttcccaattccgttttcctgaaccatttgttcattacttcccctcaagccacagtttcatttatgccattaagaaaaattatcacatataatcgccaaccttgggaaaagaatatagtcattttgttttctttcagaccacaaagtaggaaatcagaagccttgggtaaattgaaaatcccaactttgttttatttaagggatgccaagactccctgtgcccctggcactctgggtggggggatttcctgcatgccaaattgctaatgcaagatgcattagcccatagctttagaagttccagatttcttggcaccaaagggttatgaataatcctttccactccccttgactgttggaggactttcaaaatattt

SEQ ID NO: 747300 - DNA, 649 bp, Homo sapiens
tgtaagatgttatcaatgtgggaagcagggtgatgggaacacactgtactatttttacaacttctcgaaagtctaaaagtaattcaaaacaaaaagctaaaaaggaagtatttagatccaaccaatgccccaatttaaagataatccaaactacatctggatcccaaaggaggtctgaaccctccaagaacactagactgtgctgtgctgcagcaagtgaaaggctgtatcgacacctaagaggctgatctgttctcaccaaggaacaggattttcccaattccgttttcctgaaccatttgttcattacttcccctcaagccacagtttcatttatgccattaagaaaaattatcacatataatcgccaaccttgggaaaagaatatagtcattttgttttctttcagaccacaaagtaggaaatcagaagccttgggtaamttgaaaatcccaactttgttttatttaagggatgccaagactccctgtgcccctggcactctgggtggggggatttcctgcatgccaaattgctaatgcaagatgcattagcccatagctttagaagttccagatttcttggcaccaaagggttatgaataatcctttccactccccttgactgttggaggactttcaaaatattt

SEQ ID NO: 747301 - DNA, 596 bp, Homo sapiens
gctgggctgaactgggcttatattctgttctggtccccaaacagagaaagtgaatctgaggatgttggcagctgacttcccagcctcatgaggagactctatctgcaaaaagaagctcaagatgggaggcattaaaaaacacagacacacatacacaaayaaaaacacacaaacaagaaaaaaatatcctgatgacactgccaggctctcaaagtccagatttgcctgaagttggatccacttttggatgtttgagttccagaaattttatttttttgataaaatttgtgtgactttaaaccatggttttaaagcatgttcggagtcattcctgctgcctgctgtccaggggtcagtcactggacttcccgaatcctgttggtgtctgctcgaagcaaggacccctcgagctgtccttgtccaggttccttctttattcttccaagccctccccgaggacacaggtattacactcctttctcaagagtattcctgtggctgtagctgccccaacagctcagctgggcagtgaggaagggacaggtgactcattcttgccttctccagccagggaatgcaggctgggtggggggata

SEQ ID NO: 747302 - DNA, 596 bp, Homo sapiens
gctgggctgaactgggcttatattctgttctggtccccaaacagagaaagtgaatctgaggatgttggcagctgacttcccagcctcatgaggagactctatctgcaaaaagaagctcaagatgggaggcattaaaaaacacagacacacatacacaaacaaaaacacacaaacaagaaaaaaatatcctgatgacactgccaggctcycaaagtccagatttgcctgaagttggatccacttttggatgtttgagttccagaaattttatttttttgataaaatttgtgtgactttaaaccatggttttaaagcatgttcggagtcattcctgctgcctgctgtccaggggtcagtcactggacttcccgaatcctgttggtgtctgctcgaagcaaggacccctcgagctgtccttgtccaggttccttctttattcttccaagccctccccgaggacacaggtattacactcctttctcaagagtattcctgtggctgtagctgccccaacagctcagctgggcagtgaggaagggacaggtgactcattcttgccttctccagccagggaatgcaggctgggtggggggata

SEQ ID NO: 747303 - DNA, 596 bp, Homo sapiens
gctgggctgaactgggcttatattctgttctggtccccaaacagagaaagtgaatctgaggatgttggcagctgacttcccagcctcatgaggagactctatctgcaaaaagaagctcaagatgggaggcattaaaaaacacagacacacatacacaaacaaaaacacacaaacaagaaaaaaatatcctgatgacactgccaggctctcaaagtccagatttgcctgaagttggatccacttttggatgtttgagttccagaaattttatttttttgataaaatttgtgtgactttaaaccatggttttaaagcatgttcggagtcattcctgctgcctgctgtccaggggtcagtcactggacttcccgaatcctgttggtgtstgctcgaagcaaggacccctcgagctgtccttgtccaggttccttctttattcttccaagccctccccgaggacacaggtattacactcctttctcaagagtattcctgtggctgtagctgccccaacagctcagctgggcagtgaggaagggacaggtgactcattcttgccttctccagccagggaatgcaggctgggtggggggata

SEQ ID NO: 747304 - DNA, 542 bp, Homo sapiens
taaactattgttctgtgttgtgaaatcaacttaggtataattttaaaaaatagattcccagagtgtcagggaaaatggcagaataggagacaggacaaatttgcagctcccactcagaccaacagagcagcgtggagatcacatcgagaatttttgttccaagaactaccacaggaacataccaggaaagctgagagaatccacataccctttgaaggaggtggatggccgcaacaggctccatgggacagctgaggaaccgtgcgtcagcttgctctctcagccggaaggctggtagcctggggtaaattctcagctctgcaccggctgcctggaaataaattcagtgccgttagggggcacagtgggagtgagacccrtctttcaggctgtgggctacatgggagctgggtaaggcctatggctaccagctttctcccacttccctggcaacctgtgtgtgaggtaccagaggtagccataatgcccctgggaacataactccattggcctgggaactacactcccatcctccacagaag

SEQ ID NO: 747305 - DNA, 542 bp, Homo sapiens
taaactattgttctgtgttgtgaaatcaacttaggtataattttaaaaaatagattcccagagtgtcagggaaaatggcagaataggagacaggacaaatttgcagctcccactcagaccaacagagcagcgtggagatcacatcgagaatttttgttccaagaactaccacaggaacataccaggaaagctgagagaatccacataccctttgaaggaggtggatggccgcaacaggctccatgggacagctgaggaaccgtgcgtcagcttgctctctcagccggaaggctggtagcctggggtaaattctcagctctgcaccggctgcctggaaataaattcagtgccgttagggggcacagtgggagtgagacccatctttcakgctgtgggctacatgggagctgggtaaggcctatggctaccagctttctcccacttccctggcaacctgtgtgtgaggtaccagaggtagccataatgcccctgggaacataactccattggcctgggaactacactcccatcctccacagaag

SEQ ID NO: 747306 - DNA, 572 bp, Homo sapiens
atcaaaaccacatctgatactaccttactcctgcaagaatggccatgataaaaaaaaataatagtaatagatgttggagtggatgtggtaaaaagagaatatttttacgctgttggttggaatgtaaactagtccaaccactatggaagacagtgagagatttcttaaagaactataagtaaatctacgatttgatccagcaatctcactatggggtatctacccagaggagaagaagtcattatacaaaaaggatacttgcacatgcatgttcgtagcagcactatttgtaattgcaaaaatatggaaccatctgaaatagccatcaatcaacaagtggataaagaaaattatatatatataaattatacataattatatttatattttatatgtctaaatcatacatwaattatatataattatattttatatgtataaatcatatatatataaatacacacacacaccatggaatactacttaaccataaaaaagaataaaataatggcatttgcaggaacctggatggaatggcagaccattattctaagtgaagtaactcaggaacg

SEQ ID NO: 747307 - DNA, 572 bp, Homo sapiens
atcaaaaccacatctgatactaccttactcctgcaagaatggccatgataaaaaaaaataatagtaatagatgttggagtggatgtggtaaaaagagaatatttttacgctgttggttggaatgtaaactagtccaaccactatggaagacagtgagagatttcttaaagaactataagtaaatctacgatttgatccagcaatctcactatggggtatctacccagaggagaagaagtcattatacaaaaaggatacttgcacatgcatgttcgtagcagcactatttgtaattgcaaaaatatggaaccatctgaaatagccatcaatcaacaagtggataaagaaaattatatatatataaattatacataattatatttatattttatatgtctaaatcatacataaattayatataattatattttatatgtataaatcatatatatataaatacacacacacaccatggaatactacttaaccataaaaaagaataaaataatggcatttgcaggaacctggatggaatggcagaccattattctaagtgaagtaactcaggaacg

SEQ ID NO: 747308 - DNA, 512 bp, Homo sapiens
aaaataaacagccaggcacggtggctcacatctgtaatcctagcactttgggaggctgagagtggatcatttaggttaggagttcgagaccagcctggccaacatgacgaaaccctatctctactaaaaatacaaaaaaattagctggacatggtggtgggtgtctgtagtcccagttactagggaggctgaggcaggagaatcgcttaaaaccccgggaggcagaagtggcaataagcaaacatcgcccactgcattccagcctgggcgacagagcgagactttgtctccagaaaaaaaaaaaaaaaaaaaaaaaaaaggcttgcwtaaattgctgagactgacctctacccagccccaacttagtagaagttaattccaatgggagtagtgaaaatacagatatgctttgccctcaccaagtgtcacagagtggtgcatacttgtgcttctttatacatcaggggtaggtctatttatgtctctatgattcttgcatgtctgtgcttgcc

SEQ ID NO: 747309 - DNA, 566 bp, Homo sapiens
aaagcaaacaagtaccatcactttagcaaaggacaaggcaaaacaaaatatcttctttgaccggtggaactaaaggttggaggtaacagctggagagaaatgtgggtacctgcctcccaagtgagtggattaacctgtcctggcctcttctgagaaccacagcactgcaaatccagtggttaagaaagcaacgtcgcctcttctgtctgagcttcagttttcatatcagtacactgggccttcagycttgcatggccagagccctcctccttgggtgtgtgggtttccctttatgtccccccaagtgtatcaggagcatgtggcttttccactgtggttttaagcgctatttacaggaaccatctgcagagtctgcagagttcactgtgcatgcatacagttgtgcaacagtggctttgtctgagtcactgattccactcattcatcctacagataggaacaggaacattccagaaggaaggtctatgatcctcttagtctctgtagcaatcttctcagagatacctataggcattatgtatcatttctcattctaaattaacttc

SEQ ID NO: 747310 - DNA, 607 bp, Homo sapiens
aacattgattagagattcagtagtaagttgccagttctgcataagttgattgatagactcaatgtggtcccagtagaaacctcatcaggattttgtagaaattgagaagctgtttctaatatttatatggaaatcttgacttkaagaagaacaaagctggactatagttacaactataaatgtacaataattaagatagtgtactgtttgacacaagcatcaacaaatagactagaatagacagcccagaaacagacacacacacatacagttacctaacttacaaaaatgcaccaccctagttcagtggaggaaaaatggtctttcctacatagtgctgtctcaagtggatatctattctaccaggaatagatagaatgtttattaataaaactattagaaaaaaatggaaaaatatcttcatgatttcaaaatcatgaaaaatctcttcatggtttcaaaatcatgaaaaatatcttatgattttgggatgggcaaaaatttcttaaacatgacacaaaaagcactaattttgaaagaaaatatgaataaataagactttctcaaaattaggaaattttgttcatcaaaattcaacattaggagc

SEQ ID NO: 747311 - DNA, 607 bp, Homo sapiens
aacattgattagagattcagtagtaagttgccagttctgcataagttgattgatagactcaatgtggtcccagtagaaacctcatcaggattttgtagaaattgagaagctgtttctaatatttatatggaaatcttgactttaagaagaacaaagctggactayagttacaactataaatgtacaataattaagatagtgtactgtttgacacaagcatcaacaaatagactagaatagacagcccagaaacagacacacacacatacagttacctaacttacaaaaatgcaccaccctagttcagtggaggaaaaatggtctttcctacatagtgctgtctcaagtggatatctattctaccaggaatagatagaatgtttattaataaaactattagaaaaaaatggaaaaatatcttcatgatttcaaaatcatgaaaaatctcttcatggtttcaaaatcatgaaaaatatcttatgattttgggatgggcaaaaatttcttaaacatgacacaaaaagcactaattttgaaagaaaatatgaataaataagactttctcaaaattaggaaattttgttcatcaaaattcaacattaggagc

SEQ ID NO: 747312 - DNA, 469 bp, Homo sapiens
cattgtcatggttatttcacaaccacaccatttccctcaggaggctgagagctccttctgtgccccagtttactcattttttgaaattccaactcctggcacatcgtctgacagttacagagcaaatgttataaaaatatggagttgttggagcagtaaataacacaatacctgtctatgtcgaaacagcctrtaaaaggcagcttgctcttccctttccccaaatcaatgtaccctctttaattcatatattacgcatgtagaagttgagaaaaatcagagaagcctagttgggtagtttctttgaaaccatctgatatagtttggctctgtgtccccacccaaatctcacctcgaattgtaatccccattatccccacgtgtgaagggcagggccaggtggaggtcattggatcatgggggtggttcccccatgctatgctcctgagagtgagtgaatctcacgaga

SEQ ID NO: 747313 - DNA, 656 bp, Homo sapiens
cgtttgctgactatggatccccggacacagcgagatagccaggcccctctatactctaatcaaggagagaaccagagagacaaaaagtcaaagaaagaagtacaaagagaggaagagacagacaaagagggagtcagaaagagagaaagagagagacaaaggagaagtcraagagaaagaaagagagatggaagtagtaaagaaaaaacagtgtaccctattcctttaaaagccagggtaaatttaaaacccacaattgataattgaaggtcttccctgtaaccctataacaatccaataccaccttgttgtcagtgtaaacaagggcatagcccgaaagcactgaggccactgacaatccgtagccttcctatcaaaaattcttaacccagcaggtttcctaacaggacatctaaatcttaattaccatacaaaggtccgaccagatctaggaggaactccctacaggacaggatgatagatggttcctcccaggcgattaaggaaaaaaagacacaatgggtattcactaagagaaaatgaaactcttatagaagcagagttaagaaaattgcctaataattggtctcctcaaacgtgtgagctgtttgcactcagccaaaccttaaagtacttacagaatcaggaaggagcca

SEQ ID NO: 747314 - DNA, 656 bp, Homo sapiens
cgtttgctgactatggatccccggacacagcgagatagccaggcccctctatactctaatcaaggagagaaccagagagacaaaaagtcaaagaaagaagtacaaagagaggaagagacagacaaagagggagtcagaaagagagaaagagagagacaaaggagaagtcaaagagaaagaaagagagatggaagtagtaaagaaaaaacagtgtaccctattcctttaaaagccagggtaaatttaaaacccacaattgataattgaaggtcttccctgtaaccctataacamtccaataccaccttgttgtcagtgtaaacaagggcatagcccgaaagcactgaggccactgacaatccgtagccttcctatcaaaaattcttaacccagcaggtttcctaacaggacatctaaatcttaattaccatacaaaggtccgaccagatctaggaggaactccctacaggacaggatgatagatggttcctcccaggcgattaaggaaaaaaagacacaatgggtattcactaagagaaaatgaaactcttatagaagcagagttaagaaaattgcctaataattggtctcctcaaacgtgtgagctgtttgcactcagccaaaccttaaagtacttacagaatcaggaaggagcca

SEQ ID NO: 747315 - DNA, 656 bp, Homo sapiens
cgtttgctgactatggatccccggacacagcgagatagccaggcccctctatactctaatcaaggagagaaccagagagacaaaaagtcaaagaaagaagtacaaagagaggaagagacagacaaagagggagtcagaaagagagaaagagagagacaaaggagaagtcaaagagaaagaaagagagatggaagtagtaaagaaaaaacagtgtaccctattcctttaaaagccagggtaaatttaaaacccacaattgataattgaaggtcttccctgtaaccctataacaatccaataccaccttgttgtcagtgtaaacaagggcatagcccgaaagcactgaggccactgacaatccgtagccttcctatcaaaaattcttaacccagcaggtttcctaacaggacatctaaatcttaattaccatacaaaggtccgaccagatctaggaggaactccctwcaggacaggatgatagatggttcctcccaggcgattaaggaaaaaaagacacaatgggtattcactaagagaaaatgaaactcttatagaagcagagttaagaaaattgcctaataattggtctcctcaaacgtgtgagctgtttgcactcagccaaaccttaaagtacttacagaatcaggaaggagcca

SEQ ID NO: 747316 - DNA, 625 bp, Homo sapiens
acttatattagttttataatgtcaaaggaagaaaaatggatcatttccttagaaactatttaaactatgaatgactacaaagaaggtcgtctgaagtatttttctcatgcctccatatatcttaagaggctgaatatatccagatctattactactttcaaattagaaggatttagatatgattcagtcaattatggatgccttacaactactaatatttaaacactgaattgtttcacaattcaccttaaagtgaactattttaagagcctttaaaatcattgggtataataataatttctaatacagaatactgtttgaaatcaaatgggttatagattttaaaatatgttttccttatactgactttatatcaaaatggcacttgtaataaaaacttacaatatttatttcgacatacattggcmattacctaagaaacctctactgctgcaaatattaagcagggaaaaaaaaagaatgtggtcattaattattctgttaaacactgagaaaatacacctattacagcttcttgtataatcacttgccatttaagaaactatgtatcaaactcctttggctcttcccatgagaggtacttaggggactcaatttctttttt

SEQ ID NO: 747317 - DNA, 624 bp, Homo sapiens
cagcagaggaacacaaattgtgaagatttcatggacatttatcacttccctaataatactcttataatatcttatgcctgtctttacttcagcctctgaacataaattgtgaagatttcctggacatttatcagttcccaaataatgctcttataatttcttatgcctgtcttactttaatctcttaatcctgttatcttcataagctgaggatgtacgtcacctcaggaccactattgtacaaaytgactgtaaaacatgtgcgtttgaacaatacgaaatcagtgcatcttgaaaaagaacagaataacagcgattttcagggaacaaggaaagacaaccataaggtctgactgcctgcggggtcgggcagaatacagccatatttttcttcttgcagacagcctataaacagacctgcaagtaggagagatatcgctaaattcttttcctagcaaggaatataatattaagaccctaggaaaagaattgcattcctcgggggaggtctataaacggctgctctgggagtgtctgtcttatgcagttgagataaggaccaaagtacgccctggtctcctgcagtactctcaggctcactagagtggggaaaaaccccaccct

SEQ ID NO: 747318 - DNA, 624 bp, Homo sapiens
cagcagaggaacacaaattgtgaagatttcatggacatttatcacttccctaataatactcttataatatcttatgcctgtctttacttcagcctctgaacataaattgtgaagatttcctggacatttatcagttcccaaataatgctcttataatttcttatgcctgtcttactttaatctcttaatcctgttatcttcataagctgaggatgtacgtcacctcaggaccactattgtacaaattgaytgtaaaacatgtgcgtttgaacaatacgaaatcagtgcatcttgaaaaagaacagaataacagcgattttcagggaacaaggaaagacaaccataaggtctgactgcctgcggggtcgggcagaatacagccatatttttcttcttgcagacagcctataaacagacctgcaagtaggagagatatcgctaaattcttttcctagcaaggaatataatattaagaccctaggaaaagaattgcattcctcgggggaggtctataaacggctgctctgggagtgtctgtcttatgcagttgagataaggaccaaagtacgccctggtctcctgcagtactctcaggctcactagagtggggaaaaaccccaccct

SEQ ID NO: 747319 - DNA, 624 bp, Homo sapiens
cagcagaggaacacaaattgtgaagatttcatggacatttatcacttccctaataatactcttataatatcttatgcctgtctttacttcagcctctgaacataaattgtgaagatttcctggacatttatcagttcccaaataatgctcttataatttcttatgcctgtcttactttaatctcttaatcctgttatcttcataagctgaggatgtacgtcacctcaggaccactattgtacaaattgactgtaaaacatgtgcgtttgaacaatacgaaatcagtgcatcttgaaaaagaacagaataacagcgattttcagggaacaaggaaagacaaccataaggtctgactgcctgcggggtcgggcagaatacagccatatttttcttcttgcagacagcctataaacagacctgcaagtaggagagatatcrctaaattcttttcctagcaaggaatataatattaagaccctaggaaaagaattgcattcctcgggggaggtctataaacggctgctctgggagtgtctgtcttatgcagttgagataaggaccaaagtacgccctggtctcctgcagtactctcaggctcactagagtggggaaaaaccccaccct

SEQ ID NO: 747320 - DNA, 401 bp, Homo sapiens
tcacacaagaaatcctaaagggagttcttcaatctgaaagaaaaaaccactaatgtgcaaaagaaaacatttaaaagtataaaacccactggtaagattagtacacagataactccaggatactctatctaatgctataattatggtatgtagtccacwcataactttagcatgacgtctaaaagagaaatctatcgaaaacagtaatagctataagaacctgttaagagacaggtaaaataaaaacgtaaaatgacacaacaaaagtcaaaatgtgggggggggggtgtaaagtatagaagttttaaaaaattctttatttgtttctattatttctttgtgatctgacccaggttgtaatctctcactaaaatagcttgttatgtttttttgcaagtctc

SEQ ID NO: 747321 - DNA, 401 bp, Homo sapiens
tcacacaagaaatcctaaagggagttcttcaatctgaaagaaaaaaccactaatgtgcaaaagaaaacatttaaaagtataaaacccactggtaagattagtacacagataactccaggatactctatctaatgctataattatggtatgtagtccactmataactttagcatgacgtctaaaagagaaatctatcgaaaacagtaatagctataagaacctgttaagagacaggtaaaataaaaacgtaaaatgacacaacaaaagtcaaaatgtgggggggggggtgtaaagtatagaagttttaaaaaattctttatttgtttctattatttctttgtgatctgacccaggttgtaatctctcactaaaatagcttgttatgtttttttgcaagtctc

SEQ ID NO: 747322 - DNA, 575 bp, Homo sapiens
aagttacagtaaccaaaacaatatagtactggcataaaaacacagacatagaccaatggaacagaatagagaacacataaataaatccacactcattttacagccaactcattttcaacaaagatcccaagaacatacactgtggaaaggacagtctcctcaataaacagcgctcrgaaaactaggtaaccacatgaggaagaatgaaattagacccctatttctcaccatgtacaaaaatcaaattaaaacggattaaatatttaagtgcaagacctaaaactatgaaactactagaagaaaacattaagtaaatgctccagaacgttagtctgggcaaagatctttaaatgtaagaactcaaaagtacaggcaaccaaggcaaaaacaaatgaatgggatcataccaagctaaaaagcttctgcacagctaaggaaacaatcaacaaggagaaaagaccacccacagaatgagagaaaatatttgtaaactatccatctgacaagggattaataaagagaacatagcaggagttcaaacaactcaatagtaaaataataataacctgattttt

SEQ ID NO: 747323 - DNA, 609 bp, Homo sapiens
ccaagctaaaaagcttctgcacagctaaggaaacaatcaacaaggagaaaagaccacccacagaatgagagaaaatatttgtaaactatccatctgacaagggattaataaagagaacatagcaggagttcaaacaactcaatagtaaaataataataacctgatttttaaataggcaaaagatttgaatagatgtttctcaaaagaagacatayaaaggccaacaagtatatttttaaaatgttcaacatcactaatgatcagagaaatgcaaatcaaaaccacaataacacagtataaaacggccagttaaaatggcttttgtcaaaaggacatgaggtaacagatgcaggtgaggatgtaaataaagggaaaccctcctacagtgttggtaggaatgtaaattagcacagccactatggaaactagtgtggagcttccttaaaaaactaaaaatagaactaccatttgatccagcaatttgactgctgggtatatatccaaaataaagaaaatcaatatatcaaacagatactgcacttccacgtttatcagggcatcattcacaagacctaaaatatggaataaacctaagtactcctcaatagg

SEQ ID NO: 747324 - DNA, 609 bp, Homo sapiens
ccaagctaaaaagcttctgcacagctaaggaaacaatcaacaaggagaaaagaccacccacagaatgagagaaaatatttgtaaactatccatctgacaagggattaataaagagaacatagcaggagttcaaacaactcaatagtaaaataataataacctgatttttaaataggcaaaagatttgaatagatgtttctcaaaagaagacatacaaaggccaacaagtatatttttaaaatgttcaacatcactaatgatcagagaaatgcaaatcaaaaccacaataacacagtwtaaaacggccagttaaaatggcttttgtcaaaaggacatgaggtaacagatgcaggtgaggatgtaaataaagggaaaccctcctacagtgttggtaggaatgtaaattagcacagccactatggaaactagtgtggagcttccttaaaaaactaaaaatagaactaccatttgatccagcaatttgactgctgggtatatatccaaaataaagaaaatcaatatatcaaacagatactgcacttccacgtttatcagggcatcattcacaagacctaaaatatggaataaacctaagtactcctcaatagg

SEQ ID NO: 747325 - DNA, 591 bp, Homo sapiens
agatgctatcatggattttaggtaagggagtgacactcagttttgcattctgggaggaacattttgacagcattgtgaaggaaacgtaataggactagatgcgatgtaggggccagttgggatgttatgcagtgatccaggtgagatgtaataagtcctgatttaagtctgaagtgatagaaatggagaggaggagacctaattgtgaggtattaaagagaatggatgaatagaccttggtaatttattgagtatgactgagaaaaaggtctctgaatggcccttgrttttctgagttggatgactatgtagatatattatccatcaggatagagcagataggaaaaaggaatacatttaagaaatgtattcttaaatgatgaattaggttatgatatgttgaatttggttgatgcctagacagaattagtcaacagatggttggatatgtgtttggaattaaggagagaggtttgggttaaagatacacatttgtgagttagcagtataggtaatattaaatagttggagttgttagttgagatcaatgaatctcaaccagaggtgattttgatgtgtagaagacattta

SEQ ID NO: 747326 - DNA, 620 bp, Homo sapiens
aggactcagaagaagccagtcctgcccaacaccttggtctcaaactggtagcctccgaaacgatgagaaaataaatgtctgttgtttaagccgcccagcccatggtgctttgttacggcagccctcgcaaactgacacagggccctgccctaagaattcccagagtgaggcctagaaatatgtagttcaatgagcgttcatgttttataaagaaaacacagttttgaatgagtaaatactcaaaattggaatcttccaggactgcagtggcccagcagaggacagaacagacagaactgctcatcacgtctctgctaccactgccttgtgctcacaytaccattgccacggcacagtgcagcagcgtgttctctcacaggttctacaggaaggaggtgtggaaagtacaggctcattctgaccatgtctcgtgggcagtagctacagctgaccatctctttcttctggaagcccactgtttccttcacttcttttatactgctccctctcatttccttctgtctcactggccactccttctcgtactcctgtgctgccaccagcctctgtctgaccttgaactctgaaccctctcttgtctctcctcacactccctccta

SEQ ID NO: 747327 - DNA, 595 bp, Homo sapiens
aggaaccaaactgcaggcaccctctggttgacaatgggcaggctcaaccggcagggctggcctttggagttgctgatgccaccttggacgctgttccccaggtttcggggactgagtggagtcatcccaattcgaatggaaatgctggctccccrcggccctgctgcacacttaaatttacgtctttacaacctgatgaaaactcttcccaggaggaaggtgaagtctccctgcccctccacctgtactaaattctctagtaaacaaaataagcacagcacagagagttgcgtgcacacttattgctgcagagcggcaccaggccccaaaggccgtctccaagggccgaggataaataatgcacactgcatttctaatatcgttaggtaaccaaataaaataaatattttacactgctggggcataacaacgcaggcagacagaccaaagaggcagagctgggagccagagagaagacatggaaatgcctggccctcggtggaggcagggaggccctgcgagactcactgggctcagacacaagagttgagagggaaatgctccgtggtgaagagtttgtaaataatactataaa

SEQ ID NO: 747328 - DNA, 619 bp, Homo sapiens
actattttttttttaaatcagttttgcgatttgagtagtacccggcttttgctgtttcacgctttatggtcccctcattcagagcttgctgctagaggtcccttttcctgccattgtgttctcacttgggggtatggccccattaaggtaggcacagtcaggtgttatcttaggctgtgtaagccattctacagcatgcagtgtttgttcctaaagaagtgttcactttgtaatttcccaaatgaaaataggaagtgctagaatcacatgataaacttgcgtataacaaccgtgatattctgtgagtttttttctgtttgtttgctcagttcctaactaaggccctagcacataattagtgsctagtattgttgcttttttgaatgatttatgagtcagtcggtctttgggtagtcatgaagaatatgacttctatacagaggaaatatttgccaggcccaaagctaaacaaaattaagttatttagttttacaaacatagcaattagaaggaaaatgaacaggagttgtggctttgaatttggagaagcaggataggcactgggacacgccaggagcatccatggtgacctcaccgtcttttcctcagcatgctagtg

SEQ ID NO: 747329 - DNA, 584 bp, Homo sapiens
atgcatactggattccaatacctactctaaagatacaataatgaagacatatggatgcaagaaacatagtcggaaggccacaaatagacccacacaagcgtgtggtcagttgattttcaacaagatgccaaggaggaaggaatgatctttttaattaacggttctgaaatattatatatccatataaaaaaatgaaccttaacccttacaccattcaaaaaattgcctcaaaatggatcaaaagcctaaatatgaaagttaaacttctaaaccttttggaasaaaacataggagaaaatttttctgactttgagatattcagagatttcttggataggatgtaaaaagcacaaatggtgaaagaaaaagaactgataaattgaaccatcaaagttgaaagcttttgctcttcaaaagatactgttaagaaaataaagagaaaagatatatatatatagatagatataaaatagtttttatatatttttatatatatctggcctagttcttgattctagagtacttaaagaacaaatcaccactcaaaaataagacaaaaacccaactaagaaaaatagcattgt

SEQ ID NO: 747330 - DNA, 650 bp, Homo sapiens
catgatttggagaatttagtagaaatggagaatgcatgataaatgaaaaaaaatagaaagagaaggatggtgttagtttagataaagagagtttaaaactttgggatgcctagatacggatgtactatgaatgtgctayaaaaaccaaaaccttagcaagagtcaagagtagtcttttacttaagtagctaaaatctaatcaatgtccaacacttttccatagtttctcaactacaggtgattccagagaacaaatgatctttcctgatgcaaggctttcagaagcattgttctgcctacctttttcttctctttttacctaatacatttttattcattcttcaaagttaagctgaaattttacttcaaagaatgattccctgggtacggctactatacatatttggtgagtctccaatattaccctttgatttaacatggcatttttccctttgtaacactgctcataattgaaatgtaaaatttaaaaaatactatccttttatttagtccatgaaatctatgcagtttgggcagtgtatatcttactgactgctttatcgttactacttgacacactgaaatatccataggaagtaattgctatgtttgttcctacagaaacttacgttgaaatttgatctccaatg

SEQ ID NO: 747331 - DNA, 650 bp, Homo sapiens
catgatttggagaatttagtagaaatggagaatgcatgataaatgaaaaaaaatagaaagagaaggatggtgttagtttagataaagagagtttaaaactttgggatgcctagatacggatgtactatgaatgtgctataaaaaccaaaaccttagcaagagtcaagagtagtcttttacttaagtagctaaaatctaatcaatgtccaacacttttccatagtttctcaactacaggtgattccagagaacaaatgatctttcctgatgcaaggctttcagaagcattgttctgcctacctttttcttctctttttacctaatacatttttattcattcttcaaagttaagctgaaattttacttcaaagaatgattccctgggtacggctactatacatatttggtgagtctccaatattaccctttgatttaacatggcatttttccctttgtaacactgctcataattgaaatgtaaaattwaaaaaatactatccttttatttagtccatgaaatctatgcagtttgggcagtgtatatcttactgactgctttatcgttactacttgacacactgaaatatccataggaagtaattgctatgtttgttcctacagaaacttacgttgaaatttgatctccaatg

SEQ ID NO: 747332 - DNA, 581 bp, Homo sapiens
atgtgtctatttttatatcaattacacgctattttggttactagagctttgtaatgtatttttaagtcagatagtgtaatgctttgttctttgtgctcaggattgttttggttattctgtctcttttattgttctacacaaattttgggattgtttttactgtttctatgaaaattacattggtgtttgatagggattgaattaaatctgtagattgctttcagtggtatggtcattttaacaatattaaatcttctgattgatgagcctaggatgtttttccatttgtttgtatgctcttcaattattttcatcaatgattttggttttccttgtagagawctttcacctctttgcttaaatttattcctgtattttattcattttttgtggccattttaaatggaattgccttcttgattttttcaactcttttattatttatttatggaaatgctagtgatttgttatgctgattttatatgcagtaactttcctgaatttgattatgaattctaaaagttttgtggcagagtattttggcttttctaaatatagaattatgttatttgccaaaaggg

SEQ ID NO: 747333 - DNA, 521 bp, Homo sapiens
gacttatcattcaaagacaatggtcttttatatcttgccagattccttgaaaaaaattgggagaacctatccggcctgatcttttatttagactgtggaatcttatgagtagtatactgagcattttagacatgtttcattatttggcatttcctcaccccagttgaaagcttaatccagatctgatatttatttcccttttttgtaccagcaacagtattctatttgtttttgatgctcaaggaaaatttgttaattaagatggttctaatgctatagaaagagctggaaatttaatgtctccaaggaatgttattgtgttgtatgaactcactagmcaaagttgaacatcttacatccatatttcaaaaacacttaaagcatctattagcttcttctggattttgctcctggagaacataaagaagaaaccttgtctgtaaatactatgcaataatcttaactgtatttatttctgtaatgtcttggcaccctgaacatggaagtgagtttacaacaca

SEQ ID NO: 747334 - DNA, 521 bp, Homo sapiens
gacttatcattcaaagacaatggtcttttatatcttgccagattccttgaaaaaaattgggagaacctatccggcctgatcttttatttagactgtggaatcttatgagtagtatactgagcattttagacatgtttcattatttggcatttcctcaccccagttgaaagcttaatccagatctgatatttatttcccttttttgtaccagcaacagtattctatttgtttttgatgctcaaggaaaatttgttaattaagatggttctaatgctatagaaagagctggaaatttaatgtctccaaggaatgttattgtgttgtatgaactcactagccaaagttgaacatcttamatccatatttcaaaaacacttaaagcatctattagcttcttctggattttgctcctggagaacataaagaagaaaccttgtctgtaaatactatgcaataatcttaactgtatttatttctgtaatgtcttggcaccctgaacatggaagtgagtttacaacaca

SEQ ID NO: 747335 - DNA, 600 bp, Homo sapiens
atattgtaatataatatacattaattgagacaatcatgtacatttttgtccttcagtctgttgatgtgatgtattacattgattgatttttgtatgttgaactatcctgacattgcaggactaaatcccacttggtcatggtgtataatccatttcattattattatttttatttatttattttttgagacagagtctccagcctgcactccaggctggagtgcagtggcacratctcggctcactgcaacctctgctgcctgggttcaagtaattcttctgcctcagcctcccgactagctaggattacaggtgcctgacaccgtaccaggctaatttttatatttttagtagagatggggtttcaccatctgggccaggctggtcttgaaatcctgacctcatgatccacctcccttggcctctcaaagtgctgggattacaggcatgagccactgcgtctggcctattatttttcaacataaaagtttaccactatgaatccctcttggttctgtttttgctgaatcccataaaattgtgtatgttgtatttttgttcttatttgcttcaggatattttttaattccacttgtcatt

SEQ ID NO: 747336 - DNA, 600 bp, Homo sapiens
atattgtaatataatatacattaattgagacaatcatgtacatttttgtccttcagtctgttgatgtgatgtattacattgattgatttttgtatgttgaactatcctgacattgcaggactaaatcccacttggtcatggtgtataatccatttcattattattatttttatttatttattttttgagacagagtctccagcctgcactccaggctggagtgcagtggcacgatctcggctcactgcaacctctgctgcctgggttcaagtaattcttctgcctcagcctcccgactagctaggattacaggtgcctgacaccgtaccaggctaatttttatatttttagkagagatggggtttcaccatctgggccaggctggtcttgaaatcctgacctcatgatccacctcccttggcctctcaaagtgctgggattacaggcatgagccactgcgtctggcctattatttttcaacataaaagtttaccactatgaatccctcttggttctgtttttgctgaatcccataaaattgtgtatgttgtatttttgttcttatttgcttcaggatattttttaattccacttgtcatt

SEQ ID NO: 747337 - DNA, 604 bp, Homo sapiens
aaaggatagaggaagaatatttataggcaaaactagcgcaaagaataaaaatatggagatgtaagaagatatgctttgattgaggagctggaaacagcgtttggggtaatgaaaaatgatagttgagagtgtagatctggagcttttgccactcataagaagccatcaaagcatgtcgtaagaccttaataaaggttatcatcagttattatgaccagaatgtgggaartagttaatttggtagtggcagatgagtctttgaacaggaaatatattatttccattttacagataaagaaactgaaggtcacaaagttataactacaatgtaggccttaaattgatttaatttgtaatctactgatggactttcactgtatttttaattttgctaaagtaaaatgaagctgcaaagaatattcctgtttacataaatttctgtaactagaaatatatcttcagaaaagatggccagaagttcaactattaggtaaggtggtatgtgcagtttttattttgattttaacttaaattgaatttaacttaattatcctccaggaaggtctcatagacatttactgatccataatttaaagggccttat

SEQ ID NO: 747338 - DNA, 631 bp, Homo sapiens
ttatttttgaattcactattctgttccattggactatgtctgtttttgtaccagcaccatgctgttttgattactgtagccttatagtatagtttgaagctgggtaatgtgatgcctctgtctttcttcatttggcttaggattgctttagccattcaagttcttttttgtttccatatgaattwtggaattttttttctaattctgcgaacaatgacgttggttgtttgatagggatagcattgaatctgtagattgcattggtctctaagaccattttaatgatgttgattcttccaatccataagcatggaatgtttttccatttatttgtgtcattttttatttctttcagcagtgttttgtacttttccttttgtacttctcctgtagagatctttcacatcctgggttagctgttttcctaggtattttattttattttatttattttttgtggctattgtaaacgggattgcattcttgatttgtctctcagcttgaatgttattggtctatagaaatgctcctgatttttgtacattgatcttgttttgtgaaactttactgaagtcatttatcagttccaggagccttttggctgagtctttagggttttctaggtatagac

SEQ ID NO: 747339 - DNA, 631 bp, Homo sapiens
ttatttttgaattcactattctgttccattggactatgtctgtttttgtaccagcaccatgctgttttgattactgtagccttatagtatagtttgaagctgggtaatgtgatgcctctgtctttcttcatttggcttaggattgctttagccattcaagttcttttttgtttccatatgaattttggaattttttttctaattctgcgaacaatgacgttggttgtttgatagggatagcattgaatctgtagattgcattggtctctaagaccattttaatgatgttgattcttccaatccataagcatggaatgtttttccatttatttgtgtcattttttatttctttcagcagtgttttgtacttttccttttgtacttctcctgtagagatctttcacatcctgggttagctgttttcctaggtattttattttattttatttattttttgtggctattgtaaaygggattgcattcttgatttgtctctcagcttgaatgttattggtctatagaaatgctcctgatttttgtacattgatcttgttttgtgaaactttactgaagtcatttatcagttccaggagccttttggctgagtctttagggttttctaggtatagac

SEQ ID NO: 747340 - DNA, 531 bp, Homo sapiens
gttaatttgtagctttgccccagccactttgacccaacctggagctcacaaaaacatgtgttgtatgaaatcaaggtttaagggatctagggctgtgccttgttaacaaaatgtttacaagcagtatagttggtaaaagtcatcgccattctctagtctcaataaaccaggggcacartgcactgcggaaagccgcagggacctctgcccttgaaagcggggtattgtccaaggtttctccccatgtgatagtctgaaatatggcctcgtgggatgagaaagacctgaccatcccccagcccgacacccgtaaagggtctgtgctgaggtggattagtaaaagaggaaagcctcttgaagttgagatagaggaaggccactgtctcctgcctgcccctgggaactgaatgtctcggtataaaacccgattgtacatttgttcaattctgagataggagaaaaaccgccctatggtgggaggtgagacatgtttgcagcaatgctgccttgttattctttactccactgaga

SEQ ID NO: 747341 - DNA, 531 bp, Homo sapiens
gttaatttgtagctttgccccagccactttgacccaacctggagctcacaaaaacatgtgttgtatgaaatcaaggtttaagggatctagggctgtgccttgttaacaaaatgtttacaagcagtatagttggtaaaagtcatcgccattctctagtctcaataaaccaggggcacaatgcactgcggaaagccgcagggacctctgcccttgaaagckgggtattgtccaaggtttctccccatgtgatagtctgaaatatggcctcgtgggatgagaaagacctgaccatcccccagcccgacacccgtaaagggtctgtgctgaggtggattagtaaaagaggaaagcctcttgaagttgagatagaggaaggccactgtctcctgcctgcccctgggaactgaatgtctcggtataaaacccgattgtacatttgttcaattctgagataggagaaaaaccgccctatggtgggaggtgagacatgtttgcagcaatgctgccttgttattctttactccactgaga

SEQ ID NO: 747342 - DNA, 531 bp, Homo sapiens
gttaatttgtagctttgccccagccactttgacccaacctggagctcacaaaaacatgtgttgtatgaaatcaaggtttaagggatctagggctgtgccttgttaacaaaatgtttacaagcagtatagttggtaaaagtcatcgccattctctagtctcaataaaccaggggcacaatgcactgcggaaagccgcagggacctctgcccttgaaagcggggtatygtccaaggtttctccccatgtgatagtctgaaatatggcctcgtgggatgagaaagacctgaccatcccccagcccgacacccgtaaagggtctgtgctgaggtggattagtaaaagaggaaagcctcttgaagttgagatagaggaaggccactgtctcctgcctgcccctgggaactgaatgtctcggtataaaacccgattgtacatttgttcaattctgagataggagaaaaaccgccctatggtgggaggtgagacatgtttgcagcaatgctgccttgttattctttactccactgaga

SEQ ID NO: 747343 - DNA, 618 bp, Homo sapiens
taaaggaatgtttgaggtttattttctggttagtgtatgtcctatcatgatgaatatcccatgtgtttttaaagagaatgtgtgtgtagtatttgttgagtatagtattctataactactaattaggtaaaggtggttaggtagtgttattcagatttttttcttaataaagaaataaagaataaagacttttcatctcttcttatattaattactgagagagtggtattacagaccttcaacaatgattaccaatttgcttatttctccctctakcttgatcagtttttgtgttatgaattttgaacctcttttatcaggtgcatacatatttaagattgtcatatctttctgatgagtttactcttttattattttgaaatactatttttgtttcttgaaatagattttgtcttgagatttatctgtctcatattaacataaccacaacagctttcttatgattcctgtttatactatatattatttccatctttttattttcaacttatttgtcttttcaaatttaaatcgacttttttgtaggcactcttattatacaggacactttatgggaactaaaaagtgacatcataattcccctaaagtctcccgtat

SEQ ID NO: 747344 - DNA, 572 bp, Homo sapiens
gcataagagcatggccagccctgggggcttgagtctgtgactgcaactcctttcagcaatgcactagctgcacaccaagtctggtatgaggaaggtagttcaggtctgccaggaaaagtctttgtaactgcctggggttaggcctgaaagatcacagtaggtttttagccaaaacccagattcctcagtagaccctgatgcagcttaaagattgttggacacagaatgggagttagaaaaattaggaaatgagatgcttgtgattgagatctgcagaaagtccagatattggtagtgacaagatctagggtctggtaatgaaaatgaatagtcctaataaagtggagacaatcrtttaagacaaaaggcaagatcatatctgtggatattgaaatctcaaatagttatgacaagaataacactggaaggagaaatggtgacctaccctttcagtgctaagatttaaaaattaatctcgtatgtctttttttctatgagaaataatttatgaaaactctattgatttcaaatcaataaaaatgatggatttgtttcagaaaaaaattgtttat

SEQ ID NO: 747345 - DNA, 447 bp, Homo sapiens
gtgaacctatattttaatctctaggctagaaagatctgaggatatatgaatcacatgtgtaaacaagccagtaagtcttcatacaatctattacgtactgcaaaaggtataaggtgatttaaaaaaaggaagaccaaaaccattctgtgcttgggaaagggagagaaattttggmaacttcacagaataattggtgtttgagttgagccaggaaaactgagtatatagttatcagagagtgacaggatttttggatatttcgggcaaacatacaaaggcaaaggagaacatggtgtgttccaggactagctgttatttggggaggctaaagcatagtggatatatggagatgaaaagacaagaaataagtttggaaaggtataacttggatttgtttatttgttcattgcaaaactcctccaatttgtatgcaataataaaactttg

SEQ ID NO: 747346 - DNA, 600 bp, Homo sapiens
agggagaaaaacgggtgggggaaacacctgcctggcgtttgaatcccaggtccacacaggaagacgacgaggcaggctcctccctgcttcaaatcgtgtgaacttcccaaggctccaccccagtgcgcaggctgcttggagtttctccaggaatcccctcccactggctgtctcattcccccctctaaagaagtacatctaactgtggttagattaaggataaggatgaagactgatcttaaccgcttcctgctgacagggggcgctgttttggggaaatggcagaactccctcagaggcygatctaagggttcccggcagaaggggccatcttcagaggctctggttgcatgactgtttggagtttgatggcctgaaggtaagaacagacaaacccaattattagaaaacatgtatcaaagtgaaacaaggggaggggtaaggacagctcaaaaatcctgaggccctttaccagtttgcatggagagagggaggccaaaagcctgactagttaaaatctttacccttttggtggcatgttgggcttctgggtttccttcccctgggcccagtcctaaggcaaccagtttcagctttggg

SEQ ID NO: 747347 - DNA, 589 bp, Homo sapiens
gttaattgatgcagtttcttcatagcatcaatgatctttacaatttggcatgtttttgcagtggctggtaccaattgtttctttccatgtttagtgcttccttcaggagctcttgcaaggcaggcctggtggtgacagaatctctcagcatttgcttgtctgtaaaggattttatttctccttctcttatgaagcttagtttggctggatgtgaaattctgggttgaaaattattttctttaaggatgttgaatattagcccccactctattctggcttgaagggtttctcctgagagatccacwgtttgtctgatgggcttccctttgtgggtaacccaacctttctctctggctgcccttaacattttttccttcatttcaaccttggtgaatctgacaattatgtgtcttgaggttgctctcctcgaggagtatctttgtggtgttctctgtgttttctgaatttgaatgttggcctgctttgctaggttggggaagttgtcctggataatatcctgaagagcgtttttcaacttggatccattctccccatcactttcagatatatctattaaacatagatttgg

SEQ ID NO: 747348 - DNA, 591 bp, Homo sapiens
cttatgattgtagaactgagacccctgcttttttgtgggctgttggctgggggttgatctcagcctcctgtggctgctctcacatccttgccacatcactcctttcattttcaaagccaacattggagaatctctcatgtcaaatctttctgacttaaagaagatccctgtcccttttaaggatttacctgattgtgtcaggccaatccaggtaattttccttttgaataaactcaactgattattaacctaaccatggggatgatagtccatcatgttcacagttctgctcatgttcaaaaggagtgaattttgtaggttgcctgttcactctgatggtagtttcttttgttgtgcagaagctctttagtttaatkagatcccatttgtcaattttggcttctgttgccattgcttttggtgtttcagacatgaagtccttgcccatgcctatgtcctgaatggtattgcctaggttttcttctagggtttttatggttttaggtctaacgtttaagtctttaatccatcctgaattaatttttgtataaggcgtaaggaagggatccaatttcagctttctacatatgg

SEQ ID NO: 747349 - DNA, 432 bp, Homo sapiens
atatttttatgtttgaatttgatcctgtaattacaatgttagctggttattttgcctgttaattgatgcagtttcttcatagcatcagtggtctttatcatttggcatgcttttgcagtggctgttactggtttttcctttccatctttagtgcttccttcaggagctcttgtaaggcagggctggtgatgacaaaatctctccacatgtgcttgtctgtaaaggattttatttytccttcacttatgaagcttatttggctggatataagattctgggttgaaaattcttgtctttaagaatgttgaatattggaccccactatcttctggcttgtagagtttctgctgagatgatatctgctgttagtctgatgggtttccctttgtgggtaacctgacctttctctctggctgctcttaacattttttc

SEQ ID NO: 747350 - DNA, 635 bp, Homo sapiens
aaccaaaccaaagtgacgctttcaagtgattataaaatagatccaaataaaatatcctataaatgcagccaaatcactaagaaatagatacttgggttactggttttttgaaagaaaatttttttttaatattttgttataatggctttaatgtagtagaaaagaacaaaactggagagcggatttattatgggtagccagaaaagagtcatgtttctaacggaactgaaacattgctcattcatacattctaagagaagaagctgtttcaaaacatttgaagtaacaggacagaataaagcaaataagtaactggaggcaacaacgggataaaaacgatgagcccgagaactgycttcaagtctgtagaccccatgaaggacctcaggcccttggaagacagttggagagacaatgtaggcctcctagctctcattaagggatacaaggtagtctgtttttaacttgtttctgtaacagagcatttttttttttttacttctcctatgaatttcttaaaaaaattgggctcgattaaagttgtttctatctttaagatctcatgagacacacaaactttataaacaaaaggggaggaatcagattaactccttttacagggcaaaataaattta

SEQ ID NO: 747351 - DNA, 635 bp, Homo sapiens
aaccaaaccaaagtgacgctttcaagtgattataaaatagatccaaataaaatatcctataaatgcagccaaatcactaagaaatagatacttgggttactggttttttgaaagaaaatttttttttaatattttgttataatggctttaatgtagtagaaaagaacaaaactggagagcggatttattatgggtagccagaaaagagtcatgtttctaacggaactgaaacattgctcattcatacattctaagagaagaagctgtttcaaaacatttgaagtaacaggacagaataaagcaaataagtaactggaggcaacaacgggataaaaacgatgagcccgagaactgccttcaagtctgtagaccccatgaaggacctsaggcccttggaagacagttggagagacaatgtaggcctcctagctctcattaagggatacaaggtagtctgtttttaacttgtttctgtaacagagcatttttttttttttacttctcctatgaatttcttaaaaaaattgggctcgattaaagttgtttctatctttaagatctcatgagacacacaaactttataaacaaaaggggaggaatcagattaactccttttacagggcaaaataaattta

SEQ ID NO: 747352 - DNA, 635 bp, Homo sapiens
aaccaaaccaaagtgacgctttcaagtgattataaaatagatccaaataaaatatcctataaatgcagccaaatcactaagaaatagatacttgggttactggttttttgaaagaaaatttttttttaatattttgttataatggctttaatgtagtagaaaagaacaaaactggagagcggatttattatgggtagccagaaaagagtcatgtttctaacggaactgaaacattgctcattcatacattctaagagaagaagctgtttcaaaacatttgaagtaacaggacagaataaagcaaataagtaactggaggcaacaacgggataaaaacgatgagcccgagaactgccttcaagtctgtagaccccatgaaggacctcaggcccttggargacagttggagagacaatgtaggcctcctagctctcattaagggatacaaggtagtctgtttttaacttgtttctgtaacagagcatttttttttttttacttctcctatgaatttcttaaaaaaattgggctcgattaaagttgtttctatctttaagatctcatgagacacacaaactttataaacaaaaggggaggaatcagattaactccttttacagggcaaaataaattta

SEQ ID NO: 747353 - DNA, 490 bp, Homo sapiens
tactacaggcgcacaccaccacacccagctaattttttgtgttttagtagagacagggtttcaccatgttggccacgatggcctcaatctcctgacctcatggtccgccggcttctgcgtcccaaagtgctgggattacagacgtgagccgccacacccggcatctattatttttgttttactttttattaatagccattctggctggtataagatggtatctcattgcggttttcatttgcatctctctgataattagtgatgctgaacatttttacatggttgctggctgcttgtatgttttcttttgagaagtgtctgttcatatcctttgcytactttttggttttgttgcatttgcttttgagaacttagtcatattttttttgcctaggccaatgtctagagagtgtttcttaggttttcttctaggatttttatagtttgaggtcttatatttaagtatgtaatccatcttgagttaattttt

SEQ ID NO: 747354 - DNA, 564 bp, Homo sapiens
acttacagtcatggtggaaggggaaggaaacatgtccttcttcacattacagcagcaaggaaaagtgctgggcaaaaggagggaaaagccccttataaaaccatcagatcttgtgagaacttactgacttcatgagaacagcatgagggtaactgcccccgtgattaaattatcctccactggttccctcctaagacatgtggagattatgggagctacaatttaagatgatatttgggtggggacacagtcaaaccrtatcacctattgttactggtggcaagtctgaacagggtccttggtcctcgattcttgtcctgttggaagaaagaatttggccaagaagaggtagtagatttaaggcagaaatgagagtttattgaaacaaagaaaagtccatttggaaggacccaagttggaaactcaaaagattgactgcctcgcctgatccttagctcagtgctcttatagacttattatttcctgctttttatcctggtcttttccccttgtccttcctgttgggcaggatgttggctaatcgcagtatgtagagtgacttgc

SEQ ID NO: 747355 - DNA, 564 bp, Homo sapiens
acttacagtcatggtggaaggggaaggaaacatgtccttcttcacattacagcagcaaggaaaagtgctgggcaaaaggagggaaaagccccttataaaaccatcagatcttgtgagaacttactgacttcatgagaacagcatgagggtaactgcccccgtgattaaattatcctccactggttccctcctaagacatgtggagattatgggagctacaatttaagatgatatttgggtggggacacagtcaaaccatatcacmtattgttactggtggcaagtctgaacagggtccttggtcctcgattcttgtcctgttggaagaaagaatttggccaagaagaggtagtagatttaaggcagaaatgagagtttattgaaacaaagaaaagtccatttggaaggacccaagttggaaactcaaaagattgactgcctcgcctgatccttagctcagtgctcttatagacttattatttcctgctttttatcctggtcttttccccttgtccttcctgttgggcaggatgttggctaatcgcagtatgtagagtgacttgc

SEQ ID NO: 747356 - DNA, 639 bp, Homo sapiens
cagggagagctgcttagagatgtagtaggggaaaaaaacccagccagtgtagcacccagaggatttggcacaggagtgtctgcagtgaagctcagccagggatgtccatcctccaagccttgctgggtttccctaggagacttgagccctaggagagctagtggacctgaaaagagcagattgatcctgccccgagataggaccagttctaccagagcagccccctgtctgctggcctcwcctggagtttcagtctggctgtgcctgcttacagtgcagcctcagatgcccagccagagtgccttctgggggcccgtatcatagctcatatgctggcagactgcacctgaccatcggacagctccagcagagcagccatttgtgaagtgcaccaggtcactcgcacttaccccccaccatatccttccctgtgcaactttgccagcatacacttgcctatggctacccccctatcactttgccagcacacatgcatacaggtggacatcacctcccctccccaatggatgtacatgtgtgtatgcactccaccacgctatgagtgccggctggagcacaccctgccactccctgactgtgccaccattgctggtgcaaatgtgcccagagattccagca

SEQ ID NO: 747357 - DNA, 639 bp, Homo sapiens
cagggagagctgcttagagatgtagtaggggaaaaaaacccagccagtgtagcacccagaggatttggcacaggagtgtctgcagtgaagctcagccagggatgtccatcctccaagccttgctgggtttccctaggagacttgagccctaggagagctagtggacctgaaaagagcagattgatcctgccccgagataggaccagttctaccagagcagccccctgtctgctggcctcacctggagtttcagtctggctgtgcctgcttacagtgcagcctcagatgcccagccagagtgccttctgggggcccgtatcatagctcatatgctggcagactgcacctgaccatcggacagctccagcagagcagccatttgtgaagtgcaccaggtcactcgcacttaccccccacyatatccttccctgtgcaactttgccagcatacacttgcctatggctacccccctatcactttgccagcacacatgcatacaggtggacatcacctcccctccccaatggatgtacatgtgtgtatgcactccaccacgctatgagtgccggctggagcacaccctgccactccctgactgtgccaccattgctggtgcaaatgtgcccagagattccagca

SEQ ID NO: 747358 - DNA, 555 bp, Homo sapiens
atgacatcacaaccgatacagagactagtatgatgacctttatgaacgcaagctagaacacctagaggaaatggataaagtcctgtaaacatacaaacttccaggattgaactaggaagaaatagaaaccctgaatagaccaacaatgagtaatgaaattgaatcagtaataagaaaaaatctcctaacaaaaagaaagcctagtaccacatgaattcaaagccaaattttaccagatgtacaaagaaaagccrgtaccaaccttactaaaactattccaaaaaatcaaggagaaggaatgtcttcctaactcactctacaaatcctgtatcaccatgataccaaaatcagggaaggacaaaatgacaataaaaaaggaattataggtcaatatttctgattaacatcaatgcaaaactcctcaacaaaacactagcaaactgaatccaacaatacatcataaagataatttgccatgatcaaatgtgcttcgctcaagggatgcaaggatggctcaatatacataaatcaataaacatgatccaccacataaac

SEQ ID NO: 747359 - DNA, 635 bp, Homo sapiens
aatgacctgaccatatcaggtttaaaatgaccttgagttaatttttaaatggttacctagtacacatcagtatgttggcagcaatgaagtctgactgtaataacattctgtaccagaatttattctgtcaactgaagggaaaaaaaattatcccccaaatataaatatatgcatgatgtatttacattcataaacactagatgaattaaaaaacttaacactctcttactgatgcatatttaaatatatggaagcacctcatattactattcaaatattctattacaaatacatttgctaattttgtgtactttttttgtaatttgtattattttwtaaaaaagtgaataccaaaacaaattatataccacaggaaaacgtgctagctcaacagaatcaattagtatattttgaggacaaatttatacaatatgttatttcggatgtgcttcaagaaaaataaaatgaatcacacctcaaaacagaaatccttttcaatagtaaatgagttcatttataattgttaagcttattagtcagctaagaacaatactagtctctttgtaaaaatttctttattatgtcaaggccttcattgcctttcacacagaagagcatttcttacacatttggtt

SEQ ID NO: 747360 - DNA, 635 bp, Homo sapiens
aatgacctgaccatatcaggtttaaaatgaccttgagttaatttttaaatggttacctagtacacatcagtatgttggcagcaatgaagtctgactgtaataacattctgtaccagaatttattctgtcaactgaagggaaaaaaaattatcccccaaatataaatatatgcatgatgtatttacattcataaacactagatgaattaaaaaacttaacactctcttactgatgcatatttaaatatatggaagcacctcatattactattcaaatattctattacaaatacatttgctaattttgtgtactttttttgtaatttgtattatttttwaaaaaagtgaataccaaaacaaattatataccacaggaaaacgtgctagctcaacagaatcaattagtatattttgaggacaaatttatacaatatgttatttcggatgtgcttcaagaaaaataaaatgaatcacacctcaaaacagaaatccttttcaatagtaaatgagttcatttataattgttaagcttattagtcagctaagaacaatactagtctctttgtaaaaatttctttattatgtcaaggccttcattgcctttcacacagaagagcatttcttacacatttggtt

SEQ ID NO: 747361 - DNA, 464 bp, Homo sapiens
agacaaattgagcagaaaaatgtccttttattcaaatgttatggctgtttagaatctttctgctttatctctttaaaacatacatagtccattaatatattcactgaatctttgaaattttgattgcttcataaaatgattttgttacaaaccttttaataatctattaaatatatcaattcttttaatcataatttaattatacttaatattatatctaagccacctctttagccattttcaaataaagagaaaccagtagagtctttaagtgttcaattgcraatatcaatatagaaaagataatatttcagtaatagagaaaaatttaacctgtaacaatttaacatcaaaagaaaaatgtcttggattcatcaaaattgatatactcagttaatttttttggaaggaaaaaaatcttcaaaacctagaaactgaagaagagcaataataattgaacatgt

SEQ ID NO: 747362 - DNA, 701 bp, Homo sapiens
tctaaatgggtttgcagtcactaaaatcaaggtgttggcagagttgtggttctttctgaagtgtctagaaaagaattttttttacctctttttcagcttctagaggttgtcaccattccttggtttctggcctccttccattttcraagccagtgatgtcaggttgagtctcacacattgcgtcactctgacacagattcttccacctctctcttcatgttagtatgtagtattctacatactaacaatgtagttactcttgtaactacattgggcacacctggataatccaggataatctccccatttaaattcaaccaattagcaaccttagttccacttataacttaatatattcacaggttccagggattaagatgtagacattttaatgcccattctactgcttatcacacatacataagttatttttttaaattatcacatttgcttgagtgaaaccatatgactttttttttctagtattggaggaaacacatccaacccgattaagctatttgggacatagcaattttttcctcaattttgtttatgttcctcactaaggatagggtacagtggtatataggaatcaattaatcttttatgatatatttgccactagtacatttgtactttatttttcatttacagacttttaattttacatacaagttcctaccggtctgaaagtgtttaca

SEQ ID NO: 747363 - DNA, 584 bp, Homo sapiens
aagatacagcatttgacaaaaatgcactccaatacaggaaagtgacaaagagaactcccaaggtgacagctgtctgtcaggtttggagagctgccagtccagactgcaggagagggcggacggcatttgctgtccaggaaacaaacagcctggtgtttgacagatccactgcagaaaatagaaagaaaaaaacctctgtaggttcaaagaaaacaaagcgcttttccgcgctacctacagaggggtccatagggcgttgttctggattccsgtcgtaacttaaagggaaactttcacaatgtccggagcccttgatgtcctgcaaatgaaggaggaggatgtccttaagttccttgcagcaggaacccacttaggtggcaccaatcttgacttccagatggaacagtacatctataaaaggaaaagtgatggcatctatatcataaatctgaagaagacctgggagaagcttctgctggcagctcgtgctattgttgccattgaaaaccctgctgatgtcagtgttatatcctccaggaatactggccagagggctgtgctgaagtttgctgcggccactggag

SEQ ID NO: 747364 - DNA, 596 bp, Homo sapiens
tgaggataataatatttcctcccatagagttgttaggattagtgagattaccttccaacttccctcctccttcctgtctttcttctttctttcttgtgtatgtatctatctaaaataatgcctcgtatcctaaatgctcaataaatgttagttgctattaaatgcctctctcttttgtatgtggtaggccctaggaatttagagagaaataaagtcactggtgtcagagaaataataaaaggaagggtagggggcagcaaataaaggtttgtagtccattatgctaagttgggtaatagagatggacaagcaaygtgttatgtgagatgaaatagagatgttagttgtgcttggacaactggggaaaggtgagtgaaggttgatgaaggaagcagagacggaagcagatttttgaagggtaacttaagattgttgaagggtaaggagtttgacagtggggagttttatgggtcagtaccacttggggaactttgagggaaaaatgtgtatttttggttttgactcccagcctgttgaatcttttggggttggaaatctatttgccagttttaaaaggtttcccggactgtctggtg

SEQ ID NO: 747365 - DNA, 487 bp, Homo sapiens
atatattgaccagcaattaggatttgattatgtaccttgatcaaagtctccactattcttaggatacaaagccagggaggcagtgaaagcctttgcataatgaggctcattcttccaggaaaaagggaactgctaccctaaatgcttcctgaatgtcaattcaagaagacaggatatcatgactagatattgccctatcctaaatctcataacagggaaaagaaaataaaataaaaaagggaaaaatctgcgttgttaacataatttcaagtacaaagargatgaagtttcttgttttgacatcatcagagttgaccattaaactgtggaaggtccttaggaatccagacatcattttacagtgtgatgcagtgtgttctaatggaactgttactttgcagcttgagtgtgtcaccccactcagcagtggcagtccacagaactgtacttgttatgattactgagtggatgagcatacctaagattc

SEQ ID NO: 747366 - DNA, 612 bp, Homo sapiens
ggaacgttcaactctgtgaattgaatgcgcatatcacaaagaagtttctgagatttcttctgtatagttttttttgaacaaattcccggttccaatgaaggcctaaaagaggtccaaatatccactcccagattctacaagaagagtgttacaaaactgctctatcaaaaggaatgttcaactctgtgagttgaatgyaaacatcacaaatttgtttctgagaatgcttctgtgttttttttctaggaagatatttccttttctactgttcgccccaaggcgctctaaatatccacctgaaaattctacaaaaagaatgttcaaaaactgctttatcaaaagtaaggttcaactctgtgagttgactgcagacatcacaaagaagtttctgagaatatttctgtctactttttatgtgaagatattcccgtttccaaagaaaaccacaaagcgctccaaatataaagatgcagacttacaaacagagtgtttaaaaactgctatatacaaggaaaggttaaaatctgtgagttgaacgcacacttcacaaagaagtctctgtgaatgcttctgtgtagtttttatgtgaagatatcccgtttccaatgaagg

SEQ ID NO: 747367 - DNA, 612 bp, Homo sapiens
ggaacgttcaactctgtgaattgaatgcgcatatcacaaagaagtttctgagatttcttctgtatagttttttttgaacaaattcccggttccaatgaaggcctaaaagaggtccaaatatccactcccagattctacaagaagagtgttacaaaactgctctatcaaaaggaatgttcaactctgtgagttgaatgcaaacatcacaaatttgtttctgagaatgcttctgtgttttttttctaggaagatatttccttttctactgttcgccccaaggcgctctaaatatccacctgaaaattctacaaaaagaatgttcaaaaactgctttatcaaaagtaaggttcaaytctgtgagttgactgcagacatcacaaagaagtttctgagaatatttctgtctactttttatgtgaagatattcccgtttccaaagaaaaccacaaagcgctccaaatataaagatgcagacttacaaacagagtgtttaaaaactgctatatacaaggaaaggttaaaatctgtgagttgaacgcacacttcacaaagaagtctctgtgaatgcttctgtgtagtttttatgtgaagatatcccgtttccaatgaagg

SEQ ID NO: 747368 - DNA, 639 bp, Homo sapiens
gaacgtattttttgattgggcaattttataactctctttttgtagattctgcaagtgggtatttggagccctttgctgcctatgttggaaaaggaaatatctacacataaaaaatacacagaagcattctgagaaacttctatgtgatatgtgcattcatctcacagagttracactttcttttgattgagcagtttcgaaactctctttttgtaaaatctgcaagtggatatttggagacctttgcggcctatggtggaaaaggaaatgtcttcccataaaaactacatagaagcattctgagaaactccttagtgaggtttgcattcaactcacagtgttgaacctatcttttgtttgagcagatttgaatctctctttttgtagaatatgcaagtggatatttggagcccttagtggcctattttggaaaaggaaatgtcttcacataaaaactatgcagaagcattctgagaaggttctttgtgacgtgtgtgagttgaacctttcttttgactgagcagttttcaaacactccttttgtaaaatgtgcatgtggatatttggagcactttttgtcctatagtgcaaagttaaatatcttaacataaaaactagacagaagcattctgagaaact

SEQ ID NO: 747369 - DNA, 609 bp, Homo sapiens
atatttgaagtgctttgagaccaattgtggaaaaggaaatatcttcatattaaaattacacagaagcattctgagaaacatctttgcgatgagtgcgttcaactcacagagttgaaattttctttagattgagcagttttgaaacactatttttgtagaatctgcaagtgtatatgtggagcgctttgaggcctatggtggaaaaggaaatatcttcacataagaattacacataagcatcctgagaaactgttttgtgatgtgtgcattcaaatcacagagttgcatttatctttttatagagcagttttgaaactctcttactgtaaaatctgcaagtaaatatttttagccctttgtggcctatagtgtaaaaggatatatcttctcataaaaamtacacagaaatattctgagaaacttctttggatgtgtgcatttatctcacagagttgaaactttcttttcgttgaacagtttggaatcactctttttgtagaatctggaagtggatatttggagcactttgaggcctacagtggaaaagaaaatgtctttgcacaaaaactacacagaagcatactgagaaacttctctgtgatatgtcca

SEQ ID NO: 747370 - DNA, 609 bp, Homo sapiens
atatttgaagtgctttgagaccaattgtggaaaaggaaatatcttcatattaaaattacacagaagcattctgagaaacatctttgcgatgagtgcgttcaactcacagagttgaaattttctttagattgagcagttttgaaacactatttttgtagaatctgcaagtgtatatgtggagcgctttgaggcctatggtggaaaaggaaatatcttcacataagaattacacataagcatcctgagaaactgttttgtgatgtgtgcattcaaatcacagagttgcatttatctttttatagagcagttttgaaactctcttactgtaaaatctgcaagtaaatatttttagccctttgtggcctatagtgtaaaaggatatatcttctcataaaaactacacagaaatattctgagaaacttctttggatgtgtgcatttatctcacagagttgaaactttcttttcrttgaacagtttggaatcactctttttgtagaatctggaagtggatatttggagcactttgaggcctacagtggaaaagaaaatgtctttgcacaaaaactacacagaagcatactgagaaacttctctgtgatatgtcca

SEQ ID NO: 747371 - DNA, 562 bp, Homo sapiens
tttgcaacatcggccatgaagggctccaaataaacacttgcaaattctacaaaaagagagtttcaaaactgctctatcaaaacataggttgaagtctgcgagttcaatgcacacatcacagggaggtttctcagaatgcatctgtgcagtttttatgtgaagatatttccttttccaccataggcctgaaagcaytccaaatatccacttgaagattctgtgaatagagtgtgtcaaaactgctcaatcaaaagaaaggttcaattctgtgagatgagtgcacacaaaacaacaagtttctcagaatgcttctgtgcagttattatgtgaagatcattccttttctacaacaggcctaaaagagctccaaatatccgcctgcagattctacaaaaagagtgtttccaaactcctcaatcaaaagagaggttcaactctgtgatatgaatgcacacatcacaaagaagtttctcagaatgcttctgtgtagtttttatgtgaagatacttccttttccacattatgccacaaagggctccaaatatgcatgtgcagattctac

SEQ ID NO: 747372 - DNA, 562 bp, Homo sapiens
tttgcaacatcggccatgaagggctccaaataaacacttgcaaattctacaaaaagagagtttcaaaactgctctatcaaaacataggttgaagtctgcgagttcaatgcacacatcacagggaggtttctcagaatgcatctgtgcagtttttatgtgaagatatttccttttccaccataggcctgaaagcactccaaatatccacttgaagattctgtgaatagagtgtgtcaaaactgctcaatcaaaagaaaggttcaattctgtgagatgagtgyacacaaaacaacaagtttctcagaatgcttctgtgcagttattatgtgaagatcattccttttctacaacaggcctaaaagagctccaaatatccgcctgcagattctacaaaaagagtgtttccaaactcctcaatcaaaagagaggttcaactctgtgatatgaatgcacacatcacaaagaagtttctcagaatgcttctgtgtagtttttatgtgaagatacttccttttccacattatgccacaaagggctccaaatatgcatgtgcagattctac

SEQ ID NO: 747373 - DNA, 464 bp, Homo sapiens
taaataatttttaatatttttagagttatctatactcttcgtctggccagaaatgtcttcaaggcccaagtaatattgcctttagcaattatctttctgcaaaaaaaaatgagagaatattttggtagaaaacaaataattacawattgaattagaagatgttggaaatggaaggcatcttgaaatcaaccagggtgaattacatgtttgcagtgatagaaaccaaggaccagaaaagttgttgttcttgttgttgttcttctttgtcttcttcttctttttgttaaagtcacatatctaattgggatagaactcagaatttctgcttgtgagtactctccagggtaccgtggtgtccattgttttgaaccaacaattgatatgttttgaaacgttttttgaactttcaaaattaaattactaatgaaaactcactctcacttaaaaaatatgtgctagctttt

SEQ ID NO: 747374 - DNA, 623 bp, Homo sapiens
aatggttaaggagcgatattttctggacttgaatcctgttcacacaagcttgtcaccttggcctaatattgtattctctctaagcttcggttttcctcaagtggaaaatgaacataatgagaatgcttacctcatgggttgttgtgaggattgcttaaattaaaacagtaccttgcacagttaaatagtcagtaggtttagctaatacaattattatggccatagattgaattaaattttactgtttcagcattaatgaacaaaatgatctaaaagtttgctcaataacactgagatcaaaatacagtgggggaaggtatttagaagtcatttaaaaaaataaggatttttataagcttaagacatacattatttcacataattgtggcaattttattcattaaagcagatgagagatcttttaccaggaaatgtagttgtctgtgcaatttaaagtatttatctmacaagtaatcagtgacattatttttaagcatgtcagtgactccaataggcctttctctctagttccctaagcaagtcctggggttttattttattcctaccagctatatcttgaagcatgggttctataatttgaagaatatttgaatccgttagaa

SEQ ID NO: 747375 - DNA, 622 bp, Homo sapiens
gtgatatcttgtggaaggaaagggcaattaagatccctgtgaactaaattatgacatagagctataaagttgatatacccccgaggtatgacagtgaatgtgtattgctggccttgtcatctgaaagcaaactgttcctggtggtctttactaatagctgtccagaaaaagcatttatcagatcaataacattatactgggtactagaggatgtgttaatttgctcaagtaatgaaaccacatttggtaaggcagttgcaattagagtcacctccaattggtaatccactgtcatcttccaagatccatctgtcttctgcacatgccaaacatacaagttgaataggaatgtggtgggaatcaccacccctgcaaytttcaagttactgatggtgtcattaatctctgtagcccctccaggaatgtgttgggagtcaccaaccctgcatcttttaagttactgatggatttattaatttctgcagtaccatcaggaatgtggtgatgcttttgctttactattttcctaggcagaggcagtactagaacttccacttggtattccccaccataaaggtccttactccacagagtaagaaaataatatgagatcctaccacct

SEQ ID NO: 747376 - DNA, 607 bp, Homo sapiens
aagggagaaaatttcctctctctatatatatctctctctcacaaaagacccacatccagaatatattaagcactcctgaaaatcaataataaaaaggccaaaaaaagattaagacttgagcaagcagttcacaaagaaagatagataaatggctagtgagcatatgagaacgtgctcaacattattaatcatcagataaatgcaaattaaaatcacaataagacactactccacacacaccagaatcattttaattaaaaggaccaccaataccgggtgttggaaggaatgtgaagcaactggaactctcatacccttttgatggaaatgggaaayggaaaatggttcaaccaccttggaaaactattgggtggttttttaaaaagttaatcatacacctactttatgtctcatgatatagacaaaaatgtttatagcagtcctattcattatagttaaactgataaggaactcaaatttctatcaacaacaaaatggctaattattcaaataatagaatacttctcagcaatataaaagaacaacctactgacacagaggagcatgaatgaatttcaatttattataccgaggcaaacaatttcag

SEQ ID NO: 747377 - DNA, 607 bp, Homo sapiens
aagggagaaaatttcctctctctatatatatctctctctcacaaaagacccacatccagaatatattaagcactcctgaaaatcaataataaaaaggccaaaaaaagattaagacttgagcaagcagttcacaaagaaagatagataaatggctagtgagcatatgagaacgtgctcaacattattaatcatcagataaatgcaaattaaaatcacaataagacactactccacacacaccagaatcattttaattaaaaggaccaccaataccgggtgttggaaggaatgtgaagcaactggaactctcatacccttttgatggaaatgggaaacggaaaatggttcaaccaccttggaaaactattgggtgkttttttaaaaagttaatcatacacctactttatgtctcatgatatagacaaaaatgtttatagcagtcctattcattatagttaaactgataaggaactcaaatttctatcaacaacaaaatggctaattattcaaataatagaatacttctcagcaatataaaagaacaacctactgacacagaggagcatgaatgaatttcaatttattataccgaggcaaacaatttcag

SEQ ID NO: 747378 - DNA, 573 bp, Homo sapiens
cttacatttaggaaactcaagtttgcttttttataatggttaggttttccatattatcataaaaatcaactttccaattaatatttctccgttttttcccaagaagtcaatagttcttcatatccagcatcatgagtcgtctttgaggacatgagtaactgtgaggcaggaaaagcacactttagaagaaacaaagtatgttaggtcttcagactttactcaggttcaagatacatgtggatatgccattttttccaactgtatacatagaattcttagctaatccaagacaagtagagcagatcactgggttcttcaaataattacaatttatcagtctagtattcttctattctctataataaaattstggataaatcaaggcttttaaattcagttaaataaagcaataagtccataggggtggtatcccttggaatttgattcaacaatacatttttaatatatcttttaaaaggaaaaagaattttaaaatcaccaggaggaaaagcagagcataagacattcactggatccagtcacatgtgtaaaggccctttaccaagtcaatac

SEQ ID NO: 747379 - DNA, 620 bp, Homo sapiens
aatcaggaaaacaaaactgctcctcctcacaattgtcttaattcaactccttcactcattcagtttcttgagaagagaagggaagatgagtagtaactaaatcaactaatccatttcatacacttgtttctcacttctttgagacgtacgtagttctgatgacattgttcactcagtaagagagcagagtggygtaatagctcccaggactgagaatcagcagctccattatagtctcatctttactgctgagtagctgtgtaagcctggacaagtctctttctttctctagctcctgtttcctcatgtatcaaacatgcatactaacatttatttctcagagatttgtgaggatcaaggaggttttggctgtgtaagccctttgtaaaattcagtattgacatccctgtctatgtatctgaacctgtttggatgttttttatttttgttgtttattttttatttttgctgtttttggtgttttaagacttggaaaaaaacagtgaaggtagtaaactgttgctaatcaccaacaccaactcacaaggatgagttctaccatttctgtcctgagacattctttgtgcagaactggtcatctgataataaagggaggtaat

SEQ ID NO: 747380 - DNA, 623 bp, Homo sapiens
aattgaagctgaaatgaaggctcctgcacagccatactgcctcctcatatactctacatgcccctagtcccctgtgccaggaactgaatacctctgcagatagactaaaggtgaggcttcaaggtctgcctgctaggcgtggtgctgaacgccttctcaagctgcccaagcacatggagtcttggaggctttcctttccagagaaagaaagtaggaccaatccccactccctgccataataagaaagagcycttggggacagcagcatacagagcacagaagccaaagagaattcaggcagggtgaaggaccccacacccctgccaccatcccacaaatcagtacataggccaagtgcccagtttgccaggggtcttgctacctgaagtgacctatgatctctggccatgacaatctctagcgagtccttcctgccattctgcagcctgttagccaatgcatgcaggccaggcggcacttactgcaaagccatcacagaaagcagcgaggccttcagactcctaggagaaacagtgattccttctactgctccatccccactgctaactctgggtccccacccctgtcctcccagagtcactctgatcctgctcatcacacca

SEQ ID NO: 747381 - DNA, 522 bp, Homo sapiens
ttacctttttaaagaatttgttgacagatagatatgcttctgcctgctctctgaccaacctgctgaggagatactgggtctggagatagtttgcttgtgcaaatacaaacaggaagctccagaacgcctgatctgaatctcgaccttctctctgagtggactccaaatgacctctctttcttgccattttcactgctgaagttggaaagtgactttgaggacattaaaaattacatttttccagaatcgttgatttragtcatgagtatacccgtgtagaaacgattggctgaccatcaaagataactgatcccttccaccgtgcacagtcgttgtgggaaggggctgcccagccccagttctaggcaggactagctctcaccaagggaatgatgctgtgctgttgtctcctgcaggtcaaaatgactaagaaacatacgtgtcttccacacagtcactctccctgacccatctgctgaatgaaaataactctgggaacttagcagagggcagagccacagg

SEQ ID NO: 747382 - DNA, 469 bp, Homo sapiens
aaaagaatatgaacatcaggccttgagtcccagatcttccctctgatatagtctacccaaatgagaagaaaccagaaaaataattctggtaatatgatgaaataagttgctttaccacccccagaagatcacactagctcaccagcaatggatccaaatcaaggagaagtctctgaattgccaggaaaagaattcagaaggttgattattaagctaataaagaagccaccagagaaaggtaaagtccaatttaatgaaataaaaaaaagatagaagatataaaggtaaaartcttcagtgaaatagagagcataaataaaaaataatcacagcttctgggaatgaggaacatacttagaaaaatgcaaactacactggaaagtttcagcaattgaatcaaacaagtagaagtaagaacttcagaaattgaagccaaggctttcaaatttactcaatccaacaaagacaa

SEQ ID NO: 747383 - DNA, 610 bp, Homo sapiens
aggtgttataccataaaatatcttgaaataaaatgttcagagtcaacaggagctgtgtgggtaatactgagaaaaccaatagccctacaaaaaaaagtatgcatacatgtataaagttcctccaaggaaggggacagggaggtagaggaagactgctactttctatgatgaggccttctgttctaattaattttttttccacatgggtatgtgttacttggagaatgtctttggatgaatcacattaattttcagtttctctatctttgtaatgcagaaaataatgtcttctcacctacctttccagaaacgtaaggaaatgtatacaaaaatgtttcaaaaatgctgaagatgcatttaataggaaatataggtacagcaggacaggmtataacaagacctagaggatttgacagggcatcagcccagtgctgtccaatgaaaacataattaaacactttctggtagccacttaaacaatttaaaatgaggcagacaaaagtaattttagtaatctatttggcacaatgtatctaacatattatcatttaaacatgtaaataatatgaaaattgttgagatgttttacagtcttttctttcatgtgacg

SEQ ID NO: 747384 - DNA, 524 bp, Homo sapiens
tattgttcagctaatcatattttgttatggacaagttttcttcctggagtctggggctgagtaatacagtccatttattgttggtaaacacacctgatggtccacttcatgtgaggtgctgtgcttactctcctatggatgggacaatcaccataaatgttgaaataaatatcctcggccgggtgyggtggctcacgcttgtaatcccagcactttgggaggctgaggtgggcggatcacgaggtcaggagatcaagaccatcctggctaacatggtgaaaccccgcctctactaaaaatacaaaaaattaggcaggtgtggtgatgggcgcctgtagtcgctgctactcgggaggctgaggcaggagaatggcgtcaacccaggaggcggagcttgcagtgagtcgagatcatgacactgcactccagcctgggggacagagcgagactccctctcaaaaaaaaaaaaaaaaaaaaaaaaaaagaaaaagaaagaaatatcctcacacgaaacagtcatattt

SEQ ID NO: 747385 - DNA, 579 bp, Homo sapiens
gtgaaaccctgtctctactaaaaatacaaaaaattagctgggcgtggtggcaggtgcctgtagtcccagctactcgggaggctgaggcaggagaatggcgtgaacccgggaggcggagcttccagtgacccgagatcacgcctctgcactccagcctgggcgacagagcaagacttcgtctcaaaaaaaaaaaaaaaaagattttctagagaagcaaacgactgtccagaatagagtatatttccccgcttaccttgatgccagatatgtttatgtggccaaattctggccatggaataaaacttgaagtatccaacagaagtttctgagagccttctttaggagctaagtacatagttttgtctttttgctctatccatctgttgcctggagtatacatggtgttttggactatgatgakgccacactcgaggagtggatgagtggggaatagaaagacgcccgggtagctgacaacttcgtgaaacggagcttccatgccatgcctgggcctttgtgtgaaggagaacaaaatttctgtcttgtttaaaacactcttgtgttgagtttagatgttac

SEQ ID NO: 747386 - DNA, 579 bp, Homo sapiens
gtgaaaccctgtctctactaaaaatacaaaaaattagctgggcgtggtggcaggtgcctgtagtcccagctactcgggaggctgaggcaggagaatggcgtgaacccgggaggcggagcttccagtgacccgagatcacgcctctgcactccagcctgggcgacagagcaagacttcgtctcaaaaaaaaaaaaaaaaagattttctagagaagcaaacgactgtccagaatagagtatatttccccgcttaccttgatgccagatatgtttatgtggccaaattctggccatggaataaaacttgaagtatccaacagaagtttctgagagccttctttaggagctaagtacatagttttgtctttttgctctatccatctgttgcctggagtatacatggtgttttggactatgatgaggccacactcgaggagtggatgaktggggaatagaaagacgcccgggtagctgacaacttcgtgaaacggagcttccatgccatgcctgggcctttgtgtgaaggagaacaaaatttctgtcttgtttaaaacactcttgtgttgagtttagatgttac

SEQ ID NO: 747387 - DNA, 356 bp, Homo sapiens
tacaatgggattattcacatttctgctttttgttgcattattcacttgaaactaaaaaaaaaaatcaaggagcaattacttccaagacttttccaaacacatcactgggcgggggaggggtcttcatctgggggcaaggcactgcaaacttccaacattaggatatcatctgtgaatgagataacctatcagtggyggcctaggctccagccttctggtcaatctcagcaacttggaagcaaaaaagcagaaactgttacattggttgatacttcttttacaaaagggatgctctgttctcttttgcagccaaaatccacagtgatccacataatactcaggaatcacccagaagg

SEQ ID NO: 747388 - DNA, 607 bp, Homo sapiens
gtattaaaaggtaggaccaggtgggacctttaagagattattaggtcatgaaagctctgccctcatgagtggattaatctattcaaggattgataggttatctcgggagtaagttagttatcttgggagtgggtctgttataaaagccagtttggctctctcttgagtgcccctcccaccctataatgccatctgccaagttatgacacagcaagaaaaccctcaccagatgtatcccctcaatctgtaacttcccagcctccagaataataagaaataaattatttttattataaattgcccagtctgtggtatagtgtcatagcaacaaaaaactggactaagatggatggctattccccccmaaaaaataactgttgctaaggaggtggagaaattggaatgcttgcacacttttggtagaaatgcaaaatggtgcagccactatggaaagcaatatggtagattctcaaaatatcaaaaatagaactatcttacgtcctagcaattgcatttctgggtatgtatccaaaagaactgaaatcaggatctcaaagagatacctgcacccacattttcattgcagcactattcttaatagccaaga

SEQ ID NO: 747389 - DNA, 619 bp, Homo sapiens
tggggaaggcagcacttgcgtgtttgtgtgtccagagaccgggctggtgatgatgagcaggagggagcgtatgaagatatcagatgtgcaaaggacaaaacccccacccaattacaggaccactgagcctcgagctagggaagtcttaaaacagattgcctggrccgggtggattttccctgagcaggtgtacacctgaaaggaaagcaagtgtgagcatgccacagagtcaacatacatcttgtactggcattcttaagatcagcctctacggtgcagcattttcttgcatatgagtttcctttaaaaaaaaaaaagtcaaattaaagtttgagaactgatagttgcgaacttgcagacctttgcatgttggtggatcctttgagaacttcaagctgtcatttttcctgagacggcttgaggccagtctggttggttcacaggacatcattaccctagaaaatcagcagttttcctcccctgactggttctgggtgaggcatacacagatgtttccttccctcagcagtactagagcatcattacattttatttctcaaagttataaattcattttattttgaaaagagagaatcactgaattttacagctggaaagg

SEQ ID NO: 747390 - DNA, 619 bp, Homo sapiens
tggggaaggcagcacttgcgtgtttgtgtgtccagagaccgggctggtgatgatgagcaggagggagcgtatgaagatatcagatgtgcaaaggacaaaacccccacccaattacaggaccactgagcctcgagctagggaagtcttaaaacagattgcctgggccgggtggattttccctgagcaggtgtacacctgaaaggaaagcaagtgtgagcatgccacagagtcaacatacatcttgtactggcattcttaagatcagcctctacggtgcagcattttcttgcatatgagtttcctttaaaaaaaaaaaagtcaaattaaagtttgagaactgatagttgcgaacttgcagacctttgcatgttggtggatcctttgagaacttcaagctgtcatttttcctgagacggcttgaggccagtctggttggttcacaggacatcattaccctagaaaakcagcagttttcctcccctgactggttctgggtgaggcatacacagatgtttccttccctcagcagtactagagcatcattacattttatttctcaaagttataaattcattttattttgaaaagagagaatcactgaattttacagctggaaagg

SEQ ID NO: 747391 - DNA, 579 bp, Homo sapiens
cgtgctgaaccttgtttgagtgtcttgtatgacccgtctttgcagtgctttaaaacagtgcttctcaaagtatctgaggtgaaggacaatatgctctattccttagttcaggaaccgatgagcatgaccagtctgagccagtctgagaacatccagactggtctataccctgttctaagagggaagtccacagatcacatgcttggatattgtgctaaggtcagattgctagaaacattttaaaatccttccttcctttctttttctcwacttatttggtaaggacccacaactaacagtttgtaggtggtctgtggacatacttttagtggccctggtctagagccctgtctttggggtcagatagatccaggtttgaatcctggcactgtcactgacttgcggtgtgttcttgggcggctgtttaacctctctggggcttaattttgtcatctctaaattggagatgataatgcccctgcctcatagggcaggggtgaggattaaatgagataagtttgggtaaagcttatcgttaagagcccagcacacagaatttgggcttgataatattgggtg

SEQ ID NO: 747392 - DNA, 607 bp, Homo sapiens
agtggcgttattattgtttgttttttactctccctttattcttccaaacggtgtctttatcatctttttttttggctttactattttttttaagtagtaaatattagtagatagtgaaactgaggcacaaacaagtaaaaagttgtccaagatcacagagaaaccaacatctaccttccagaatctatgatctcttcagcctgctccaaatgtctcacctggcagagggcctaagtgtccggaaccccagatgtttgaagaaatgggacaggagtctgttcctcagacatttaccgcctattaattaggaggtrgtgtcttcttgactccctccagcgggtcccaggcctgcctgcccgaacatctgttctcctaacaatgtctgcccataaatcctgtccccgagtccagggtggcttagctggggaacaatggagcctatgaccggcagccaaatcctcaccatggttacacgagggtgtgactgcaactgtgtgtgcttgttggcaggcaccagcacctgcaactggggccaaggttgtgtgtgtgtagcggtctccagggccaggggtgggggcgttgggctgcggttgggagggatcctcac

SEQ ID NO: 747393 - DNA, 606 bp, Homo sapiens
tcttggagtgaaatctctatcctatgaacaagtcgaggtaaggacaatgaaggccacagtattcttgacctactgtgtctggggtagagcttctgccctatcagtcttggctgagtggaggaaaagagccctttcccccaaccactaagctgcactcaccaggaatttagccacctccacttagacttcaaagggataagaaatgctggcagcatgcccctcccaatacratactgtatcccttgattgggagctcaggggagagaaacttcatcttctttgccacacccactgggaatggaatttctgtgaagctgagctggagaaggaacaggggaaaagtgaaagcgagtcatggttgaagtgccaaaaactcttgctgttcttaccaagctgtagttgattttcttgaataaatgtcttcatttgctctatgcctttaggacaatttccagatttaattaccaattagcaattatgcttgttttgctagggagcacatctgtggagctcctcatgctaccattctagaaatagaaaccccctcttcttttctaaaataagtatttcatgctgtaaatttcccaatgaaacctacttgggcta

SEQ ID NO: 747394 - DNA, 611 bp, Homo sapiens
ggataggaataccttattttacaaatagccagtgcatccctttctcctcactacagcctgtctgtctcacaggtacatacataccaggatatcaggaagagggcttaccagactgcaacagagcaggaagccaggaagctcttccttaatggatggacagccagtgatctgcccaaagaatgaacrgtggacaaacaatacacctaaaggatactgatgccttatacaggaagcaaggattatgaaaaagtatgtccatttcatatgaaatatacttaacattttgtattgagctgcattaaaactgcaacaataaggaaatttattatgatttaaaagagcactcatgcaggtcaatacgtgttgctagaaacacttttccaaatgacagaaacagatttcttcctatacactaagctcatgaagggcagaatctatgtctaattcatcctcaaccccaccccagtacctaatataataccttccccaatataaccatttaatgggtatctgctgagtgactatatggataaacaagatggtggtattacaaagtgttttttaacattttgtgatataaaccatatgtaattttaacttgtatgtattct

SEQ ID NO: 747395 - DNA, 617 bp, Homo sapiens
acaaattaaactgcccatcctgaattttatcatgacttccataggatgatttttcttataatactacaagattatgtttgtctttcccgtaacaacaattcttactctagtaccataaaagtatgaaaagtacattcccaattacttcatcagtaatagaaataaaaaggacaggccccagaaccagtccyttcagcacactactcaccatattccatcaggctcatactactttttaaaatgaattttacaacatacctgaggccaaactttactggtttgtcaaaagactacttctcctgagaattcttcagaaaataactcaaagaatgttatgtataatatagattttaagtatatacatagatatgattattatatatctgaggcccaccagatggacaaaaccaatctagctggtactgtctgtgaaggctgacataaggttaggaagtcctggggctgtaccagatacaacagggagtcggaggttgcagtgagctgagatcgcgccactgtactctagcctggcaacagagcaagactctgtctcaaaaaaaaaaaaaagaaaagaaaagaaaagaaaaaagaagattctgatacgatttattcaaaca

SEQ ID NO: 747396 - DNA, 600 bp, Homo sapiens
cgtacaacatctactgacataagaagtcagtactggagatataaatgttggagttttacatacaaacttaattcgaaaccttgtaggagttaaaaattaaaaagggttagtattaggcaactacttggtatccacagttctcctatggcaaacccctatggcaaaaagagcaactaattttatcttatttcacaaacttcttatgaaaatagsacatattttcataagaagaagaatttatccatgaaaataggactattttcataagaagtttgtgtgccactgcactccagcctgggcaacagagcaagactgcataagtcttaaagatagagtttatgatttataacaaaaggtgcttatgtcttaaagatacatacgtttatgatttgtgaagttataaatcataaatcttaaaaataaattctgataacttttttaaaaattgaaaactcatgagccactagaagtgtgaacattgccagcctccctaaagccttattagttaccctccacccaaaggtaaccactattttgacctctatcagtacaaataaattttgtccttttcaaactttgtataaatggaatcacacagta

SEQ ID NO: 747397 - DNA, 585 bp, Homo sapiens
tgttgcagtgaaaccgctgtcataagatgtgcctatgtcaagcctcagtagttactatcaaggagcttttcaaactggatataaaaatttgaacttcttacagcagtgtatgagacttcagactattctgtatctttgtcaaaactttgtactgtgattttgtttttttaattttagccctttttgtaggtatgtagagatactgaatttacatttccctgactattaataatttgagcacctttttaagtrtttattaatcatctgaatagcttcttttgtgggctgcctattcaaatacattgctcttttttattgaattgtttttcttgatgatttttttctatatttaaaatgcaagacctttattgaataaaggaattgcagatatcttcttccattctgaattgccttttccctttttttctttttttttttttttgagacagagtcttgctgtgctctgttgcccaggctagagtgcagtggtgcaatctcggctcactgcaggctccacctactggttcaagagattctcatgcctcagcctcccgagtagctggcagcatgtgccaaccacgcttg

SEQ ID NO: 747398 - DNA, 610 bp, Homo sapiens
tatattattttattttattccttataatccttggattgggtttcaacattcccctgaatctcaatcatcttcgttcctattcatagtctaaattctacttctaccatttcagcctggttaagaaccattgctggaraactagtgtgggtgtctgtaggtaagaagacactctggctttttgagttgccagagttcttgctctggttctttctcatctgtgtgggctcatgtcccttcaacctttgaagttgctgtcctttggatggtggggtttttgttttgttttgttttttgcttttatctccattgatgtccttgggggtttgtggcataaggtggggtccatcgactggcttcatttctagtagattttgaggagccaaggctcagctcaacactcccacactgtatactctaactctaaggggctggtatcgggtcactggctttgttctctggtccctcaaagttgggacctgctgtgttaaatgggccaaagtgttcctggtccgatggccacaacactccaacgagtggtgccagccaaagcgcttcatcaggcagtggcaatgtgattaatgcttgtttgcatgtgccagcagcagtggta

SEQ ID NO: 747399 - DNA, 610 bp, Homo sapiens
tatattattttattttattccttataatccttggattgggtttcaacattcccctgaatctcaatcatcttcgttcctattcatagtctaaattctacttctaccatttcagcctggttaagaaccattgctggagaactagtgtgggtgtctgtaggtaaraagacactctggctttttgagttgccagagttcttgctctggttctttctcatctgtgtgggctcatgtcccttcaacctttgaagttgctgtcctttggatggtggggtttttgttttgttttgttttttgcttttatctccattgatgtccttgggggtttgtggcataaggtggggtccatcgactggcttcatttctagtagattttgaggagccaaggctcagctcaacactcccacactgtatactctaactctaaggggctggtatcgggtcactggctttgttctctggtccctcaaagttgggacctgctgtgttaaatgggccaaagtgttcctggtccgatggccacaacactccaacgagtggtgccagccaaagcgcttcatcaggcagtggcaatgtgattaatgcttgtttgcatgtgccagcagcagtggta

SEQ ID NO: 747400 - DNA, 610 bp, Homo sapiens
tatattattttattttattccttataatccttggattgggtttcaacattcccctgaatctcaatcatcttcgttcctattcatagtctaaattctacttctaccatttcagcctggttaagaaccattgctggagaactagtgtgggtgtctgtaggtaagaagacactctggctttttgagttgccaragttcttgctctggttctttctcatctgtgtgggctcatgtcccttcaacctttgaagttgctgtcctttggatggtggggtttttgttttgttttgttttttgcttttatctccattgatgtccttgggggtttgtggcataaggtggggtccatcgactggcttcatttctagtagattttgaggagccaaggctcagctcaacactcccacactgtatactctaactctaaggggctggtatcgggtcactggctttgttctctggtccctcaaagttgggacctgctgtgttaaatgggccaaagtgttcctggtccgatggccacaacactccaacgagtggtgccagccaaagcgcttcatcaggcagtggcaatgtgattaatgcttgtttgcatgtgccagcagcagtggta

SEQ ID NO: 747401 - DNA, 599 bp, Homo sapiens
gcatttaaagtgaaacatgctaactacaatcctccttcttaaataatgataggttctgaaatatcaacttgagctctaaaccaaagatgagttgacagtttcaattgcttggagagagtataaatatcaagcacatcatcctctcatagaaaaattcccagcctttgtctttgatacaattactgtgtcagaataaagccactcaacttttccattaacatctcaaacacattatatatcatcccaattcacaagactatccctacatggtcgcaaaattctataatctgagagaatcaaagaacttgacacttagaagtcattaggagaaaaggaaaggtattctatggaargagtatatctggtcatgtaacaaggtgaagaaagacagcttggaaatagaaaagaaagagacaaaactagtagagaccagcatctctacagagacaggagaagatgggaccaaaatcccaggataatttattctccacttttccttcacaactcagttaaagacttttccttctctaagatgcctcccattaccagtccatcttactgattattaccttattatgtttttaaagtattttgcttta

SEQ ID NO: 747402 - DNA, 608 bp, Homo sapiens
caggaacaaacacagaaatgatcaactagagactagtaagatcatatatccacagaagtggcttggaatggcaaagacaacacagaaggaatgaaggtagggtgacacctctctgaatatacctaatagtccaggtctggcgtttggaatcatattaatgttttatttactaaaaaaaaaaaaatgaaataaggacaggagagggaaattctgaaatgaactacaaacagaaacaaataaacatacttgtatttcaaatgattaataatcacactgaagggggaataaataaccaaatcaactttagaatacaatcttyggatcatgtgctcttgggctgaagacgaaaagaacacaaaagaactcttagactctagttacaggtttctttcttcacagagatatggtctatcaattgaaaaaccgtttcctgctattctaggtttgagcaaataagtaaatatataatggaagtcaggtttctcacagtcagagggtaataaaacatataagaagaataaaataaactgttgaatttgactagaaatggaattagtgtgagttcatactttctatatatttagagagatatagaaatatagatgtat

SEQ ID NO: 747403 - DNA, 602 bp, Homo sapiens
acaatctttggatcatgtgctcttgggctgaagacgaaaagaacacaaaagaactcttagactctagttacaggtttctttcttcacagagatatggtctatcaattgaaaaacygtttcctgctattctaggtttgagcaaataagtaaatatataatggaagtcaggtttctcacagtcagagggtaataaaacatataagaagaataaaataaactgttgaatttgactagaaatggaattagtgtgagttcatactttctatatatttagagagatatagaaatatagatgtataagtatgggatatgtgtatgatataaaaacacacatatgtaaatatataaacaacatacacaaatatatacacacacagggatgtatatgtatgtgtctatatattcatttgtttcctaattccacctgctgaaaggggctaaaagcaatttctttggaaaggacaaaaacatacttttagataatttctcagtgtcaaataagaaatcatactgaaaatcatgaactatactggaactgaaccacaaaaaatacactacatataaaaatgtgtgtgatacaacttagcatttcttaaaacaat

SEQ ID NO: 747404 - DNA, 602 bp, Homo sapiens
acaatctttggatcatgtgctcttgggctgaagacgaaaagaacacaaaagaactcttagactctagttacaggtttctttcttcacagagatatggtctatcaattgaaaaaccgtttcctgctattctaggtttgagcaaataagtaaatatataatggaagtcaggtttctcacagtcagagggtaataaaacatataagaagaataaaataaactgttgaatttgactagaaatggaattagtgtgagttcayactttctatatatttagagagatatagaaatatagatgtataagtatgggatatgtgtatgatataaaaacacacatatgtaaatatataaacaacatacacaaatatatacacacacagggatgtatatgtatgtgtctatatattcatttgtttcctaattccacctgctgaaaggggctaaaagcaatttctttggaaaggacaaaaacatacttttagataatttctcagtgtcaaataagaaatcatactgaaaatcatgaactatactggaactgaaccacaaaaaatacactacatataaaaatgtgtgtgatacaacttagcatttcttaaaacaat

SEQ ID NO: 747405 - DNA, 582 bp, Homo sapiens
tgcttttttttttttttttttgagacggagtctcgctctgtcgtcacccaggctggagtagagtggcgtagtttcagctcaccgcaacctccacctcccggatttaagcaattctcctacctcagcctcctgagtagctgggattacaggtgtgcgccaccatgcccggctattttttgtatctttagtagagacggggtttcaccaggttggtcaggctggtctcaaactcctgacctcgtgatccgcctgcctcggcctcccaaagtgctgggattacaggcgtgagccaccgtgctcagcccatttcattgctttttgactgacatatatattctgatgattttttccatatcaraaatatcaccccattcttattcataattacataaattttactttactgatacatcatgttttatgaatataatttgctattgatgcatgtaggctgtttagagtatttttctataacaaatggtatttcaagaatacccctatgcatatctttgtgtattatgtgtcttttcttgcagaataaatgatgtgaaatggaatggctcagtcacaggatggcacatt

SEQ ID NO: 747406 - DNA, 554 bp, Homo sapiens
aagcttgatttaaattacattttattggatgctgcagccttaagagacgtgactgctttacagtttgtttccacactgtgggcagctgctgtctgttctgtgtccacagtaggatcctgcccaataaggagcagcctccccacctcattgtgtttgaggcttggcgccttcctcttaactgtagggcttgagtcaggaacatggcttgactcgcagtggggctgctatgtatcctccctggcttccagccaaaatcacattggtagattcaaaggggccaaatttctttcccctctatctttccctttcccctggttttggaartagagttttctgtctactgatttgttagtttccttttcttctcccctcactgtcaatttctaggtcattgctgctcttaagactttagcagttggaacagggttggttctgtcaatgatgcatgaagcagacttagtgtccctgcttggcttctgctgcccttgtgggagcaaaagctgatatatgtttgtcagtaaagtcttaagtgtaattcagactgctgaggaaga

SEQ ID NO: 747407 - DNA, 519 bp, Homo sapiens
gcgttgtccatagtaacccttggaccttgtcacaagcctgccttccaacagcccaagctccaaggatctcaccagccatggggtccctcaggagccctgggcaaagctctcaggaagagacaaaagcagaagcaagaggcacgggcgggggttggatgcaaggaaggaaggaagccaagaaccacccgttttaatgctsttgttcagtgggcctggtattgagccaggactttgcccgcctcatcctatttaatttccattaacagcccctgaggtaggtgcacctatcaccacttgacagttgaggaaactgaggcacagcgaaatgaaaagcccttgcctgaggctggaaaggggaagagcaggattttgaatttacgttgcaaagcacctgatggggagagacaggagggcgacccctggcagcctcagggctgtctggctagtctcagcctctagaaaagttgggtccagaccctgaaattctgtgtctgggtcttccttgtcctgtgacttggg

SEQ ID NO: 747408 - DNA, 523 bp, Homo sapiens
gatgctgaagtgactcactggaggaaaccattcagaggaagaccctgagacagggacctcctgtttggtaaacatccttctccgacaatatcaaggaacgaaggaactgccatctcatttggaaatgcaacactgtaccctggatctgggtaacactctctggaggcttcccacggwctggccaaggtcatccttaagacccccttcctaatggtcctccatgatcagtcctcgggatactgcttatgctggccccaccatccacttcccggtgctcacggtggagatttccccaagttagggcccacatgaagggggcctgctggactctcacatcatccccaacgctggaggaaaggtcagcaaccattctgcatcgtgagcaatgcaaaccaggaccccaaatctaccaatgccagccaggcacccaactttggcttcagcttgtgcccagtcttttccagggcttccctatggcctccagatatgccctcgggcaccaaaagaagctgggtgagctgtc

SEQ ID NO: 747409 - DNA, 523 bp, Homo sapiens
gatgctgaagtgactcactggaggaaaccattcagaggaagaccctgagacagggacctcctgtttggtaaacatccttctccgacaatatcaaggaacgaaggaactgccatctcatttggaaatgcaacactgtaccctggatctgggtaacactctctggaggcttcccacggtctggccaaggtcatccttaaracccccttcctaatggtcctccatgatcagtcctcgggatactgcttatgctggccccaccatccacttcccggtgctcacggtggagatttccccaagttagggcccacatgaagggggcctgctggactctcacatcatccccaacgctggaggaaaggtcagcaaccattctgcatcgtgagcaatgcaaaccaggaccccaaatctaccaatgccagccaggcacccaactttggcttcagcttgtgcccagtcttttccagggcttccctatggcctccagatatgccctcgggcaccaaaagaagctgggtgagctgtc

SEQ ID NO: 747410 - DNA, 608 bp, Homo sapiens
tcacacactgaagaaacatcaccaaagttaattatgatttaaaaacttgcatccacagaaactatttctagttacaaagccactcggataacttacagactggactgggggccgggcatggtggcacacacctataagcccagcagtttgggaggcygaggtgggtggatcatttgaggtcaggagttccagaccagcctgatcaacatggtctctactaaaaatacaaaaattagccaggcatggtggcacatgcctgcaatctcagctactggggaagctgaggcaggagaatctgttgaacttgggaggtggaggttgcaatgagccgagatcacaccattgcactctagcctgggtgacagagcgagactccgtctctaaataaataaataaatagactggattgggtaactgggcctgtcttgtgcccagctcatcacataatgcagtgcattttcatttatacaacatcacagaagttaacatttgtggaattcctaggcattcaaagccaaaataaaaactcttcagcaatcctagacttccagagccaggaccagccctgttagcattagggaaccttagcacctccaggtgctactgac

SEQ ID NO: 747411 - DNA, 660 bp, Homo sapiens
cttcgctaagtaagttatgttcagggatcccttggcttgatactcatcccagtggaagtatatatgaaaatatttatcatagtattttttgagccagcaggacattggaagtgacctagttatacatgactaaagaggtagataaataaaatatacagttatacaacatggaaacctatgaattagttagaaatgaattagatgtacatcaaacaagtagtgaagttataaaaatgaatgctgaaaaatatgaagaaagaacatacctaaaatgcaattttaatatatgcaaattaacaactcaaccctgcatattttaaaagggtacccatatactcaagaatgtagatcagccacattgtagtggttgtttttttgggagagaagaatggacatgatgatcaaaaccaacatgcatttccaacagcacaagagcagcataggcttctgggcttattacagggttatttgcagcttctgttgcttctawtagttcccttcttctttaagcttttgatgtccttccaacacctttggaatcaagtctctgtatcatatctcttgtaagaaatatccagattggtttctctttccctgaccatttgctaactcatgtaatacttgatgacatttgcttttgatagctgaaggctatgatta

SEQ ID NO: 747412 - DNA, 583 bp, Homo sapiens
acttggcttgattaaactggaaactatttcctgaaaactatcagaaaaatktaataactagagttatattaaatgtcgggtgagttttagacagtgtgatcaaatgagagcaccgatttcatttaaaaaatatcataacacattcttatctcccttgcaataggctcagataagtcattattttaagaatgttctcatgaaaatacataactccacatctgtaaattttgttggccataatttatatattccttttcatcagcattgcttggaagtatattgtgtttaaacgacttaagaggcctgctgaatagattcagcattcgcgcatattgtaaactggtactctttttggtctatggggcagcattattacatgtcattcttttttctttttctgattgctcatgctcctcttctttcatttatatgcagagacaatgccatttcttcatttacctctgtacaatcatgctctcagactcttcatttgtagtgaagcatcgttttgaaaataaccttcctcttgttttaatttaatactaatactactaataagaatagctattgttttcagcactga

SEQ ID NO: 747413 - DNA, 583 bp, Homo sapiens
acttggcttgattaaactggaaactatttcctgaaaactatcagaaaaatgtaataactagagttatattaaatgtcgggtgagttttagacagtgtgatcaaatgagagcaccgatttcatttaaaaaatatcataacacattcttatctcccttgcaataggctcagataagtcattattttaagaatgttctcatgaaaatacataactccacatctgtaaattttgttggccataatttatatattccttttcatcagcattgcttggaagtatattgtgtttaaacgacttaagaggcctgctgaatagattcagcattcgcgcatattgtaaactggtactctttttggtctatggggcagcattattacatgtcattcttttttctttttctgattgctcatgctcctcttctttcatttataygcagagacaatgccatttcttcatttacctctgtacaatcatgctctcagactcttcatttgtagtgaagcatcgttttgaaaataaccttcctcttgttttaatttaatactaatactactaataagaatagctattgttttcagcactga

SEQ ID NO: 747414 - DNA, 606 bp, Homo sapiens
attcatcatgatggcacataatatcccatccagagaatcatcaaatgaactgtttattattgcacacttgtgcttttattttcatcttgtgctaatatttgtcaatcattatctgtagttccagacattatactaacagcttctaggctttaacttccataaggattatttccaatgattcctagaataatgccatggtgacaacagaatgcacatattattttgcatcttctctattatattttgagattgatgtaccagaagcagaattactatgtcaaaagttataaatgcttcttggttagatattgtacaaaagakttgtactaagttccacataccaaacaacttgtaccaagttagaatgctactaggtttataagagagcatctctttcagcctttcctttttaatctaaaatgtttagcaagttcaaaaataaagctctgtaaacatacaaataattcagattaaatatctaaaggaaatttatagctaccagaagaaaagatatacattttataaaattgttgtataattagcttctttcttttttcttttcttcctaatctcaagctgttcattgatcatgatcatgagtaggca

SEQ ID NO: 747415 - DNA, 634 bp, Homo sapiens
gatgaaaaaatgtaataaaattggatgactggcatgcccaaaaatatattccaagtaaattataaaccaaaatacaataagtaaaatttaaactttcagaagaaaatataggttaaccttgttttagccttatgaaaaaaatatagacaaaatacaaatagcatgatctcttgtcccagcactgccaatctttagtctccttcatattttccatagcacttaacttcttcttgtatattacaaaatttccttatttgtgttgtttgttgtctctttytttctgttagaatgcaggctccatcatgaaaggactctttgcctcttctatgctataatgtttctaagcacccaaacctgtaacattctgtaattttttgcctcttacaagataacaaggaaactcatggcagaagacacaagactcttaagtcagagactaaggacttactactcatagcactgcatacatctagaacatgagcttatttgtttatgtctgattcctcttacccccacattccatggagtaccgtggtatgggcccaggtatatcctccaaacagtgatttttgtatcgaagctaagaaacctagagcttagaaaatctgtttcttctataatgagtgataagcaa

SEQ ID NO: 747416 - DNA, 492 bp, Homo sapiens
cacagacccaacaccatgtggaagtcaccaagtcttggggcatatgctctctgaagcagtggcctgtgctgtacttgaccccttttattcatggctggagctggagcagctgggatgcagggcaccatgtcctgaggctgcacagagctgtgagaccctgggcctgtcccatgaaaccatttttccctcctagggctccaagcytctgatggaaggggctgccatgaaagtctctgaaatgtcctggaggcatttttcccattatctccgatgttagcatttcacctctctttacttaagcaaatttctgcagtcagcttgaatttctcccagaaaatgggtttttcttttctaccacatgaccaggctgtaaatttttcaaacttgtatgctctgcttcccttttaaatatgtttcagtttcagactgtctttttttgtgtatgcatattggcatatacagttagaagcagccaggtcacatcttgaacaa

SEQ ID NO: 747417 - DNA, 604 bp, Homo sapiens
aactttctcaaaactcaagttaaagagaaattcttaaagcaggcagaggtgaaagagacaaattctaaggaatgacaataataatgatggctgaattctcctcagaaacaatacaagtcagaagacaacagaacggtattttttaaaatcaatagaaagacaaagcaggataaatgtgaatgaaatcatgcctgagcagatcagagttaaatgactgaaaaattaaacatacaaaggcatttttgaaagtaaaaagaataaaaaattacacattacttatataaacatatagctagacacataaatgttcagaatttaaatatacatacacatataattaaaatacaatacatttctcatctaaatctatatgaagkctagaagagagtaaagagtagagggaaaaaaatgctaaaagaaactaaaatgccaacctagatttttatatccagtataaaaaagtttcagatagaagaaaactaatgtaattcattgccagcagactgatgctataagtaatgctaaagtatattctttatcctgaggacctttatccctactgaaaatccagatttttaagagagaacaaagaacatcaaaaatg

SEQ ID NO: 747418 - DNA, 596 bp, Homo sapiens
tcattcagaatatagtaaaaaaaattaaattaaaaacaaacatcaaaatgataattagggagatcccccaaagtattttaattataaaaactcagattaaaagtaaaacgttgggaccaagatatagcatgcaaaacctaaccacatggtagctaatcaagttatattttatcaaagtttgaggcaaagaatactaagtaaagaaggacatgttataaaagtgaaaacatcaacttatcagagatgcaacaatcctaaatgtgtacackactattaccagatgttcaaaatacatgaaacaaaaactgatagaacttaaacagaaataagttaaactacaattacaatggaaactttttttttttttttttttttttttttttttgaaacggagtctcgctctgttgcccaggctggagtgcgggggcacaatctcggttcactgcaagctccgaaccccggggttcacgccattttcctgcctcagcctcccgaatagctgggactactacaatggatactttttaaaacatttttctttcagtactcaatagaagtaataataataaaaaaaaaaacagtagggatgtaaaaaa

SEQ ID NO: 747419 - DNA, 555 bp, Homo sapiens
cttccctgtctgctttgtacagtagattccagatagagcagtaatacatgagagggtaggacgtggttgttttaacaggggaaaaaaactccaaaaacaaaaaccaagttttcctctgtttgatattatattaaaagcatatcttactgtggttgagaaaaatgtagacagagatgtttggggggttaactcttatgacttaaagcatttatataaatgcagaatataacagtctaaattttggcctgaataccaatttattggctctgtaaatttgtatttgttcaattttttaaaatacttgattacaactttaatttgcttcttctggtttatacataataagacttctgacttcatactaaatgacattttcttctaycttaccttgtttctactgtatgtatgtatatatacacgcacatatctctctctctcacacacacacacacacacacacacacacacacacacacacacatatatacacgcacacatatttcaaaccaatgttaaagtatgctttcaagactcacacattcaatattccccaat

SEQ ID NO: 747420 - DNA, 555 bp, Homo sapiens
cttccctgtctgctttgtacagtagattccagatagagcagtaatacatgagagggtaggacgtggttgttttaacaggggaaaaaaactccaaaaacaaaaaccaagttttcctctgtttgatattatattaaaagcatatcttactgtggttgagaaaaatgtagacagagatgtttggggggttaactcttatgacttaaagcatttatataaatgcagaatataacagtctaaattttggcctgaataccaatttattggctctgtaaatttgtatttgttcaattttttaaaatacttgattacaactttaatttgcttcttctggtttatacataataagacttctgacttcatactaaatgacattttcttctaccttaccttgtttctactgtatgtatgtatatatacaygcacatatctctctctctcacacacacacacacacacacacacacacacacacacacacacatatatacacgcacacatatttcaaaccaatgttaaagtatgctttcaagactcacacattcaatattccccaat

SEQ ID NO: 747421 - DNA, 644 bp, Homo sapiens
gttcaattttttaaaatacttgattacaactttaatttgcttcttctggtttatacataataagacttctgacttcatactaaatgacattttcttctaccttaccttgtttctactgtatgtatgtatatatacacgcacatatctctctctctcacacacacacacacacacacacacacacacacacacacacacatatatacacgcacacatatttcaaaccaatgttaaagtatgctttcaagactcacacattcaatattccccaataaaccttggatgtattctcaagatttctccctacctgaaaacagaaactatattcaatttgtacactgaatctcaaatgtactgtctgtcaaaatgtgtggcttttttaattgttgttcaagtatttcaaagtccagccattttttttaaataaggttatatttatagaaacattccaaagatagttcacagagtttctagagaccctatatycagatttcactaatgttaacgttttgcataaccagggtgtacttatcaaaattaagaaatcaatattactgtaatattactatgaaacaaagggctttgttctgatttcacaagtttttaactgatgtcatttctcttcccgcatccaatcctggaat

SEQ ID NO: 747422 - DNA, 602 bp, Homo sapiens
ttcaaagtttaagcaaacttggaatggcgggaaataatccctagataatgcagtaagaagagacaaggaaattaatgatatacagataggaaaggaagaaataaaactgtctttgttctcagataaaaacattccctacatagaaaatccaagagaattggccaaatagaagctcctggaactattaaacaattataggaatgttgtagcagttatacaaagattaatatgtgaaagtcaatmactttcctatacaccaaaaatgaagaagtaaaatttaaaattaaaaaggcattaacattgacattccacctaataaaatgaaacccctttgtgtagatctaacaaaatatatacaagatgtatctgagggaaattacaaaatctgattgaacggagcaaataaataaataaaataaaatactcaattttcatagacagaaagactcaataaggtcaagagctcagtttttcccaactgtatctatacattaaacacaatcccaattaaataccagtaggttattattattattattatcattattattttgtatatcaacaaactgattctaatgtttgtatggaaagataaaagaccc

SEQ ID NO: 747423 - DNA, 602 bp, Homo sapiens
ttcaaagtttaagcaaacttggaatggcgggaaataatccctagataatgcagtaagaagagacaaggaaattaatgatatacagataggaaaggaagaaataaaactgtctttgttctcagataaaaacattccctacatagaaaatccaagagaattggccaaatagaagctcctggaactattaaacaattataggaatgttgtagcagttatacaaagattaatatgtgaaagtcaataactttcctatacaccaaaaatgaagaagtaaaatttaaaattaaaaaggcattaacattgacattccacctaataaartgaaacccctttgtgtagatctaacaaaatatatacaagatgtatctgagggaaattacaaaatctgattgaacggagcaaataaataaataaaataaaatactcaattttcatagacagaaagactcaataaggtcaagagctcagtttttcccaactgtatctatacattaaacacaatcccaattaaataccagtaggttattattattattattatcattattattttgtatatcaacaaactgattctaatgtttgtatggaaagataaaagaccc

SEQ ID NO: 747424 - DNA, 573 bp, Homo sapiens
atattgaagaagaaaagaagaaaaacaaagtcagaggcctgaaacaacgtgacctgaagacctaccagaaagcttaaataatcaagacagtatggtgttggcaaaacaacagacaaatagatcaatgaaacagaatagggagcccagacatagacctgcgtaagtatagtcaactgactgacaaataagcaaaggaaatacatagagcaaaagaagactttttgccaaatggtgctggaacaactgaatatccacaaggaaaaaaatgaatctggacacagracttacacctttcacaaaaattaactcaaaataaatcataaacagaaatacagtatgcagaactctaaaacttgtgaagataacataagaaaacctgggtattttatgtatgattttggctttttagatacaacacaaagtgtatgatctatgaaagaaacaattgataagtgggactttattaaaattaaaaacttctgccctgtgaaaggcaatgtctagtgaattagaagatgagccacagattgagagaatatcattgcaaaagacacatctaagaaagcactgtca

SEQ ID NO: 747425 - DNA, 573 bp, Homo sapiens
atattgaagaagaaaagaagaaaaacaaagtcagaggcctgaaacaacgtgacctgaagacctaccagaaagcttaaataatcaagacagtatggtgttggcaaaacaacagacaaatagatcaatgaaacagaatagggagcccagacatagacctgcgtaagtatagtcaactgactgacaaataagcaaaggaaatacatagagcaaaagaagactttttgccaaatggtgctggaacaactgaatatccacaaggaaaaaaatgaatctggacacaggacttacacctttcacaaaaattaactcaaaataaatcataaacagaaatacagtatgcaraactctaaaacttgtgaagataacataagaaaacctgggtattttatgtatgattttggctttttagatacaacacaaagtgtatgatctatgaaagaaacaattgataagtgggactttattaaaattaaaaacttctgccctgtgaaaggcaatgtctagtgaattagaagatgagccacagattgagagaatatcattgcaaaagacacatctaagaaagcactgtca

SEQ ID NO: 747426 - DNA, 609 bp, Homo sapiens
tctcctgaaatcgtaagtcccttgaatccagggtgctggtttctttccagtgcatccttgggacagtgttggcacgtaactgacacaggaggtcatctccataatctcattactgattctgattcagggctacttttcttccagagtcagtgatctctcccctgtcccygcttactctgttgtttattccatactttatctaggctttggtggctttatcccaacagtcttatggcttcagatgtctctcctgtcaaaattttccatgtcctcctatctttgaattcccgtaaatgaccctgagctcctggttttcctgggactagctccgcatctaactcttagttgattcacaaaatatttctgaactatatgtatgctagtgggggagctaaaaataaacacaaaatacctaagttagtagaatttttaaccagaaaatgttaatatgtgagactgaaatagtacttattcattcataatttagtatcttaaacactatggagactttttgctttacatgtttcaattaatatattactaatatatgttaaaacatattatcttaaatgattctaaattaaaaatgagaaattaatttgctgtttt

SEQ ID NO: 747427 - DNA, 607 bp, Homo sapiens
ttccaaaagactgcaatttttaaattgttttttcttattgaaaacataatcattttcttttcaccataggaaaattagaatattaaaaaattaaagctatcaacaatcttttttttttttttttttttgagacagagtctcactctgtcacccaggctggagtacactggtgcaatctcagctcactgcagcctctgcctctcgggttcaagagattctcccgcctcagcctccccagtagctgggattataggcacgtgccaccacacctggctaatttttttctatttttagtagagatggggtttcgccatgttggccagactggtcrcaaactcctgaccttgagtgatccacctgcctcagcctcccaaagtgttgggattacaggtgtgggccaccacacccagccaaaactatcaacaattaatttttaacaaagagcaatagcataactgaagtggaaagagttgcaaaaacttagagaaggcctaactcagccctaaccttgtatccttttaccagctcctgcctctgcttgttaactttatactgccagacacggtgcctgaaattttcatcttgttgaattaagtccttgggttag

SEQ ID NO: 747428 - DNA, 653 bp, Homo sapiens
gaagttgaacaaactgcaataaagctgggaaagaagggataactaaataagtttgatctcctcaactctgatggttgcaatgactttcatccctttgacataaagcccctgtaggacgaggcctcatttcttggacacctaacaacagtagggggcacacacagcaggggaaatatactaaacggtgattcagagctcagttccagcaccaaatacttaaccaaatacttcaccaatggttggtgaactgtagattcattaaacccagatcgtgctttttrtatgtgagcatgactctaaaatagcaagttccaagctgaaagggataatttaaaataagaagaatgttttttaaaagggaataaatagtaggcggggtgtcataaatcaccttatcgtgagaatacagcaggaacaaggagtcacaaacagaaattaacacaaataaagtgtaaaataatcctgaacaaaagacaacaaacacgatgccagtcaggcctttactagagtacataacagaggctctagaacctaaggggactgagatttctgttcataagagagaccacaaagaataacaatgaaaaagaaaaaatgctaaacaaactggacattcttcaatttggacataagagaagttagaaaggtgacac

SEQ ID NO: 747429 - DNA, 504 bp, Homo sapiens
tatcttaagcattataaaaatattaacattaaaatatcaatatgatatgctttaaacaacccaccaaaacccagttcagttagtttttaaaggttttcaaattgtatttaacagggaactattggggataaggaataagtttgatatggtttttatccagagtcccttcatatattttagcaaatcactctgtaaaatctgagtaaatcacttgaataaattactgtggatttcagtttgcctatcagtgaaaaggtaatgatggcaaaacctgtttaaatatatttgttctagmaactgctataaagactattataaagcaagttatgaggcaatagattttcaaaaaaaaatttttaattatatatacatttagctgtaagtaaattagttcattggtgtttccgagcagtctccgtttctcaagatgtcagaatcagtgatatagatggtagatattgcacttactgaatgatggctgtggaaatcagtttgatttctctg

SEQ ID NO: 747430 - DNA, 618 bp, Homo sapiens
aacagcacccaagtcacatcttgaatgctctgctgcttagaatttttttttcaccagataccctaattcatctatctcaagttcatagttccataaatcgctaggggagaagtaaaaatgccaccagtctctttgctaaaatataacaagagtaacttttgctccacttcccaacaagttcctcatttccatctgagaccacctcrgtctgggctttattgttcatatcactatcagcattttgggcaaagccattcaacaagtctctaggaagttccaaactttcccacattgtcctgtcttcttctgagccctccaaactgttccaacatctgcctgttacacagttccaaagttgcttccacagtttccagtatcttttcagcaataacccactcccagtaccaatttactctactagtctgttttcacactgcgataaagacatacccaagactgggtaagttatgcagaaaaaagggtttagtggacttacagctccacatggctggagaggcctcataatcatggtggaaggcatggaggagcaagtcacatcttacgtggacggcgacagggaaaaagagggcttatgtagggaaactctgcattttaaag

SEQ ID NO: 747431 - DNA, 612 bp, Homo sapiens
actatcacagtgtataaagcccaaatgagacctttaaatctgtcctttaacattggccaagattgtaagtcaaaaacaacattgcataccagggaaatatcgtattagaaatcccattaaagccctaaagaaatagtcttcctatcataaattctgaagaattactattgactgactttagttcaacaaagtattaccctcattgtaactgctgtgtaagatatagtatcaatgctaaatgaactaaattccagaatgtggcaagactttctcagcagaggagagaccaatactgctgtcaacttggtggactggccgaaggagaaagaatatcccatagagaatggaaaggaagaaactgacakatatataaatattgtttgtcagtcatgttttggccagcataacttatgatgattttaaacttaagtcttgaaatttaaggcacaaccaaaacacaagcaagtcctcctctgcccaacaactcctctttacaaatcttcatcaaatgtgtgaaggaaatacatagaacggtgagaatgggacaagagaactgacgagaaccagggattctcatggattctgtggttttacaaaacaggaatggcttat

SEQ ID NO: 747432 - DNA, 563 bp, Homo sapiens
ctttttcatgtttttctttaaactcttgagtatattgagccatctatcatctttatcatttctgagttttgtttctatgaaattatttttctcctgattataggttatattttctttctttttttttttttttgagatgsagtctctctctctgttgcccaggctggagtgcaggggcgccatctcggctcactgcaagctcgatctcctgacctcgtgatccacccgcctcagcctcccaaaatgctgggattacaggctcacgtgagccaccgcaccctgcctataagttttattttcctactttttggcatatctagtaatttttaactgaattttggacattgtaaatatgatgttaagcatctggatttgttattgttctttaaagagtgttgggctttgttcaggcagactaggtaaattacttgcaaatcagtttgacctttttgaggcttttttttttgagacagagtcttgctctgtcacccaggcttgagtgcagtggggcaatctcagctcattgcagcctcaacctcctgggcttaagggatcctcctgcc

SEQ ID NO: 747433 - DNA, 598 bp, Homo sapiens
cttccactctgcaactgcacaatgcacattctactgagtagcacatggattattctccaggacagactatgtgttaggccaaataacaagtcacagcccatttttaaatactgaattcatatcaagcatcttttctgatcacagtggaataggaggagaaatcaataacaggaggaactttaaaaactgtacaaacatatggaaattaaaatacatgttcatgaacgatgaataaagaaataaaaaaattaaatatttattgaaataaataaaaagagaaacacaacatmacaaaacctgtgggatgcagcaaaagcagctgtaagaggaaaagtgcatagctataaatgcctacatcagaaaagtaaaaagatctcaaatagccaacctaacaatacacctcaagcaatgagaaaaacaaaaaaacaaatgttaacattagtagaaagactatcagaaagattagaacagaaattttacaaatagaaacaaaaaaatacaaaatacaaaaaaatacaaacagtcaatggaaaaaagagctgggggtttttggaaaaaaaatcaaaattgacaagctttaactaaactaaggaaaaga

SEQ ID NO: 747434 - DNA, 598 bp, Homo sapiens
cttccactctgcaactgcacaatgcacattctactgagtagcacatggattattctccaggacagactatgtgttaggccaaataacaagtcacagcccatttttaaatactgaattcatatcaagcatcttttctgatcacagtggaataggaggagaaatcaataacaggaggaactttaaaaactgtacaaacatatggaaattaaaatacatgttcatgaacgatgaataaagaaataaaaaaattaaatatttattgaaataaataaaaagagaaacacaacataacaaaacctgtgggatgcagcaaaagcagctgtaagaggaaaagtgcatagytataaatgcctacatcagaaaagtaaaaagatctcaaatagccaacctaacaatacacctcaagcaatgagaaaaacaaaaaaacaaatgttaacattagtagaaagactatcagaaagattagaacagaaattttacaaatagaaacaaaaaaatacaaaatacaaaaaaatacaaacagtcaatggaaaaaagagctgggggtttttggaaaaaaaatcaaaattgacaagctttaactaaactaaggaaaaga

SEQ ID NO: 747435 - DNA, 564 bp, Homo sapiens
cactttgggaggccgaggccttttggatcacttgaggtcaggagttcgagatgagcctggccaacacggtgaactctctctgctaaaaaacacaaaaaagttacctgggtgtggtgggaggtacctgtaatccagctactgaggaggctgagggaagagaatggcttgaacccgggaggtggaggttgcagtgagtcaagatcatgccactgcactccaacctggatcacagagggagactctctatgacatgcttgaactttctgacttgtcctatctttccctatttcctaaataattagtcattctactttaggacaagaatttgccatacaagatcctctctcatataacatttyttcataacatttctaaccataaacacatcttcatatccacaattttctttgtatctctcctccctactaatttcttatgcccacccaaatcaaacaagatcaggtaatgcaaggcaaaacagtacagccttagattttgagagggacctgtctgcttacagttcttgggattccatgaggaaaagagaggtttctcctaaaaggg

SEQ ID NO: 747436 - DNA, 546 bp, Homo sapiens
gagtaaagacattaatattttgtttaagaaggatgttgacaatacccggtgagtcatagtgcacagcaagcataagggctgttctaaaataacaaggaaatcactccactcaagaactttaataaagacttttttaaacagctagtttgatacactttaccaatttaatatccacctgtcagtgtagacataataacattttgcatgtactagcttgggtctataagcatctagggtgctcaggtgttcatctttataaattgtcaccaagtctaaaagaaaaggacaataaggaagcctcctgtcccactggggtatgayataatacaagttgctaactcatagtcctttgatggccaagaaactgtgctgaggtcacttatctaaagcaggtaaagatttagatgaagatttccccattgctttcctagtctgatatattgtaatttatatcagctaggggtcagataagagctatctgcagactgaaaacaacaacaacaataatgatgatgatgataatactagtagtcataaactaaaagt

SEQ ID NO: 747437 - DNA, 561 bp, Homo sapiens
gaaaaataatgatattaaagaagcccagtgagatacaagcagacacagacaacattacaaagaaataagaaaaacaattcaggatatgaaaaagaaattcaccaaagagatagatctcataagaaagaaccaaacagaaatccataaactgaataactcaatgaatgacataaaaatacaagtgagtccaggtgcagtggctcacgcctgtaatcccagcactttgggaggctgaggcgggtggatcacgaggtcaggagatcgggaccatcctggctaacatggtgaaactccgtctctactaaaaaatacacaaaattagttgggcatkgtggcgggtgcctgtagtcccagctactcaggaggctgaggcaggagaataccgtaaacccgggatgcggagcttgcagtgagccaagatcgcgccactgcactccagcgtgggtgacagagcaagactccatctcaaaaaaaaaaaaaaaaaaattgagaagcttcaacaatagactagatgaaacagaagaaagagatttcagtttgacagacaggcctttcaaacta

SEQ ID NO: 747438 - DNA, 563 bp, Homo sapiens
gaaaccttgtctctacaaaaaatacaagaattagccagacatggtggcagatgcctgtaatccagctacttgggaggctgaggcaagagaatcgcttgaacccaagaggcagcagttgcagtgggccaacattgtgccactgcactccagccttggtaacagagcaagactccatttcaataaaaaaaaaaaaattggcaaaaggtagaagtaagccaaatgtccatcaataagtaaatggataaacaaaatgtagtatacacattcagtggaatattatggagcctttaaaaagtatgaaattctgatatatgttacgacaggtatgaaccttgaaaatattatgctaagtgaaataaaccagacacaaaaggaygaatactgtaggattgcactatgtgatatacctagaaacaggcaaattcaaacacagaaagtagaatgctggttaccagggcctgggaaacagagtactgggaagttattgtttaatgggcagagactttcagtttcagatggtgaaaaagttttggaaagggatagtgcctgtactgataattata

SEQ ID NO: 747439 - DNA, 579 bp, Homo sapiens
cagtaagtatatattttaaaaagtctcattaaatatacatgtgatgcttgaaatgccaaaagaaaatatcccatacctgtctgagtgaatcctgatttgtatccattagttgtcccattttctggggtcacagttgacgacactgaagagcttggcttaatagagtggcaagaagcagaggattgtcggcttctacattctggaaaagagtaaaaatcacattgtatgaagtgaccaatgttctgttaaaacaggtgatggggacrcaatccataaaatctctaaattaaatcgctgctccttaagcggcagccactttaattagagatcaccttccccatcctgactccaacagaatgtttcaactagtgaacacaatgcttttgtttggaagacaaagaaatggtttcaaagaaattggacctttgttccctacatactagttcccagaggaaaaatactcgtaaccaatatagtcatgctagttttatgggtaagacagaggttaaaacattagtaatttatgaaaacctaataggcctttcaataccagttaacatcctacctgggattggttta

SEQ ID NO: 747440 - DNA, 576 bp, Homo sapiens
agggtaaaggttatgaacttagagtttataggaaaaaatgcaaacagcttttaaacaaatgcaacaatgcttaatgtcaataagggagatgcaaatttaaaaaacagattttgggccaggcatggtggctcatcctgtaatcccagtactttaggaggctcaggcgggcaaatcacaaggtcaggagttcgagatgagcccggccaacatggtgaaaccccgtctctactaaaaatacaaaaattagctgggcatggtggcacctgcctgtaatcccagctacttgggatgctgaggcaggagaattgcttgaacccaggaggtggaggttgcagtgagccgagatcgcgccactatactccagcttaggcaacagagcaagactccgtctaaaraaaaaacacagattttatttttcacccatcagattcacaaaaatccaaaagttcaataaataaactcaattagtgagcctctgtggaaatattggtacaacctgttaggagagtaatttgacagcatgcatagaaattacaaatgagtatatgtttgatccagcaatcctggacatttata

SEQ ID NO: 747441 - DNA, 529 bp, Homo sapiens
tttcagcctttttccagagcaccaatgtctggaaatattgctgcctcttaatctattaccactccaacaagttatcttcctttcatcattgaaaatcttgaaaacctcctggcgtggtggctcacatcagtaatctcagcacttgagaggccaaggcgggcagatcacctgaggtcaggagtttgagaccagcctgaccaacatggagaaacccgctttctactaaaaatacaaacttagctgggcatggtggcacctgcctgtaatcccagctactcgggaggctgaggcaggagaatcgcttgaacccgggaggcggaggttgtggtgagccaagatcatgccattgcactccagcckgggcaacaagagcgaaactcctttcaaaataaaaaagaaaatcttgaaaagctacattctccaacaggtctttttagtttaatttttaaaaagtacccagttatacatggaggatcacataatctcaatctcttcaacttagagtttaaggagtaatacgacagaacat

SEQ ID NO: 747442 - DNA, 631 bp, Homo sapiens
accaacctgtcaaaggtggagaccttggaaccacctgatggcattccagacttacaggtgggtaattaatgacttcacagcatggaaacttccagttggcagcagttgcaggccattctgacccttactgagatggtttttggggaacgtggtccagatggtggatgtgacactctcagcsggcacaggtatgaggactgaggccatcctcgggcaggggcaggagatggaggattgccagctgtctggatctgggcaagggctatgaggtggcacaccatccaacctgagcaactcatggccctacacgccagctccttcccccaaggttggcaggggattccctgtccaatgccgtgacttttctagtgttggacgcaccagacatgcctgcaatctaccacaaaactagtgactggtgagacctggaggtcagaaggttggaacaggtgattgctaagggacatccccttctgagattccattattcagtccgagaagcccacaggagacactgtcaaaaccctccaaattactttctgcatagacatatcagatcattctactggagggcaaccctatagcatgactgacaaccatgacattctcaccgaatagagctacacctgcc

SEQ ID NO: 747443 - DNA, 631 bp, Homo sapiens
accaacctgtcaaaggtggagaccttggaaccacctgatggcattccagacttacaggtgggtaattaatgacttcacagcatggaaacttccagttggcagcagttgcaggccattctgacccttactgagatggtttttggggaacgtggtccagatggtggatgtgacactctcagcgggcacaggtatgaggactgaggccatcctcgggcaggggcaggaratggaggattgccagctgtctggatctgggcaagggctatgaggtggcacaccatccaacctgagcaactcatggccctacacgccagctccttcccccaaggttggcaggggattccctgtccaatgccgtgacttttctagtgttggacgcaccagacatgcctgcaatctaccacaaaactagtgactggtgagacctggaggtcagaaggttggaacaggtgattgctaagggacatccccttctgagattccattattcagtccgagaagcccacaggagacactgtcaaaaccctccaaattactttctgcatagacatatcagatcattctactggagggcaaccctatagcatgactgacaaccatgacattctcaccgaatagagctacacctgcc

SEQ ID NO: 747444 - DNA, 580 bp, Homo sapiens
tcatgtcaaacattcttaagaaaagaaactgtgaggccgggcgcagtggcttatgcctgtaatcccagcactttgggaggccaatgcaggtggatcatctgaggtcaagagtttgagaccagcctgaccaacacggagaaacctcgtctctactaaaaatataaaataagccgggcatagtggcgcattcctgtaatcccagctactcgggaggctgaggcaggagaatcgcttgaacccaggaggtggaggttgcggtgagccgagatagtgccattgcattccagcttaggcaacaagagcgaaactccatctcaaaaaaaaaaaaaaaaaaaaaaaaaraaagaaagaaagaaaataaactcattggaggtaattttatcaaactcaaaaccacacagcgtctctagaaaatgttcaaggatatcagatacttatataatagagttgtctggtgtgtcttcttttttctgttaccagcttttcctattggacagttgattgcaaaccatcctgaaacagtaggatattacaccttttacatattgaattacatattgaatattgaattacatatgaa

SEQ ID NO: 747445 - DNA, 622 bp, Homo sapiens
ggccaggaggtgctactaggatcccacggtctgtgagcaaggaatcagttgcctcaatgggagctgactcaggagatgactttgtaagtacctttacttaagaaataaagatacttttgcagggtattcttccaataaatattttaaattgcttgattatttcatacctttcatggtttatagctgtacaagagcctgtacatctgattcttcttactctgaggtacctttttgttaatgtttggtttgtaaatgttaaggtactctatwtttttttccttatttttctgtgagttcctctccatattctctccagtgtcctcttgtactgtttttccgtctatataccttatacatcttcttttgcatttcatttctgaaaatgtctgggcctgttttcattgcagacatatatacttatataacaactaagtcattgctgcttaacaaggtctctgagttgtggtatggggttagcaagagtgcattgttgtattgggacgattgttggaaagatggccccagtgattacagtatgttgctttttttcttttttctttcttttttttttttttttgagatggattctcgctctgtagcccaaagtggagtgcagtggcct

SEQ ID NO: 747446 - DNA, 603 bp, Homo sapiens
aatattgaatgtcccccatccttcctgatatgagactgaaattggctcctttgtaactctttgcctctgatcctagttctgtcttctaaagcttataatgtctgggctgtctcttacacatctttcactattcagaagtgatcctcatatacagttaccctatgcctgccaactctttccttccccatctcagctgatagccttcagctgttcttccttgtcctggtctccaggtcctcccattctggttgctctcttgaacctatactagtttggtggtgtccttaaaacctargctaaactctcctcccacaggagccccaccatatgtcacagagcagtatttgtctactgcttgtctggtagctcagctcttagttcctccaaagaggacatcagcttttcttgttaatcttttgcttcactaagggcgcagacaacagaagctaagttgttttttgttttcctttgtgctgctgtttagctaggtgtctcctagcctttgtcattgatgtcttggaaactgcctctgagaaagttagggctgtcctcccaactccctacttttctctgcttcccctagttgtttcttccctagttttt

SEQ ID NO: 747447 - DNA, 641 bp, Homo sapiens
cattgtggttttgatttgcatttctctgatggccagtgatgatgagccttttttcatgtgtctgttcagccagagtctcttaatagtagaattgattaagcagaagaactagtgaacatgaagacaggctatttaaaaatacaaagtcaggctgaatgcagtggctcacacctgtaatcccagcactttgggaggccgaggcaggtggatcacttcaggccaggagttcgagaccagcatggccaacatggcaaaaccccatctctactgaaatacaaaaaaattagccaggtatggtggtgcacacctgtwatcccagctgttcaggaggctgaggcatgagaattccttgaacccgggaggcagaggttgcagtgagccaagatcatgctactgcattccaccctgggcgacacagtgagactctgtctcagaaaaacaaacaaaaaaatcccccacaagtcagacagtaataaatgctggtgaggatgtggagaaagggaaatcttgtatagtgttggtgggagggtaaattagtacaaccactatggagaactgtttagaggttcctcagtaaactaaaattagagctacaatacaatccatcaatctcactgctggatatatactcaaaggaaatc

SEQ ID NO: 747448 - DNA, 641 bp, Homo sapiens
cattgtggttttgatttgcatttctctgatggccagtgatgatgagccttttttcatgtgtctgttcagccagagtctcttaatagtagaattgattaagcagaagaactagtgaacatgaagacaggctatttaaaaatacaaagtcaggctgaatgcagtggctcacacctgtaatcccagcactttgggaggccgaggcaggtggatcacttcaggccaggagttcgagaccagcatggccaacatggcaaaaccccatctctactgaaatacaaaaaaattagccaggtatggtggtgcacacctgttatcccagctgttcmggaggctgaggcatgagaattccttgaacccgggaggcagaggttgcagtgagccaagatcatgctactgcattccaccctgggcgacacagtgagactctgtctcagaaaaacaaacaaaaaaatcccccacaagtcagacagtaataaatgctggtgaggatgtggagaaagggaaatcttgtatagtgttggtgggagggtaaattagtacaaccactatggagaactgtttagaggttcctcagtaaactaaaattagagctacaatacaatccatcaatctcactgctggatatatactcaaaggaaatc

SEQ ID NO: 747449 - DNA, 575 bp, Homo sapiens
atctgaatttagtgttcctctgtctttccacagttatggaaaagatcattatgcaataagcgaggcttctggaggaaaaaaaggatagctttattgttgaaaacattgggctattatgctaaacattccttgtatttttgagggcaaatagtytaaaatatgtttagaggaaatccatattcagacagaaattcttgtcgttgtttttttttttttttttttttttttttaaaaaacagaggacagtttattcctccaaacaaaagcagtagctagagtagagtatcagcatttacaccatgtccccaaacctcaattcccaacggtcatgcaacgagggccagtgatgcctgcatatgaggtgggttgttacagaagaagaaccccaaactcagagaatccaaatcttttataatggacagtgagcttacctgatctttgcccaggagggagactttatttttattatattggacagtggcaaatctgttctttactccagaggaagatattagctctattttccaaggcagtttgctatgcaaatatccttgaataaatagtccagaacaagg

SEQ ID NO: 747450 - DNA, 469 bp, Homo sapiens
ccacaatgatggggatcctctacattttcccttccttgtcctgccctctttacaatcaaggttgccaggcagaacatcaatgcccctctatttctcatgccccaccctttgttccagggcaacaaaaggaaggaactaatatttgttagtgccagagcttgatccattatatttcatctcatttcagcctccaaagagccctgcagtgttgacactgtacctccattctgcagatgcrgaagtggaggctctgggaaatgaacctttggctgtactggcaaaagggttaagtacagcacaagggttaaggcagtgcagtgtagtggctgggaggaggtgcgtctggaggccgactccttgggtttgcacaatggcccatcacttactagctccatggatctgagcctctttgaagcctagtaaggtaagaataatacctttctcagagggctactgtgaggactaaatg

SEQ ID NO: 747451 - DNA, 518 bp, Homo sapiens
agggagggggtcggtttcgccaaccaggctcattccctcagtcacctcccaaggatacagtgtcagaataacagcttctgaaatgagttttctccactcatgcaaattgctctctgactttgaacacccacgtgagtagaagcagtgttttggctgcctggttggtgraggaggaacatcacagggttattttttcccctagcaaatgcagacaataccctccctctaatcaacaggttcataagcgtttgtctgagaaccagaaatgaatttacaaggggctctctcctagccttgtggaattagagcagagatattgctttcttttcacttcagttaatccaaatgagctgagtctcctttctatagggaagggcaaaacaaaacaaaaacctaacccagcaaaaacaaggctttcttactgccaaactggggctccgaaaatagtttgggtcattggaatcatgaaagaaatagtgtttatataacctctctcttgcagagaacttgaaagtgat

SEQ ID NO: 747452 - DNA, 578 bp, Homo sapiens
taggcacggggttccctgtccatggctgcattccgatgctagcacactgcctggtgcacagcaggcggctaacaaatgcttgctgattgggtcaggcggttaacaactgcttgctgattgggtcaggcgttaacaaatgcttgctgattgggtcaggtggttaacaaatgcttgctgattgggtcaggcgttaacaaatgcttgctgattgggtcaggcgttaacaaatgcttgctgattgggtcagggaaggagggaatggagggtgggtgtgggggaagactgtggggagtcaaccattggagactgagatttagacttgatggtgtcagaaatctcagtggctgcgaaagatttcmaacagtagctaggtgtggtgtgtgcttatgcccctcaccctccatgatgctgttcagcccacttctccaagttcatcttctgtcctctagcaagcagcgcttcttaacctgccttccttcctctcttccttccttccttcctccctccctccctccctcaagacagagtctggctctgttgcccaggctggagtgcagtggtgcgatcatagctcattg

SEQ ID NO: 747453 - DNA, 610 bp, Homo sapiens
tctgccctggctcctggtcccaggggactccactgtgtttatcctactctatttccagccttgccgctccagctgcaacctacccgctagctgattagcatattcccagggtccggcccttcttggcgggctgggcctgaggagagcgctttcccttggggccccacagctcaktttctgccagcgtccccagactggagaagggcctgagaccaagaagctacttaaacctgaggggccctctgcaccccctgcccgccccccggccctgcgtcattccctcgctcaccgcaggctggggacagcccccaccccacagtccacctctgctccctgtgcctgggaggcagctccacttccccacgtgcctgccagggcagcccctccctgggcacagcagcgctgaagaccctgtggtgggaggggcaggttccaggccaggaagggagtgtgagccaccgcgtccggcctttattctttttaaagaaaaaatagtggtagaagccaggcatagtagctcacgtggtgtagctgtggactacttgggaggctaaggaggctagagtgagctaaggattgcgctactgtactccagcctgggtgacagagc

SEQ ID NO: 747454 - DNA, 610 bp, Homo sapiens
tctgccctggctcctggtcccaggggactccactgtgtttatcctactctatttccagccttgccgctccagctgcaacctacccgctagctgattagcatattcccagggtccggcccttcttggcgggctgggcctgaggagagcgctttcccttggggccccacagctcagyttctgccagcgtccccagactggagaagggcctgagaccaagaagctacttaaacctgaggggccctctgcaccccctgcccgccccccggccctgcgtcattccctcgctcaccgcaggctggggacagcccccaccccacagtccacctctgctccctgtgcctgggaggcagctccacttccccacgtgcctgccagggcagcccctccctgggcacagcagcgctgaagaccctgtggtgggaggggcaggttccaggccaggaagggagtgtgagccaccgcgtccggcctttattctttttaaagaaaaaatagtggtagaagccaggcatagtagctcacgtggtgtagctgtggactacttgggaggctaaggaggctagagtgagctaaggattgcgctactgtactccagcctgggtgacagagc

SEQ ID NO: 747455 - DNA, 395 bp, Homo sapiens
ttcttacatgcaggataaattggatttatcttcaaagttagccagcaatgctaaatgctggttaaaaagcagttctctgctggggtagagaaagcaagttcccatgtgtctcaacccatgtgaaagagggaagagagaatgtttccatccagggtggttcattcacataagggtgacagcattcaggatatagggtacygaacagaagggtttttagttgtgttttttttttccgtgtgtttatgatataatttatgcaccatacaattcactcatttcaagtgtgcgatttaatgacttttaatgtattcatagagttgtgtatctatcattacagttcgcttgagaacatttgcattatgtcaaaacaaagaaccctccccctctttcccacc

SEQ ID NO: 747456 - DNA, 395 bp, Homo sapiens
ttcttacatgcaggataaattggatttatcttcaaagttagccagcaatgctaaatgctggttaaaaagcagttctctgctggggtagagaaagcaagttcccatgtgtctcaacccatgtgaaagagggaagagagaatgtttccatccagggtggttcattcacataagggtgacagcattcaggatatagggtactgaacasaagggtttttagttgtgttttttttttccgtgtgtttatgatataatttatgcaccatacaattcactcatttcaagtgtgcgatttaatgacttttaatgtattcatagagttgtgtatctatcattacagttcgcttgagaacatttgcattatgtcaaaacaaagaaccctccccctctttcccacc

SEQ ID NO: 747457 - DNA, 574 bp, Homo sapiens
tcggctgtccaagctgctgttcctctctccgcagtaagagggtgtttctctccctgttcaagaggagcaccaacacttgaggtttggattccatcttttcctgccccttctgcaacattatcttctctgcccagtaktaacagcctctgccatagctaaagacagaccagaaagaactctcctgagaactcataccccttcataggtacatcccctcccctctccttccctttagggaccttcaaaagcagctattttgttctcctctttcactttgatcctttatttctagctctgtaatatactgtttttgtctccaccattccactacaaactagaagtttagactccagaagttcttcaagagctttttatgttgattttatatattttttctattaatcaatctagacacacacacacacacactttttagccatttgcattcttgacgtcttatgttgattgccaatgctgatgcctctcaaatcgaaaactcataaccatacttttgtttcaagccctaggccagtatccaatttcttagtagacctgagcatctggatctagacaa

SEQ ID NO: 747458 - DNA, 540 bp, Homo sapiens; identical to SEQ ID NO: 746147

SEQ ID NO: 747459 - DNA, 606 bp, Homo sapiens
gcaaggagaacatacaatggctagtggacgagggagctgagaagcatcagtggggagaggagttgcagtggctgcagccatgattctttccactaaatctcttggttgtttcctcaggaagaagatagacaaaaacaccagaggagctgctcccagatggagtggacttgccatacaaagcaagagagtcccagcagggcagggatctgtagtggatggtgatgcagcacccaggaaacctcatcaggatgtagctactccttctcccactgcgrgtggtaccagctgctgaaggctcacagctgagactctctaaggaaaggggacacatagcccaggtgatgcccactctccagggacagcctgcaccagtgactagacgcaggaggaagatgcccactgcctggcttctatttgtgatggcctctgaagggctatctcagatccactgctgcctttgggggaatggaggtccttgtggagaccacattccacctgaaatgcctctgcccaatcctgctttcctgacttatggttgttgttcccaagaaaacaccctcataaatcatttccagggaacccaactgaagccataaatccctccag

SEQ ID NO: 747460 - DNA, 572 bp, Homo sapiens
tccatcatggagcctgcattcccaaagtcacctcagagtacaaaatggctgctggggatcccaccattgtgggatccagcctgcagagaaagaagaggggtgaagaggcagaggcaaggctgccactcagatatctcttaaraaaggctataggtagctgttccttgacacatacggtttcaaaactttgctcagatctgtcaaaggaagcagggaaggctggcctcgtgataggcgctgtgttttcaggtaataggtggggatcctgtaactatgtagactcagtggatggatactgggaaagccaggcttttgtgtgtgtttgtgagggttcaggaaggagtcaggcatttataagaggtgtattactattattatgtaaataaatctaacaacaacagcaccaataatgggtaacaattatataataggtactctgtgccaggtaatgttctaagtgttttacaatttttgattgatgcagtcctcaaaataaccatatgggaaaagtgaggcagaagaagatgaaatgacttgctcaggtcacacagccagcaactgactgagctaga

SEQ ID NO: 747461 - DNA, 540 bp, Homo sapiens
cacccggctaatttttgtatttttgtaaagacgggttttaccatgttgggcggctggtcttgaactcctgacctcaagtgatccacccgccttggcctcccaaagtgctgggattacaggcgtgagccaccgcgcccagyaggttctgattatcttaagcactgtcctgcctcctgctgctttataacctcaacaagccacctccttgctgacagatggtgacagagcagtttggattacagaacaagtggtaacgagggcagtttgtagcaagtagagttgagtatagcaagtacagtgagttgtatgtagctcattttcaaaatagctctcagactattgatgagaaaatgtacatcaattttgatacctaagtttatttttgttgcaggaaaacagtcacaaaataatcaaattatctacaactttaagccaccatattattttagttaatctggaatgtcaaatggtttgctgagggtaaatattagcattcctactgactgtatgtttggagttttttcactataaaatttgaga

SEQ ID NO: 747462 - DNA, 684 bp, Homo sapiens
gacccaacccttattctaggcgatgaatataaataaagatacggtattcaaaatctcatcttagtggaactaaaagaattcaaggttttgagtaacagaaagatatatcatagaagactaaaaagtgttatgtaagatgagaaaagattagaagtggatattttagacatggatagcctatttgatgaattcatagatgcaaaccacctgattcagaaacagctgtactgcaaaaaagcatttatgtttaaatggatggacatttttggacagctagaaacgaattcatacaagtttaaaaacctacagttgccagtaattaaaaatctaggtagtccatattcaaacacttttgttcagaggagatttaactaatgtcctcatattacactgacagtagaagtcactgtaatgtatgatttataagggcaaagctgcaagtcacactgaatttcacttttgaccctattcagttttcccaatacatcaagaaaaagatggatgtcctaaaggcttgayacagttcagaggagtgtttttgggaaagaaaaacaaaaagtaaaatgtcttactatttcatgaggcaaaaaaaacttattttttattaagtagagataatgtttaattattccattgtatttacgttcctttttaaaagacacacacacacatatatatgtatct

SEQ ID NO: 747463 - DNA, 623 bp, Homo sapiens
cagccaagtagaaagacaattggacaaaaaggttatgatttaatgctaaaagactgttggaatctgcctgacctgtccagattcctcttggcctctctgtgaagcattccttcttttttggtgtgcgacatctatctctggaakgtgggtgttctgacataccgtcaaaaaaggtaagtcagatcatttctttatggcagtttttaacaaaaaggagtggaaaaagttagagtaattttaaacatttaatcctggcttcttggaaaaagggttctggtttctctgacccactttggttaagagaaattctagtttctatggctatcctcgagggaaactgagaggccagagatagcaggacaggagaaagtcagagagagttgcttctgaggccttcattctggagtatcattttctgagatccttcatatcatatgtatattatttacatatataattagcatgtttattttttctcttcaaagtatatgagaatcattctattagaacatatgcaaaaatatttagattttttctgtatactgcaagtgacttgaatgatgagagagagagagagagagatacgaagtgggggaccagggagggaggtagtaagaaggaaa

SEQ ID NO: 747464 - DNA, 617 bp, Homo sapiens
atacaccaatattgagtatatgtaaacttggtaaagaagatacaagagcaaactttaattcagacatagaggctgtgattaattctgatttccaagatgaagggccattgctgaggaatggaggtggggggttgaaatgcagattggctgactctgggcctgggagtttggttacttcaacagactgcttgtgaaatgaagaggtctgaagcatgaggaagagaaaacagggtctggaagaattcacccagccggggtgccctatgacattttatgctgagttgggaccactatgacattttatgctgagtttacagcacatgtccctcccagagtgtacagtggaatcatctgcagtagggtagggagtcacccagcaaaaatcctatgtgagttgcttctataacccaggcaagatgaggacaaaaaatgtccscgaaaggaagcctccctttcctctaggagagtgacatttatgaatgcttacccatccctgatttcctgtcatcattgcagctaccctgttacgggctaactggtgtgccccaaaacactcatacattgaagtcccaatccccagtaccagagaatgtgaccttatttggagacagggtgtt

SEQ ID NO: 747465 - DNA, 617 bp, Homo sapiens
aaagttgtgtggaagtatcttcttcaagtgctcaaaacattagtttatgaaattgcttccatgaaattgcatcagcgtcatgaaccaaattttcctgtcaaggaggtgaggaggcagtaagtcatgaccttagttgcttactaaaaaygaaaggcgtttgaggaaagcctgataattcattgacaacattaccatcaaccacaccttaccattcctaggagagctggccaaacggatcttcctctatcaatagcgggaagtgggtatctatttggtattaacaaacatgcaaattagtgatttaggagccacacagcccctgatgatgaagacacatgattcctacactataatttcaagatgtaacattgaatactaagttgttttaacaataacaaattttaaattaatatatttgggataaaatatcagatttattttttcattgcataacatcaatctatgattataatattcactttttgccttggctttgaccagagacagattttaccatttgccaatttggaatctggtcaaatgcatatttaccgggcacctctagaatatacatgcatggacacacacacactcctcataatctcaatgtctccaag

SEQ ID NO: 747466 - DNA, 632 bp, Homo sapiens
gaaggcctgtaatttgtgtcactgagcaaaaaagtaaagaatagattggtaataatgcatggtgatttctccttagtttacaaggctgattgaaaaacaaaggggaaaacttttctgaaccagatacaacttctatcagaaaagacctagtgttgacttcttccaaattttaaacgcatgaaacctagaaaatgaaactttccaagaataggtttgcatttgcatgccgacttactttcccatcaatgtatgaaattgcttcaagtttgacttttaaaaggttgaatatagaaagaatagaatgtccatctttaaaaaatgctgagtttatcacacataggagcttgattctgctaccctctcaaggttatatctcagataattttcccttattttaatagagcacaggaaggagktatggtaaccatgaaacatgagttacttaaatagggaggaggaattagtacattcactaattagggaaagtattgttagtttttctaaaatgaagaaaattttgccagcttaagaaaaaacctgcgacatgagtacaattgtcattatgttcaaaggaatgattatgtttcatttaagaaacgcaagatatatgaaattaagatatttttattttt

SEQ ID NO: 747467 - DNA, 526 bp, Homo sapiens
ccttacactcaagaatctcacagacttctgggaagaaatatctctatctacacacctaaatatagagagattattttttatagtcaaggttgtcaggttgggttgggtacacctaagataacacagggcccacagagatgacctttcacgaatcagggacagtgtcacagagaagggaatgctgaaatattgaaggaggaggctccagggacccactggagaatgtaagcrtaacagtgaagggatcagattttcaccttagaaaaatcaccctgacagcaatatgaaagaagggagagagactagttagggtcaggaaggtaaacaggaagctgctgagaaagctcgggagaggtcagagcctcagtcagggcagggaatgtggagatgtagcaagtagaaaattttcttaggaaagaacatcagccaaaattaaagcatgttttgggtgtggactctgagaaagaagaaggattttgaaaagatcctttatgtctatatggttacaaacaaaaggagcatttat

SEQ ID NO: 747468 - DNA, 622 bp, Homo sapiens
ataagagattatgtgatttcccatcaaatcaactttagtcttaatactccttgagttgaacagcatctctccaattacaccttgcaatatctacttgtcaaggtatggatagtaagaatattttctaatatatgaaaataatttcaatgttgttctttaaatgtgtatgaaagcataygtctgcattgaaatcacaatgacaatgtcattatgaaacctaggtttaattaataacaatctgtgagaatatagctctacacttacatttctgcagcatgagctacttgagtgaaaagagccatgtgtaaaatcgctaagtacgttataatgctgattgtgggaaatgtatattacattgatgaaaaattgcattaaaggtattatcatcatttgaaagcaccaacgattaattctacatttaataggcatttttttcatggaataaggtaatccaaaattgaaaatctttagcaacgttgtgttaatttataggcaagttcaatcataacttataatgataagaaattcaaatgttaagaaatttttaaaaattcaatataagaagtttaacacatttaagaatggctcatatgaaaagggtatattttagttattctgaaat

SEQ ID NO: 747469 - DNA, 598 bp, Homo sapiens
aggctggttcaacatatacaaatcagtaaacgtaattcagcacataaagagaaccaacaacaaaaaccacatgattatctcaatagatgcagaaaaggcctttgacaaaattcaacagtccttcatgctaaaaactctcattaaagtaggtattgatgggacgtatctcaaaatagtaagagctatctatgacaaacctacagccaatatcatactgaatgggcaaaaactggaagcattccctttgaaaactggcacaagacagggatgccctctctcaccactcctattcaacatagtgtgggaagttctgtccagggaaatcaggcaggagaaggaaataaagggtattcaattgggaaaagaggaagtcaaattgtccctgtttgcagatgacatgattgtatatctacaaaaccccactgtctmagcccaaattctccttaagctgataagcaacttcagcaaagtctcaggatacaaaatcaatgtacaaaaatcacaagcattcttacacatcaataacagacaaacagagagccaaatcatgagtcaattcccattcacaattgcttcaaagagaataaaatacctagga

SEQ ID NO: 747470 - DNA, 668 bp, Homo sapiens
aaaccattaggtagagatacaaggaagcagaatttagcttaaagataatttctaattattatgccaatcttgtgaagttctcactgaaaatattaatgttaaagtagattcgcatttgttcgatcatgctccaaggataaatgatgcttagaagaaaagcactctgacttctgaggtgccttgccaaactaaaattttattttttgctttaatacactgtagtgctcaaatatattatttaaggcctaaagtatattacagtttagatattcaaccaaatgttttttcctctaatgcaacccacataaggaaacttgactttatctaggcttgggatatccttacatcacacggaagctctctccccaacagatcacctcatggtttaatctttaaaacatgttcttgtctaacctactttacctattaaatataaaaattatttaaaagtgactccaacagtgtccaataactggaccytaaaagacatttaagaaatcaactttcttttacagttaaaatgtatactacttggttagaatcttttgcacttcaaaggcaggaaagaggaagagattgccatctttaaaagtttgagggccagagtagctaatcaaagtctactgccagaggacatttttaaaaattaactttatttcacatttcta

SEQ ID NO: 747471 - DNA, 604 bp, Homo sapiens
tatacccttttcatatgagccattcttaaatgtgttaaacttcttatattgaatttttaaaaatttcttaacatttgaatttcttatcattataagttatgattgaacttgcctataaattaacacaacgttgctaaagattttcaattttggattaccttattccatgaaaaaaatgcctattaaatgtagaattaatcgttggtgctttcaaatgatgataatacctttaatgcaatttttcatcaatgtaatatacatttcccacaatcagcattataacgtacttagcgattttacacatggctcttttcactcaagtagctcatgctgcagaaatgtaagtgtagagctatattctcacagattgttattaattaaacctaggtttcataatgacattgtcattgtgatttcaatgcagacrtatgctttcatacacatttaaagaacaacattgaaattattttcatatattagaaaatattcttactatccataccttgacaagtagatattgcaaggtgtaattggagagatgctgttcaactcaaggagtattaagactaaagttgatttgatgggaaatcacataatctcttat

SEQ ID NO: 747472 - DNA, 602 bp, Homo sapiens
cacagggcccagcagggtcccatggcctggggactggacagaagtattggcctgacgtgaagacagataagtgggcctacttgagacagctttcttcagcaggaattcccagcctggacttcccacctctcactcctctctattgaacaccatgctccctggtgttcaacctgtactgctacttcctccrtcagctcacagccccttgtctgtgatgggcagagcagtctatggctgggcactgaacttgatatctggatggcagagccgccctcagccgtgcttagagtatcatggaagagcagcaggagccaagtgtccccatcgtatttgcagctggactagaccttaggcactgcaccagatgcgctcagctatggctgcctctgaggactagggcccctgcccaagccctgccagacactgtagtctgagggtactggcttctctcttgaacaccagggcactgtgggacaatatgtaggaagccttatagttaggttcgaaatggcacattcaatggagatagtaaatgcaatagtcctctagtgatattgtagtacattatatgatcacagattaaaaaccaatattcacctttt

SEQ ID NO: 747473 - DNA, 602 bp, Homo sapiens
cacagggcccagcagggtcccatggcctggggactggacagaagtattggcctgacgtgaagacagataagtgggcctacttgagacagctttcttcagcaggaattcccagcctggacttcccacctctcactcctctctattgaacaccatgctccctggtgttcaacctgtactgctacttcctccatcagctcacagccccttgtctgtgatgggcagagcagtctatggctgggcactgaacttgatatctggatggcagagccgccctcagccgtgcttagagtatcatggaagagcagcaggagccaagtgtccccatcgtatttgcagctggactagaccttaggcacwgcaccagatgcgctcagctatggctgcctctgaggactagggcccctgcccaagccctgccagacactgtagtctgagggtactggcttctctcttgaacaccagggcactgtgggacaatatgtaggaagccttatagttaggttcgaaatggcacattcaatggagatagtaaatgcaatagtcctctagtgatattgtagtacattatatgatcacagattaaaaaccaatattcacctttt

SEQ ID NO: 747474 - DNA, 549 bp, Homo sapiens
cacttaggataatagcaacatctatgttgccacataaggacatgattttgtccttttttgtggctgcattgtattccatggtgtataaaagtaccacgttctatttatctaatccatcattgatggaaatctggattagttccacatctttgctattgccaacaccaacatttttatgtctgttctttttctttgcattttcttaatatttatttttacaaaaagggcaatggatgtcaaagcaattgcttattttacattactttggaagcctttagaaagactgcccatacaggggaggtgtttcaagattacactgatattatactgattgtccaggataatgaactaactttagagatgaaaagtcagatggacagtaaggtyttagggaaagtgagatgaaagcacccaatccttggcttaaaaaattatactaagagaaagagctggcccagagccatgtgcataaggttatccaaaatatgtttaatttggggctctatgaaaatatcttgaaactagggacctcaaatagattgtgttaga

SEQ ID NO: 747475 - DNA, 536 bp, Homo sapiens
tgaatgaatttgggagataataaaaaatgagaattgttttttccacatgtagttcatagaataagtctaaaacaggttttatcatgttccccagaatacaagttgttggaaatatttagagttttcttttaaaaggttgtgttcgtcagtatttattttcaatagtttaattttcaacaatttgttttgttttctgtttattttactatgagcgtctccttaaaagatcaggaattttttaatgcaatacccaatttgtaaagcccamgttagattatagaacttagttatgaggacatactgatcaactgctaaaaatggtcacattaaaagggactgtagttgcagtctaagacaggaaactgttgcatggcatttcggtacaaaactcactacagaggccctgggagccttgaagggaaaaaccccagattagtcatttttcagctgacttgaatttcaatcaaataatacaaaaaacaaatgcagaacttttgcagaaatcttataaattccattagtcaataataccttct

SEQ ID NO: 747476 - DNA, 588 bp, Homo sapiens
ttccaatactatttaaactgttctacactacaaagaaaaaagaaaaagttcctaagtatttttgtaaagctattaccaatgaaaatataatacacaaaagccaagacaaccttatgggtcaatctcacttgtaagtatcaagggaaagttcttaataaaattttaacaaatagaattgagagtatatactaagaataataaaaagctaycaggcatggtggtgggtacctgtggtcccagctacacgggaggctgagagaagagaattacttgagtccaggtgtttgagactctcctgggcaacatagcaagaccttgtcccttagtagtagtaataataataataataatagtaataatattaagaagaaatactccttgatgacaaatgagattcattttaagaatgcaagaatggttcgacattaatactaaacataatatctatgaagcaaaggaggcaacatatcataagattatgtcctagtttctaaaggaacattttataatattcaacataatattgtgcaacaattacccctgacgttttgaaactcccaataaattataagtagatgactgtttctg

SEQ ID NO: 747477 - DNA, 588 bp, Homo sapiens
ttccaatactatttaaactgttctacactacaaagaaaaaagaaaaagttcctaagtatttttgtaaagctattaccaatgaaaatataatacacaaaagccaagacaaccttatgggtcaatctcacttgtaagtatcaagggaaagttcttaataaaattttaacaaatagaattgagagtatatactaagaataataaaaagctaccaggcatggtggtgggtacctgtggtcccagctacacgggaggctgagagaagagaattacttgagtccaggtgtttgagactmtcctgggcaacatagcaagaccttgtcccttagtagtagtaataataataataataatagtaataatattaagaagaaatactccttgatgacaaatgagattcattttaagaatgcaagaatggttcgacattaatactaaacataatatctatgaagcaaaggaggcaacatatcataagattatgtcctagtttctaaaggaacattttataatattcaacataatattgtgcaacaattacccctgacgttttgaaactcccaataaattataagtagatgactgtttctg

SEQ ID NO: 747478 - DNA, 604 bp, Homo sapiens
tacccataaggtaatgcatagtcacctttgtctgataaaattaaagtaataagaattttacatatcattatgtatttatatttttgccaataagtatggaatttgtaaataatatctattttagatagtaaaactaggtgagtgctatgctaatatttatataacaaatttggaagacaacaggaytgtaaagtggctttgataagaaaacattaaatttattttctatttgatataacattgtgtttctaattgctttcttagcaaagaagttattattcatcaagaatcatcaaatggattttatccaaaactcttagactgacaggataatggatttctgctaatatggtgattgatggttgatgctaaacttgaatattttttgccatagttatactatagggactcatctttggataataatcagccatagctataaaagattttcactgaataatttgtgttgctccacagtgcaccctaaggcattgaactgattacagaaaggtaaattacctttatgcattttcttcctgactacgtgggtggcaagtacaaacactgaattctatcttgaattaaataattctttcgtagtcta

SEQ ID NO: 747479 - DNA, 604 bp, Homo sapiens
tacccataaggtaatgcatagtcacctttgtctgataaaattaaagtaataagaattttacatatcattatgtatttatatttttgccaataagtatggaatttgtaaataatatctattttagatagtaaaactaggtgagtgctatgctaatatttatataacaaatttggaagacaacaggattgtaaagtggctttgataagaaaacattaaatttattttctatttgatataacattgtgtttctaattgctttcttagcaaagaagttattattcatcaagaatcatcaaatggattttatccaaaactcttagactgacaggataatggatttctgctaatatggtgattgatggttgatgctaarcttgaatattttttgccatagttatactatagggactcatctttggataataatcagccatagctataaaagattttcactgaataatttgtgttgctccacagtgcaccctaaggcattgaactgattacagaaaggtaaattacctttatgcattttcttcctgactacgtgggtggcaagtacaaacactgaattctatcttgaattaaataattctttcgtagtcta

SEQ ID NO: 747480 - DNA, 587 bp, Homo sapiens
aaacccttctatatctacatctatatctatatatacatcctaaataagtgaaaactaaataacacacttttatgaattcatgagtcaaagaagaaataaataagaaattagagaaattggaaagtattttgaattaaataaaaatgatacacagcttatcaaaagttgtaggatgcagctaaagcaatacttagagggaatttatagtttgaaatgcttatttagaaaataacttcttgaagaaacaacctagaatctcatcttttaaaaaatcagcaaaattactgcaaaagaaacccaaatgaaacagaagaatggaaatcagatcagagcaaaaaccaataaatagtcgattaaaaaaaatagaagaaatcagtgaaacccaaagctggttctttgataagtaaaatttgtaaaccactagccaaagtgattagaaaaawaaatgagacacaaattaccaatattaaaaatgagaaaaaaataaaaaattaaaaaattaaaatgagaaaggtgacatactgcagattctgcaaatagtaaaggatactaaatgaatattatgaataatttcatgccaataaatt

SEQ ID NO: 747481 - DNA, 454 bp, Homo sapiens
gcataacttcacatccttgttgttgaagcattccattctctggccacagacggctctgacttcctcattgtcaacgactcagcttccattcacttcaccaatccagtcctgttgtcacctcctataccttgttcctccccatcacttgggatgacccaacctgcaaaatcyatatgctcagaagtctagctctgcaacccttttgggtcacacattcatgggcctgagtcttagagtcagagaagtccacagtaatctgacttttctgaattgcagttactcttctgcaaagtgagagagtactaaatgagaccctacatgtaaagctgttagcatgatgcctggtgcataaataccaagggttacaatgagagctactgttatcaagtctgtgatggttgatttcatgtgttaacctgacaggactacgggatgcccacatatctggctaaac

SEQ ID NO: 747482 - DNA, 547 bp, Homo sapiens
acttgtgatttgggcgaagaggaggattcaccagagaaggattcaccaaaggaggctgaggaagagtagcccgggaggttaagagagacctaagagagagtgatgtcccctggcagagagcaccaagtgtttcaaggcagagggcctgatcaactgtgtcacaagccactgataaagggagcaacaggggactgaggcttgacctcagacttggcaacacacagctgaccttgataatgtcagaatatgtaattctgataccagccctgcaagctaaatattattgtcttcattttacagataaggcaacagaggccagaggaggttcagtgaygcacccagggccacataaccagtgaatgttggggatcagattagagtgcccacgtctccagcctccttctgccattgacaccatcacatcgaccatccgggcaagaccccgcaccgcccccaagggcgcaggcttgatttcactgccaagccaataatgtcagcaacagcacttatggtgctggaccataaatgaaacaagctttgagaacta

SEQ ID NO: 747483 - DNA, 509 bp, Homo sapiens
tattatgttaatcaatccggaatcgtcaccaaaaagttaaagaaattcgagatcgaatacaacgtagagcagaggagcttcaaaacactggcccctggggcctcctcagccaatggatgccccggattctccccttcttaggacctctagcagctataatattgttactcctctttggaccctgtatctttaacctccttgttaattggaccctgtatctttaacctccttgttaagtttgtctcttccagaatcgaagctgcaaagctacaaatsgttcttcaaatggagccccagatgcaatccatgagtaaaatctaccacggacccctggaccggcctgctagcccatgctccaatgttaatgacatcaaaggcacccctcccgaggaaatctcaactgcagaacccctactacgccccaattcagcaggaagcagttagagcggtggtcggccaacttccccaatagcacttgggttttcctgttgaggggggcactgagagac

SEQ ID NO: 747484 - DNA, 611 bp, Homo sapiens
gtggtaacataagcagcaaagtttgggaaaatgatggactagatgatataattttttacctaattaggatgatcaaccatcctggtttttctggaattatgttcctgggatatgaaactttcattttagaactaggaaagtcccaggmaaaccaggatgagctggtcaacctggtcttaagtgggtatcttcactagtcagtcttaattcaagtggggtggctgggtgtacccctcggagtctacaggggcactggatgacatgagggagtcagtggacatttgctaggcctcccctacccaatctggttgacttttctcatctgacagatgaggaaacctaaatggagtaaagtgactgattggttcaagattgcacagatggtaagtggcagaatgaggaatagaaccacatctcttgactgttagtttcagttagttttcttccccgtgggggaggtaggcctctttgctcaactctgtcctgcccttcacagcctctgtttgctttcaggtgcatctataataatgttaagacaaataacaattagatgatattaattaaattgaaacactgtcctaagagctttatgtatattagtcattgatttc

SEQ ID NO: 747485 - DNA, 631 bp, Homo sapiens
tgtgggagttttccgccttcctttatgagcctgtaggtgccataaatggtcgtgtctggtaatcttaaagggacggaggagaaggaagagagggtcagcctacccctttcacattatttctatcctcagggccgggcgyggtggctcatgcctataattccagcactttgggaggccaaggtgggtggagctctgagctcaggagttcaagaccagcctgggcatcatggcaaaacccagtctctaccaacaacacaaaaacttagccgggtgtgcgggcacacactgtagtcccagctacttgggaggctgagatgggaggatcatttgagcctgggaagcggaggttgcggtgagccaggattgtgccactgcgctccagcctgggtgacagagtgagaccctgtttcaaacaaacaaacaaacaaacaaacaaacaaagaaaacacattaattctatcctctaactataaaattctacaatggctccactttcttaaccttggggagccccgtaggatactctctcgtggataacatcaaaacatctcacaaagcacattatgtttgctttattatacaagtaataagcaataaactgggttagtactcagaatatacccactcccct

SEQ ID NO: 747486 - DNA, 576 bp, Homo sapiens
ggttcacatcactggaaattccatgatatatccagcttcagaaatggctggatgccgataatcaaagatcatcatggactttatgtctcatactatatctctaggcactgcattcctttggaatggcttcattccctagcagctckctctctctctgcatagagaaggatcatggcacctagcagctctaggcttatgttgtcattagaattcttttttttgctgggcgcagtggctcacgcctgtaatcccagcactttgggaggccgaggcgggcggatcacgaggttaggagatcgagaccatcttggctaacaaggtgaaaccccgtctctactaaaaatacgaaaaattagccaggcgtggtggcaggcgcctgtagtcccaggtacttgggaggctgaggcaggagaatggcatgaacctgggaggcagagcttgcagtgagccgagatcacgccactgcactccagcctgggcgacagagcgagactctgtctcaaaaaaaaaaaaaaaaagaattcttggaaccaacccaaatgtccaacaatgatagactggattaagaaaatgtgt

SEQ ID NO: 747487 - DNA, 584 bp, Homo sapiens
taagaatctaaatgccaaagatgaaaactggagaaatgtatatgaactgtgagggtaaatgtgatctctgagcttcctgatagccatggcaaaaaaggaaattgtcaattacctacttctttattataagggagaaataattttagttcttttagggagtcatattttcctggccctaagtcctaactgaagctcctgagatcctgctatgtagaatggtgactctcagccttctgccttcttcatgtgtttggcacagatgaacctttgggggcacctgctggggtactattcctttctctgattctcaggtgctccagtgggtaaggctgaggcagagggccctaagagttatggtggttaaatcccaaacagtgcaaaagggcattttttgtagccactcctgactaaagttgagagtttcatgcaaaagaccracccaggggtagtgattctgtggatggcatggccgtccaagcctaaagtagtccaagaatagaggcagagattgctgaaggggtgtcacttcaaccagtagccacgtattgccctgcaggattttctatgcaggaccgagtccatca

SEQ ID NO: 747488 - DNA, 618 bp, Homo sapiens
gcaatcgtcctggtttctgaactccatgtaatagatctggggatgaaacagaagctatcacggtctcaggccaagctgcctcaacacctttaggggcttcgcaagcctttttcgactctaagatgtgaaccagaaagtgtttttgtgattcaggctaggatgtcttaccagttggcaaaagaaagataataagaagtaagtgtrgccaaatagttctcaggagctgaataattgaatactcttagctatgtaagaatgatctctttactgtttaatgtttcacttcagctacttagaagtataatgcagattgattgacctcaagtgatcttcctgcctcagcctcccgagtcgttgggagtacaggcgtgcaacaccagtcctggctaatttttaaattttttgtagagacagggtcttgctatgttgtccaggctatgaaggtaattttatatattatcttaaatgattttgtgcatgaaacagtttcgatggcattttgactgaaacctgtcacatgaggtcaggtgtgacattttccacttgtggctcagaaaattttggattttggtgcctttcggattttggattttgggattagggtcgctcaacctgtat

SEQ ID NO: 747489 - DNA, 567 bp, Homo sapiens
ttttgtttatttttattttttgaaatggagacttgctctttcgcccaggctggagtgcagtgacacgatctcgactcattgcaagctctgcctcccggttcaagcaattctcctgcctcagtctcctgagtagctaggattacaggtgcctgccaccatgcctggctaatatttatatttttagtagagacaaggtttcaccatgttggccaggctggtcttgaactcctgacctcaggtgatcctcccgcctggccttcccaaagtgctaggattacrggcatgagccactacgcctggcttttttttttttttttttttttttaagacagagttttgctctttttgaccaggctggagtgcaatggcacgatcttggctcactacaacctccgcctcccaggttcaagcgattctcctgcctcagcctcccaagtagctgggattacaggcatgcgccaacacgcctggctaattttgtatttttagtggagatgaggtttctccgtgttggtcaggctggtctccaattcccgatctcaggtgattcacctgccttggcctccc

SEQ ID NO: 747490 - DNA, 665 bp, Homo sapiens
cagtggggaaggagcaagagataaatagccatcagaagaggtgctgtgggattacatctgtgctgctaattgcctaagcagtagctggagttaaaggatggctgatagcatgtaaggtgcagctctaatggggtctgatacaaagccctgtattgccctcacttcattacctctctgacctcattctcattctttccatcagtcactctttcccacttcctctgccctgcttgttgttctcagaacaaaatggacaygcaccctcctcagggcctttgcacttactattctccctgccagaaaagacagctggctggcttgaaattcacacagctggcttcctcatcttcttcaagtttcaactccaaagtcacatttttaaaatgtatacataatattttacatattttcagggtacatgtgatattttgttgcagcaaatgtgttacgatcaagtcagggtatttgggggtacccatcacattgagtatttatcatttctatgtgttagaaacatctcaagttttctcttctagctacaggttttttgttttgtttcattttgttttttgagatggggtcccgctctgtcacccaggctagaatgcagtggcagcgatctcagcttaccgcaacctcagtctccagggtttaagtgcttctcc

SEQ ID NO: 747491 - DNA, 707 bp, Homo sapiens
aagcagtccacctgccctggcctcccaaagtgctgggattacaggtgtgagccaccgcacccagccacaggtaacatcttataacccatttatttcaaactgataacaacttaacactgatggcaaaaacaaaccaactaataagcaaagagaaaactaataaaaactctctacactttaacttcatctcccctgctttttaactttgtattgtttctatttatatcttatactatctatgtcttgaaaagtagttattatatttgataggttmaacttttaggctttctactcaagatatgagtagtttataaatcacaattacagtggtctgtgaactatactgttacagtgagttttgtacctaagataatttcttattgctcattaatgtccgtttctttcagattgaagaactctggttagcatttcttgtagcacaggtctgatgttaattaaatctcttagcttttgtttgtctgggagagcctttgtttctccttcatgtttgaaggatgttttccctggatacgctattctaccatagaattttttttctcatcagcactttaaatatgtcatgccattctttactggcctgtaaggtttccactgagaagtctgttgccagatgtagtggagctcctttgtatgttgtttcttttcttttgttccttttaggatcctttctttatccttcacctttg

SEQ ID NO: 747492 - DNA, 707 bp, Homo sapiens
aagcagtccacctgccctggcctcccaaagtgctgggattacaggtgtgagccaccgcacccagccacaggtaacatcttataacccatttatttcaaactgataacaacttaacactgatggcaaaaacaaaccaactaataagcaaagagaaaactaataaaaactctctacactttaacttcatctcccctgctttttaactttgtattgtttctatttatatcttatactatctatgtcttgaaaagtagttattatatttgataggttcaacttttaggctttctactcaagatatgagtagtttataaatcacaattacagtggtctgtgaactatactgttacagtgagttttgtacctaagataatttcttattgctcattaatgtccgtttctttcagattgaagaactctggttagcatttcttgtagcacaggtctgatgttaattaaatctcttagcttttgtttgtctgggagagcctttgtttctccttcatgtttgaaggatgttttccctggatacgctattctacmatagaattttttttctcatcagcactttaaatatgtcatgccattctttactggcctgtaaggtttccactgagaagtctgttgccagatgtagtggagctcctttgtatgttgtttcttttcttttgttccttttaggatcctttctttatccttcacctttg

SEQ ID NO: 747493 - DNA, 588 bp, Homo sapiens
cttttcttttgttccttttaggatcctttctttatccttcacctttgggaaaaagtaccttgagatagtcttatttgggttaaatctgcttggtgttctattagcttcttttacttgaatgttaatatatttctcttagttctctgttattctccctttgartaaacattctaccccagtctctgtctcctctttaatgcccaaggcagatccagaaatgctgtccaggagccagggcctggagtcaggaaccttgaaatctacttggtgttccatactagtgcagtggagcgggcaccaaagccacaagataaagtccttcccactcttcctcaccttccatcgtgtagaaggagtctcaacaccccaggcccatggcaagtactgcctggctactgctaatgttcactcaaggcccaagagctcttcattcagcttgtggtgaatgctgctaggcctgggtctctcctttcagggtaggtggctcccctatggtccaaggcaggtccagaaatgccatccaggagccaaggcctggaattggggaacccagaagccctcttggtgctttacccccatggccaagct

SEQ ID NO: 747494 - DNA, 588 bp, Homo sapiens
cttttcttttgttccttttaggatcctttctttatccttcacctttgggaaaaagtaccttgagatagtcttatttgggttaaatctgcttggtgttctattagcttcttttacttgaatgttaatatatttctcttagttctctgttattctccctttgaataaacattctaccccagtctctgtctcctctttaatgcccaaggcagatccagaaatgctgtccaggagccagggcctggagtcaggaaccttgawatctacttggtgttccatactagtgcagtggagcgggcaccaaagccacaagataaagtccttcccactcttcctcaccttccatcgtgtagaaggagtctcaacaccccaggcccatggcaagtactgcctggctactgctaatgttcactcaaggcccaagagctcttcattcagcttgtggtgaatgctgctaggcctgggtctctcctttcagggtaggtggctcccctatggtccaaggcaggtccagaaatgccatccaggagccaaggcctggaattggggaacccagaagccctcttggtgctttacccccatggccaagct

SEQ ID NO: 747495 - DNA, 541 bp, Homo sapiens
gggatgtgaggagcacctctgcccagccgcgaccccgtctgggaactgaggagtgtctctgcccgaccgccaccccgtctgggaggtgaggagcatctctgcccggccgccccgtctgagaagtgaggagcccctccgcccggcagccgccccatctgggaagtgaggagcccctccgcccggcagccgccccgtctgggaagtgaagagcgtctctgcctggcagccgccccgtccgagggggaggtggggggcagcccccgcccggccgccccgtctgggaagkgaggggcccctctgcccggccgccaccccatctaggaggtgtacccagcagctcactgacaacgggccatgatgacgatggcggttttgtcgaatagaaaagggggaaatgtggggaaaagagagagatcagattgttactgtgtctgtgtagaaaaaagtagacataggagactccattttgttctgtactaagaaaaattcttctgccttgggatcctattgatctgtgaccttaccccccaaccctgtgctc

SEQ ID NO: 747496 - DNA, 541 bp, Homo sapiens
gggatgtgaggagcacctctgcccagccgcgaccccgtctgggaactgaggagtgtctctgcccgaccgccaccccgtctgggaggtgaggagcatctctgcccggccgccccgtctgagaagtgaggagcccctccgcccggcagccgccccatctgggaagtgaggagcccctccgcccggcagccgccccgtctgggaagtgaagagcgtctctgcctggcagccgccccgtccgagggggaggtggggggcagcccccgcccggccgccccgtctgggaagtgaggggcccctctgcccggccgccaccccrtctaggaggtgtacccagcagctcactgacaacgggccatgatgacgatggcggttttgtcgaatagaaaagggggaaatgtggggaaaagagagagatcagattgttactgtgtctgtgtagaaaaaagtagacataggagactccattttgttctgtactaagaaaaattcttctgccttgggatcctattgatctgtgaccttaccccccaaccctgtgctc

SEQ ID NO: 747497 - DNA, 435 bp, Homo sapiens
aggagtgtctctgcccgaccgccaccccgtctgggaggtgaggagcatctctgcccggccgccccgtctgagaagtgaggagcccctccgcccggcagccgccccatctgggaagtgaggagcccctccgcccggcagccgccccgtctgggaagtgaagagcgtctctgcctggcagccgccccgtccgagggggaggtggggggcagcccccgcccggccgccccgtctgggaagtgaggggcccctctgcccggccgccaccccatctaggaggtgtacccarcagctcactgacaacgggccatgatgacgatggcggttttgtcgaatagaaaagggggaaatgtggggaaaagagagagatcagattgttactgtgtctgtgtagaaaaaagtagacataggagactccattttgttctgtactaagaa

SEQ ID NO: 747498 - DNA, 571 bp, Homo sapiens
ccaaggcagatggattatgaggtcaggagatcgagaccatcctggctaacacagtgaaacccagtctctactaaaaatacaaaaattagctgggcatggtggcacgtgcctatagtcccagctactcaggaggctgaggcaggagaatcatttgaatcgggaggcagaggttgcagtgagccgagattgcaccactgcactccagtctgggcaacagagcaagactccgtctcaataacgaaaaaaaaaagacacctggattgtttccagcttttgactattaggaataggccaggagcggtagctcaygtctgtaatcccagaactttgggaggccgaggcagatggatcacgcggtcaggagatctagaccatcctggccaacatggtgaaaccccgtctctactaaaaatacaaaaattagctgggtgtggtggtgcgcacctgtagtcccagctactcgggaagctgaggcaggagaatcgcttgaacctgggaggcagaggttgcagtgagccgagattgcagcactgcactccagtctgggcaacagagcaagactccatctcaa

SEQ ID NO: 747499 - DNA, 504 bp, Homo sapiens
gtaaatattgtttgttgggcacttgataaacgtctctcaagttcctactgtgtgccagttgttgtgttagctgcaaaggatgtggagatgagattctgtctcttcctttaaggaaaggggatggtgttattttcttcctaccagatkacaagttaatactatttaaaacatgatttctgttaatttgtgggagattgcatttttttccccatcagatcattgtggtaaaataacttgtgctcttttcttattccgtggtttgttttgttttgttttctataggattttgtttgtttttcacaaaaatggtcatttgagctgtaaggcaaaagtgcagcctcctaggctgaatggtgcaaagactggagttttttccacaaggagccctcatcgtcccaatgcaataggactgaccctggccaagctggaaaaggtagaaggtaacccatttcatttctacttttacctttttcctcacccaaaaaagccttataaaataaacag

SEQ ID NO: 747500 - DNA, 504 bp, Homo sapiens
gtaaatattgtttgttgggcacttgataaacgtctctcaagttcctactgtgtgccagttgttgtgttagctgcaaaggatgtggagatgagattctgtctcttcctttaaggaaaggggatggtgttattttcttcctaccagatgacaagttaatactatttaaaacatgatttctrttaatttgtgggagattgcatttttttccccatcagatcattgtggtaaaataacttgtgctcttttcttattccgtggtttgttttgttttgttttctataggattttgtttgtttttcacaaaaatggtcatttgagctgtaaggcaaaagtgcagcctcctaggctgaatggtgcaaagactggagttttttccacaaggagccctcatcgtcccaatgcaataggactgaccctggccaagctggaaaaggtagaaggtaacccatttcatttctacttttacctttttcctcacccaaaaaagccttataaaataaacag

SEQ ID NO: 747501 - DNA, 534 bp, Homo sapiens
acacaccatatgctaaaactaactcaaaatggaataaagaccttaatgtttatagacaatgttataaaacttataaaagaaaacacagatgtatatctttgtgatgttggattactcaacagtttcttagatataataccaaaaacaaagcacagtaacaaaagaaaaaacagataactggactttatcaaaactaaaaactttgcatgtgaaaggacactgtcaagaaagtagaaagacaaagaatgagaggaaatatgtgcaaatcatgtatctgataaaggtctaatagccagaatrtacatatttttaaactctcacaactcaacaataaaaaaatttgaaaattagtaaagtacttcaatagacatttgtccaaagaagatatacaaatggccaataagaaatgaaaagatgttcattattagtctttaggaaactagaagtcaaaaccacaatgagaatttggaatctttgtgcattgctgtagtaatgtaaaatggtacagccactgtggaaaacagtttggcaatt

SEQ ID NO: 747502 - DNA, 638 bp, Homo sapiens
aatataaaagctagaaaagagaacttttacagagacgggaaaaaaactggtgtatgtgggattgaaaggtttaatcatgtgctgtgcaaaatcaataaaagaggctccatctaaatatattctagaaaacatttagaactgagagcaatttttaaaatccacacagacagaaaactaaagttaccacaaaaaaacaaaactcaatttaacttcaaacttgtcttttgcaaaagtagcatgaaagataataaagtaacatttacaaagtttttgagagtaagaaatgttgcgtaccaataacttcatataaagacaagttggcttttatatagaaagaaaacagagaaatttgggagagtagttccactcattaaaaaaaaagaaagaggatataaagcytaaagcatttccaaagatgaagttctattaaaaatgaatatctcagtcagaaatgtaccacacaaaaaatgaggtggcagatcagaactgcaaaaactgtagacttaagctattagaactatctaaataaaaattttaaattgtatatactatgtatcagaaactaaaagagtcttgaaaatatgaacacaaggctatgacaataacttagcatttatagaatacttctctcaacaata

SEQ ID NO: 747503 - DNA, 642 bp, Homo sapiens
tttaaagtaattttagtagctgcatatttcattccatagttatacctcagtttatttaacaggctattattggatattgaattttttcataattttatcaaaattataaataatgcctctatgaggatctttttgaataggtctktattttctattgaatgatttacttaccctaaaattctagggggaaaagtattggattgcaggatatatgagtatctttgtagttcttcctagtttgggcaaacatttaaaatgaaaatcagtccaccaacctcagtattggacattgacttcaattttgctgctgttaatcactatatttgtaaggttttttcacagtttaatattttcttcctctatcctttgtttagttgtatctaccttaaaacagcttcacttatctttctcacaatcataaggacaggggcattttaaaatgcgcttgtgtgtgtgtgtatctcatatttatgttcagttgaaaaaaatatgacccagcaactcatatggtaaatatgaaataaagaagtcagccaacctgtatatctgccactttcaataatggatttttctctggagtcaaaggaatgaacctttgtatctaaatgcctccttcactgattccatatgcccatatgcctg

SEQ ID NO: 747504 - DNA, 612 bp, Homo sapiens
tcactttagagtgacagctgtgcccctggtgggcctggtctttgagcccattggaataactggagaggaacagaaaggttggcctccagagggtgcactaggcactgccgctggtggagatcaagtcaaggtcctgcttggattactgttctccctgatggaagcaggttgagaagttctggtgcctgagtaccaggcgctacttagatcttcctcctcgtgcataatctcttttgggaatcccagtccgggatttcgtctcatctccsatgcagccactatttggcctccaaaggccagtgggactgaagagtggcacaggcgggtgcatgggcaagagtggcacaggcggatgcatgggcggttgccttcgttgcagcctaagcttgagggagtggcttgccttctctggcccagagttagggtgtagcttgaagaaagggtactctagaggccagttaaccactttctggccaaagattcaagccagggaccaaatggaattccagactgacatcagtcagcccaaatgactaggccacttgattaggatttggaaccatgaaaagtaatgaagacagtgggcatcttcctgcctttggtcaccctgct

SEQ ID NO: 747505 - DNA, 405 bp, Homo sapiens
tcccagcattgtaattcttgccttaggctcttattactagaggacctgggctaaggcatggccttggtttagatatctctaaagactctttctgctgtgacataatagactggtacaaaattccatacttccaatacctaaggataaaaaaatttatgtatatatactgtactggaaataaaacaccatttaattcctgcagagattagtttctgaggtaygccaggggtcttgcttgttataattccaattggaccaagagagaaagttataataattattaataatgtttattatgttttatatgctaggccttgggttaagtactttaaaggcatttagtgtttgatcttcactctaaccttactgggttcttttatcctcattttacacaagaggaagatg

SEQ ID NO: 747506 - DNA, 611 bp, Homo sapiens
cccacctctcgtttccaatggagacctgtcttccgaactgtaggctcgtatgccacctatctgctcagcagctccacttggatgccaggtgagcatcttacacttggcatgaccaacacagagcgctgagctgtcccatgagatgtgaccctcccacaatcaaacccaactcaataaatggacacccaggctgaaacctgtgagtccttgtgacccctctcttcacttacacccccagcctatattagctctgccttcaaagtatagctagactccaactrctttgcttcaccttcacagctactaacctggtgcagtcttctctaatctctcctagaatatctggccacattggccagagtgcaccctgggcaccgtactctctccctacagcatttgtatctgtggctccctctttctggaatgtttttctcctctccttcaggtctttgttcaaatatcactgtctcccggaggccttccctaaccattgttttcaattgcagcccttatacctgctagactgtcccggtccctcctcccaccttacttatggtcagagcacttgccactctcagatgtgctgcagatttccttgttgtcgttggtaa

SEQ ID NO: 747507 - DNA, 507 bp, Homo sapiens
atcctgtcctacacttgctgtgtgattttgggtgagttacataacctctctgggcctgtttcctcactctgtaaattgtagatactaactgccccttgctaagggcattgatgtgaggaggactgacactgtgcttgcatagtgcttcgtggcctttcacaggaaaaccagggagaaaggctttgcaaacaaagattctctttaaaaatgaaattgacaggtgatgtgaaaacacaagttatcctctgtgcattactttttgtaactggcctgtaacagggctcttcaggatactagagggtgggccctttccacttcactaaaggtgaatcaagcctaatccttttcakcactgaggggtcaggggaaattgccaatgttttcacttgtcttccttaaatctactatgacctcagcaccaggagaaggggctggggtgcacataaactaaagaaaatctgaaataaagacccagagactcggtcagaatttaatcttcataggtac

SEQ ID NO: 747508 - DNA, 616 bp, Homo sapiens
agtcccccaggattcctggggaagcccatgtagtctaactaccaggaagtatctggaacagaaggaagactagatactcttcatgctccactgcgctccagttctcactgctgctcaccttatgatcacctctgtctccccaaccccttcattcaactcagtgctgaattgcttgaatccatggagcccacccaaaggtaaacaaaattttacaggactggctgtagtttttcaatagggtgagggaagtatcttacagtattttaaaagaggcaagctgaaattaagagaacaggcgataatattactgtkgaggatctatttccactttcaccccagataaaaagctcaccagaacagcaaatactgattaatttcacaacaaacagaccaaaggggattacatacttctgtaatacacttggagtgggtttgacttgttctgtgatcctttacactgatacatccctcgagggtccttggcattacttcccagattccatttttttttatcttcagctaggaagccgatcatcttcccatctttaaaccatgtgatatttttggcttctgcatcacaagtcagaagtaccgaaccatcttcttgatagtcata

SEQ ID NO: 747509 - DNA, 634 bp, Homo sapiens
ggctcagcgtcgtgcacactggtaggttatgcagggaacagtggttttggaaaggatgagagcttgtagaaaagaaaggggcaatctttgttaaggctgagagagagggacaatcttttgtgatggatagagagagggactagcccttcagaactgggagcctcagagggagaccgaagagttctggggtaaaaagagaaaggctttgtttggctgtggaaagaaacagaaagtaaagcaaaggaactcagagaatccgttacaaaaatggcattgagattgtgaaagggagagggagcaattctttgatgaaaggcttacaacaggtctgttcactcactcatttattcgagatacttattgagtacctactctaatgctaggcaccgtcaaaagtgcatgacatacactatctcattgaatccccacaccactctaggaggcaggtactaatgatgggagctaacayttactgagtacttcccaaatgtcaggggctttacatgacacattttatttaatctttacatatctcatcagtttattgtgcatttaatgcctcccatcttgccaatgaggaaacgaggctcacagaggttaagtcatttgccctgagtcacgtagctgataaatg

SEQ ID NO: 747510 - DNA, 576 bp, Homo sapiens
ttgaggagtctgagcccctggccgtcgtggtcttttcgggttgtggctgctgcacttgcccatttaccatcaaaattgcactaaaaaatgccccaggggagcccttggattctatctgagttgtgcctgcagccctgcctcctccttatcatcagatatggaaagattcactctgctgggggagcaaatcattttttttttttttttggcatgctggtctcttggcagtggtgtagcttaaagtttaatgggtgctgtggtgaaagtgttctgtctctggaaaccatggcccctataagctcagagcctagagttagcgggacaggaagcacasatttcctaagtgggtcactggaagtaatggtaagcatgaatatccctacttctaacctttagctcttgcacacatgcgttttaccttttggagacatagtatcatataacagtcattggcttaatatgtacaccacatcctgaaggacagtgcccaatcctagcagggtgtcatctctaagttgataccttagctatgtcttgaaaagactattccatggatccatcaggctggcagcttct

SEQ ID NO: 747511 - DNA, 619 bp, Homo sapiens
gtgccatgcactccagcctgcgtgacagagcaagactccatctctaaaaatataaaataaaatatgataatggtgttgaagtatttaaataattaaatggggggggcattagactgaggaggctctaactaagttcctactaagcaagctaaaacctaactcagtctcatttcctgtaagcagttaatttaaaagaaacttagccaatcacagaaggccatctgggcattagttatattgtctttaacttcctattggatagtctaaataaggaaattctggaagtttaaccaatcaaataatttctttgctctgcttctgcatttaccctrttagagccttcccctcttgctccgtcctcgaagcccaaaccatttccagtttggagcagcctgatcaatgaattgctgtttgctcaaataaactcttcaaagttttaaagtgtgccaaagtttatcttttaacagaagttatatttatgggcaaaatgatatggtatcttcaatttgcttcaaaataatattgggtgggtagataaagacataaatgcccatgggttgctgataataagggctgggtgataggacatggggtttgttatattattttatctacattt

SEQ ID NO: 747512 - DNA, 564 bp, Homo sapiens
aatatatatttttgtgttttgggttttgtttacttttggtttattttctagtgttactgactaacagctttattcagataattcacatatacaattcactcatttaaagtatataattcaatggcttttagtatattcacagctgtacatctattaccacaaccaattttagaatgttttctttrcccgaaaagaaactctgcccctcacagccgtcatctcccattccactcacccctctccccaatcccaatcccctaccacccaaccttaggcaactactaatctaccttctgtctctataagatttacctaaacatttcatacaaatggaatcatacaatatgtggtcctttgtgattagcttctttcacttagcacagtgttttcaagtttcatccatgtagtagatgtatcagtacttcattcctgttcatgactaagtaatattccattagatggatatactgcattttatgtatccattcattagctgatgggcatttgggttgtttccaattgattcatttttttaaacagtatctcttattttgttttactttg

SEQ ID NO: 747513 - DNA, 564 bp, Homo sapiens
aatatatatttttgtgttttgggttttgtttacttttggtttattttctagtgttactgactaacagctttattcagataattcacatatacaattcactcatttaaagtatataattcaatggcttttagtatattcacagctgtacatctattaccacaaccaattttagaatgttttctttgcccgaaaagaaactctgcccctcacagccrtcatctcccattccactcacccctctccccaatcccaatcccctaccacccaaccttaggcaactactaatctaccttctgtctctataagatttacctaaacatttcatacaaatggaatcatacaatatgtggtcctttgtgattagcttctttcacttagcacagtgttttcaagtttcatccatgtagtagatgtatcagtacttcattcctgttcatgactaagtaatattccattagatggatatactgcattttatgtatccattcattagctgatgggcatttgggttgtttccaattgattcatttttttaaacagtatctcttattttgttttactttg

SEQ ID NO: 747514 - DNA, 547 bp, Homo sapiens
gaatatcatagtgtgtacttacacaaacctagatgatacatatagcctactacaaacctagggtacatagtataacctattgttcctaggctgcaaacctgtatagcatgttacagttatgaatactgtaggcaattgtaactcaatggtaaatatgagtttatctaaacatacctaaacatagaaaaggtaccttaaaaatatggtgtaaaagataaaaaatggtacatccgtatattcacttatcatgaataaagcttgcaggactggaagttgctctggttgagtcagtgagttagcagtgagtgaatgtgaaggcctatgacgttactgtagactactatagatytataaacactgtacacttagactacactaaatttatataaaatattttttaataataaattaaccttagcttactgtaacttttaaaatttacaaacttaattttttaatttttttgactcttttgaaataacatttagcttaaaacacaagcacattgtacagctatacaaaaatattttttatatccgtattctac

SEQ ID NO: 747515 - DNA, 483 bp, Homo sapiens
aaaaagtttttaaaaagtaatataatcaatatgctaagagaagaaagaaaatagcatctcataaaatgctcagttaaaaccacaatggaagaaaaaaagtaacaaggacaacaaagagaaaaggtgggcagggcgyggtggctcacacctgtaatcccagcactttgggaggccgaggtgggcagatcacgaggtcaggagatagagaccatcctggctaacaaggtgaaaccccgtctctactaaaaatacaaaaaattagccaggcgtggtggcaggcgcctgtagtcccagctacttgggaggctgaggcaggagaatggcgtgaactcgggaggcggagcttgcagtgagctgagatcgcgccactgtactccagcctgggcaacaaagtgagactccgtctcaaaaaaacaaaaaacaaaaaacaaaaaaatagaaaaggtaacatatacagatactaatctcactataccaataatg

SEQ ID NO: 747516 - DNA, 625 bp, Homo sapiens
gaagttcttgccaccctgctagctgcccttctcagcctacagtgtgtgcttttcttccactgcaccctccccgggtatccctggccctcagagtcccccacaacttcaccttctaccatggcacatgttctcctgcagcatctgtctgcctcccatgttgaaaactctcttttaagcttcagtttctgctrcctctaccctccatgttaacagtcccagctcctgggagcagggacacattgtcccaggacacgtgtaaaatgccacaggggccagctagctcactggttgtccctggctcagaagctcccccagtgctgtcagctgttggtggggagggcgggagcagatgatgggaaaccggtctgcctgggcgccgggcaggcgcccctgggaggggttgcttgtggcgcaggcccccagcctcggcctgcctggcatatgctgttagcagtgcatttgttttctcaagtcctttggaggcaagaacctcaagcgcgtggggatcatacttcagagaggggtcctcatccttatgctgtgctgctttccctgctgggccgacttggtcaacaccgagcgcatcctcctgctcttaaaacaagacccgaagtctccaggtgag

SEQ ID NO: 747517 - DNA, 625 bp, Homo sapiens
gaagttcttgccaccctgctagctgcccttctcagcctacagtgtgtgcttttcttccactgcaccctccccgggtatccctggccctcagagtcccccacaacttcaccttctaccatggcacatgttctcctgcagcatctgtctgcctcccatgttgaaaactctcttttaagcttcagtttctgctgcctctaccctccatgttaacagtcccagctcctgggagcagggacacattgtcccaggacacgtgtaaaatgccacaggggccagctagctcactggttgtccctggctcagaagctcccccartgctgtcagctgttggtggggagggcgggagcagatgatgggaaaccggtctgcctgggcgccgggcaggcgcccctgggaggggttgcttgtggcgcaggcccccagcctcggcctgcctggcatatgctgttagcagtgcatttgttttctcaagtcctttggaggcaagaacctcaagcgcgtggggatcatacttcagagaggggtcctcatccttatgctgtgctgctttccctgctgggccgacttggtcaacaccgagcgcatcctcctgctcttaaaacaagacccgaagtctccaggtgag

SEQ ID NO: 747518 - DNA, 637 bp, Homo sapiens
acttgaggccaggcgcggtggctcatgcctgtaattctagcactttggggtgccaaggctgacagatcgcctgagctcaggagttcgagaccaccctgggcaacatggtgaaaccctgtctctactaaaatacaaaaaactagccacgcatggtggcacgcgcctgtagtcccagctactcgggaggctgaggcatgagaatcgcttgagctcggaaggcggaagtttcagtgagcgaagattgtgccactgcactccagcttgggctacagagtgagactccatctcaaaaaaaaaaaaaaaaaaaagaacttaaaaaaaaaaacagacctgagtatgagtatataaacatctcttaagatttgcatgcctaaagtacacataactggcttccagttcaaaatgaatgaatcacatgcctaactcccttccctcccaaaacacygttaatggaaaataaatctccatgcttaatagaaaataaattcattaacaacactgagaatgagagccggtcagcttctgcaagagggaaagcaggctccacagccatgatccaagggcagaaacgcaggaagccacagcacagaacatgaacagaatgctgcctcacactccgtcttcccagtagagctcc

SEQ ID NO: 747519 - DNA, 627 bp, Homo sapiens
ttaggacagtgcctggcacatagtatgtgctcaataaaagtttgctgttattattactaaatgcacatcctactggcagatcggggcatcacctttagatgttaaccacaacttaactttatttatttttatttttttgagacagggtctcactctgtcccccaggctagagtgcaatggtatgatcttggcttactgcaacctccacctcctgggttcaagtgattctcctgccgcagcctcccgagtaactgggattacaggcgcccgccaccatgcccggccaattttgtatttttagtagacatggggtttcaccatgttggtcaggctggtctcaaactcctggccacaagtgatctacctgcctcggcctcccaaagtgctgggattacagacatgagccaccgcacctggcccacaatttaaccttaaatatagaaattataatgtgctatactgtttaagaaaaactaggtttmatatttccccagttgacacaaggtggttatcatcctttagttagaaggtacacttttgttcagtaatcaataaggatagatgtagacacccatttgatctaagatacagcatacatctgttgagttgccctttagagacaagctt

SEQ ID NO: 747520 - DNA, 624 bp, Homo sapiens
aaccctaagacgtaagtagagtatgggacgtgactttccagaggggtgatcatttacccagtaagtgaggacagtgaaattctctgagttcaaagattaaatacctacttttttttttttttttaatgtaaactaccgtctttcctcccctaaatgggttggcttcctaagctctgatctggtgagaagctgtttctcctgaagtctttacagcccagctcaggcatccaggagggtcataaccatgtatccttccaggaatctgtctctggaaactttacagtcacacacacattcctcccctgggctgttgttcagattcagcacttagacaatgcctcttgggatcagtgatagtgccttttccccygggtcactcagaacttatttttccttttaggcgaaagttcaccaaaaaggccccaactagcagctcccagagaagtttcgtggagtttatcttggagcctctttataagatcctcgcccaggtgagtgtgtcaggtcacactgggcagatctgctcttataagcacagtgtggaagagctggtgaactcacacttccctctgtccctaaacctgctcagttttatgtcaagtataagggtggttgttggtcact

SEQ ID NO: 747521 - DNA, 614 bp, Homo sapiens
atctacacctagccaaacacatggatgtgcaaatgcattcatagtccaaccaaaaataatgaacaccaaacctcacctctcaccatacacagaaattaactcaagatgtaaaacaatacaacttctggaagaaaacatgggggaagacttttgggatcttgaggtaggcagagatttcttgggtagaacatagtcataggctggaattgcatatcattgagcacaagctctgaaatcagaaaacatctctttgattcctgtcttattgtataactggctgcattgaacttaggtaagttacttactttctctgagctcatatgccttcttgtacaatgaaggtataatacyacctacctctctggatgcctgtaaagttcagagaactaatgcatgtgaaatagtcttttttaaaatttttattgtttttgagacagggtctcactctgtcacccaggctggagttcagtggtgcaatgtcattgcaacctccgcttcccaggctcaagcaattctcccacctcagcctcctgagtagctgggactacaggcatgtgccaccatgctcagctaatgttttagttttatttatttatttatttatttgcagagat

SEQ ID NO: 747522 - DNA, 503 bp, Homo sapiens
cagccacgctgggacggaggacggggacaggggagcccctgcggcgccacttcttcctctccgagtcctgtctgcccttgatggagccactggtggggttacttgctggcggtcggccactttcgcccctccctcgccagcccgccagctccctaaggttttgtggttttttgtcaccaccacacctcagtgttgagctaagtgaggacgtccccccagcaaatgtattggacggaargaaacggtgtgcgggaggaggcggaggaaagtaggccacccggggctcaagtggtgagaagaggcagccaggcagggtggcaggtggggtgtggccagcttgttgggtgtcccaccctgtgctgttgggggcgtggagggtagtgtggggtggccagggcgggctcatgtcctcatccccctcctctttcccagaaccacacccaaaccctcttcaaccccctgtgtgtgggctgtggcaggggtcaacctcttgtgttcaggtc

SEQ ID NO: 747523 - DNA, 503 bp, Homo sapiens
cagccacgctgggacggaggacggggacaggggagcccctgcggcgccacttcttcctctccgagtcctgtctgcccttgatggagccactggtggggttacttgctggcggtcggccactttcgcccctccctcgccagcccgccagctccctaaggttttgtggttttttgtcaccaccacacctcagtgttgagctaagtgaggacgtccccccagcaaatgtattggacggaaggaaacggtgtgcgggaggaggcggargaaagtaggccacccggggctcaagtggtgagaagaggcagccaggcagggtggcaggtggggtgtggccagcttgttgggtgtcccaccctgtgctgttgggggcgtggagggtagtgtggggtggccagggcgggctcatgtcctcatccccctcctctttcccagaaccacacccaaaccctcttcaaccccctgtgtgtgggctgtggcaggggtcaacctcttgtgttcaggtc

SEQ ID NO: 747524 - DNA, 606 bp, Homo sapiens
atgtcctttgaccaattttgttgctgcagtgttcatatattttattgttgattcataaaaactttttgtatattagaatgttaacttttgttgctcatatgtcttagaaacattttttgtcctataagtttgtatgggggaggcactcttttttttttttttcttttttgagatgacgtttttctctgttgcccaggctagagtgcagtggcgtgatcttggctcactgcaacctccacctcccaggttcaagcgattctcctgcctcagcctcctgagtagctgggactataggcatgcaccaccacacccagmtaatttttgcatttttagtagagacagtgtttcaccatgttgcccaggctggtcttgaactcctgacctcatgatccacccgccttggcctcccaaagtgctgggattacaggcgtgagctaccacgcccagcccggcactcttaaactaataagcaaagccctcaaacaagacagaatctaagccttcaaaagcagttggcacctggcaagagacttaacttaaaccattcttgtcaaagggcatcagctgtctagagaagaatccagggtgggggaactggaaaggcca

SEQ ID NO: 747525 - DNA, 617 bp, Homo sapiens
aacttatctggccgggagaagagacatcttatgtatagatggttaaaagtgtggtaatccaattgaccacatattctagttaaatcacagattaccaatttctgaagaaatgtaataccagaaaagcacttcacatttaaactatgtcagataaaacaatttgtatttgacaacccagaagacacttaaaatcttggcagaccatcatcattgtgtcattgtggtgcagatataaagaagtgcatttgaaatgtgttctaatagtattttctttaggaatggaattcaaaaggaagcagtaagagcagaaatatcacaagagggtaaatgaaaagggaactgcactaacaaaaggagtcaggcactgacttttctcctgatgtgaccaaaaccccaagtactgagaactggtatattcagcatttcactttatwtttttctccaggacattatattagtttcctgcaataaaatatttttaaaatgtcagtttgtctaaactgctggcctgtaaactatttctaatcaaaacctgaaattgtgtcacaacatggctgtattatgattccatgtcagaggaaggatatatacgtgtatctggtggtggcttcccgttg

SEQ ID NO: 747526 - DNA, 621 bp, Homo sapiens
gttttacatttctggcatctgggtatttcccattctttattaagagcttagctatgtgttgatattttttaacatagcattttattcagatttctaggtgttctgaacaagagggctctaataataattcagtccactgtgtttccagaactgaaatttgtccatatgaaatcttatgcgattgaaaatctctaaatcatatgttgatatgtgattatatcaactggataactctatattaggtattgagagcaacagactttcggcaaacagatgtcaatgttctacragaaactgtttatcagatggcataaagtcatttctcatacaattaaagtatcacaaggatacaaaataggatacgtaccaggctgggtttgatgcctacactttcagccgcttcaaatgccaacaagagattcctcttctaagttaaaaagacaaagagactggaatcagtaatttaaaatatatagcttttgccaggaaagaatatcaactgatattcccatatagattattcactattataaagcgaagaatagtaagtcaagtgtacaatatttgatctcagtttaagaaaaaaaaaaatcaacaggttgcaactgcaccaaaactaac

SEQ ID NO: 747527 - DNA, 578 bp, Homo sapiens
caatatccctgaaggatgcagatacaaaaattgtcagagaaataaaggggatccagattggaaaacagaaagtcaaattgtctccctgtgcacatgacctgatctcatatacagaaaaccataaacacgccaccaaaaaagcctgttagaactaaagaattcagcaaaggtgcaggccacaaaatcagcatacaaaaataatgccaatagcatgtgtaacatttctatacactaataatcaactagcataaaaagacatcaagaaggccgtcccactattctagctacaaaataataaaatggctcagaataaagttaaccagagagattttgtaaagagctttayaaaaaaaaaaaaaaaaaactacaaaacaccgacaaaagaaattgtagaggacacaaacatggaaagatattgcatgctcacggactggaagaatattggttaaatgaccttattactgaaagcagtctacagactgaacgcaagctctattaaataccaattttgatgtttttaggggaagacaagatggtcaccacatgcagccaggaaatgcctctctgcgagagagaaa

SEQ ID NO: 747528 - DNA, 627 bp, Homo sapiens
gatctatacattttatattcaactagatacaacatttagccataaccaaatattactttacattttctttcaggaaggttgaaaaatattttatctttcttaatacttacttttcttcctgctttctctttctcacattgatccattctttcttttaaatgattatattcatccatcagctccttgttcttctcttgtagtgaaagaatctgcttttcactctcagcttgaagatttttggcagcagaatgaaactggtcttggatagtactgattgtcttttcttgactgttagctttcttgtgarcatcatccagttgctgtcgaagcaacatattttcactttgtagttgagataatctctcctctacagattcctgcttggcaatgtatttcttcagtttgctttggtacatttgttcagtttctttcttctgacactgtgtttggctgaggtctctttgcacacgttccaaaatcaaactctctcttccaagagcatctcttgtgttatggagctgaatttgtaggctgttaattttactttcagcattagaaagtttttcagaaagaatctcattcttagcttgtaggccagacatatcaaccttcattttgtcatgtaaa

SEQ ID NO: 747529 - DNA, 627 bp, Homo sapiens
gatctatacattttatattcaactagatacaacatttagccataaccaaatattactttacattttctttcaggaaggttgaaaaatattttatctttcttaatacttacttttcttcctgctttctctttctcacattgatccattctttcttttaaatgattatattcatccatcagctccttgttcttctcttgtagtgaaagaatctgcttttcactctcagcttgaagatttttggcagcagaatgaaactggtcttggatagtactgattgtcttttcttgactgttagctttcttgtgaacatcatccagttgctgtcgaagcaacrtattttcactttgtagttgagataatctctcctctacagattcctgcttggcaatgtatttcttcagtttgctttggtacatttgttcagtttctttcttctgacactgtgtttggctgaggtctctttgcacacgttccaaaatcaaactctctcttccaagagcatctcttgtgttatggagctgaatttgtaggctgttaattttactttcagcattagaaagtttttcagaaagaatctcattcttagcttgtaggccagacatatcaaccttcattttgtcatgtaaa

SEQ ID NO: 747530 - DNA, 552 bp, Homo sapiens
cactggttcacgccattctctcgcctcagcctcccgagtagctgggactacaagtgcccgccaccaggcccggcaaatgttttatatttttaatagagacagggtttcaccgtgttagccaggatggcctcgatctcctgacctcgtgatctgccygccttggcctcccaaagtgctgggattacaggcgtgagccaccgcgcccggccggttttaaatttttttgtagaggcagggtcttgctatgttgcccaggctggttttgaactcctggactcaagtgatcctcccaccttggcctcccaaagtgctgggattataggtgtgagccactgtgactggctgatgggtaagatagaacaggtggtttactgaagacacaggacctgcctatagcacagtgaaggtcatatggaagtcttgaggcccaatgagaattcagaaatgggaccctggggaccagccaggccccaaggaggtggcaggaaaggaaggtaagacctggcaaagtagctgattgtttccctgaatgtgtgactggctaaatcttgg

SEQ ID NO: 747531 - DNA, 549 bp, Homo sapiens
aaccagtctcattgagatgaaccaggtacctcagttggaaatgcagaaatcacccatcttctgtgtcaatcacgctgggggctgcagactggagctattcctatttggccatcttgctctcatttttttcttagtctggtgatagctttgccaattttttatatcttttcaaaacaccaaatttgcatttcattgatttctctattgttttcttcattttaatttcatttatttctgctctgatctttattatttstttccttctattaattttgggtttggccagctcttgcttttctagttctttaagatgcatcattatgttatttatttgaagtttctcttcttttgtgatgtaggtgcttataacaatacatttccttcttagtaatactttcactgtatcccataggttttggtatgttgtgttcccattttcatttgtttcaagacatttttcaatttccttcttaatttttttattgacctactggttatttgggagcacactgtttaatttctgtgtgtttatatagcttcaaaactttc

SEQ ID NO: 747532 - DNA, 549 bp, Homo sapiens
aaccagtctcattgagatgaaccaggtacctcagttggaaatgcagaaatcacccatcttctgtgtcaatcacgctgggggctgcagactggagctattcctatttggccatcttgctctcatttttttcttagtctggtgatagctttgccaattttttatatcttttcaaaacaccaaatttgcatttcattgatttctctattgttttcttcattttaatttcatttatttctgctctgatctttattatttgtttccttctattaattttgggtttggccagctcttgcttttctagttctttaagatgcatcattatgttatttatttgaagtttctcttcttttgtgatgtaggygcttataacaatacatttccttcttagtaatactttcactgtatcccataggttttggtatgttgtgttcccattttcatttgtttcaagacatttttcaatttccttcttaatttttttattgacctactggttatttgggagcacactgtttaatttctgtgtgtttatatagcttcaaaactttc

SEQ ID NO: 747533 - DNA, 594 bp, Homo sapiens
ctggacctatgactagactaaagtcacagtgggcccccaaaggtgaggttgagagtgtgacccatgatgtatgacacactcgaaaagaactgcttgagttttctaatttatgtaaacagaaatctggagaacagatatgggaatggatattaaggtatgggatagtggtggaaggaacatagagttggatcaggttgaatttattgatttgggtccactaagtagggactctgcatttaatgtttcagctcggggaaccttataaaaggttctaatagtttatttgcttggtagctgaaatatggattaacagatggcycactgtgagcgagctggaaatgcctgatctgccttggtttaatgtggaggaagagatccaaaggcttagggagattgggatggtggagtggattaatcactctagacctactcatcccagctgggagggtctagaagacatatccttgtccagtgccttacagaacagatttgtgagggttgcacctgcatctttgaagagtcctgtaattgctgttctctgtatgtcaggtctaatagtggagaccacagtcactcaactacagaatttaaata

SEQ ID NO: 747534 - DNA, 594 bp, Homo sapiens
ctggacctatgactagactaaagtcacagtgggcccccaaaggtgaggttgagagtgtgacccatgatgtatgacacactcgaaaagaactgcttgagttttctaatttatgtaaacagaaatctggagaacagatatgggaatggatattaaggtatgggatagtggtggaaggaacatagagttggatcaggttgaatttattgatttgggtccactaagtagggactctgcatttaatgtttcagctcggggaaccttataaaaggttctaatagtttatttgcttggtagctgaaatatggattaacagatggcccactgtgagcgagctggaaatgcctgatctgccttggtttaatgtggaggaagagatccaaaggcttagggagattgggatggwggagtggattaatcactctagacctactcatcccagctgggagggtctagaagacatatccttgtccagtgccttacagaacagatttgtgagggttgcacctgcatctttgaagagtcctgtaattgctgttctctgtatgtcaggtctaatagtggagaccacagtcactcaactacagaatttaaata

SEQ ID NO: 747535 - DNA, 445 bp, Homo sapiens; identical to SEQ ID NO: 741213

SEQ ID NO: 747536 - DNA, 605 bp, Homo sapiens
ctttttttataccagtaccatgctgttttggttactatagctctgtagcacaattggaaatcaggtaatgtgattcctccagggttgttctttttggtcagaaaagctttcgctatttgggatctttcatggttccatataaattttaggattttttttkatttctgtgaataatgtcattggtattttgatagagattacattgaatctgtagattgctttgggtgtatgaagcttttgaaaatgttgattctttcaacccatgaccatgaaatatttttcaagttttttgtttcctcttcaatttttttcatcagtgttttatacttccccccgtatagacctttcagttcttagttcctaggtatttaatttaatttggggctattataaatgggattaaatattaaatttattttgcagattgttcactgttgacatatagaaatgctagtgacttttgtatgttgactttgtatcctgcaactttactgaatttgtttataaattctaaaatgtttttgctggagtcttagatttcttcaaatataagaacatatcatctacaaacaaggataatttgacttcttcctttccagtttgga

SEQ ID NO: 747537 - DNA, 612 bp, Homo sapiens
ttggccatagactgatggctgcactatcagcttccctacttttgggattttggggacttgaactggcttcctggctcctcatcttgctgacagcttactatgagacttcaccttgtgatcatgtgagttaattctaataaactgcccttcatacatacgtgtatcctattagttctgtccctctagagaactctcactaatacacagtgtttttacgttttgggctcagaatacacagatcatcaggtttactgcattctcttagcatgtaggagtctactataacatttattatacagaataaaaagttaattttattggtaaaaaagtatttctgatactaattatattaattcccaaagcttcttttggaactgatatgtcaatagttaaagcacttatagtagtcatacctgaaatgtacctttcttaatcaraatgctagatgacccgtcctggcctgttaatttatgattagcttaacaagtgttttttgccttatgtatagcttagaataacacatagataatatcacactctctatgttaaagtatcttaaaagtaaattacaacatcataattctaatcaagaaaaatgagagtaagcaaaat

SEQ ID NO: 747538 - DNA, 606 bp, Homo sapiens
agaatgaacttaaatttctaccttacgccacttataaaattgtctcaaaattaatcaaagacctatagattcaatacaaatttttaataaagatgccaagaacatgtattgaggaaaagacagtcttttccatcaatggtgctggcaaaacaggctattcatatgcagaagaatgaaacttgacccctatctctcaccatatacaaaatcaaatcaaaatggattaaaaacttaaatcctaggctttaaattatgaagctccttcaagaaagcactggggaaaccctctaggacattggtctgggcaaaaactaaaactaaaaagtcttagaatgaaacaaataaatcttcatgacattggatttggcaacaatttctggatataacagcaaaagcacgggcaacyaaagaaaaaatagataaattggaataaattaaacttaaaaataatctgcacattaagacacaaccagagtaaaaaagcaacatggaatgggagaaaatatttggaaatcgtatgctgacaagggttggagacagcttaagactactgagttccccaggggaggtgtgactgtcatcactgcagctgcctgctgcctaaga

SEQ ID NO: 747539 - DNA, 602 bp, Homo sapiens
tcccagctactcgggaggctgaaggctgaggcaggagaatggtgtgaacccaggaggcagagcttgcagtgagccaacatcgcgccactgcactcagcctgggcgacaaagtgagactccgttaaaaaaaaaaaaaaactaatatgcaaacaacatggattaaattattagcttagtagaaggagtcactaaggaagtcagttcctatactttgttgttaaaaaattaactgacaacactttaaaacacatgttctcagcaccctgtcttggtagcctttggccctggctgtactcctggacatagatagagctacactggttcttcataaaccatagatacaagtaggaatttaaatgtttctaacttgtaggctggagcttatctttttctgccttcrtagggtagccatgagcaaggagcctggtgaccttaacagaaagggaagatttaaggtttctatttaaatgtgttcaggaaaagcagagtttgaattaaaatttttatctcaatttcaacttcatttggttttacatctttaaatattgttctttttaaatgttgattataattaatatttgttaataaagacaaaatactag

SEQ ID NO: 747540 - DNA, 563 bp, Homo sapiens
ttctataattttgggctttttgaaggcttgactggttctaaagttaaaatgaagaatacatgtaaaattgctttctgagagaggattttaatcaacctaaagccatgatgtaaagcagtaaaaatcaattaataaagatgattatttaaaacttgtatgtgtaaaaattaataaacaaaatgagaatatcgacaaactggagaaaatgtaatmcgaatataattggtaaattgtaaaaatggcattgaaaaacagggaagttggatcatttacctcccatttctagcccctcatttgttggggcttgccctcagaaggattgaaactattgtgctttagggtgtccctgaaaagcacactcccatgaacctggaaagtgtttgatagaaaggcagagaggtgcaaatatcgaggtggaaagctgttaatgtgtataggattgtgtagtgtgtctgcagctgagcttagagagggtggaggtgatatggggaagggaaaaaacacagcagtatctactacaggtgagaaatgttttgattacaaaattaaatgaaaaatgctgg

SEQ ID NO: 747541 - DNA, 563 bp, Homo sapiens
ttctataattttgggctttttgaaggcttgactggttctaaagttaaaatgaagaatacatgtaaaattgctttctgagagaggattttaatcaacctaaagccatgatgtaaagcagtaaaaatcaattaataaagatgattatttaaaacttgtatgtgtaaaaattaataaacaaaatgagaatatcgacaaactggagaaaatgtaatacgaatataattggtaaattgtaaaaatggcattgaamaacagggaagttggatcatttacctcccatttctagcccctcatttgttggggcttgccctcagaaggattgaaactattgtgctttagggtgtccctgaaaagcacactcccatgaacctggaaagtgtttgatagaaaggcagagaggtgcaaatatcgaggtggaaagctgttaatgtgtataggattgtgtagtgtgtctgcagctgagcttagagagggtggaggtgatatggggaagggaaaaaacacagcagtatctactacaggtgagaaatgttttgattacaaaattaaatgaaaaatgctgg

SEQ ID NO: 747542 - DNA, 585 bp, Homo sapiens
cagcccagttagtgtacctcaccctccacttatcagtccaagtgtattgattatcagtctgcaacgacaaaaacaagcattaacatgcagccttgcttcatttagaaaatactaaaagaaccaattcaagaatacaaagtatatttaagaccatgatttgacatagaacctggaacatttgagaataaaaagaacactataaatcatttctgtcaactcaaattcagtacatgcagcctttcttagaaacagttatttcttagagatccccaggaatacatccttggaagttatttcaaaaaacactaataaaaaaaaatttatctcttattccgtgaaactcyccttgtttgcaggttttcagggcaaaagagaagttttatcttcataacaaataagatatttcttatattattattgaaattataataaaaattaagtaattttcattaaattcatggacacctgagagaaatgctcatctcttcatatcttctcattattctgttgttgaaacagcaccaatggtaaacggcttagctaaggtcatggaagagaggtatggaagagaggtaagggtatgga

SEQ ID NO: 747543 - DNA, 592 bp, Homo sapiens
gcttaccttcagaagaaagataaacgattctttatctggagctccacagccttttaaatcctggagagtatttcacagttacaaagttccctgtttttaaaattctttgactgtgcactgggagctagagaggattatttcagcccagaaaagttttcagttgctatggagagagctgctctgaaggtaacaatgaaggtggataaaagggagaactttctgtctggtagattttcaaggtaatcaaatcagtgtggttcatgaatttaactttttagatcaagaattaaccaattttcttaggctcacctactgtcactygcctttcaagggacagaatctaggtcaaaggatttcacctcgcagaatagaaagacttcagtgttagatgaagattttttcctctccagttgattctgtaataactgtttcatccaggctcaaaccaaagatttgttgaaaagataggctctttggaaccatatttgttttgcaagatgcagaagcctaaaagattgaagtctttcgtaatgagatgctttcaaatgaaaagtattggttgaaggaatgaaattcttaccagggatgtagg

SEQ ID NO: 747544 - DNA, 620 bp, Homo sapiens
attgttagagttcaggagttcgagatcagcctgggcactacagtaagaccccaactgtacaaaaaaaatttctggtttgagttggtgtctggaaacaaaacaaacaacaaaaatttagcatgtggaattgttgctttgtgcagcaatactaaaatattttggtctgctcttttataaaattacaaaagcatattagagaaaattatttgtggacaacacycatctgctttaagagatatattttaacccaagatttgaattttgcttctaagtcacacctttgccaaccttaatatgaagctattgataataataataataatggtaataataacagtagtaacttatatttatggggcatataccatatgtcaggccttgttttaaaaagtattaactaattcagttcttcaagacaagtttataagtacttagagctggtaaaagatgtcaaaaggtaattctcttaaagagctattatcatttctcatcatgccaaacatagtaatttagttacgcagtctcaatatctacttcagttcttctttaatccgcgaattatttataatttttaaaacttaaatacacttattttcgtaattaagttttttaaaatccct

SEQ ID NO: 747545 - DNA, 661 bp, Homo sapiens
gcttaaggtattaatgaagcagcaagaaatgcagagatggctgttggcaggggcagaaccaggttttgtggggcctggagatgttgctcttgggggccctctttaagaaaaaggctgggtgtggtggctcatgcctgcgatcccagatctttggaagtctgaggcaggaggatcgcttgaggccaggagttcaagaccagacttggcagcatagtgagaatctgtctctacaaaaagcttttaaaaagctaaccgggcatggtgacaagtgcctgtagtcccggctacttaggaggctgaggtgggagcatcccttgagcccaggagtttcaaagctgcagtgggctgtgatcacaccactgcactccagcctgggccacggagtgggaccctgtctcagaaaaaaaaaaaagaatattaaaaaataggtacaaaagtgaaaatgtattcagaacaagaaaagaaatcaggagaagktgcaaattattaaaagctggtaactgcaacaaacatcacacactggggacagttacacattatttttagtaattaccttcctgatgtacttcctattactttgcttgggctgtcataataaaatgccacagactgagtggcttaaacaacagaaagatattttccaatatcttctccaggtaaa

SEQ ID NO: 747546 - DNA, 645 bp, Homo sapiens
tggtgtggcttgcagaagaagactggagtctaactatttcttgctatgactttcagctagtggtgtgctggagtgggcttacacctggctcttcccgatagatggttcagtgttctcttattggtagcctgaaatgagccacagtaggagtattcatactacagaactcagccatcgttgggaggtgctcctcatcagccatcgttgggaggtgctcctcacctttcacatcagttacaygtaaattggggcactaccacatccagccagtccccattttacgttcaccctagtccaggtcttcaaaggtatcgtgctccattcctgagcctccttgttggactatgacaaagggttttgtttctcttcagtgccctcctcttcatgcaagtagatttccaatttggcatgtgaagacatgactactcttccattttcagcttttagattttttttattgttgttgtcccttctctgttctctttattcaattatttatgcttttttatcatcccctattttcattataaatgtgtttggaggaaagatttgagataaatatataccatgttaaccagaagtcttgttacatatttataacctgaaaagaggtattgatgtagcacaactggaaactggacccag

SEQ ID NO: 747547 - DNA, 635 bp, Homo sapiens
atcaccatgaaagtactctgaaaagtcaagcatgctctgtgagtataaggaataagggagacagtgattggctctgcagcacctattcagctcctctggctgctcatggctctcccgtgcccttggaaatgctcagttaggaaaaggcctgttgwtgtgtctggatgtgatgactaggatctcaatggccatctagggagaggattcaacctgcaccatataagggaaacagcagaggtagagaaggaagctgaagtgcctaccacatcatgactggggctaccctatctctggacttcctatggaaaagaatacatttcttgatggtttatatggatccaaattgtgtttttctattatttgcagacaaaataatctcacagacataagaagttattaaaatccataaaacagtgctttctgaccatttaaactagtaagtggcagagctgggtttgattccacttaatagccacatgtctttgggcaagttgtttgacctctaagtgaaacagcctcattgtctggagtcacacccgaggttcattttctcatggccacggagaacaataatgaggacacataaagattgaggttgagagcggaagtttaatatgcaaaagaaagagaagagt

SEQ ID NO: 747548 - DNA, 635 bp, Homo sapiens
atcaccatgaaagtactctgaaaagtcaagcatgctctgtgagtataaggaataagggagacagtgattggctctgcagcacctattcagctcctctggctgctcatggctctcccgtgcccttggaaatgctcagttaggaaaaggcctgttgatgtgtctggatgtgatgactaggatctcaatggccatctagggagaggattcaacctgcaccatataagggaaacagcagaggtagagaaggaagctgaagtgcctaccacatcatgactggggctaccctatctcyggacttcctatggaaaagaatacatttcttgatggtttatatggatccaaattgtgtttttctattatttgcagacaaaataatctcacagacataagaagttattaaaatccataaaacagtgctttctgaccatttaaactagtaagtggcagagctgggtttgattccacttaatagccacatgtctttgggcaagttgtttgacctctaagtgaaacagcctcattgtctggagtcacacccgaggttcattttctcatggccacggagaacaataatgaggacacataaagattgaggttgagagcggaagtttaatatgcaaaagaaagagaagagt

SEQ ID NO: 747549 - DNA, 482 bp, Homo sapiens
taccagtttctcttttcttccagtcttccaatcaaaagtctggctagcttggcagtgatagtgatcatgaaccagtattcagaattttgcttgttctagaaaggcacttcctcatcaacccctaaccttggatgaggctagctgctcccaatctaatttcagcagttcagatttcaagcaaagtatctacacaactaataatctcattctattaacattcccctaatcttctatgtctagtgtgtaattwgaggaagcagttgggccctgaaagctcttggcagacctcttgtctgataaatattttagtactttcagtagccttttaaaattggcagttcttgctctaaagattcattcaagtacatgtgataatttgaaattaacatgctgccagattttgcgtttatacaagtaactttgatagtcagtaccaacaaagggattttgtcagccatgaatggataaacacagctgttttc

SEQ ID NO: 747550 - DNA, 595 bp, Homo sapiens
tatccccccacccagcctgcattccctggctggagaaggcaagaatgagtcacctgtcccttcctcactgcccagctgagctgttggggcagctacagccacaggaatactcttgagaaaggagtgtaatacctgtgtcctcggggagggcttggaagaataaagaaggaacctggacaaggacagctcgaggggtccttgcttcgagcasacaccaacaggattcgggaagtccagtgactgacccctggacagcaggcagcaggaatgactccgaacatgctttaaaaccatggtttaaagtcacacaaattttatcaaaaaaataaaatttctggaactcaaacatccaaaagtggatccaacttcaggcaaatctggactttgagagcctggcagtgtcatcaggatatttttttcttgtttgtgtgtttttgtttgtgtatgtgtgtctgtgttttttaatgcctcccatcttgagcttctttttgcagatagagtctcctcatgaggctgggaagtcagctgccaacatcctcagattcactttctctgtttggggaccagaacagaatataagcccagttcagcccag

SEQ ID NO: 747551 - DNA, 595 bp, Homo sapiens
tatccccccacccagcctgcattccctggctggagaaggcaagaatgagtcacctgtcccttcctcactgcccagctgagctgttggggcagctacagccacaggaatactcttgagaaaggagtgtaatacctgtgtcctcggggagggcttggaagaataaagaaggaacctggacaaggacagctcgaggggtccttgcttcgagcagacaccaacaggattcgggaagtccagtgactgacccctggacagcaggcagcaggaatgactccgaacatgctttaaaaccatggtttaaagtcacacaaattttatcaaaaaaataaaatttctggaactcaaacatccaaaagtggatccaacttcaggcaaatctggactttgrgagcctggcagtgtcatcaggatatttttttcttgtttgtgtgtttttgtttgtgtatgtgtgtctgtgttttttaatgcctcccatcttgagcttctttttgcagatagagtctcctcatgaggctgggaagtcagctgccaacatcctcagattcactttctctgtttggggaccagaacagaatataagcccagttcagcccag

SEQ ID NO: 747552 - DNA, 595 bp, Homo sapiens
tatccccccacccagcctgcattccctggctggagaaggcaagaatgagtcacctgtcccttcctcactgcccagctgagctgttggggcagctacagccacaggaatactcttgagaaaggagtgtaatacctgtgtcctcggggagggcttggaagaataaagaaggaacctggacaaggacagctcgaggggtccttgcttcgagcagacaccaacaggattcgggaagtccagtgactgacccctggacagcaggcagcaggaatgactccgaacatgctttaaaaccatggtttaaagtcacacaaattttatcaaaaaaataaaatttctggaactcaaacatccaaaagtggatccaacttcaggcaaatctggactttgagagcctggcagtgtcatcaggatatttttttcttgtttgtgtgtttttrtttgtgtatgtgtgtctgtgttttttaatgcctcccatcttgagcttctttttgcagatagagtctcctcatgaggctgggaagtcagctgccaacatcctcagattcactttctctgtttggggaccagaacagaatataagcccagttcagcccag

SEQ ID NO: 747553 - DNA, 651 bp, Homo sapiens
aaaatattttgaaagtcctccaacagtcaaggggagtggaaaggattattcataaccctttggtgccaagaaatctggaacttctaaagctatgggctaatgcatcttgcattagcaatttggcatgcaggaaatccccccacccagagtgccaggggcacagggagtcttggcatcccttaaataaaacaaagttgggattttcaakttacccaaggcttctgatttcctactttgtggtctgaaagaaaacaaaatgactatattcttttcccaaggttggcgattatatgtgataatttttcttaatggcataaatgaaactgtggcttgaggggaagtaatgaacaaatggttcaggaaaacggaattgggaaaatcctgttccttggtgagaacagatcagcctcttaggtgtcgatacagcctttcacttgctgcagcacagcacagtctagtgttcttggagggttcagacctcctttgggatccagatgtagtttggattatctttaaattggggcattggttggatctaaatacttcctttttagctttttgttttgaattacttttagactttcgagaagttgtaaaaatagtacagtgtgttcccatcaccctgcttcccacattgataacatcttacat

SEQ ID NO: 747554 - DNA, 651 bp, Homo sapiens
aaaatattttgaaagtcctccaacagtcaaggggagtggaaaggattattcataaccctttggtgccaagaaatctggaacttctaaagctatgggctaatgcatcttgcattagcaatttggcatgcaggaaatccccccacccagagtgccaggggcacagggagtcttggcatcccttaaataaaacaaagttgggattttcaatttacccaaggcttctgatttcctactttgtggtctgaaagaaaacaaaatgactatattcttttcccaaggttggcgattatatgtgataatttttcttaatggcataaatgaaactgtggcttgaggggaagtaatgaacaaatggttcaggaaaacggaattgggaaaakcctgttccttggtgagaacagatcagcctcttaggtgtcgatacagcctttcacttgctgcagcacagcacagtctagtgttcttggagggttcagacctcctttgggatccagatgtagtttggattatctttaaattggggcattggttggatctaaatacttcctttttagctttttgttttgaattacttttagactttcgagaagttgtaaaaatagtacagtgtgttcccatcaccctgcttcccacattgataacatcttacat

SEQ ID NO: 747555 - DNA, 545 bp, Homo sapiens
ctgctctcaccgttaatctttgtttttctttatgtttccataaaaatacccctcatgcccaagactaggagattggttcgacaaaatacggtgtagtgtgcctacgttaggtctttggtgctgattgatatttgttctgatgtatgttccttccctttgcagatccttacctcacaaggcctgaccagtgtcttcaataaacccasttccttgtttgtgaaacatctggggaagtattaaatgggggaaaggaaggaattaacagcccaccaaaatggtgtgaaaattactttaaactcaaaacatcttcacaatcagcagccacagaaagaaacattatctaaacttaggcagagcctcctgaattacagcttctatgaccccctctgagggagtttcccgattgtgagaagactcatcctaggatcagcgagtgaggatttagctgtcccttatcatcacaaggcccaatagaaacttccctactttcccatggagtccaaaccccactccccctctctgttaagttggtatataaaccttta

SEQ ID NO: 747556 - DNA, 520 bp, Homo sapiens
attctcccccagaggtaccgttctacagccacactcactactttatccatgtctgtgtgcagtgagcatttttctgttcttctagtttcactggagttttattttatgcacccttcccctgccccatttcttgagaccagctggaccgcaygctggaaaaacaaaacaggagagaggggaaggtccctcagattccaaagcagaacacaaccaaggcttcctaagtaaatgaaaaggacttggagaagacataacacttcagtgtagacacttaagttgaaatttctgccctgtcgttccaatgccatgatggagaaggacccctaaaatcgcctttggcgtgtgcagctcgagcgttacaacgatgcaaagtgcggtctttggaggatgcgggagtcggtaacccctcaattcactctcgccgttccttctctccagtctgcgcgaaagccaggtccgagggcttcgaagatctgggggacccgagctgcgcacagtggcgggaaacgagcgggctcag

SEQ ID NO: 747557 - DNA, 605 bp, Homo sapiens
atccagctcagctcaccagtgcccctatcctggcttctatttgtcaagttcctgaagcacagacctccttttctgaagctggtttcaacctcctttaggctgtccacattatttttatggccccatgacttctcaaagctccctctcctcccccaagtctgccaccccccaattttctctctgctataattgcttgggactggagatggtagctcatcaacagatcttggttgcttatgtatttttgttgcccctgcaaccactcttccttcattattattacacatttattatttttattattcaccygagctggagaaaataaagtggagaacagctaagaggctgggactcccattattttggggtagaacttttgttttcaaaaaatcacataatcataattcatgttttaattattattattatcaatattaatatgatgaagcaactctgtacaaggactatataaagggaaaacgtgctaaagacagacgttggaataggagaattacactacagagagctggggaggcagctaggggaagggcaactatccacagggactacactaggtaccagcgacagacacagagaacaagaca

SEQ ID NO: 747558 - DNA, 607 bp, Homo sapiens
agaggctgggactcccattattttggggtagaacttttgttttcaaaaaatcacataatcataattcatgttttaattattattattatcaatattaatatgatgaagcaactctgtacaaggactatataaagggaaaacgtgctaaagacagacgttkgaataggagaattacactacagagagctggggaggcagctaggggaagggcaactatccacagggactacactaggtaccagcgacagacacagagaacaagacacagattgacagagaacctcacagaagtcaagtttaaagcaaatggaaagagaatattgcatatctttgtcccctcactccttttagagtgttctggtccctcttcattattagattgggaatcaggttagtctggagtggtagagctcaaatccagcaccctagagcccagaggtcacaggaagggctgcataaagggggtacagtgggtgaccagtcaaggtggggagtgcttcatgcccaggggaagaccacaggagactgcagacagctggaatggtggtaatttgggggaacttgtacatgggtgaagcaagtatgtgtggatggggaattgtcaggt

SEQ ID NO: 747559 - DNA, 629 bp, Homo sapiens
aaggtgaaaatatcataaaaatttgggaagctagggctgggactcttctcctctgccatcagttagcataacccaggtttggaagacctctgtacaacaggctgggaaaaatccaggggcagtttctaggtggtatttccttccttcaagtaaggtsactccagaaagttaaaggtcaagggatagatgccaggtgtaaaagtttctttgctttactgtgaaaccttttcatacagaaaaaatgggtaggctgaatgaggcaaggagcatgtggctggttaagttaaattctgcaggccatcatatgattccagaatagaacgaggcaaaacaaagtgtggagtccatttggacagataattacaactgaaatttaaacaatattatagaaaaatctagacattaggtttacattatacttggtctttatgctttacttcatgtgagaggagcaccttagtcatataaagtcagagtcccagaaaccttagtctcttgttctcaaaagctaaggggaagaataaacattttagccctcctgaaattattctatttatggccctgccttcagctaggaagacacatcctaggttggtcatttaggtcctctagcaatttcatcctaattt

SEQ ID NO: 747560 - DNA, 519 bp, Homo sapiens
atggtatctccttttttcattcctgatatttgtaagctgtatcttctttgctttttataatctttctaactagaggtttatcaattttgttaatttattcagtgatactgcttttcatatcattgactatctattatttttctgttctttatttcagtgatttccaccctaatttttattatttcattcttctacttttgcttcattttgtgcttctttttataagtctttaaaatggaatcttagataattgatttgggatctttcttcttttctaacaaaaacatttacagatataggtttycttttagatacttccgtagctacattcacaaattttaaaatattgtgctttgtttttttaagagtcaaagtattttctattttaccttgtgatttgtgtttcatggactatttaggaatattatgtttaattttctaaactatgggaatttttcagatatacttttggttaggtttttaatctaattctgatgtgatcagagtatactctatatg

SEQ ID NO: 747561 - DNA, 574 bp, Homo sapiens
gaggagtgctcaatgaatggcagcttttctgcttaaaatgatttcacaggaggtagagacaactctgaaaggtctaaaactgtgctatccaatggtgctctctgcagtgatagaaatgctctataactgtgctgtccagcagcatagtcataaccacatgtggctattgagtgcttaatacatagctagtgcaactgagagattgaattttaaattttacttaattacaataaatgtaaatttcaataaccatatgtggccagtggctaccgtattggacagtgcaagtctaaaatgtgtctgcgctcacagtctgtgtgtcctttacagccccttgggtatgaaacaaaataagttatgttcaacatttggatcctggcatatagcaggcacccagtaaatttgagttwgtcagaaatgggagagaaaggaaaatcagtaagtgaagccaaagcaatgttttacatttaacaaattgtgtaaaattgtagaactggactctcagacttctccagcaaaatcttccagagttcagtaaccatgggggactgactggggcaggttgttagttttt

SEQ ID NO: 747562 - DNA, 545 bp, Homo sapiens
catatattgaagagcttattatgaggtaatgtgctaggcactgggaatgccaaggtgaatgagtcagacccatccctttattttagaatgagagacagatgaaaaaccaattagttaactaattaaaaataaacaaacacttatcattttataacttgtggtaagtgctatgagaaaacaaacaagaaaaggacaaagtggggctgtctttagaggctgtgatctgatgagaactggcagagaaggtgatatctaagctraaatctacagatgaagggtaggcaattcccaggcagaagaaacagaaaatgcaaaggccagagaggtgaatgattttgatatgatgcagcaggaatcttaactgaagaccagtgatcaccacggttggagggtagtgaggcaggtggggcaggagccagatcacgtttggattttattcaaacgaagtgagaaggaactgaaagaattttttttttttttctttttgtgacggagtctttctctgtggccaggctggagtacagtggcaatctcggctcactgca

SEQ ID NO: 747563 - DNA, 400 bp, Homo sapiens
aatacctgtgctaaattttcatcatgatttatctcatttaatcctctaaaaactgtaaatgacaggcagcattgttttgtctatctctctatgtttctatctttttcttccattattgacactcaagtatcttgcctgagggaatatagaccactaaatgaaagtgcttccactgggactctggatccataaccttagccagcaccataccatctcccatattgacagatatacatgtagctatacacacacatmtatatatgtgtgtgtgtgtttgtctgtgtatatttataacagactccagatgggtagagagagaaatagatattatctagaccagagccaagattctggtttcaaactgctatagggctggaggaaaaacagaaaacaaagctta

SEQ ID NO: 747564 - DNA, 597 bp, Homo sapiens
gacgtgggaattatgggcaccaaccccgtggagtaaaaaatccaaatataactaactttctttgtttctttcttttttctttttctttctttttcttttttttttttaggctctctgtcacccaggctggaatgcagtgacatgatcatggctcactgcagcctcgacctcctgggctcaagtgatcctcccacctcagcctccccagtagctgggactacaggaacrtgccatcatgccgggctaatttctgtctttttagtagagacaggttttgccatgctgcccaggctaatctcgaattcctaggttcaagtgatcctcctgtctcagtcaaccaacatgctaggattataggcttgaaccactgtgacctgcctgagaatccaggtataacttcctaaaacctaactcctaatagtctacagttgatgtgaagccttactgataacatatacagttgattaacacgttttcatatgttgtatgtattatatactgtattcttacagtaaagtaagctagagtaaagggaatgttattaagaacatcataaggaagaaaaattagatttcctattcattaaatggaagtgga

SEQ ID NO: 747565 - DNA, 541 bp, Homo sapiens
ggctggagtgcaatggcgccatcttggctcactgcaacctccgcctcccaggttcaagctgttctcctgcctcagcctcctaagtagctgggactacaggtgcgtgccaccatattcagctaattttttgtatttttagtagagacggggtttcaccatgttagccaggatggtctcgatctcctgatctcatgatccgcctgtcttggcctcccaaagtgctrggattacaggcgtgagccactgcgccggccgaggtaggttaatttttattatgctcattttactgatggggaatttcccccaaggtcacagagctaggaagtggtgcagtgtgtctgcagagcccacattcttagcacagaacaacactgcaatggagctgggcagtagtagacaagtgggacaaaaatacggcatggcttcttgactatcggccatgtcacctgaaacccacactgagccctcacatccatcatctatggaagttgtaggtgttaacgactcccatgttaaaatcacataaacatagacataggcg

SEQ ID NO: 747566 - DNA, 493 bp, Homo sapiens
tttattccctgaccttttggttcattggcctcctccagtgatcttgcctccacctgacctcagctactcacccctatggtcatcctctagaattggccataacccagaactccaacgccagctggatcttaattttaagtatcattctcactacctactttttcagctcgctctctttagtatcacaaagcttcgggtactgaggctgaggccagccactgtccytgtgcctcacaccccactcccttaattactcagatgttttgtcagcatttctcccctttcccctgcatcatcaccatttccctccactgctccccagttagcatacaaataggctacagtttctcctatcttgactccacttctttcctgctactgccacatttctagttttccctttacactgaaaaccctcaaagagttgtctgtgtttactgttttctctatttccattgtttcacctatgatttatatacaataagttgcacac

SEQ ID NO: 747567 - DNA, 493 bp, Homo sapiens
tttattccctgaccttttggttcattggcctcctccagtgatcttgcctccacctgacctcagctactcacccctatggtcatcctctagaattggccataacccagaactccaacgccagctggatcttaattttaagtatcattctcactacctactttttcagctcgctctctttagtatcacaaagcttcgggtactgaggctgaggccagccactgtccctgtgcctcacaccccactcccttaattactcagatgttttgtcagcatttctcccctttcccctgcatcatcaccrtttccctccactgctccccagttagcatacaaataggctacagtttctcctatcttgactccacttctttcctgctactgccacatttctagttttccctttacactgaaaaccctcaaagagttgtctgtgtttactgttttctctatttccattgtttcacctatgatttatatacaataagttgcacac

SEQ ID NO: 747568 - DNA, 493 bp, Homo sapiens
tttattccctgaccttttggttcattggcctcctccagtgatcttgcctccacctgacctcagctactcacccctatggtcatcctctagaattggccataacccagaactccaacgccagctggatcttaattttaagtatcattctcactacctactttttcagctcgctctctttagtatcacaaagcttcgggtactgaggctgaggccagccactgtccctgtgcctcacaccccactcccttaattactcagatgttttgtcagcatttctcccctttcccctgcatcatcaccatttccctccactgctccccarttagcatacaaataggctacagtttctcctatcttgactccacttctttcctgctactgccacatttctagttttccctttacactgaaaaccctcaaagagttgtctgtgtttactgttttctctatttccattgtttcacctatgatttatatacaataagttgcacac

SEQ ID NO: 747569 - DNA, 643 bp, Homo sapiens
ctttatttctcagactggctgacacttagggaaaatagaaaagaacctacattgaaatattgggggctggttccccgatattcccctccctgtgttcatgtgttctcgttgttcagctcctacttgtaactgagaacatgtggtgtttggttttctgttcctgtgttagtttgctgaggataatggctcccagctgcatccatgacctgcaaaggayatgatctcattcatttttatggatgcatagtattccatggtgtatatataccacattttctttatctggtctatgttgatggtatttgggttgattctatgtcttcgctattgtgaaaagtgctgcaatgaatatatgcacgcatgtatctttgtaatagaatgatttatattcctttgggtatatacccagtagtaggattgctgtgtcaaatgtcatttctggttctagatctttgaggaatcaccacaccatcttccacaatggttaaactaatttacattcccaccaacagtgtaaaagcattcctatgctcgaaagtcttaatccaggattgtgagagttcaacagtcagcatcacagcatgccctatgcattttccccatgagtttcctcattctttcattcagtgagtattactggaca

SEQ ID NO: 747570 - DNA, 643 bp, Homo sapiens
ctttatttctcagactggctgacacttagggaaaatagaaaagaacctacattgaaatattgggggctggttccccgatattcccctccctgtgttcatgtgttctcgttgttcagctcctacttgtaactgagaacatgtggtgtttggttttctgttcctgtgttagtttgctgaggataatggctcccagctgcatccatgacctgcaaaggacatgatctcattcatttttatggatgcatagtattccatggtgtatatataccacattttctttatctggtctatgttgatggtatttgggttgattctatgtcttcgctattgtgaaaagtgctgcaatgaatatatgcaygcatgtatctttgtaatagaatgatttatattcctttgggtatatacccagtagtaggattgctgtgtcaaatgtcatttctggttctagatctttgaggaatcaccacaccatcttccacaatggttaaactaatttacattcccaccaacagtgtaaaagcattcctatgctcgaaagtcttaatccaggattgtgagagttcaacagtcagcatcacagcatgccctatgcattttccccatgagtttcctcattctttcattcagtgagtattactggaca

SEQ ID NO: 747571 - DNA, 628 bp, Homo sapiens
accctgcagggatggagcttccagaggaaggagcaggctgccatctttgctgttttgcagccttcactggtcataccctgtatgacacttggtatgggaaaaactgaggcaactagggtctggaatggacctactgttaaaaaccgaaaacaacatcaatgaaaaacctgacacaaaccccattcaaaggttaacaacctcaaagatgagaaaggatcaacayaaaaatgctaaaaactcaaaaagccagtgcctctcttcctccaaatgactgcaacacctctccagcaagggcacagaactgggctgaggctgcagaactgggctgagatggctgaattgacagaagtaggcttcagaaggtgggtaataatgaactttgctgagctaaaggagcacgttgcaacccaatgtaaagaagctaagaatcatggtaaaacattacaggagctgttaaccagaagtaaaacactcctcagcaaatgaaaaagaattgaaatcataacagtctctcaaacctcagcacaatcaaattcactcaaaaccacacaactacatggaaattgaacaactgctccttaatgactcctgggtaaataagtgaaattaaggcagaaatcaaggagtt

SEQ ID NO: 747572 - DNA, 628 bp, Homo sapiens
accctgcagggatggagcttccagaggaaggagcaggctgccatctttgctgttttgcagccttcactggtcataccctgtatgacacttggtatgggaaaaactgaggcaactagggtctggaatggacctactgttaaaaaccgaaaacaacatcaatgaaaaacctgacacaaaccccattcaaaggttaacaacctcaaagatgagaaaggatcaacacaaaaatgctaaaaactcaaaaagccagtgcctctcttcctccaaatgactgcaacacctctccagcaagggcacagaactgggctgaggctgcagaactgggctgagatggctgaattgacagaagtaggcttcagaaggtgggtaataatgaactttgctgagctaaaggagcaygttgcaacccaatgtaaagaagctaagaatcatggtaaaacattacaggagctgttaaccagaagtaaaacactcctcagcaaatgaaaaagaattgaaatcataacagtctctcaaacctcagcacaatcaaattcactcaaaaccacacaactacatggaaattgaacaactgctccttaatgactcctgggtaaataagtgaaattaaggcagaaatcaaggagtt

SEQ ID NO: 747573 - DNA, 592 bp, Homo sapiens
tctttccaatatctcaaatatcaacttttagggtactcatgaattaaaaatataaatcacatgttcccatatcagcaaaatgaaacaagtataaatgtaccaaagaaatgcagcaaaaacaaaaacaaacaaacaaaaaccatgagtattaactagctttcaggtgtaaacaatagaaaaattactctctccttcctcctaacgtttatttccacagccttagcaattttattattcaatgacagcagcactaaattattctccaaataaagcccacgataagatttactggcaccaacgcaattgcttccaaacctaactygtgagatactcagaaaaaactacgtagtactaagtcactgataagaagtttctcaagtcttccctgataggcatgtgagggatgtatgccagctgcaccagaccacggtccattgccatgcaaactctgcccttcctccacaaacaggtaaagcctctggattgtgtttaaattcttgattgatacaaattcttcaaagtaactgatttgttattgaaaatgttaactcagtaagaggatcagctataaggaagtgtatttagtttgttg

SEQ ID NO: 747574 - DNA, 636 bp, Homo sapiens
cccaagattcccattgttctatatgttaagatagagaaaaagggaattcttttttccagagatattaacacaattttaaataaattttaattcctttaataagtaatcatgtgttacttgtttatctttttcattaaacagtwttcaaggatcttgtctgttgcccactactatatctcccttgcctcaatacttgataaatgagagcattagttaatgaaatacaataacgagaacagtcttatggtcaatcactactgcgaaggataacactaacccttgacatttgcaaagcactcttcttccaaacattcaagcattaaacatcatcatctcattaatcttcttaagatcagagagcaaggaagatgacaaggagacaagtttaaacataccatatgatagtgaagaaacctctagatattttccaactcaatttattttcaaacacatccttctatttttttttgtctcctaaaatgtactgtgttcagccaatgagatttatttcttttaaactttctacatatttagagttttctgctatgacaaaaaaggcataagtcccccaatgtaagtctctgaagaaaaaatatagtgggagtaggaggtgaaaaggatcacccaagaaactca

SEQ ID NO: 747575 - DNA, 633 bp, Homo sapiens
agccaatgagatttatttcttttaaactttctacatatttagagttttctgctatgacaaaaaaggcataagtcccccaatgtaagtctctgaagaaaaaatatagtgggagtaggaggtgaaaaggatcacccaagamactcattcagtctcatgaccaaggactgttttgctcatgaaagacaatggccactgacttcaccatgccacctcctcactgcctctaagcctgcccttcctggcccacttccactcatactaagaagggcaaaaccaggatcaatgagtaagcaacaggtgagaagagtagaacagaaagttctagaataactaatccaaaaataatttaaggcagaggcataataaggctgtggaacctgcccttggtggtattaaggaggaagctagaggatcttcggaggaatgctatgtaataaatgttttcctcaccagaaaatgaatctagcagatttccaagttccctcccaactcttagaaaactttggtcttttaattgcattcataatagatggctaagctttttttaagttatgccagcatatgcaatataatttatttactattaagaataaacacatgcaatgtttatcaaaattttaacagtaattaact

SEQ ID NO: 747576 - DNA, 569 bp, Homo sapiens
gggctgcaggtggagctgcctgccagtcccgtgccgtgcgctcgcactcctcagcccttgggtggtcgatgggactgggcgccgtggagcagggggtggtgctccttggggaggctcgggccgcacaggagcccatggagtgggtgggaggctcaggcatggcgggctacaggtcccgagccctgccccgcgggaaggcagctaaggcacggtgagaaatcgagcgcagcgccggtgggctggcactgctgggggacccagtacaccctccacagccactggcccgtgtgctaagcccctcattgcccggggccagcagggctggccgactgctctgagtgcggggcccgccaagcccacgcccacccggaactccagctggcccgcaagtgccgcacgcagccccggttcccgctcgcgcctctccctycacacctccctgcaagctgagggagtgggctccagccttgccagcccagaaaggggctcctacagtgcagtgggggtttgaagggctcctcaaatgccgccaaagtgggagcccaggcaggggaggtgccaagagcaag

SEQ ID NO: 747577 - DNA, 633 bp, Homo sapiens
tctgcaacccttctcatctgtttcattgtgtttgcattgtttaagttacctctccaggaagaaatgagacagttgggggatttctctgtacttgcacctatagatgaatttatcttcttcatctaaaatgccagaggagaaattaaaatgtggtgagttcacaggtcttctagttttgtgacttctagcccacgatatgtgtatacatgtctcttctcaacacatataacccaacatggcttagccatgtgtatttscatatgagcaaagacagcttttctgcaggccacttcccagcctttgatgacacttccataggagggcacagacccaggtgtgctaatctgctcatttcgccccctcccccataactctctagtggccttccatcaattgtaataatatctgtaatttttaccatgagctttaaggccttccccaaactagctaagccttgcttacctcatctttcccacccctgcatcgctagcttactgggcttcagccacactgactctttgctgttcttcttacccagtagtttacaatcctagttacttgcactatagaatcacctggtgatttacataggttacacacacacacacacacacacacacacacaccttcaga

SEQ ID NO: 747578 - DNA, 579 bp, Homo sapiens
ataaccatccaggcaccgtggcagaactgcgtaaggcactaggcagacaggcatgacctgagtgtcttctggctgagactggctccattggaaaacagaaggcctcagaagtgaagaagcaagaattggactgctaaacagaccctatggtgagcacgcagactggccctaaaccatgttctaatcactgtagtgttatgcctattcttaaccttccttcccacagggttccaactctaacatatttataggctgtgtttcttctcctctatctaatatcattctagttttcatcctggtgcattcaggaggccctagtctggccatttcagttacgtttctttgcgtgaccrggaccacccctgccattatagagctctctgcaaaggacagcacctttcatgcactcccagcctcagccccatgtggaaaagttctagacaagtttgggagatggtaacagcccttgagactcattcaatatattgatttggaaaaggagagactaaaactgattttgactgggatttctataaaatattggtggaacagttattgaagaagttagggctaattggt

SEQ ID NO: 747579 - DNA, 645 bp, Homo sapiens
tagaatagcagtactgacagcttcagggatcacctcatctgaccatatggttttatatttgaggaaacatagagagatgaagtgactcactgagggtcaaaaaaatatgaccttctgggcatttgaagaacatggaacttcccttgcataaaaggtgtgagtttcattcagctcaattccatttgtgtaactttaactcctttcctcctgagcaacrtgactgagtattccataggcaggggacagaatttccatttaactaatgaacaaactgaagtcagggagtttagacatgtccagaatcacccagagatctaacattgtattgcctggataagcaggcaagtctcctgatgttgttgagtctttgtagagcattgattcacaagcatttggccatttacttgggaaaaatttgtcctatgccagccatgttctttaaattaattatctccatggccaagagtatgcatttatgagccagctgaaaagtcagggttattccatttgggggaaaaattaagtagaattaagcagttaatacaccactgagcatggaagcttcagcattgaacattaaacagttatcttgatacactttgcttctcttccatctatggacatgattgattacttaacctcccc

SEQ ID NO: 747580 - DNA, 603 bp, Homo sapiens
ctaggtactcagtgtatcatatctaacacaagctatgtgtgaaccttgtagcaggactgccatatacctccactccagttttttacagcacaatgtggggaacaccattcacgcagaaaacaatgtgaaagtcaacccctggtggtgcatagtgtagtgactcctatgggaagatccccaagtgtttcgttgtatacccttcacaaggtataccaagtgtactgatttcaatagacagtgtcatcttaccgtttagtcatgtgatgttttttaaaaaacacatttaatacaatttttttccattgaattcattagccgttattgactttgttgcctaggttaaatttaactataactgaattaaaataccaggttacctagagaaatgccattaccacygtgttgcaacctctctattaagctatggcacctgttattttatgttaatggtcagtaattgctccagatagaatacaagaggatatacaagtactgtgtcctcttaaaataaagagtaaatgtgttctctagtatgtgacagctaattagttaaatgttttttgattgtctttttttaaattggctaacattgttatctctgag

SEQ ID NO: 747581 - DNA, 611 bp, Homo sapiens
ttttttctaatggttcttttaaaagatgcctacttttttaaaaggaaagaatgtaaattctaacataaataagttatcctgacactaatgtccatgatgaaagtggagaaatttctacaggtgaatgaccctcaccctggctctggaacctgggccacacatgctcatcagactcatctctctgcacgctggtttctcagkgccatctgcagtgaccctgtgttgctcaaccagaggctggccagcctgtgggcctcagcaaagaccactacacctccatgatgccatttcacttgcagaccacttccctttctttacctgagcagtccccaatttttaaatttaatcactcaagaacatagatcaacctgatcctgagctctagtgaggcagtaactcttcaaaaaatgtttgttctgcctttcttagtagatgactgctatggtgagaaaatcacctaaaatctgcaaatcctcaagttcccttaagtaaaaaatggccatgtttatcgttatactagttgttttctatttttccaatttttaaagtctctgctatctataactaaatttaaacttgtatttaataaaacattttatacaattatttct

SEQ ID NO: 747582 - DNA, 604 bp, Homo sapiens
ttatcctcatagtacatcagttcaacattacaaatgttcaaactaaaccaatttaacaaaaagaaacctaaattctctctacaagggaactaatatctttttataaacttttatagcattgcatctttgtctttcttaaagtacttatcttccaccttattgtattcatttctgtacatcttctgcaagtttaaggagaaaagcagctctcgttatctaaaatgtcaatgtgccctgtacttcgcagaacatgaaagtggaattttaataactcagtatgttggaatggaaagcaaagccacaacaatgtttaaccttttcaggttcaccaactgctgtgagaacttcctgacagctgtggaccttttycccagaaaactgtgcacaggcaattttgaatataaccttggggatctcctgaatataatccgggggataccccttaagaggtccagggccccagttaacaatcactggcacatgaaataccaagagccaaaccattcttcaactaaagagaacagggataaaaagaggatgttcaagttcaggtttctatcagatcagttaggctactcccacaatagaccaaaaagacaagaac

SEQ ID NO: 747583 - DNA, 584 bp, Homo sapiens
gtatgaaagcaaaggagttcaggaaatgccacctcaatctatgctgcactgaactgaggggagttgtggaatggcaaatgctgggaggggctttctctggacatcttcatatgcccaaagacagatcctccagaaggacctcaactgccatgaacccctcccgggggaacctcatccaccagggaaccgaargctcacacgtcacacctggatactctgttgcggtgtcacctgttcttccgagggctaagttcatttaccctcccctaagttgcccccatccccttccctgtcccctgtgagggagtacagaagcttctccatctcactgggtttggaggtatcggctcttcagtgtgatgctcccatgcacgtgaaaaattcatctaagctcttctgttaacctgcctactgtcagtttatttcagactcaattactgaactccagggggtggagagaacaccttccttcccctctgagaagaaccaatgccacgcccgccccgaggctgaagaatcacccaggcagctgtatcacaagagggtctcaggatgctggcatggcagctttctcagtgactcaa

SEQ ID NO: 747584 - DNA, 620 bp, Homo sapiens
ctcctctgaccactgggttgggcaggtgagcatggcagtgacaattctctgcctgtgacagcactgattcggccaaggggcaggcactgatccacgctgggccttatggaggccttgcctgaagctgctatgtggatgcaggaggggagcagagggagttttctactgaggcaattgctgatggacgtgtttcttgcaacatcgagtggcctagccaaaggtgagggtgtgaaagagaagaaaggagaaatggaaagggagaaagagctggcagaatgtagaccgtggtttcatttggagggcatggtttgtggagctctttaagtgctgtgagcatgtgagcctaagtgggtgagcccactcattcattgatttattatttggagccaatatgtgtggatattgaatgtatttgttggctgccacttgagcatttattccttccatttragccaggcaacataaccattccctctagcagcagagatggtcacaagcccagtcagaaacaatgaacccacaaagactggggctgaggcttccagtaaactgtagcttccttgctcctctagcatggtgtaagtatatgatgcctggaaatgtggcaaccgttttcctcc

SEQ ID NO: 747585 - DNA, 634 bp, Homo sapiens
ttgttgactgtttactttcattatataaccatgtgcaactctgtcttcttttaaacattaggaacagaacaaaataaataatctttattttgcttgaatgccctggctagtaatctaatccagtttactatatcacagccacagttctggaaagtatattttgtattcattgtcttcactttattatattttcctttacctcttcagtcaggtttggcttctcggctttcatgcaatggaaaattgcccttgtcacacagcatggcacaaaagtaccaaattcagtgggcacctttcagttcttccttgactcctttggtagtagatgctgtttaatcatactttcactcattgcttgkttcctttgaaataattaccttttggttagtttttagccattctttcttggtcttctcttccttctcctgcagcttgaatgggtgtctggccttttagtttgtattaatacatacttttattacaatgatcattttaaagtagattgttttctgtagaatattagctctttgaagtcagaaacattagtattttcattgttgtttctccagcatctaccctagtacttggcacaaatgtatttaataaatatttgtttaatgaatataaatatatt

SEQ ID NO: 747586 - DNA, 670 bp, Homo sapiens
aaaggaatgaaggatttaaaaattacagagtgtcacacggagtctccaatcacaatcataattacactgcgaggcatgacaggaggtggagagatggcacgtgcagagacaaggccagcacacatgatggagcggaagccagtgtggagcacaaccgcgtacacagaagggttaaaacccgaaggacagttcaactcagtagcaaactaaaaataaatagataatactttaaaaaaaaaaacccacacccacacaaaacacggaaagataaggacaaaaaatcaacaccactcaagatgaaaaatgagcagcctccagattaatgcttaaaagaaagaaacaagaatgcaactggagaataccaaggcagggcaaaccccaaacytagagcttaaagaagtgggtggcattctggttagaagggacaggcaatttactcccactcattctgtcaggattcctgagagcatggatgtatccacgcaaccctctgccatgcaaaacacatatggtggaatttgaataattacaaaacaagtcacacaattgatcactacaccaaagaaatataatttaaaagctcaaaagtaaaatatgtattattaatttctaagtttaagcttacagcttggaaattcaaatgacaaaaaggcctatgaagtgttctgtg

SEQ ID NO: 747587 - DNA, 622 bp, Homo sapiens
aacatatcttaggccagaaaacaggtctcaacaaatttaaaaaagtagaaataatatgaagtatcttttctgacctcaatggaataaaactagaaatcagtaacaaaaggaacctcagtaaatacgcaaatacgtggaaatttaaaaacatgctagtgaacaaccaatcgaagaaattaagaggaaaatcccataggtttaggtatgttgtatttctgttatgatttgtttcaataatttttaaaatgacaatactactcaaaaattacaaattcaatggaatccctatcaaaatatcaatgccattcttaacagaaatagaaaatataatgctaaaatttatrtggaaccagaaaatattccaaatagccaaagcaagcctgagcaaaaagaaaaaagctggaggcatcatatactacctgatttcaaaatgtagtataaagctttagtaaccaaaacagcatggtaccagcataaaaacagacacatagatcaatgcaacagaacagagaacccagtaataaatctacgcatttgtagccaacttgtctttgacaaaggtgctaagagtatacaacgaagaaaggacagtctcttcaataactgctgctgggaaaacagg

SEQ ID NO: 747588 - DNA, 622 bp, Homo sapiens
aacatatcttaggccagaaaacaggtctcaacaaatttaaaaaagtagaaataatatgaagtatcttttctgacctcaatggaataaaactagaaatcagtaacaaaaggaacctcagtaaatacgcaaatacgtggaaatttaaaaacatgctagtgaacaaccaatcgaagaaattaagaggaaaatcccataggtttaggtatgttgtatttctgttatgatttgtttcaataatttttaaaatgacaatactactcaaaaattacaaattcaatggaatccctatcaaaatatcaatgccattcttaacagaaatagaaaatataatgctaaaatttatatggaaccagaaaatattccaaatagccaaagcaagcctgagcaaaaagaaaaaagctggaggcatcatatactacytgatttcaaaatgtagtataaagctttagtaaccaaaacagcatggtaccagcataaaaacagacacatagatcaatgcaacagaacagagaacccagtaataaatctacgcatttgtagccaacttgtctttgacaaaggtgctaagagtatacaacgaagaaaggacagtctcttcaataactgctgctgggaaaacagg

SEQ ID NO: 747589 - DNA, 561 bp, Homo sapiens
aaagaggaaactttttggcttcaggaagatataacaattagaaacatatgcacctaaaaatggaaaatcaaaatacaaaaggaaaaactgacagaaacgaagagagaaatagacaattcaacaataataggtggagacgtcaatacctccttttcaataatgaagagaacaactaggcataagatgaaaacataatagaagactcaagcagcactataaaccaactagatttaacagacatgtgtagaacactccatctaacaacaataatatacattcttaaacacacatggaatatttttcagggtatgtaaggccataacacttcaacacatttacaaggayggaaataatacaaacaaaatatgttctctgcttacaatacaataaaatgtgaaagtaatgagaaaatttgggaaactcacaaatatgtggaaatcgaactatacactcctagataaccaatgggctacagaaggaatcaaaagaaattcagaaagtactttgagacgagtaaaagtcaaggtacaatataccaaaacttatgggatccagttgaag

SEQ ID NO: 747590 - DNA, 615 bp, Homo sapiens
tacctaataggtagtttttcaactcttgcccacctccctctttcccctcttttgcaatccccagcgtttactgttcccatctttgtgtccgtgtgtacccaatgtttagctcccacttgcaagggagaacatgcagtatttggtttttagtttcttaattaatttacttaggataatggcctctagccacatccatgttgctgcaaaggacataatttcgttctcttgttatggctgtgtgaaatattactaatatttttcatgcatggttgatataagcaactttacaacactacacactaaaatgctgagtctttgatataaagagaaatggaaatgtgactcctgtaamaggtcaaattattgaacaaatttaaacatattatatactaattttcctgaaaattgaattatttatatttcacatccaataattacttcacttttaaacaaaatatttcattcataaactaaatgagaaaatgtgaagctatttcatgtaatgcagaaccaagagggaaaaaaaaagaaaatgtaaagctaactgtggtatataaaaaaagtaagcaaacctgttcactgttgagaatatttgttttatccatcataaaacca

SEQ ID NO: 747591 - DNA, 614 bp, Homo sapiens
gagctcttggtgggaccaggctgaagctggtctgtagccaggaccacaagcctgctgagatccccctggtctaggaaggggaaatacaggaagctgatactctgttggtctcttgtatcccccacttcctagagcattcgggcagtgaatcactggcccccaaatgcccatctcaggcactgattttagggaaccaactcaagacaacgatggtcaaactctgatggccattgcaaccccacagccatattttgacactatcagtggagtggaaaactcacagcatggctcacagcgtccttgtttctgaatttctcaatgtttaaagctctaccttagtattgagcccttgaattacaggagagaagaygtaaaccattttcgtgtacctgtgagcagttctgggagacaggatgaagcaattgttgaagacacggtcttgctctcagccacacacttgcgtcattcctatgctccctattttccaccacagagcctgtatgttgggtaggtgcactgaagggccaacatgagcccatcgcaagggccttgagaccggtctcacttcaaccttgagatggctctttttggtttccgatggaaacggagccatt

SEQ ID NO: 747592 - DNA, 605 bp, Homo sapiens
attatcagtatttgtgctcttgtgttctgacctggcctacactgagaatgaaagttccaagtatgttagaatctaatcttggctttgctgttggcagaaagtacctggaagtactaaaggaaagtgaggacaatgttatcagtagctggaggaaggaggacccttgttatgtactggttgaaagtaaagcaaaatggaggccaaggcgggtggatcacaaggtcaggagatcgagaccatcctggctaacacggtgaaaccccgtctctactaaaaatacaaaaaattagccgagcacggtggcaggcgcctgtagtcccagctactcgggaggctgaggcaggagaatggcgtgaacccgagaggtggagcttacagtgagccgagatcgcgccactgcactccagcctgggtgacagagcgagacactgtctccaaaaaaaaaaaaaaraaagaaaaaaaaagaaagtaaagcaaaatggtcagctgccatcacatgaaaaatagaaatttttacttaatgcaatggatgatctagctaaggagatttctagacagggtgctaaaattttgtcctcagcctctccaggacaagcaatgataaa

SEQ ID NO: 747593 - DNA, 629 bp, Homo sapiens
gttatattctacaatcttactaaattcactaattttgtctagaagcactttgtagattcttggatcattgcatagaagcttggagttgaaattcttactttttttcaaatttcatcctgaaagcattgctcttctactattgcatatgatattcgctgttggtttttcaaaaagccctttactgagttgagaacatttccctctattcttttttatggacattttaatcatgattgatgattcatcatgtagtataattacctgatacagaaaaataaaatatttyttaataataaataatttttctctattttaaatttttatttgtactattattgttattttatccctgctttcgttggattttattttctctcttctttctatacatttaaagtttgaatcttaggtaattgatttgaaatgcttcttcttcactacatgaacatttaatatgcataattccagtcccactatggtgatgtaaacccagtagagcctacttcttcccctaattgcatctaaaaactctagaaaacatattaacagactttgtttctatttctccctcaacagcattgtacctttacctgggaccagtgacagaaaggtttcctgtccctcctagg

SEQ ID NO: 747594 - DNA, 629 bp, Homo sapiens
gttatattctacaatcttactaaattcactaattttgtctagaagcactttgtagattcttggatcattgcatagaagcttggagttgaaattcttactttttttcaaatttcatcctgaaagcattgctcttctactattgcatatgatattcgctgttggtttttcaaaaagccctttactgagttgagaacatttccctctattcttttttatggacattttaatcatgattgatgattcatcatgtagtataattacctgatacagaaaaataaaatatttcttaataataaataatttttctctattttaaatttttatttgtactattattgttattttatccctgctttcgttggattttattttctctcttctttctatacatttaaagtttgaatyttaggtaattgatttgaaatgcttcttcttcactacatgaacatttaatatgcataattccagtcccactatggtgatgtaaacccagtagagcctacttcttcccctaattgcatctaaaaactctagaaaacatattaacagactttgtttctatttctccctcaacagcattgtacctttacctgggaccagtgacagaaaggtttcctgtccctcctagg

SEQ ID NO: 747595 - DNA, 623 bp, Homo sapiens
tccttctctgcctctcttagcaggagctctttcagagaatgggaaacacaggtccagagaggttcagacctgccctcctgacacacacacagcaggtccataaccaaaccaggctctgtcttaggtacgatgatcccagaccaggggctcctccctcttcaccaygtatcctgggcactggagaatgcagacctgctggcccactgcttccagagcccctgtttacccctttcaccaggcaaaggtggtgaattcacacatgggtgcatgtgtacacacatgcctgagtcatgccttttctatccagaacaaaactagcaagcaggctgcctttttctctagaacacaaatgaacacagaactgagaagtaggtcatgaaggcccttagggtttattaatcccttcattgattcaacaaacgtaaaatatttacagtccgtgtattaaaactcttgtgcactttgctcatagaaagcccactctagggctattaactgccagtttacaaacaatgttgacaagctgctcacctgcccccctccacagaaatgtaagcgccctgaccctgaccctggatagagtgtggcccactcctactcctgggtggcctggtcattccagt

SEQ ID NO: 747596 - DNA, 515 bp, Homo sapiens
ccaatccactgtggatagactcctaggtagattccacatcttcactattgtgaacagtgctgcagtgaaagtgcaagtgtatgtgtctttttggtagaatgatttattttcctttgagatatatatatatatctccagtaatgggatacctgggttgaatgtagttctgtttaagttctttgagaaatctacaaactgctttcaacagtggctgaactaatttacattcccaccaactatgtataagcattcccttttctcgacatccttgtcagcatctgtcgttggttaacattttaataatagctattttgattggtgtgagatggcatctcattgtggttttgrtttgcatttctctaattagtgatgtggagcatttttcataagtttgtttgccacttgtatgtcttcttttaagcaatgtctgttcatgtttttgcctattttttgatgaggttatttgttttttgcttgttccgttgcttaagttccttatagactctggatattag

SEQ ID NO: 747597 - DNA, 598 bp, Homo sapiens
ccattctgtagcttatctgtttactttgttgatagtttcttctgctgtgcagaagctctttcatttaatttggtcccattatcaatttttgtttttgttgcatttgactttaagaatttagtcataaattattcctcaaggtcaatgtccwgaatggtgtttcctagttttttttctaggattcttacaaagtcttcacttaaatctttaatccatcttgagttaacttttgtatatagtgaaaggtaggagtccagttttattattctgctgcatatggctagctagctatctcagtatcatttattgaataggaagacctttccccattgcttatttttgtcaattttgttgaagatcaggtggctgtgtccctttatttctgagttctctactctgttctgttagcctgtgtgtctgtttttgtacatgtaccatgttcctttggtctgtatatagccttatagtttaaagtcaagtaatgtgatgcctccggttttgttgtttttttttttttgcataggatttctttggctatttgagctcttttttggttccatatggaattttataatttttttctagttctttgaaaaaa

SEQ ID NO: 747598 - DNA, 552 bp, Homo sapiens
tgtatatagccttatagtttaaagtcaagtaatgtgatgcctccggttttgttgtttttttttttttgcataggatttctttggctatttgagctcttttttggttccatatggaattttataatttttttctagttctttgaaaaaatgatgttggtagtttgataggtatagcatttaatctgtagattgctttgggcagtgtggccattttaacaatattgattcttccaatccatgagcatggaatgttttccatttgtttgtgtcatctctgatttctttcagcagtgttttgtagtwctccttgtagagatctttcaacttcttgtttagatgtatccctaggttttttcttttgttttttgttttttggttttttttacagctactttaaatgggatttcaaccttgatttgagtctcagcttgaacattactggtgaatggaaatgttacttatttttgtacattaattttatattctgaaactttattgaagttgtttatctgttccagcagtattttggtggagtctttagggttttctagg

SEQ ID NO: 747599 - DNA, 601 bp, Homo sapiens
ttggcacttcctctgcacactgctttgccttctgtctggcacatgtgaggctggtcctctcagctcagagtcagtgcctcaccaacagtgtggccatacatgctcaggggagcaggagagaacttcttcttgggccagcgcaggacaagaaacagttactggccttcctaagccagtgctctcctctcatccaagggagaagaatgaaactaacattcatgggagtttaacaagaatggtgggctgggaactcccagctgtctgtcccgccacatgctcctctaaattatgagaaagtcactcctccctgaagcctctctcackgcctgcagccccgagataatggcttccctctccaagcttcctatcctcagtttctgcttcggtgggagggcgcaccacagtcccgcgtgtgttcttgctgggtggctacacatctgtctctccagccgggctctgagccctccacggtgagttatattgttttattcagcatcctaactcttgaacgtgagtgtggtgtcttccatattgtattgctcaaacttcagctggtctaaagtatgcttttctttatataattgtttctgtgcatgttaga

SEQ ID NO: 747600 - DNA, 569 bp, Homo sapiens
tcacaaaataagagtgttaagtaatcactcaggggaagagatctccccagcaaatactcctacctcaaatgtcaaagcaaagcatgtccatctatgtttagctgaacagcatgtgctgcaacctggccttctagctccaggagggctctgggaaaggcagaccaccaggcatctgtgccatctcagctctgtacacacagctgtaccaacagcatcatgaacaaagtgctggcacttcctcccagacgccatgtacatcatccctgcacatgggtgcaaatctacccatcacacaagtgtggggctgrccagaaaacaggacacaatgtcaggggaaagcacagtggggcaaaggcaggattcccagagatgggggcagtggtgtatgatggcatcgtaaccactaagcacattgtttttcaaaaccgttgcttttccagaccatagacataggggaaggcaggcaagggtacagctttaggaaggctcactcccccagtgtaggactggctatgtgcttctgggtggttccagagaaaccagattccatattctcaggaagaaatgaa

SEQ ID NO: 747601 - DNA, 621 bp, Homo sapiens
cgcatgtgctgagaactgtggctgctcttaggttactacagcaatgctgagtaggccacatccttcaaagccaaaaatatctaccattaggcccttcgcagaaaaagcttgtcaatccctgctcaagaacgtcccagctcacgattgcaagataggcttcaaataattctaatcaatcaagactcatgttctgacttgagcattccatattatttctactgcttgaagcaatattggtttcctaagctccaaaatgaaagacaaatttgacccgagggcaagattcaaggaagggacccctagttcaccgaaacacatgcacagcttgctacacacctggtcagtctccttgcaggctgtgggtgggaagagcccttggctgtgcacacagtgacactgatttgctctctccaacagctctcacccctgaggatatcagcattttgctcccgaaagggcaaacacraaaggtataattccataatcactagattctacttcattttagaagaacagtattatacaaccatggaagattaaaaagaaaacccacagaaacaatgaaaacctttaccttgagtttatttttcaaagacagagagccaaggtatttctgttaat

SEQ ID NO: 747602 - DNA, 668 bp, Homo sapiens
aaaaatgagagaaataaagtcacttgcctcacaacttaacctcctcataaactgataataggttttgtattttcttagccactgtacaatgcacactccctaaacactaatagtttccagcatttagagctgggcaactccagtgtacttaattttatgttctttctccttggttcaggaataatatgtcgcccagtttgaggaagcatctctgttctctttttttttttaagtttaacaaaaggtaacatccgatagttttacattttctgctaggtcaaaaaataacagctaaattaataattaatagaataatttctaaattaataattttttttttgagttggagttttgctcctgtggcccagattgggttgcaatgatgcgatcttggctcactgcaacctctgcctcctgggttcaagtgattctcgtgcctccgcctcccgagtggctgggatcataggcgcccgccactgcgcccagctgatgtttgtatttttagtagagacgggcgggrtttcaccatgttggccaggctggtctcgaactcctggcctcaagtgatccgcccaccttggcctcccaaagtgctgggattacaggcataagccaccatgcctggacagcaataatagaatagtttctgaacaccgatcacgatagcc

SEQ ID NO: 747603 - DNA, 641 bp, Homo sapiens
aaatgaagaataatctattatgggtcagcaagctttggcttgctggtcaataagcctaccacctgttttgttttattaccgctttattgaaatataatttatataccacacaaaccatccatctaaagtatacaactcaatggttttagtacattcaaaccattgtgcagccatcaccacaatcaaatttagagcatatttattacccacaaaagcctgtatctactggcagtcattccccaactccccctcaggccagccctaagtaatcacaaatctactttctggctctacatatttgcctattctggatattaaatacaaatgaaattayacaatatatgatcctgtatgactggctacttagtcgagtattttcaaggttaatctaatgtgttgtaacaagtatcaacacacttctttttactaatgaacatttcattcgtatgaacataccatatttatcgattcatcagttaataaacatttggactgtttccatttttggccattatgaataatgttattatgaacattcatgtccaagtttttcacttcatttcacatgtttcatttcttttaggtatatacccaggaatggaattactaggtcatatggtaactctatgtttgacattttg

SEQ ID NO: 747604 - DNA, 617 bp, Homo sapiens
ggtctaaatgccattgggaagcagtttcctccactttttatggggagtgggaagcgacagggcatgagatctcaccgcgctggggacaccacatctaactccatgtcccgcgcagcgcagccaggcagtaaccagcaaggactgccgctgctgcagagaggaggttgtgctgacccaggaataacagctatgagctgatgatgtcagtaacttttaagatagcttatttaagaatcttttcagtgacctcagctacacttaatgccagttagctcatctggacataggcaggaaatgttakaaggttgggtgacaactggaactccaagcagctgttatcctaagaagctcattttaggaaagaacttgtctgaacaagtcggagactgaagataccctcggtatctagtgaccatgatgtagatatagatccagtgtgtccccagccatgcaagtctgcagaaaatctagcatcacaagaacagttacacatggtatttctagcgctctgcccatatcttctgtgatggcaactctggtgccctttctgggtctcctgtgtattttggagattctgtggatgactcacatggattcatgggcttaattctatcagt

SEQ ID NO: 747605 - DNA, 514 bp, Homo sapiens
aagagcaaattaatccaaaatctggcagaagacaagagataactaagatcagagcggaattgaaggagatagagatacaaaaaccctgcaaaaaatcaatgaatccagaagccggttttttgaaaaaattaacaaaatagatatattgctagctagactaatgaagaagaaaakagagaagaatcaaatagacacaataaaaaatgacaaaggggataacaccactgactccacagaaatacaaactaccatcagagaataatataaacacctctatgcaaacaagctagaaaatctataagaaatggataaattcctggacacatacacccttccaaggctaaaccaggaagaagtcgaatccctgaatagaccaataacaagttctgaaattgaggcagcaattaatagtctaccaataaaaaacaagcccaggaccagatagattcacagccaaattctaccagaggtacaaagaggagctggtcccattccttctgaaactatgccaaac

SEQ ID NO: 747606 - DNA, 558 bp, Homo sapiens
ctaaaagtaggaaaatgcctcttttatcaatatcataggaaaaaaaaaggtgtttcaagaaaaatatggccggaggagataaattgtctaagagatgccatccaaaagacaaagctgtctcatggtaaaagtacttccattttacctgtccctcctcccttcaaagcaaccaggaaaacaggaacaggctacacccagaagaggaacagagtacaccactgagagcaaagaagagtcattccagtctgtgcttagggyatgacaagaccaaaacctgggcatgcagaggccagttcacaggaacagcaggcaaaagtcaaatgcagattgagggcatggacagagtcctggggggatgtccaggtgtccacaggtacaggccaccatcagtcttggaggcaagggctggagagtgctgaggagctctagtcggttaccaggtgccaaggcatatgatgccaagaggtaagagatggacaggggccaagatgactgaggaagccaggaccagtacctggtggaggaagtcgcaggaagacatgagaatattcaggggga

SEQ ID NO: 747607 - DNA, 686 bp, Homo sapiens
ccaaatagccaaactaatcctgagcacaaagaacaaagctggacgcatcacattactggacttcaaattatactacaaggcaagagtaaccgaaacaggatggtactagtataaaaacagacacatagatcaatgtaacagtatagagaatttggaaataaagccaattacctacagccaactggtcttcaacaagattgacaaaagcatatattgggaaaggaacatgctattcaataaatggtgctgggaaaatgtggattgccatatgcagaatgaaactggacccctatctctcaccatatacaaaaattaatgttgattaaatactgaaatgtaagacctgaaaatataaaaatactagaagaaaacctaaccaaaaactttgccagacattggccttggcaaagaattcatgactaagacctcaaaagcaaatgctacaaaaccaaaaatagacaaatgggacttgattaaattaaaaacttttgcactgcaaaataagtarcagagtgaacaggaatcctgaacaatgggagaaaaatatttgcaaaccatgcaccaggcaagggactaatccagaatctacaaggaactcaaacaactcaacaacaacaaaaaccaagtaaccacattaaaaagggggcaaacgacatgagcagacatttttcagaaagagacatata

SEQ ID NO: 747608 - DNA, 555 bp, Homo sapiens
tcccacatgtcttcaaaacacccagaaagccctagagaaaactgcagaccctgagctttgccctttcacatccccagtgagccgcagccgtcaaaggcctgggctgcttgccagagggtgcccaccaggcctctgccctcctggcagccgttgtggatgccagtgaaggggtcaaggtgggagtcctctggccccttccccaagccctcctgcctccataacactctgagcccatggccaagtcttctttgttttggagttgctggtagaaccaaagctagagagattgtcagatgggtgggagaagtggggctgagaaatgcaaatgacagaagcctccctctttggggtcgtggcctygcccagaagtctgggcctgggagctccaccacccactgtgccagctctcagctgccacttcccaatgactttgacaccctcctccctgcaacacacacattctcaaaaccagaagattctgtgatgtgccaccaagccttccctatcgctatgccaagaagaaaccctctcatggcagaaatgtgaagacccagg

SEQ ID NO: 747609 - DNA, 527 bp, Homo sapiens
actgaaccatacccttaaaaattgttaaaatggtaaattttaatatgttacatgtgttttatcacagcaaaaattatttttaaaaaaagggaccggttgtttggggagtagggaggagaaccacagatttaggccaaattctgagattacaaatgaggtggctacagccccgagagcagaagggcttcgtccaaggtcactctggttgggcagcccagctggcctggaacccaggtgtytacccatcccccgtgcagcgcttctcacagatgtctggggcctgtctggttccatgacctggatgcacagagtcagaatcacaagctgtggcatcatggctcttggggaagaagaggcagggcactcggctgccaccctgttcctgccacccaccggccaaagacctggggcctctgtgagccagcgcccctcacaggctgacctgtgttgctgttgcagatcacatccctgctcaaggacaatgagcgcatccagtccacccagactgtcgcccccaacgatgaaga

SEQ ID NO: 747610 - DNA, 527 bp, Homo sapiens
actgaaccatacccttaaaaattgttaaaatggtaaattttaatatgttacatgtgttttatcacagcaaaaattatttttaaaaaaagggaccggttgtttggggagtagggaggagaaccacagatttaggccaaattctgagattacaaatgaggtggctacagccccgagagcagaagggcttcgtccaaggtcactctggttgggcagcccagctggcctggaacccaggtgtctacccatcccccgtgcagcgcttctcacagatgtctggggcctgtctggttccatgacctggatgcacaragtcagaatcacaagctgtggcatcatggctcttggggaagaagaggcagggcactcggctgccaccctgttcctgccacccaccggccaaagacctggggcctctgtgagccagcgcccctcacaggctgacctgtgttgctgttgcagatcacatccctgctcaaggacaatgagcgcatccagtccacccagactgtcgcccccaacgatgaaga

SEQ ID NO: 747611 - DNA, 527 bp, Homo sapiens
actgaaccatacccttaaaaattgttaaaatggtaaattttaatatgttacatgtgttttatcacagcaaaaattatttttaaaaaaagggaccggttgtttggggagtagggaggagaaccacagatttaggccaaattctgagattacaaatgaggtggctacagccccgagagcagaagggcttcgtccaaggtcactctggttgggcagcccagctggcctggaacccaggtgtctacccatcccccgtgcagcgcttctcacagatgtctggggcctgtctggttccatgacctggatgcacagagtcaraatcacaagctgtggcatcatggctcttggggaagaagaggcagggcactcggctgccaccctgttcctgccacccaccggccaaagacctggggcctctgtgagccagcgcccctcacaggctgacctgtgttgctgttgcagatcacatccctgctcaaggacaatgagcgcatccagtccacccagactgtcgcccccaacgatgaaga

SEQ ID NO: 747612 - DNA, 591 bp, Homo sapiens
cagcccagcttccccacaggaaccagctgcccttagaaagagccatgggcttatcaggcatcatgactccccttctgggatctgggcagtctggtggaggactgcgggggatactagatctattccagcaactctagtaggcctgtgaagatttgttattgaaacttggactcgggtcctgtatctgaatgtatcctatatccttgatcacatatagtgagtcctgatctcatccagggcccagggaaggtgggcatgaggctctctgttgcattggagagttctaggatgtccctgggactgactccagaacaatgctgctgttccgcagaggaatccaaccgggatccaggcaagcctatgtggtcccattgttgtggcaggtgtgattygggtcctatcctgtggtcacactgaggctcgtgtgttgtgagtctgagaagctctgggtagctctggttggtctcagcatcattctggggatgtccaagttgtgatcctggcctcatcacagcagctccagtgttgcccccagtgtgagtctggtttttactctgcagctttggagggatctgtctctggcctctgccc

SEQ ID NO: 747613 - DNA, 676 bp, Homo sapiens
ggtaaggcatgagaatcacttgaacctgtgaggtggaggttgcagtgagctgagatctatactacactccagcctgggtgacagagtaagactccatctcaaaaataaataaataaataaataaataaaatatatgtctgatataaaaagttgtggatccagaatgtataaaatctttcaaaactcagtaataagcaaaccaacaacccatgtaaaagtcagaaaactattttaatagacccttagttaaagaagacacatggtgggcaaatatacatctaataaggttttcaacatcattagccattaggaaaatacagattaaaaccataatgagataccattacgtgctcactagaatggctaagataaaaaaaactcactgttcctagtgttagaactctcacacactgctggtggaactataaaatgaatatccactttggaaaaaccatttgrcaggttttatttattttttatttttaaagttaaacctatccctactgtgtgacccagccattcccttcctgggtattttcccaagagaaaataaagcatatatccaaacaaagacttgtatatgaatgtgcatagcagcttttttttttttttatgttttaattattttaatggtactttttccctgcattttgaacaaggagaatcccattttcat

SEQ ID NO: 747614 - DNA, 602 bp, Homo sapiens
agaaatacacatatatatcccttttatttagtgatttgcactgtttctcttagtttttattatctccagtttttaattcagtggcctgagtaatttttatatataagtaagaaccctaaagtaaaagtaaaggaatcattgtattagggaaatagccaactttgtgactatagaggagctgttgtggaaaatggtgggggtgctcattacgtaactcaggatgatgagattataatttttaacccttgtttttatgatagcaaaactgtgagacttaattagcatattagaattttagagctatgawggaccttaaaaatattttatgctttccaagatgtaatttatggtgagtgggcatgcattatcatttacatattttaatgtaaattagaaaaattatattaacataaatttcataaattttgcttaggacaggactaaagttatttacattttaaaactgtacattcaaagtgacatatcaagtaaattaacagcgtgaatgtggctaaaattattaatgtagtctgtgaatggctgaagcttggaaattatatcagactaaccctttctgagactctgagaggtgaagtagcttg

SEQ ID NO: 747615 - DNA, 646 bp, Homo sapiens
ctataagaaaaggtaggaattttacagatgaaaaaatgggtttgtgcccaaggtcataaagccagataatggaagcactggagatatctctgagcctactgaacgtcctctagttatcacacacatgtccacatgtccaccacctatacagtacccggaagaaagacgcccagaaactccactaactgagaggctactctgtgccaagggcagaatcagaggcgaaaggtacagtgagctggcactaccctacaggattcccccaaccaactaattcagaaagagggattcagatatggtttgggtctgtgtccccacccaaatctcatgttgaattgcaatccccaatgttggaagaggggcctggtgggaggtgactggatcatggaggcagatttcccccttgctgttctcataatagtgagtaagttctcatgagatctcgttgtttataaaaatrtgtagcacttccccctttctcttcctcctgctctagccatgtaaggcaatccagcttcccctttgccttctgccaccattataagtttcctgaggcctccccagccaagcttcctgtacagcctgtggcaccatgagccaattaaacctcttttctttataaattacccagtctcagatagttctt

SEQ ID NO: 747616 - DNA, 618 bp, Homo sapiens
gggaccaaaccaaatgaagccaaccatgcatggaaaacatctgctgataattcctaaagttaatggtttctaatagtagtatatatctcttatcacaatgctttccatggaaaatatgcaattattcactggtgaaagatcacactaagtgacttaacaatattacaaaaaccagtattagtaccatatagcagtctgttaatgtttggataatttaattagtcagggtttaataaaccttctgcttaagtgagttactgtttttaaaaaatttaacacacatataccataccataccataccataccatagcataccataacatatcataccatagtaaaagatgtgcaaagttatttctacaaacagaattttaggtcactgaaattcaatttaaaacacatatggaaaatgaaatatttgataaatagttcaacttattttaaaatgaaatcacttttttaaaactstcaaatgttactgaatgttacactctcaaatgtacatacagttaaacactgatcataatagttctagtcatattaaaatttgatggctaacatttatagaatgtgtggccaagctttcctctaagctctggacaaagaaacagaaact

SEQ ID NO: 747617 - DNA, 569 bp, Homo sapiens
aacccaagtatatcccaggaggcttgattccccttttacaatgtaacacaagtcagcaagtccatctgaatcttaacccaaagatcttaaaaaatcttggacaatacaaaaccaagtcttaagttacaaatactatgccaaagattactgtagtttctggttatgaaagttacttcatttgtttatgtgtgtctatgtttggttttttaaatttatgtatctacctacctacctacctacctacctayctatctatttatttatttattgacaggttctcattctgtcatccagactggagtgcagtggcacaatcatggcttactgctcctgggctcaagtgatcctcccgtctcagcctcctaagtactaggactataggcacacaccactacactcagctaagaagtaacttatttttacacatataactattctatagagatttacctcatctacagtcaaataaaattttgtttcccagattagaaatgtaccaaattgggaattctaccagaatatgaacagagaaaacagtcccaacttatgagcaggtagcatgctaaaac

SEQ ID NO: 747618 - DNA, 520 bp, Homo sapiens
agtggagaaggaaggccataacgtgaccatagagggagagattaatgatgtagccataaaacaaggaatgccatcagccaccagaagctagaagaggcaaggagcagattctcccctagatcttccagaggtggtgtggccctctgacaccgtgatcttggctgactgataatgatttcagaattctggcctccagaacgctgagaaataaatgcctgtcattttaagccacgatgtctgcagtagtttgttatggcagccagaggaarctagtataaatatctccccatctccaagtaaatatgtatgcaaaaggcatacatatttgactagtctgaagtacaaatacaaaagagaaaatcagatacaatttcagagttcctcattcaaaatgagaacataacactcctaaatttttttacagttaaagaaagtatagataaaaagagaaataaatacggctttagaaattatatccaattatatccactggatccaattatatccactgtatactcag

SEQ ID NO: 747619 - DNA, 622 bp, Homo sapiens
ggccctggccgggactggctttcaatttttaaagccccctgggggtccatccaatacccccatcccctgacattaaggaaagttttaaacaaagagaaatggagagaagcatcctgtgcttccctgggggcatgctaaggacktgaggaggcacaggtggcacagatacgaccccacccctacttcactaggaaaagctgagctgactggacatccagaccaggaatgtctctcgaggccaggaaccagcctcagctctgcactgggctctgggcagccacttgatgaatgactgcagagtgggaaatgggagggacccagccagataacgactccctgcttccatctgagagcggctctgataccgtctggaatcagacttgtgggggagtgggcctcagcattttgggcaacatattttgaggcttctccttccagagaagcagctgggcttctcttgactttgttctaagttctgtgaagccaagcatcaaaccaacttaccttcccatacccctacgtcccagtcatcgtgcctggctcagaagaagatcttaataggtgctttttggttcgaacagaaataagtagcatctagagagtctaggagggagaactagag

SEQ ID NO: 747620 - DNA, 622 bp, Homo sapiens
ggccctggccgggactggctttcaatttttaaagccccctgggggtccatccaatacccccatcccctgacattaaggaaagttttaaacaaagagaaatggagagaagcatcctgtgcttccctgggggcatgctaaggacgtgaggaggcacaggtggcacagatacgaccccacccctacttcactaggaaaagctgagctgactggacatccagaccaggaatgtctctcgaggccaggaaccagcctcagctctgcactgggctctgggcagccacttgatgaatgactgcagagtgggaaatgggagggacccagccagataacgactccctgcttccatctgagagcggctctgataccrtctggaatcagacttgtgggggagtgggcctcagcattttgggcaacatattttgaggcttctccttccagagaagcagctgggcttctcttgactttgttctaagttctgtgaagccaagcatcaaaccaacttaccttcccatacccctacgtcccagtcatcgtgcctggctcagaagaagatcttaataggtgctttttggttcgaacagaaataagtagcatctagagagtctaggagggagaactagag

SEQ ID NO: 747621 - DNA, 662 bp, Homo sapiens
agctgtggatccccactgagttgttcttcccctcatcttaatctcagcactctcttgtgaaggctttgtgggagaggggcacttctctgagtaggcgcttcttggaaagctggagcgactccattttttcctggggcgttcttgtttcttctgtttggacaagaagaatctgtccttcactgtcctccctttcaacgcacctcctgacaaagtaaagatggaggtgacaaatcgtatttgggtcacgttcctaggtctcctcctcttggctacccctaggctaaggagtctggaaaccgtcaaatgattcagaatgagctgaatgggttcttcattcttcacatttgrtgccagggagcagagcagtggctgatgcaagaattgaacacagcaggagttgagcttgaaaaaaaaaaaaaaaaaagataggaagaaaccggccatagctaaggactcctacaaaaagtatttacaaaaagcactcagtgggaacccatgcatggctgtagatatttggttgctgctggaggccaggtagagccggactctgcccacagcatgtgctcatttgatacttacaggattccctctctgttcctaggacctattcctgtccagggccgttgaaaaggagtaatgaggttgggcaattggggaagtta

SEQ ID NO: 747622 - DNA, 598 bp, Homo sapiens
acagcaggagttgagcttgaaaaaaaaaaaaaaaaaagataggaagaaaccggccatagctaaggactcctacaaaaagtatttacaaaaagcactcagtgggaacccatgcatggctgtagatatttggttgctgctggaggccaggtagagccggactctgcccacagcatgtgctcatttgatacttacaggattccctctctgttcctaggacctattcctgtccagggccgttgaaaaggagtaatgaggttgggcaattggggaagttaggataggctcagcaamatcttgggaggatgaataaatgtcacttaatcacatccacaggtgacaagcaggcagccatggggaaaaggcactcatagaacagtgacttgtaccatgctgttcttcagcatcttctgctggctgtgcgtgcagggtgatgatggcagcctacaggtatgccttcgggagcaggcagcctcctgtcaatggagaaggctcactgggtcactgttgactccatttttcttcatgaatcctccaggccttgccccgctaccccccacctaacatcccttcagtccactgatcttctccaggatcctgc

SEQ ID NO: 747623 - DNA, 590 bp, Homo sapiens
tttattttaaagggtttttaaagattaaatatttaatttgtcagttatttaacccaattttcttccagcagaagctggcaactcccattccttgcccttccccaagttttggtgtgctatacattacgttaggtattgagrgatagtaatgagagacaggactagctggatttcctaggccgactaagaattcctaaccctagctggggaaggtgactgtatccacctttaaatatggggcttgtaactcagctcacacctgaccaatcaggtaacagagagctcactaaaatacccgttaagctaaaagcaggaggtaaagaaatagtcatctatcgcctgagagcacagggggagggacaactatcaggatataaacctaggtattcgaactggcagtggcaaccccctttggatcccctcccattgtatgggagctttgttttcactctattaaatcttgcaactgcacactcttctggtccatgtttgttagggctcaagctgagctttcactcgccgtccaccactgctgaacgtcgccgtcgcagacccgccattgactttcacccctctggatccggcaaggt

SEQ ID NO: 747624 - DNA, 596 bp, Homo sapiens
aaggtgttcctggatttggtaggttattcacacgttattttaagtggttcattcattttagatgtaatgcacccactgtaaaactgacttaagcattaaagcaattccatttttttcctcactgggccaaaaacaatctctggttcttttgtctttagtggatctgctatggcagatgactttattttaatctgtttttaaaaaatattactctgaaagagaaaataaactgttctcaaggaaatggatatatagtatctgaggaccacagcattgaaggatatgaattaatagtttagtaactttttattgcaggtagtacttgtgatttcggccagaaactggtctgtgctgataaagtacttsacattgactgattcattcatattcatgtagtaagtattaattgaatatgtaggttcgaagcattcattatgctaggtgctggtactttctgaacttccccaatctataactttttttaaaaaatgtttttattgcgcttgtataatataatattaaagttcctggaaatgtttattttaaatggctaggaatacaacatgttcattgtgtgttggagaagtagggatatt

SEQ ID NO: 747625 - DNA, 623 bp, Homo sapiens
atctactttctgactctatagatttgtctatcctaaacatttcctatcaatggaattataaaatatgtggtctttgtgactggcttctttcatttagtatgatgttttcaaggttcatctatgttgtagcatgtatcagtatttcattccctttttattgccacatartattccattgtgtagatagaaaacatttttttttttttttgagacagggtctcactctgtcacccagctggagtgcagtggtgcaaccacttactacagcctccacctccagggctcaagtgatcatcccacctcagcttcccgagtagctgggattacaggtgcatgccatcacaccaagctaattttttaattttttgtagatatggggtctccctatattgcccaggctggtctcgagctcctggcctcaagcaatcctcccacttcagcctccaaaatgttggcattacaggcatgagccaccgcaccttgcctagaacatattttatatttatccattcatcaatttataaatatttgggttatttccactttgggctattttataactaaatatagctaataatatcccacttgtgggatattatgaataatgctgctatgaacatcca

SEQ ID NO: 747626 - DNA, 609 bp, Homo sapiens
catcaccttaaaaagttccctcatgcctctttcctgacaatccccaactcaccccctggcgaaaacaaaaacaaaaacaagaaaacaaaacccactgttttgattattatttactatggtttagctctggaccattgcatgaatggaatcatacagtatgtattctttttttttgtaaggtttctttcactcagcctgatgtttctgagactcrtccctgttattgcatgtatcagtagccagcttttaaaattattgagcagtattccattgcataaatactacgttttatccatttttctgttgatgacatttggggtgtttccagtttcagaatgtctgtctcatgatgattctacactttggcatccctcctaacaatgtatgagagttccagttgcttcatattctcaccaatatttggtgctatcagtagtttttaaattttagccatttaagtgagtatgtagtgttatttcatgttttccttagtcatattttcgtgtccccgatgactaattatattgaatacctttccttgtgtttactttcattttgtatatcttctttggtgaaaaatctgttggaaacttttgtccattttttata

SEQ ID NO: 747627 - DNA, 605 bp, Homo sapiens
gctatttgttaagggagaaatggatgctagataactagaaacacatcagttgccctcttagatacatttaactactctttaaattaacctctcaattacttctggttaatatatgcactgctggatatactgaggagcccgtcctgcttgcttcctcatgcatcattttcttcctctcccattagctacatggaggatgggcaaaggcacttcctgtgattgcctctggtgttcaaccttacactgccatctggagcaatgctgcmttcttctgggaatgcctcacagttgtctgtggtgctaatgaatgccaaggcctttgagagccagagtgcacttcattatacaatgacttcattaagccaaaattatgaaacagtcagtgttagtctgttttgtactgctatcacagaacaccacagcctgagtagtttataaaaaatagaaatttatttctcacagttctggaggctaggaagttcaagagcaagattggactgttggtccaagatcaaggctggcagttttggtgtctggtgagggcctggtgtcctcttccaagatggtggcctgaatgctggatcctctgcaggggagaagtgcta

SEQ ID NO: 747628 - DNA, 536 bp, Homo sapiens
taattttgtatgtaaagcatatttaaatgcatgcatgcatttcatttcaatgaaatgggtaattaagcactgttaattgtaccacgcttatactcggatttaataaggccttggtgtctactgaaaatgcaagtgctggtgccccacctctgacacatgaattccaactctctgtgaatgagcccagagatctgtgttttagaaaactcttcaggtgattctgatgcatgctaaaatttgaaaagcaggttctagaaagttaaaatccagagaagctcactgtatgagtgaaatccaacatgtaaattaaaggaraaaacttagtgtgctgtaagtcaaggattatcagagtttaaggaaaggggaagaaagtgttattttatacaagaaggattcagttataatgcatacattgcttaggttttagtctcacaaagccagctgatgtccttctgctggagaaaaaaatagaatcctcatgggacagggactttaacagtgtgtttgttattacccatctgaacaagactgaaaaa

SEQ ID NO: 747629 - DNA, 628 bp, Homo sapiens
cgggacatacataatgaccccaaaatcaatttccataaaaacgcatctcaatagtacaaaagagaggaccaaggaagttattgtaagcaaggacacacacaaaggtcatctattcatgatagaaaaataatcaaaaataataagtttttgaataaattgtgtggcaggaatagaataatcctaagttgtcaccaaaacagagaaatatataattaacttagcaatcattatttcccacatgtatgactcatttcctaagttctttcatgttggtttccaattgtcccccacagatcacctattctcccccatccactttctctttcctccttttttccygtaacccttagtatgacctgacatcatatcctaacatttttttttgttgactcactgcccccataaaattatgagttccaagaaggcagggatgtcaagaggctggggaaatagctcatgaacaagaagaactgtacctggcacatggtagaatttcacgcagtatttgttgaacgggtaaagttagcaaattagaaaatacagataaaggaacattatccttacctcttcccaccaccactatgagatgatatcacctgcaaatatctgtcagacatttctgtaagtg

SEQ ID NO: 747630 - DNA, 534 bp, Homo sapiens
cattcatgcttaaaaccgtctatcggagtgataagattggtatgatatggtctccacctgacttaaaggacctatgtttgagcgttgttgttctcttctcaccgcagccataatgtgatataccctatgacattcattaggctcttgtagcacacatttgacattagcacagggataaagtagggcagggagtgtggtgacagagctgtgggtgggaagagtgaagctttaaaccctcaacagtacaasttttcccctcccagagaagtgactctaaccaggaattacagggcctctaaatataccttcccataatttgtccatattctctcttccttcccaattctctcttaaatatttattctgtgttaatacaagtgtggtgttctgctgaactgggtggtggtttagaaaatgcatatgaagcccatatcttaaaccttctgttttagtctggaatataagcttaacaacatcttcccccaacacatacataaaaccataatcaatatgggacagctagtgtattagata

SEQ ID NO: 747631 - DNA, 507 bp, Homo sapiens
aatgtaagatgtatacatggaaatctgagcaagaaacggtggcatatgttgatattgtggaattaggacttcagactttttggagccagggagctgtggtgggctggggggtccgctccactgtcacgggcttctttcttaaatacgttctgggtcgatggggagatgttggtcaaaggagatataattacaattcaaaagggggaattttyttttcctaaaccagttttcagacccccaatttttttttaagcccaaataggcaaacaaagagagaggagataggtgactgcttgggctaggggagaggataggtaggtagcggggaaagaagtgaagaatggctacctatggttatggggtttcttttttaggcagtgaaaaggctgtttgtggtgatggacacacaactctgaacacactaaaaaccactggattgtacatttgaagagggtgaattgtatgctatgtgaattatatctcaaagctgttgaaatcataaagtaa

SEQ ID NO: 747632 - DNA, 568 bp, Homo sapiens
tgtagtatactatgtaagcaacatcaattatcaacccttgcaagatgacaacatgagcctgtgggggaagcacttgaggggagggaggagaaacttctcttttttaataatcagccggaaacaatgtttaacaagaatytgatgaggtcactgcagtaaatatttttcctcttacagagccaatcatcacggagggatcccctgaatttaaagtcctggaggatgcatggactgtggtctccctagacaatcaaaggtgtttgctttctgctctgttgcttttaaattgtatgggaaaggaagattggtccgacggcgcgcttgtggcccggccggagcttgcgtgcgcgttctgacggctgggtgctgtgttacaggtcggcgcagttcgagcacacggttctgatcacgtcgaggggcgcgcagatcctgaccaaactaccccatgaggcctgaggagccgcccgaaggtcgcggtgacctggtgcctttttaaataaattgctgaaatttggctggagaacttttagaagaaacagggaaatgaccggtggtgcggtaacctgcg

SEQ ID NO: 747633 - DNA, 568 bp, Homo sapiens
tgtagtatactatgtaagcaacatcaattatcaacccttgcaagatgacaacatgagcctgtgggggaagcacttgaggggagggaggagaaacttctcttttttaataatcagccggaaacaatgtttaacaagaatctgatgaggtcactgcagtaaatatttttcctyttacagagccaatcatcacggagggatcccctgaatttaaagtcctggaggatgcatggactgtggtctccctagacaatcaaaggtgtttgctttctgctctgttgcttttaaattgtatgggaaaggaagattggtccgacggcgcgcttgtggcccggccggagcttgcgtgcgcgttctgacggctgggtgctgtgttacaggtcggcgcagttcgagcacacggttctgatcacgtcgaggggcgcgcagatcctgaccaaactaccccatgaggcctgaggagccgcccgaaggtcgcggtgacctggtgcctttttaaataaattgctgaaatttggctggagaacttttagaagaaacagggaaatgaccggtggtgcggtaacctgcg

SEQ ID NO: 747634 - DNA, 568 bp, Homo sapiens
tgtagtatactatgtaagcaacatcaattatcaacccttgcaagatgacaacatgagcctgtgggggaagcacttgaggggagggaggagaaacttctcttttttaataatcagccggaaacaatgtttaacaagaatctgatgaggtcactgcagtaaatatttttcctcttacagagccaatcatcacggagggatcccctgaatttaaagtcctggaggatgcatggactgtggtytccctagacaatcaaaggtgtttgctttctgctctgttgcttttaaattgtatgggaaaggaagattggtccgacggcgcgcttgtggcccggccggagcttgcgtgcgcgttctgacggctgggtgctgtgttacaggtcggcgcagttcgagcacacggttctgatcacgtcgaggggcgcgcagatcctgaccaaactaccccatgaggcctgaggagccgcccgaaggtcgcggtgacctggtgcctttttaaataaattgctgaaatttggctggagaacttttagaagaaacagggaaatgaccggtggtgcggtaacctgcg

SEQ ID NO: 747635 - DNA, 568 bp, Homo sapiens
tgtagtatactatgtaagcaacatcaattatcaacccttgcaagatgacaacatgagcctgtgggggaagcacttgaggggagggaggagaaacttctcttttttaataatcagccggaaacaatgtttaacaagaatctgatgaggtcactgcagtaaatatttttcctcttacagagccaatcatcacggagggatcccctgaatttaaagtcctggaggatgcatggactgtggtctccctagacaatcaaaggtgtttgctttctgctctgttgcttttaaattgtatgggaaaggaagattggtccgacggcgcgcttgtggcccggccggagcttgcgtgcgcgttctgacggctgggtgctgtgttacaggtcggcgcagttcgagcacacggttctgatcacgtcgaggggcgsgcagatcctgaccaaactaccccatgaggcctgaggagccgcccgaaggtcgcggtgacctggtgcctttttaaataaattgctgaaatttggctggagaacttttagaagaaacagggaaatgaccggtggtgcggtaacctgcg

SEQ ID NO: 747636 - DNA, 555 bp, Homo sapiens
tgccattaagaagcactaactggtctgggcacggtggctcacaccagtaatcccagcactttgggatgctgaggcgggggggatcactggaagtcaggagttcaagacctgcctgccaacatggtgaaaccacgtttctactaaaactacmaaaaaaaaaaaaaaaaaataggcaggtgtggtggtgggtgcctgtaatcccagctactcaagaggctgaggcaggagaatagattgaacccaggaggtggagactgcagtgagctgagattgcgccactgcacttcagcctgggcaacagagcaagactccgtctcaaaaaattaaaaagaagcactatctgtaaaactagatcttatctactaagatattacacagattttttaaagtagtaaaaagtagagaataaaacaatgtctctttagagatagaactccaaagagaaaatattcttatttttataataaagtaaaacctatttaaaatatgaaaggctgaaattttggcattaatctatgtataataagatacaattattaatatgtgaaagcacat

SEQ ID NO: 747637 - DNA, 625 bp, Homo sapiens
tgtcaggcttttagggactgtattgagggataaggttttgttaagttgagaccaattcattaagttttattgcctggtgagaagcagcaatactttattgtaagacttcatcaaatattcatggttaaagagaagtagtaaatgtattcaatcaagtggtcttttgggattttgaaaaggattatgaagtctgctcagctgataacattgatagaggttgtttaacaagggtaattttaatctccgagtttagttttgttgtccagtcttgtctcttttttactgtcacaaatccaggtctgtaagaattgtgtcacattstaaggataaaagaatgatatatccattcatataatttatgttatttcctaaatatgtatattttaagttatcatcttagtttgagtttggcatatgagggaattgtgacccatctagttgtgagattgctattcatttggtcagactctagtctcatctcaccactgctggtgatcttttcatgtcttggataatatgatttctttgacacatataaaataataagcaaccttttgccttggccagttcagactgtcatgaaggggtatagtcagctgtttctgcataatggaaatgtccatag

SEQ ID NO: 747638 - DNA, 599 bp, Homo sapiens
ccctgtggatggacacgcaggctgtttccagttttggcctgttacagatagagttttgaagctggtgcagataggggagagcgctagccagggagcccagaggcccattccctccctcttttttgtgagacggagtttcactcttgtcgcccaggctggagtgcaatggtgcattcttggctcactacaaccctacctcttgggttcaggtgattctcctgcctcagccgcccgagtagctgggattacaggcayccgccaccacgcccggctaacttttttgtatttttagtagagacggggtttcatcatgttggccaggctggtctcgaactcctgacctcaggtgatctgcctgccttggcctcccagagtgctaggattataggcgtgagccaccgcgcccgtcctccctcccctctttgtcttactgttctcttctgaaacatgaagcattggactcacagttcctaggggcccttggctttaacagttggcttccttcatttttctctgttaatgctgtgctcctgtgacagtgagggccaatggcagaggctgggcctgctcaggacctgggggtgctgggctctgcactg

SEQ ID NO: 747639 - DNA, 594 bp, Homo sapiens
agcctgggcatagtcttttcgtaatgctagagacacaagagagatcaagggaaaagtgagcattcctctgaagcttagactaaaaaatagctctttgtatcatcattcctcataactgcaagacattcttatactaagcattctgccactaaaataacaagagtcctttcccaagtttccaataacatattcctcaattctcatgaaacatttaacagcagtrtccctgtagttcagatttctatcaatagtgttcacagagatttaggtttttctaagatgattcacaatttctccataattttcctgacttctttctgatactcattgataaaatctttaatgtccaatttttgctatcaacaatcttttcaaggtactctttttctattttattcttccaaattcttccagactctactcattgatcaatttaaaagttacttcaaaattttaggtgttcatcaagtagtaccccaatttcaggcaccaaataaaatctgtgttagttttttttttttaggttttatttttctattaattgacagataataattgcagatgtttatggagtacaatgtgatgttttaatat

SEQ ID NO: 747640 - DNA, 677 bp, Homo sapiens
ttcagacctagatgactccccacaaattatgaaactccatcatgtggggatgttaggaattcagacctgacttggtttactgaactaactactctttattaggtgagctacttctggagaggtttataagcattatagttaaaaaaaaaaaaagaaataaaagattaaggaaatgacataaaccttcttcaraaagataaataggtacttggtgggagctaaaacatctagtcagcatatatgatgagtgcatccaactccagttggcaacaggagtgagaattaagaacaatactctaggagtttgaatcagtaaataaaatctatattctgtgcctgagttaggatcagttggacacagacacagtagtcagacagagattaaaaatcaacactgtccctagagtggagaccatagactagaagaataagccccagtggatttgctaatatttaatttctgaagtagacacattttcggagatggatggacaactgccctccctaacaggtatattactcagctccacaatacagccagaaaaggactaaactgagcatgttcagtttcttttcccaaactgcaaattagatgaatcattcctactcttacgaggtagaagtgagtaaggggtggagaagtaggtcaggagttctactaggtggatgctcccaac

SEQ ID NO: 747641 - DNA, 650 bp, Homo sapiens
agacagttatgccacctatatgcatgtttacacaaacatttaagtaaaaagcaaaatgctaagttatagcttaaaaaagcaggatacaaaatttcatgcttagtatgatttcaattttgaaagaagatagggctagaaaaacaccttctaaccctaagttatccatgagtgattgaattataatgctgctcactatttttaaatatttctgcattttcaaaacttttcttaattttgctgtgattcatatattaaatttttttaaagggctggataacaaaaactctgtctagcattctagactccattgtcgcaacacttcttttttgctatgtagtaagtagtttcttaacctggctacatatattaaatacaaaattagggaaaaagttttgccattactttcttttggtctttttactttttatatgtgcaaaaaccttaaaaataatttttaaatagattttccttaggagtgtcagcacattcrtcatggttttctgccactaaaatatctttcacaatatccctgactgttttcagttgtaaactatggttcacccttcaagcagaagtgcctctgcgaacagctgggcacagatgcctactgcatctggcctctgaaaaagtaatcatcagagcccagattt

SEQ ID NO: 747642 - DNA, 619 bp, Homo sapiens
tttctaccctgtagaaaagatggaagaagcttatgaatcaaggattttcactggcatgaacttcagccaagaacccaggagagatccctgcattcccctgcattcatttggtcctataattttttaaacttacaaaactgatatattttgaatatagccagttaagaccacctctctctctactctaacttctctgtgatacttttcctcatgctgaatggcatcaggggggccattgccatttttgttacttgactaatgggaagtggaatgggggtataygctgtttgatgggacatgtttatgtgctttgaggtcatttctgcatattgcttagatattgcccatcattttggtgtagaaatggctttcaagtatcactattactgaatgtttaaacttacttgagttatagcatgaaggtatgacataggtcatagttttttttctgaactttgagatgttttctcttatttgggagatattcaaataacttttaaatttgcagcaccttccatgcacattccaagtacatattcactttcacatcaagttgaaatcttctatttttttctcaagaagtcctcttccacctcccctaaaattgcttaagctttca

SEQ ID NO: 747643 - DNA, 588 bp, Homo sapiens
aatttgaaacagtcatttggtatgtttaaatatagagatggttttgggggtggagattggagagaggtgaaggagggctaggaagctattttaatgataaagtgcctcacacaccatgctaagtattagatcttttcttctgaatataatgacaagccactgaaacttttaacacaagaaagttacataagggtatcagtgtttcacaaagttaactctggtgacaatgaggaatatacattgaagaaaggagaagctggaattagagacaccagttctgagtctatttctgtagtccatagaggtaaagataaaggcctatctgaaggcagtgacagtggaaaaaagaaaagaaaaccagtgtcctaactggtctttcaatcttaattttttgcattcttgaacccaaactgctacatatcargttaatcttttctaagcagaaattgaatcttgtcatagacatgtatgaaagcatttaataatgttttattacttatcaagttaaatctttgccttcacaagacctaaattctaccttttattttattttagacatttctgttttgtttttccacaatcagcaat

SEQ ID NO: 747644 - DNA, 609 bp, Homo sapiens
aaatgcaaataaaaaccacaagtgagctacaacttcatacctgctaggatggctataattaaaaagcaataacaacaacacataagaaaacaagtgttggcaaggatgtggagaaataagaacccttctacattgctggtagaaaggtaaaaagtatagtcactgtgatttgttggwtcttcaagattgtaaacacagcaccagcatgttacgcagccattttacaactagagaaataaaaacatatgtccctacaaaaacttgtacatgaaggtttatagctgcattattcataacagcccagaaatgggaccactcaaatgttcatcaacagatgaatggataaacaaaatataatatacatatagtggaatattattaagccataaaaaaggaatgaagtactgctatatttcactctgaagggaaaagtacagcaccaatacaactctggggaaaaagaggaaagatgatatttcaaattttggtgacccatgatgcagggcacagatgcagtttggttcccagatctaagtgagcacaaaggcaacttgggtcctggagaatgaggcaccatgcagtggtgactctggactctggaatggtggg

SEQ ID NO: 747645 - DNA, 609 bp, Homo sapiens
ttttgatatgctgctgggttcagtttaccagtattttattaaggatttttgtatgaatgttcatcagggatattggcctgaagttttatttttttgttgtgtctttgacaggttttgatatcaggatgatgttggcctcataagatgaattagggaggattctstccttttcaattgtttggaattgtttcagagggaatggtcccagctcctctctgtacctctgttagaattcagctgtgaatctgtctgatcctgggctttttttggttggtaggctatttattactccctcaatttcagaacttgttattggtctattcagggattcaacttctccctggtttagtcttgggagggtgtatgtgtacaggaatttatccatttcttccaaattttctagtttatttgcatagacatgtttgtagtattctctgatggtagtttgtatttctgtggggtcagtgtgatatctcctttattttttttatgtttattttattattttctatttttttctttattagtctagctagtggtctattttgttaattttttcaaaaaaactcctgaattcattgcttttttgaagttttttgtgtctcttct

SEQ ID NO: 747646 - DNA, 529 bp, Homo sapiens
aactatattgtgaagacattgttcagagattaaaaaacaagttagaggctgaaagaaaatattttcaatcgatattttataaaggatttgtatccaaaatatataagatccctcaaaactcaggaaaaaaatgagcaaaatacatgaaaagacacatcatcaaagttatatggaaagcaaatacacacatgaaaataaattcaacacttccaaaccacmacgagaattactgtgtacctactagattaccaaaaatgaaaatggctaaacctaccaagtactggtaacgatgcagagtaactggaactcttcaaaattgctagtaggaatgaaatacggtaaagccactctgaaaaacagattggcagtttctcataaagttaaacttcccacatgatctggcaaatccactcctaggtagaaaaatgcaacagcctatgcacataaagtttacaggagctctaataatagtttttagaagctggaagtaacacaaatgtccttcagccagtgaatggataaactgtga

SEQ ID NO: 747647 - DNA, 529 bp, Homo sapiens
aactatattgtgaagacattgttcagagattaaaaaacaagttagaggctgaaagaaaatattttcaatcgatattttataaaggatttgtatccaaaatatataagatccctcaaaactcaggaaaaaaatgagcaaaatacatgaaaagacacatcatcaaagttatatggaaagcaaatacacacatgaaaataaattcaacacttccaaaccaccacgagaattactgtgtacctactagattaccaaaaatgaaaatggctaaacctaccaagtactggtaacgatgcagagtaactggaactcttcaaaattgctrgtaggaatgaaatacggtaaagccactctgaaaaacagattggcagtttctcataaagttaaacttcccacatgatctggcaaatccactcctaggtagaaaaatgcaacagcctatgcacataaagtttacaggagctctaataatagtttttagaagctggaagtaacacaaatgtccttcagccagtgaatggataaactgtga

SEQ ID NO: 747648 - DNA, 602 bp, Homo sapiens
cacatagctctgtggtaagaagaggaaagtgtattgctacccctgccaagtaaaagcaaatgttgtcaggcaatctttactcatcatcaccaaagaaaaggaacattttccaaattgatagcagtatgccaggcccatgggatatgtttaattactccagaagaaaccataactgggacaccagctaaaattggaatcatcccctgattaagttgcatgattcaagtatcattttccaaaattgacttttcttttacacaggccaaacagatgaatttataaacataattatacttgtatcttatgtgtttggtattaatatttgaaactatctcaaratattcagcaggacaaaatatgacttttgagattaataaaaaaagtttttccttacaaagcctagattttaagacatctaactatagatccaaaagactaactctgaaactcaaggtacaataaaaatacaaagataatcttattgttcaagaaatatattttcttctcttccctaagatttaagtcttttattgaaaaaaatggcttacatacaagaaagatacagatggtgataaaaatactcctgttaaaatcacttcctc

SEQ ID NO: 747649 - DNA, 716 bp, Homo sapiens
agcagtaaccctgcctgcctgcctgcaccctccagtaacaggtggatccaactgaagaccttgcagcatccatgtgacccgactccaatctcactcaattacaatccaggaagcagtctcatcagtctgaggacatggcagggggtctttacctgcagaaatcagtatgtaaagacaggaagaagtgtttgttccttcaaataaacagacatcaacacaaggctgtatggatcatgaagaagcaggcaaacatggcaccatcaaaagaaactaataaagttccagtaaccgaccctaaagaaatggagatacatgaactgtatgacaaataattgagaataaccatttttaaggaaattcagtgrgctacaagacaacaagaatacataaatctacaaaaatcagaaaaccaattcataaacaaaataagaatttcaacgaaaggctagaaatcataaaaaaagaactaaacagaaattctagagctgcaggatgcagtgaatgaaatgggaaaaaatgcaacaaagagcttctgcagcaggctctataaaaatgagaagaatttgtgaacttgaagacaggtcaatgaaattatccagttagatgataaaaagaaaaaaaatgaaaaaaagtaagaaagtcaacaggatttacgtgacattataaagggaaactatatatatattatggatgtcctagaaggaatgagagagaaa

SEQ ID NO: 747650 - DNA, 590 bp, Homo sapiens
tctacattaaaggctctttccttcctctggcttctagaaatgatttttcttcttagctttgaactgggacaatttaactatgatgtaccccagtagagcacagacttttcctctttagaattctatatctgagtcattgagcttcttgactctgtgacagtttcttgttttctggatatttgaaaagttgtcagccatcatggcttcaagtataatttctgtcacagtatctctttcctctccttctgtgacatgcttaacatgtatatgaaatgtttggatgttttcatagatgtcgttgaggctctgttgattagttggttcagtctttgtgtgtgtgtgtgtgtgtgtgtgtgtgtgtgtgagagagagagagagagagagagagagtrtgtctatcctgtggtttgtctagtttctattgaattattttctagtttacttttactattgtaatgtctaaggtgatgataaggccatccagtgagttcttccttacagattgtcttttctcagttctttaatttctatttggctctttaattctttttctttctcttgatattctgcaattgtttctctcatggtca

SEQ ID NO: 747651 - DNA, 580 bp, Homo sapiens
tgatcctcccatctcagcctcctgaatagctggtgggagtgcaccaccgtgcccagctaatttttgtacttcttgtagagacagggttttgtcatattgcctgggctggtcttgaactcctgagctcaagcaatcctcccaccttggcctcccagtgctgggattacttactggtgtgagccactgcgcccagcattcatttatcaatagacatttcactgaacagttactgcctacagggtgttattctagctgctgaagatacagtgataagcaaaaaacattgyctgctcttgagaagatcacaaggaagaaatacacatgtaatcagtcaagtatacagatgcagataggtgatatagggctaaaataatggtttgcccaaagtgctatgggaacattgaggaggagcacctagccagcaggttaaggcaggctagtggtggagggcagggaagtctcccaagagtggtgtgggagacacacgaacagcactgaaaggagaagtgactttgccatgtggaagtgaagggcagaggcctctggagagggcatgggagctccttgatgtgatgtcatc

SEQ ID NO: 747652 - DNA, 521 bp, Homo sapiens
ggctgaggtgggaggatcacttgagcccaggaagaccctgtctccaaaataaaaaaagaacattattaaaggtaatgagacaatgagaccaaccatgtgctaaacaagaataaaaatttagagacaaaaatctaataacttaaaaaaaataactatttcattaatgcaacaatacttactgagttctactaacaccatgttgggcaccagagacatttgatccctaggcaaaggtcagaagaaggaagaacrgcttctttcctgaaggagcttacactatggtggagaaggcagaaaagaaatctgggggctgtgaggagctcactgggagccctgaagacaaagtgggggcacggggtgagatgagagggttgtcagccagagaaacagctttcctggacccagcatgggggtggggcgaaaagtcacaacacttatattgaatatttagtaccagttaacttaggtttctatacatgatgcattacttgattaggtaagtgtaaatttacttggttcct

SEQ ID NO: 747653 - DNA, 521 bp, Homo sapiens
ggctgaggtgggaggatcacttgagcccaggaagaccctgtctccaaaataaaaaaagaacattattaaaggtaatgagacaatgagaccaaccatgtgctaaacaagaataaaaatttagagacaaaaatctaataacttaaaaaaaataactatttcattaatgcaacaatacttactgagttctactaacaccatgttgggcaccagagacatttgatccctaggcaaaggtcagaagaaggaagaacggcttctttcctgaaggagcttacactatggtggagaaggcagaaaagaaatctgggggctgtgaggmgctcactgggagccctgaagacaaagtgggggcacggggtgagatgagagggttgtcagccagagaaacagctttcctggacccagcatgggggtggggcgaaaagtcacaacacttatattgaatatttagtaccagttaacttaggtttctatacatgatgcattacttgattaggtaagtgtaaatttacttggttcct

SEQ ID NO: 747654 - DNA, 585 bp, Homo sapiens
tttaagtggcaggagtaattgatcttaatgacttactttgaattaaacttgtgcttaattaacttggatgttctaagtttctagagtcacagacttttagagctggaatattgctttttgaacttcagtgtaaggaagaattgcttatgctygaattgatttgttctgtatcccaatactggactgagtagaaatcaattactttaatattggatgagagagtgattgattgaagatcaggtttttaacctctttttttgttctccttctcacagggagagtcccgtattctcagagtaaaagttgtttctggaattgatctcgccaaaaaggacatctttggagccaggtatgttggctttgtttttatttctgtggacttctgaaaaattgacaagcagttttcaaattcaggcacgcatcagaatcacctggaggacttcttaagacaaagctggctgggccccacctgcagggattctgatttaggaagtgatgctggcccagctggttccaggagcacattttgcacagggcttctggacttaccatcacaacagtagttaacagcctgttcttcacatg

SEQ ID NO: 747655 - DNA, 527 bp, Homo sapiens
taaaatactctttggggacctttcttacattgagaacagaggctgggccacagcttggctaaagcattccagatctctcttctgagcaagagattttgacttgttcataaaccaggctctctctcatagtgggcaaggccttaaaaacaaacaaacctgcaaaacctgaggaaacatcttcctcctacgtacttagctgatgtaggcattaatggaaatggatattggagtgggaggctccttttagggggcagaaaagaaagaaygtttttatttttaattaaaaaaatattttcttttgagacagggtcttgctctgccatccaggctggagtgcagtggtgcgaatatggctcactgcagccttgacctccttgctcaagtgaccctctagccttggcctcccgagtagctgggatgacaggcgcacaccaccatgtctggctaatttttgtattttttgtagagatgaggtctcactggcttgcccaggctggtttcaaggtcctgggctcaagggatcctcc

SEQ ID NO: 747656 - DNA, 500 bp, Homo sapiens
gttgtgagaactttggctacatggaaagtttccttgttgttcgtttgtgtgttttctttattcatacttctttgcctccaaaacatgccagatttttagggaggttaatttcctaaataaaattatttttggggtgagrgggatgggttctgtttgtttgttgttaaccaaaatgtagtgtatctccaccctaaatgttgaggaagctcaaataactgaaatttgaaaagccattgctgatgttgctgtgaatttggtagaaaatgacacaaccctgtcttagttcgtttaggctgccattataaaatatcatagaatgtgtggttttataaacaacataattgatttctcacaatcctggaggctgggaagtccaagatcaagttgccggcagattccttgttgatggaggcctgtttcctggcttatagttggccatcttctcactgtgtactcacctggcaggaaaggcaaggcagctctctggggctgcttttatg

SEQ ID NO: 747657 - DNA, 613 bp, Homo sapiens
agcatgacaggatcaggttttggacgtccgggctagttacagaagtgcttttcaactttcacgtatctgcacagaatgaaaggattataatgatcatctatctatccaggggacaacaaagaaagaaacataaaatgtctaaacctctacttcctacaaaaaacatcagctaatttcactatgtcagttacttcaaaatgctgttgtctagctggctaactcaaagacaaaaatctgtcaatgtcaagaagcctactgtggtcctggagacacatattagaaatcctagaaagactacagtcacttttttttcagagacagggtattgctatgctgcccaggccttgatctcctgggctcaagcaatcctcccacctcacccttccaagtagctgggactacaggtatgtaccaccaggtgtagctgactatggcaattcctactttctattaaacattacagaaatgtaacgcygtgaacattacatcctcaatcctatttcttctctcttaatttatatgtggaatctggtatgttgtatatatcattgttacccttatagcaaattacagggggaatgacttccattacgttttgatacaatagctaagc

SEQ ID NO: 747658 - DNA, 552 bp, Homo sapiens
aagctccatctcaaaaataaataaataaaaataaaataaaaataaaaagactagtaggaaatacatgatttggaaataaaaaatattcactagattgatgatgctaattggctttttacaaacctaggaagaaaaatatgttgcaaacatggaggaaagatgatggcctccttcaacagaactatgagttgtccaagatttcacaaagttcttcaagcatggcatttgatgatgtaagtrcaagaagaacaaaaagtaatgataaggtagaacttattagagatgtatttgaaatatggaatcagtattaataagatggaaatgttctagattcacgtataacagttgatgaacagttagctgcattttagcacattactcatttggaatacatcatggaagaagaatttgggtatactatgcttaaattcttattaaagtattctaataaagctgttctccctatccttttattgttctgtacattatttgtaaagtgaaaactgcacaaacattacaaaagagccattggatccagacaacaaacagtaa

SEQ ID NO: 747659 - DNA, 656 bp, Homo sapiens
tagatgaggaaatgagagtgcaagggagttcggccacattcccaaagtcttatagctaataagcaatggaaacatttcttgtaattattatttaaaaagcaaagtggaaaatttgatcaggaggggaaagatatgaaaaaatattcaaattaatttgagggcatatatcctttatactctcatcacatctccaaaagagatgaagcatgcccctcccagggctgttaattttcctaccatccctgctactttaaggcttctcccactgttgcagggccctgaattccaggcaccagccttgacgatgcttgcagagcctgccggtgtcctgaaaaaggtactcggttcagtcttaccctttacawcataaagagatttctcaaatacagtatacgttattgatagataatatttatacatatttatggggtacatgtgatattttgatacatgcacagaatgtgtaatgatcaagttggagtatttaggatatccatcaccttgaacatttatcatttctttgtgttgggatcattttcaatcttctagctaccttgaaatatacaatatatacaatatattaagtactatgctattgaacactagaacttattccttctatctaactgtatgtttatactcattaaccaacctca

SEQ ID NO: 747660 - DNA, 621 bp, Homo sapiens
gtatttatcccttaaaacaggaaattaatatattgaagtgatatctgcactccagtgtttagcactactcacaatagccaaaatatggactcaacctaagtgtccatcaatagatgaatgaaaaaatgtaaaatgtggtatatacatacacattttgtatgtaagtgcccatcaatagatgaatgaaagtacccatcaatagatgaatgaaaaattttaaaatggggtatatatgaacaatgaatattattcatccataaaaaaagaatgaaatcctgtcacttgcagcagcatgctgcatgcaactggaggtgattatgttaagtgaaacaaggcacagaaagacaatttcacgtgttttaactcagatgcaggagttaagaaagtggacctcttgaagacagagactagactcatggttaccagaggctaggagggtaggggtgaggtgggtatgaagagaggttgattaatgggtacaraaatacagttagatagaagaaataagactattgttcaataaataaatagcagcactaaacaataatctatcgtatatttcaaaatagctagtagagaataattcaaatgtccccaacataaagaaaatggtttaagacg

SEQ ID NO: 747661 - DNA, 646 bp, Homo sapiens
agtaggaagattcctagatgtcatggttcaaagactcccagttgagtcagaccatgacaccaagagtatagaccaaattggacagacagtggttcagaatagagctgcttaagatataatattggcctctcaagggggatgtgctgttttacagaaagaatattataggtacatccatgctgacctgtcttggatctttaatagcaygaaaaagactcagaagcaaataaaaaaaatttgggtaatgtagctaataaccccatatgtagtgctgtgggctcttctcatttggtatgagatctcatctcttcgtttaatatgggctgtctcagctcctagatgaggatgtcactacaaactctgatcataatccttctcttggtatttttgccacagtgttcagatgagtgatctccagagtctaaaatgctgctgtgcagtctctgtcccatgatgtgatctaacaaattatcatcaaacagaaagagcaagaaaacttgaacttacagaggtagaaacaaccacacccagatacttatatgcaattgtgacacctcagacactggtgaatatctggattgatccatcacacccctggatgtaaatgatctatcattcaactcaggctaaagaatggccacatggg

SEQ ID NO: 747662 - DNA, 634 bp, Homo sapiens
agtaatcttgtggcctctggctgaatgattcctgagccataatttctaatcttatgactaatttgttagtttaacaaaaggcaatctggtctccggcaagaagggggtttggttcgggaaagggctgttattatcttttgtttcaagttaaactataaactaagttcctcccaaagttagtttggcctacgcccaggaataacaaggggagcttgcaggttagaagcaagatggagtagttaggtaagctccctttcactgtctaattgtctcaytgttattatttttgcaaaggcggcttcatctgtgtccaaatttcctcttcttaaaaggactccagtcagattggattagggcccaccctaacagcctcattttaacttcatcacctatttaaaagccttgtgtccaaatgcagtcacattctgaggtacaggggttatggggcttcaatatgaatttcgggggacacaattccttttttaacatatttctttattaaaaatagtaattcattaacaataagaaaacaaacactattttttagtgatgactatatgccagtgtggcataagaagaaatatatatttgttctctgcctcagtttctggaacagtagcttctaaaacccttg

SEQ ID NO: 747663 - DNA, 469 bp, Homo sapiens
gtcctcaaggaaatcacttctcagttttccatctgctattctactacccctcagggattgttcaggcctcctccctttcctacacatcaagctcagggatttgcccctgcccaggactggcaaattgagtttactcacatgccccgagtcagaaaactaaaatayctcttagtctaggtagacactttcactggatgggtacaggcctttcctacagggtctgagaaggccaccgcagtcattgcttcccttctgtcagacataattcctcggtttaggcttcccacttctatacagtctgataccagactggcctttattagtcacatcagccaagcatttttttcagactcttagtattcagtaaaacctttatatcccttacagtcctcagtcttcaggaaaggtagaacagactaatggtcttttaaaacacacctcaccaagctcagccaccaacttaaaaagg

SEQ ID NO: 747664 - DNA, 504 bp, Homo sapiens
tgtccattcaagtttgatcatgagattgcagcaattcagtcacatctttaggttgtatttgtaattctagttttcttgctccgcagttacttcctcccctgaagtctttgaagtgttgaacccttcaaagtgatttacgagggttagaatcaacttcttccaaattcctattgatgttgatattttaacatcctaccatgaatcacaaatgtttttaatggcatctagaatmgtggagcttttccagaagattttcaatttactttgcccagatccatgaggagaatcactgtgtatggcaggtgtagccttacaaaatgtattccttaaataataagacttgaaagccaagattacaccttgatctatgggctgcagaatgaatgtcgtgttagcaggtataaaaacagcattaatctccttatacttctccctcagagctcttgggtgaccagacacgttgtcaatgaacagtaatattttgaaagagatcttttttttttt

SEQ ID NO: 747665 - DNA, 589 bp, Homo sapiens
aaataaagtatatacagtttgactaaataatcatgtcttacagaaaagtcagggcctaagcaaagttatgaaattattgaagtgtgattagatatattaatcaggttggattaggttatgctgcataataaactcaaaaacacagtggtgacttagaacgaaaggatttaatttttctttcaaggttcatgtcctttgagaattttctgggagactcaaagcaaaggctgaatgaccaccttctggaacattatattaccacatcagagggaaaatggacaacagagggcctttatgctctggtacaaaagtggcacactctatttccattcacattccttggccagaactagtcatacggttcaccaacaattagggccataggaaatgcaatcatayaaggtgtgcagaaagtggagagcaggagcacacctctaatgactaccccattaagatttaagaagattcctaacttacagaaacttccatattctccttttaggagctctccccttcagatttgacttgcatatcatttttgtagaaatttaaatatttgttgatagaatgcagaattgtaacaataaac

SEQ ID NO: 747666 - DNA, 576 bp, Homo sapiens
ggtactggaaaataaaagccattattttccgcatgtaaagcattttacatcaaagaaaaagtaaatttaacaatagagacttcactctgaggtgcttacaataaaatacctcgattgttcaaaatctcattgttgaaaggaagacatacgtcaaaagaaatgataatatttgaccaagttatccctttgcctttgtaactaccactatcagcactttgatttctttatcagatgtcacattaggttttctccaaaaaatgaatgacaatacatataagagcatatraagcttaattattttaaaattaaaaatatcatactcaaaaagggaaagagagaagaagagaagtaaaaatataaatccagtatgaaatacagtattcaagaatcctgcaacttggtaaatattaatacataaagcaacactgtctataccctgagtgaatatgttttatgtgaatattgctttcaggttcttctcaggcaagagaatgaatgagagactcaatttggacactatgtgagaattgattgcttaatgccttttaaaatctctttgaaaatgaattggtcaat

SEQ ID NO: 747667 - DNA, 592 bp, Homo sapiens
ctcaatgttttaaatattttattcctcctgttattgcttgcatggtttccgaagagaagttggattaattcttatcttcattcacctagagatgagtctataggtaagatgtttcttccctctgattctttcaggactttttctttatttttgattttatgtaatttgcaaatgatatgcctaggtttttgcaaatgttatgcctagatttttcgttttgtttttcttttttcttcttcttcttcattatcccacctggtgtcctttgagctttctggatctgtgggttggcgtctgacattaatttgaaggaaattcttggtcattactgttacaaatatttcttctgttcctttttatttgtcttcttctttttcatctttgttacctttgttgcctttcggctttgcaaatttctattgagttatgcttaaggtcagaggttcytttctcgactatgttcattctactgataagctcaccaaaagcatttctgttacagcacttttaatctccagcatttcttttttcggttctttctcaggatttatttatttttgcttacatttctcatctgttcttgaatgctatc

SEQ ID NO: 747668 - DNA, 611 bp, Homo sapiens
gaaatatctctattgtagtcaaaatagcatagtagatttatctttgtgtttccagcagttttgaggtatataatgtatacttccttgagacatgattttcggtttattcattagaaatccaaagatttttacatcttatctaactatagaagcagaggataaatgcctgattataaaaatcaggattattatagcaacctatttgaaaaacaattctcaagtgacataggctgcaaaaaccattgaaagatatttccttggctttggtcacggtagattcacatctggcatttggtcaatcactcattaaatattaactagctttatttatgcamtttcaaggctccttttaccctttgaaaggtttcaaatgtgcatgtaacagttgatgacatattaactatttaagtaaaagacacttgaaaacagcaagtacaaaaaatcactttgaccttcatgttgttttttaaaagcaaaggatgagattcccatgtgaaagacatgaaagaccctcttgatatgagaaagaagcaacatctttatttttcaggaagagaagtcaaaagcaagagaattttgtacagactttgttgagatgtctcttatctttt

SEQ ID NO: 747669 - DNA, 590 bp, Homo sapiens
ctctaaaatacaaggagtaagtagagactggaaggggataaaaatgtgaagattttggtagccaattataacaggtttgtaaacgtatatgaaatatgaagtgttcaaaaatttcagtatcattttatttatcattgcccacttttaaaaaaatgagataaggtctcatgatgttgcccaagctgttctcgaactcctggcctcaagtgattctcccacctcagcctcccaaagtgctgggattataggcaggagccaccacaccttgccccaactttgtgaatagaatgtactggctgaataggaaggaacaatgtctttttttattccagctgctgcttgcctcttccttttcatgctaycaaagcggagttcagcacaacagaaacagatggacagaaagtttcagaagacatgggattttaaaaaccaccgatctgttaggaaacagccttgtttcctcatttccacggaagtaagggtttattggaatctatggacaccacagaaaaccaccactcctggtactgctgccctctgtctgtgtccaaagaaatggatttcaggtcctgcttccatttgataaagga

SEQ ID NO: 747670 - DNA, 631 bp, Homo sapiens
aggctggagtgcagtggtgcaatcttggctcactgcagcctcaacctccagggctcaagtgatcctcccacctcagcctcccaggtagctggggctacaggcctgcatcaccagtcccaggtaatttttgtatgtatatatatttttctacaggtagggttttaccatgttgcccaggctggtcttgaactcataggctcaagttatccactggtcttggccttccaaagtactgggattatagtcatgaaccactgcgcctggcctcgtggtcaaatttttatggactcataaaattcacatagatacagggttagttaagatgttgggctgcagttgacccaaatacttgactgaaagtaacgtcaacaatagaaatgtattcattaaatatataacatgtaataagaaggctggagatgacagttctaggattgacagcagtttagcagagtcagggctttggattgacttctcttgaycttgccttcccggcatagtcacaggatggctctaccagcttcagtcataacttcctcagataactatgttcaaaagcttgaagcaaggaaatgagctgcttctcttcacgtctctcttttcaaggggaaacaatatgcttcctaggaga

SEQ ID NO: 747671 - DNA, 605 bp, Homo sapiens
gatattgcactgaaaacagtttgcagaaatgaggacccaacaacgcactgcaatacccagttatgaggcaaatgtatcttggcaaccaggagtggaacaagttccaactagctgtcaaaagttctaagggcaataatggattcttgagctaaggatatctcaggacaagaaacaataattggggctgggggatgacaagattgaagctctgtaaaactaataaagcataatcaccaattcaaacttttgtgaggagataaaaaaatagatgaacattcattaactgtttaactcacacttcattttgtgaattcgacttaaaaataaaaaaactacacaacgaataaaacaacaaacatactaaaacaaatggttacttacgcccaaaagtcttcaacagtatcaaacttggagatcagccgcaggtttgcttgccaagttttgsttttatcatttttaaaaaaccagagtgcccatctaaaaataaaaaatcagtgtcaaaaaatggtagctgcatacccatgttaaaagcaacattattcacaaaagtcaaaaggtagaagcaacccacctgtccatcaacagatgaatgaaaaatgtatata

SEQ ID NO: 747672 - DNA, 583 bp, Homo sapiens
aaagctataaaatttctagaagaaaatataagagaatcttttagtcaccttagatcaagcaaaatttactaaatagtactcaaatttcatagactataaaaaattgataaatcatactttgttaaaatcttaagatttttcttcttcaaaaaacactgttgagaaaatataagggaaagcttgggtctcactctagacytacaaaatcagtatctccaggaatggggttccacatgtcattttgaaccataactgttaagaattattgcctcggttctcaaattaaaatttgagaatttcaatatatagtaccatattgatggcctccgcataggaccaaagaagactcacagggagaaatagaagacagatattctctacggtaaatgagaaaattagatctagagaagaaaaaaaactaagagattgataaatactggcttgcaaatacatgaataatcactgtgcagtgaccttggcacagagtcactgcatagtgactaaaaaaaaaataggggttgatattaggtttcaaatgagatactggaatcttctcaaatattcattaaggtaagttattcct

SEQ ID NO: 747673 - DNA, 662 bp, Homo sapiens
tcctgatagcaaaaccagacaagcatgctacaagacaagaaaattacagaccaatatccctgatgaacatagatgcacaaatcttcaacaaaataatagaaaacccaattcctgccactgcactccagcctgggtggcagagagagactctgtctcaatttaaaaaaaaaaaaaagcatttgacaaaattcaatatcctttcatgatgttaggtatagaaggaatgtacctcaacacagtaaagaccatatatgaaaagcccacagctaacatcatactcaatgatgaaaagtcaaaaactgttctaagatcaggaacaagaygaggatggtcactctagtcaagatagtactggaagtcctagccagagcaataaggcgagagaaggaaataaaggacatccaaattaggaagaaaagaatgaaattatctatttgttgatgacctaatctgatatatagaaaatctaaagactctacaaaaaaaactgttacaactgatgaattctgcaaattgcaagatgtaaactcaacatacaaaaatcagtaatatttttatatacaaaaaaatgaattattcaaaaaactaggaaaacaatcctatttacaagaaaatttttaaaataggataaaatacttaggagtaaatttaatcaatgaggc

SEQ ID NO: 747674 - DNA, 641 bp, Homo sapiens
gggccctgagcctccaaacccaccaatatgtatccgatccagacactaatctgggtgccacatctccccaggaggccccttctccctagcttcccttcccagaactcaagggccacacttgctgcaaaggacccagaggaccaagcaggtggcttgcattctgcttactgaaagaggtctggttgggtgacactcatggctttagaggtggcaaatcatcttctctttggaaagaattcatcagtgacagagggagaatagcagttcacaaatgggcgctctgaaaactgcccttcttggttcaaccctgaagcacagcaggcctctctgcctcaccttgcccatgcctgagtgagcgtggccaatcttcaccaccacagggaacgtgggcagtgtcagctgaaatcagaagagaaatgaataaactgtcagagtgtgcccatctctccgtggaatcctacacatatttttcttgggaatacccttgggagggttctttaaagaactagtccaatctacttgctttacagattaaaaaactgagacccatggaatgacagtgagttcccagggtcacasagcatattagtggcagtgctacaagaaccctgtactcttatttggtataccctacatcttta

SEQ ID NO: 747675 - DNA, 589 bp, Homo sapiens
ccaggatgcatagcatgggtttatgaattccctatctttgcagcacatcctttatttctggcttgcatgggacttgaaagcctaaaacaactaaatgctaagaaaaattatttttaaaatgatgacaaaaatattttctatttcagatgtatagatctgcaatccagaaactatgaatttttttcagttgagtagtctgtttgccaaaaaataaaaaaaaataaaaaataaaaacttgcctaagtktcttctcttacattttatttaggatttgcccttagacattatttagtgcttttctgaccctgtagggacggtgagaataattgaaacactagtttcttaaaatttctgttaaaattggttaaaggccatagaattttttttttaagctaagcatgttatagagaggtatcctataagaagcaaggggcaggtaaagactttagagatgtatagtccagtgtgttaattaaaggatactacctacttctaattcggtatgtattaatcttttctgatatatctgttaaagtactcttcgcatatttttaaaaaattggcattttaaagtatagtctttgatggt

SEQ ID NO: 747676 - DNA, 589 bp, Homo sapiens
ccaggatgcatagcatgggtttatgaattccctatctttgcagcacatcctttatttctggcttgcatgggacttgaaagcctaaaacaactaaatgctaagaaaaattatttttaaaatgatgacaaaaatattttctatttcagatgtatagatctgcaatccagaaactatgaatttttttcagttgagtagtctgtttgccaaaaaataaaaaaaaataaaaaataaaaacttgcctaagtttcttctcttacattttatttaggatttgcccttagacattatttagtgcttttctgaccctgtagggacggtgagaataattgaaacactagtttcttaaaatttctgttaaaattggttaaaggccatagaattttttttttaagctaagcatgttatagagaggtatcctataagaagcaaggggcaggtaaagmctttagagatgtatagtccagtgtgttaattaaaggatactacctacttctaattcggtatgtattaatcttttctgatatatctgttaaagtactcttcgcatatttttaaaaaattggcattttaaagtatagtctttgatggt

SEQ ID NO: 747677 - DNA, 580 bp, Homo sapiens
aaaagcctccaagaaatatggagctatgtgaaaagactaaatctacatctgattggtgtacctgaaagtgacgaggagaattgaaccaagttagaaaacactcttcaggatattatccaggagaacttccccaacctagcaasgcaggccaatgttcaaattcaggaaacatagagaacaccacaaagatactcctcgagaggagcaaccccaagacacataattgtcagattcaccaaggttgaaatgaaggaaaaaatgttaagggcagccagagacaaaggtcgggttacccacaaagggaagcccatcagactaacagcggatctctcggcagaaactctacaagccagaagagagtgggggccgatattcaacattcttaaagtaaagaattttcaacccagaatttcatatccagccaaactaagcttcataagtaaaggagaaataaaatcgtttacagacaaataaatcttgagagattttgtcaccaccaggcctatcttacaagagctcctgaaggaagcactaaacatggaaaggaaaaccggtaccagccactgcaaaacatgccaaa

SEQ ID NO: 747678 - DNA, 642 bp, Homo sapiens
gcagcaaaccaccatggcacacatttacctatgtaacaaacctgcatgtcctgcacatgtatcccagaacttaaaataaaataaaatatatattaaaaacagctatgtggggaaacgttatttcttttcactgactgagctcagagttaggtcaaataaagacaagctctgcaaatggattttcaaggraacttgtagaccagtaaaatggcagcaattcttagaggataaaaattttagagaggtccaatcatgttctgttccctccagtgactgattgcttggctgctagttttcacatttactgatttctctctttctctctgttgtaacaaattaacacaaacagtagtttaaaggaatacaagtgtattgtctttcatttctggaggtccgaagtcttaaatgattcctcacagttattgttccagaaactatataaagaatacttgtttgccttttcgatcttctaatcttctgaccttgtgatctctcataaggacctttgccattacagaagacccacccagatggtgtggaataatctcccatctagagatccttcaattagtcatgattgaagctacctttttccatgtaggcaatacatttatgatttccagggagtataatatgaacatg

SEQ ID NO: 747679 - DNA, 642 bp, Homo sapiens
gcagcaaaccaccatggcacacatttacctatgtaacaaacctgcatgtcctgcacatgtatcccagaacttaaaataaaataaaatatatattaaaaacagctatgtggggaaacgttatttcttttcactgactgagctcagagttaggtcaaataaagacaagctctgcaaatggattttcaaggaaacttgtagaccagtaaaatggcagcaattcttagaggataaaaattttagagaggtccaatcatgttctgttccctccagtgactgattgcttggctgctagttttcacatttactratttctctctttctctctgttgtaacaaattaacacaaacagtagtttaaaggaatacaagtgtattgtctttcatttctggaggtccgaagtcttaaatgattcctcacagttattgttccagaaactatataaagaatacttgtttgccttttcgatcttctaatcttctgaccttgtgatctctcataaggacctttgccattacagaagacccacccagatggtgtggaataatctcccatctagagatccttcaattagtcatgattgaagctacctttttccatgtaggcaatacatttatgatttccagggagtataatatgaacatg

SEQ ID NO: 747680 - DNA, 543 bp, Homo sapiens
gaacttgcataggagggcttgcctaagacatggcctcactgcatagataagacaggccacacagctgacttgcccagacatgtctgcaatggaaaattccatcccctgacacatgtgcagtaaggggaacaaagcaatatggagtaactcaaggtaagggcctgcatgcacactaggaggacagagtggagctatcagaaatttgtactttatgcaaattagatgcccagccctcattggtttcttaaaaaagcctctgtattcaactgtaaaatggcaactcttttctgggacccttctctgtggcagagagctttctctctttcttttgcttattaaactgctgctctaacctcacccttggcatgtcsccttcttgattttctcagctgtgagacaaagaacttcggaaaaatttagtttgtagtttaaaagagaatagcccttaccagaacaaaactgtctctataaatctaatgaaaggccaccaggttaaaaggatgaaaggggcctgaactctgctaagatgtaggtgtaattaaa

SEQ ID NO: 747681 - DNA, 621 bp, Homo sapiens
attataaatatattgtttttaaaaaacaattacaatggaactataagagatttcaaatattaaaatttgatattttgcccaaaacaaaattaaaacacgataagactatttgtttcacaaatatataaagcctagcattaatgaacaktatgagacactgggctagacttcttacaaacatttctcatctgattccagtgccacacattataagcccaaaggtacagatgaaaaaaatcaatgctcaggaaggttaagtaacttgacagattttacaaaactgttagctttttgtcgaccttccagaatgaagaatatgagtgggcaggaaatggcacaaggaaatcacttttaaaataaggaaataaaatgggaagccaaaaaactaggggagagatgcttttattcctttaagacctgaattaataatattctcatcaatattatgtactctttctatttagaaaggtaacatataaacaactttaactcttttatccactgatagtatatctgtggtgttattctgtggttatctttgtggttattattccacataatagataaagtagccaatgtgtaagcctgaaaaaatacctttgagaaaaagtttacattata

SEQ ID NO: 747682 - DNA, 635 bp, Homo sapiens
acattatattggagtaattaataaaaaaactttattaaacataaaagatttggaaaatattttccaatatcaataaatcataaaagcagtttcggtctaccatttcattgcctcttcaatattaattttagcttaaccaaataataaaataaaataaaatgtcagtattcattttggcacctatattatattcttaagtacattgaatgttttaaactataccatatttttaattatgttgaaagctagctgtagaaaatacatagaaagactaatagagaattaaacagttgttactttttaaaatccagttacatatgcctaggtaatatatatgtttaataagtctttcatgctgcagatggcagcaacacttcacattatgatggcattgcttagctacaccagcagaatcttgaaaatacaaatttctattgagtattcattttgttctttctgtaatctgrgaaataaaacacatcaattttgtgtgtagaagggtaaaatttgatgttatgtttttaataaactgagaaacactatatttgttaatgtattatgcacatgatgaaagtttagtaattactatttttaatgagcagactgaattgatggacagtttccatcaatttagt

SEQ ID NO: 747683 - DNA, 567 bp, Homo sapiens
gccaatgtctcaatagcaagatgattttctcatttatttaactttgggcagagtggtagttatcactctgattaaaggtcactgttggtcatgagaaatggaaaaaaaagaagcagacctatgtagtcaaataaaaataagcaaatcatccctcacttaaacgtggtggtttctatgtgatgacactgtatattatccattttaaacagaacgttaaccttgccatctaagtctgattgccaaagcatatggatccttcttaaatctgaaatatcatctgccaatgctcaaggccaygttcagaatgtctgacatctttgaattcctacaagaagcccaattatgcaaagatagttttgagaaaattagtataatatgtactacccagttatgcttctctgtggtctctccttttccctatattaaattaggtcactagaagctgcaacatattaatatttgtatatttactgtaatacattgtagaatttcattagagtagctcttcaacaacagatggtctacttttacaatccaaattttttcattgcaaatgtttaaaaatca

SEQ ID NO: 747684 - DNA, 627 bp, Homo sapiens
ggtaatggagaaataaaggtgtatacaactgtcactaatagcactgacctaaagcctacaaaaaatccactaacagaagtctttcaagagtagtagcacaattactaagtgatttgttttaaaatataaaagccaagtgttctctttataagttaaatttttgttcatttgtttgtttatgagtttggagtttttttggtaaccctgaggaaaaaaagaataaatcctattttgccaaaatgtttcaaaaccccttaacatgtattaaaatgaatggttgttttaayttagaaaaaaaattctggttcaatactaaacttctttaagatttactgagggtgtttaatattagaacaactgttttggttcattacattttttaagaggttctaaactcgaatcagtgaaaactcactcaagcttctaactgcaaaagcgggctattttaaagtaatgtgaaaactttacaattttacaattttaaagctcttcttcatataaatttttgtggatgcctctgaagttttgcatttccctaatgagataatacttacaaataggctaaaaactctataagatttaaagactaatacacatgagttttataagtctaaacttggtttgtac

SEQ ID NO: 747685 - DNA, 645 bp, Homo sapiens
atatttacacctggctgtctcagaaaaaaataaaaaaaaccttgtatgcatatttattataattgattaaaatagctaatttgataatgttttaaaaagagttggtttaatttactgagaatatcatagacttggatgtcaaaaacatggtctttgacctaactttatctctaattaatgatttttgtctgaagcaaccacctagctacccaggatttcagttttcacatctgtaagatgagaaaggtaagtattcatgctgtttggaagaggcagagatctgtagctattcagttcctacccaccaaagaatgcaagaatggtcatgttatatccgagaagactgtccttcttaattctttcaggcagattcatgaaggaaatgcattatacaatgaaagagaaaaaaaatgctacctagtcagataaactacacttaattgcgtgatggctggattgccctaatcagtattattttggattagatcattcytaaggtttccttcagttccaagtaaataaataattcacttacttttgtcaagaaaacataaaggaagtcaaataaccagttcacatagtctctgaatttaacagaccagctttataatcaagcttcttttcataatattaatacaatagtta

SEQ ID NO: 747686 - DNA, 526 bp, Homo sapiens
aaaaaaaatgtttaaaatcacaaattggtataaaacaagtggaaaactctacaaactagggccataagttatattaaattagcaaattaaactaggaattagggattacagaagaatcaaccaaataaattgccatggttcttttttctttaggatcaaatagcacctacctgtcaggaaataaacaagccagtgaaagaatgtataaaaagtgggatagtccatgaaggtagggggtggaragtgagttgatgagtttgccagggtcatgaagaaaagcttactttaaaattgagtgttgtaacttagggctacttgtttccagggctccaaagttcattgctaaaaagacatgacagggttatacaccatagtgttcatcttgtgggctttttcctcttttttcttaaaagaacatggtatcatttcctcttctccagcccactctgaaacagaaacaaatattcaaatctgaatggccatttttaataaagttttatagtttaaaacttatatatataaagtc

SEQ ID NO: 747687 - DNA, 526 bp, Homo sapiens
aaaaaaaatgtttaaaatcacaaattggtataaaacaagtggaaaactctacaaactagggccataagttatattaaattagcaaattaaactaggaattagggattacagaagaatcaaccaaataaattgccatggttcttttttctttaggatcaaatagcacctacctgtcaggaaataaacaagccagtgaaagaatgtataaaaagtgggatagtccatgaaggtagggggtggagagtgagttgatgagtttgccagggtcatgaaraaaagcttactttaaaattgagtgttgtaacttagggctacttgtttccagggctccaaagttcattgctaaaaagacatgacagggttatacaccatagtgttcatcttgtgggctttttcctcttttttcttaaaagaacatggtatcatttcctcttctccagcccactctgaaacagaaacaaatattcaaatctgaatggccatttttaataaagttttatagtttaaaacttatatatataaagtc

SEQ ID NO: 747688 - DNA, 626 bp, Homo sapiens
taatggtggacgtccctccccccatcaagctcaagtgtcccaggttgacttcagactgctgtgctgtcagggagaatttcgagctagtggatcttagcttgctggtcttaatgtgtgtgggatccactgagctagaccacttggctccctggcttcagcaccctttccaggggagtaaatggttctgtctcactggcattccaggcaccactggggtatgaaaaaaactcctgcagctgagctgagtgtctgcccaaacagcgcctagttttctgcttggaacccagggccctggtggtgtggtggtgtaggcacctgagggaacctcctaatctgtgggttgtgaagaccatgggaaaagtgtagtatctgggccagaatgcaccgttcctcttgggacagtccctcatggcttctctcagctaggggagggagttccctaaccccttgtgcttcacaggtgaggtgatgcctcacmctacttcagctcatcctctgtgggctacacccattgtctaaccagtccctatgagatgagcagggtacctcagttcaaaatgcagaaatcacctgccttctgcgttgatcttgctggaagccacagaccagagctgtttctatttggc

SEQ ID NO: 747689 - DNA, 540 bp, Homo sapiens
taacaaccgtcacagtatttattctatagcctcacaaactcacaaatcgggaatccatactttaggatttttcccagctgcatgttccaagcttatgttctgtccacagatcaggagaaaactgtacatttacttttaacttctcagactcaattcactctccgcytatcaaataaactgtttgctcccctgtgccaaagagaagtacaagttacatcctcaattctgtaggaaattgctttgtgttcttttatgtgatggtcagtcaagagtggccacaagaggagacaggagaggctcaggaaagaagaaactttattatattcacagatcctagagagaggaggcacagcacaccgtgtagtgctatgtgggaaagacaccagggtgagcaggaggcagaagacaggagtgaggggaaagtttagacaagagcctttaactgagattttcaagggaaagacaaggcaatgcagcataaagagtttcacattggctagtttgaatagttttggtgggctctaagctataatggtggtc

SEQ ID NO: 747690 - DNA, 600 bp, Homo sapiens
ctttgttaaatttatgcctatttctttttaaacaattttaaatgttattttattttcaattttcttgttcattgtgttcattgttagccttaaaaatacacataaattttgtatgtttatcttgtattctgtaataactgagttcagtaactagttctagagtttcattttgttttgtttagatatcttgagattttctatgtagacaatsaagtcgtctgtaaaatagagagttttattttttcatttttgttttgtgtcccatcaattttttcttgcattattgcattaacaggaacttctagtaatatgcgaaataacagtggcaagaatagagattttggcttgttcctcatcttagggggaaaacattcagtctttcatcatcaagtagaacaagctgtagagttgttttcatttatgcttttcagtagaaactctttataaagttgatgaagttcccttccgttaacatttttcagagaatttttaacatgaataagtgatgacttttgttaaaggcttttttctgggtcaatcgttaagagcatatgcttttcttctttagcttggcttgttaatatgctggattgcattact

SEQ ID NO: 747691 - DNA, 600 bp, Homo sapiens
ctttgttaaatttatgcctatttctttttaaacaattttaaatgttattttattttcaattttcttgttcattgtgttcattgttagccttaaaaatacacataaattttgtatgtttatcttgtattctgtaataactgagttcagtaactagttctagagtttcattttgttttgtttagatatcttgagattttctatgtagacaatcaagtcgtctgtaaaatagagagttttattttttcatttttgttttgtgtcccatcaattttttcttgcattattgcattaacaggaacttctagtaatatgcgaaataacagtggcaagaatagagattttggcttgttcctcatcttagggggaaaacattcagtctttcatcatcaagtagaacaagctgtagagttgttttcatttatgyttttcagtagaaactctttataaagttgatgaagttcccttccgttaacatttttcagagaatttttaacatgaataagtgatgacttttgttaaaggcttttttctgggtcaatcgttaagagcatatgcttttcttctttagcttggcttgttaatatgctggattgcattact

SEQ ID NO: 747692 - DNA, 600 bp, Homo sapiens
ctttgttaaatttatgcctatttctttttaaacaattttaaatgttattttattttcaattttcttgttcattgtgttcattgttagccttaaaaatacacataaattttgtatgtttatcttgtattctgtaataactgagttcagtaactagttctagagtttcattttgttttgtttagatatcttgagattttctatgtagacaatcaagtcgtctgtaaaatagagagttttattttttcatttttgttttgtgtcccatcaattttttcttgcattattgcattaacaggaacttctagtaatatgcgaaataacagtggcaagaatagagattttggcttgttcctcatcttagggggaaaacattcagtctttcatcatcaagtagaacaagctgtagagttgttttcatttatgcttttcagtagaaactctttataaagttgatgaagttcccttccrttaacatttttcagagaatttttaacatgaataagtgatgacttttgttaaaggcttttttctgggtcaatcgttaagagcatatgcttttcttctttagcttggcttgttaatatgctggattgcattact

SEQ ID NO: 747693 - DNA, 756 bp, Homo sapiens
acttgaattcttagaagcagagaatagaatggtgacttccaggggtgaaaggatgataaatggggaaatgctgtccaaaaggtacagggtttgaattaaccaggaggaataatttctagggatctgttgtacagcatggtaaacattagttataatgtcgttttttattatacttaaaaattgcaaaaagtttggatttgagtggtctcatgacacacaaacacacacacaatataactatgtgaggcagtggatgtgataattaccttgattatggtaatcatttcacaattgtattcatctatcaaaacatcacattgtacaccatacttacatacaattttacttggctattataccttaagaaagttggaaaatgtaagaataaaatacattttattttatatttatttatctcttttcaagggtttttactgctttgtgaagatccaaatttctattctaatttttaaccttgaagaacccccacaaatattttttgtattgcagttctgtcagcaatttattcctatttgtctgaagaagtctttatttctcctgcaatttttaaggatatttttgcttgatatakaattctgggtagatttaattttcttgcatcactttcaagatataattgtgttttttcttgctagcatggtttctgatgagaaacctccgataattgcgttcttgttactcttcagataatgcatcttttattctctggctaccttcaaatagtgccatttcttt

SEQ ID NO: 747694 - DNA, 592 bp, Homo sapiens
cctgtgttcgtggtgatgcttgtgtacacagacttactgcactgccagtcatataaaaatacagcacatacaataaggtatagcacataatacctgacaatgataataaatgattaggttactagtttaatatgctatagtttttattgttattttagattgtactctttatgttaatatattattaaaaggtcagttgtgaaacagcttcaggcacttccttcaggagctatccagaaaaaggcattgtcatcataggagatgccagcttaatgcgtgacgttgcccctgaagaccttccaatggggcaagaaatgtaggtggaagacagtgataatgatcctgaccccgtgtaggtgtaggctattgtgtggtttgtgttttagtttttaacaaaaaartttaaaaattaaaaaattaaacaatataagagcgcttatagaatacggatataaaaagagacaatatttttgttcagctatacagtggatttgtgttttcagtggagtgtaattacaagagtcagaaagttaaaacaaagtgaaaagtttatactgtaaaaaaagttatagtgggctaaggttaattcatt

SEQ ID NO: 747695 - DNA, 595 bp, Homo sapiens
acttatttgcattagctgaatgatttcccttacttcaacaaagcctcattttgtcaattttgtcagagctccttggggctctattacaaactaagatgtactttctgtgtctgtattctgtgtgttgtcagaactagcacatccctaatgtcacataactacttacgtcctcctaatttggatatacactggtctggccagagtggcttattcaccaccttggcaaaatcaaacagattacaygcactttgacaaaagaaatggaggcatattttaaatatttgtttttcaaagcacaccaagcatatatttttatggcttaaaaatattaaatcaattaatcacagaaattaaaatgataatacaaacaaagcacataaactagagacacattcaagtttcaatatattaccattacaactctcaaggccatttcagcaacaattggatgtagtgtctagaaacagactacataaaaaaatgaaagcaattcatttttgtcatggggtgaacttataattcaagttcctatctgtaatttcctgtgctggtagtacattgatctcaacaggattattgtctgtgaaataacagg

SEQ ID NO: 747696 - DNA, 608 bp, Homo sapiens
acaaagcacataaactagagacacattcaagtttcaatatattaccattacaactctcamggccatttcagcaacaattggatgtagtgtctagaaacagactacataaaaaaatgaaagcaattcatttttgtcatggggtgaacttataattcaagttcctatctgtaatttcctgtgctggtagtacattgatctcaacaggattattgtctgtgaaataacagggtataaaatagaatttcccactgggacaacgaaatcctattgaataaccctgaaaggtgacatctaccctgaagtttattataagtatacatacccattggatttggtcttttctcctctgaaagccctgctttcactgggccatgtaggtggaacctcaggcattagtattcccatcacagatgttcaagggaattaaaaactcagagcctaccagaatgttgtgcatacaacaggaacttaataaatgaacatacacatctatacctatacagacacattcttgtctttcttgtaacctgactgggtgacttcagtcctttaaatacgtaaactctaatttatccaagaagaatttgtcctaagcatttataattata

SEQ ID NO: 747697 - DNA, 577 bp, Homo sapiens
tacagctcttaattcctcatctgaatgtcatggtatcttccataaatactctctgtatcctgaaatgtcacaactacaagtgttaaatgtcttaacacgtgccctttggtttgtctgcatactgtattgggctatttccatctactctcatgacacttattacaaagcatctggctttactctttctcatagatgctttaagtaggaaattcaggtaccagcttcaaactttctctcacctgaggaagagagcccagtgtattagtaargtttaaaaatctttcgttgaggcaatcccaatgacaagaaccggtgatattctgggagtatgtcccatgaacttctctccttggcttattttaatctggatcacttggctataatacataataaccatgaatgtaactgctttcagggagttctgtgaatctttctaggaaattattcaactccaagggtggtcttgaggaccccaaatttacaaattttgtgagatgtgagatggtcttgggactcccacatttttcaatttgtgtcagaagtgagagtcctcttggaaactccttaactctgtagt

SEQ ID NO: 747698 - DNA, 658 bp, Homo sapiens
aatgatttcattcctggaagattttagggggtcagctcttagctcccaattcctggactgtgggctctaactctggggacttgtattgggccctgactttgttctctggctcctccagtttaggagtctactgtgctgggtgtggctgaggtgctccctgactgctggtcactccactccaaagggtggtgtcagccaaagcgtttcatagtgcggtgacgatgggatccgcccatgtttgcacgtgccaggagcagcggtagcagcagctccagggrggtgcacacttgtcagcggcagtggggtgctggcgggtgccagagggcctgccgccctaaggtcgttcacgatggtgtcagcggcaatgcagctggggtggagggcctgctggcagctgtgcgtgcagtgacactggtggtgttggctgcacacacacagtttggtgttggctccaacactaacatttcaagtctggtggtatatatctatcgtctatagtacacattcattttctatcatgcgcaaacactgtgttaaggtttttaatttttagtcaccttaaaaacaatcttcttgtattgttttgttttgatacaaaaactcttaggattgttgtaagtatctccattttcagagaagaaaatggaagcaaatggag

SEQ ID NO: 747699 - DNA, 547 bp, Homo sapiens
cttttgcttctgaagaaactgctgaggccttcacgttggggtattgttttctgagtgccaacaatgatctatgtattggtttattacgtaaacaggttcatgagccaggcactgttgcaaggatcgaaaagtcaaatgttagaggaaaatagatgctgcctggacctcagagaccttgcacttcaatgagggagagaactgtcctcaatatgaagaaaaataaatgcaaattgcraaggtggtgagtgctgcaaggaaggtgtcccgaagccaacagaacgacgggattgttagacgtgatcatgaaggcagtggccaaggaaaacaggagccgaagcagcagtgctgagtttaacaaccccatctccattctctgcattcttccagtcttaggggaaactaaggaaatgggaagaaactaggtggggggaaatgagtcactaggggaagaaacaccaccatggtagcctctaaaacaaaggagggtgtgctgagtagacagtggagccaagcaggtgacttaggcattcatattcatggattgaca

SEQ ID NO: 747700 - DNA, 473 bp, Homo sapiens
catcacattccttctgtccttgcccttacattccattctcaacagggcagccagcatgatcctgttgacacacaagtctctgctcaaagccctgccaagatttcccacctccactgtagtcaagggcaggccctacactggcttgggctgattgccctctgcctatctgtagcccttctgaatgttgttctgcctcatcctctggcgcccttgccatttctccaaactgccagctgcaacacttyccaaactaccacccagccgttgtcttgttggtacactaaaacaatgcctgatggaggagctctgtaaaatgtgttaaaggcgaaaactaaagtatgaatgaataaatgtccctagttttctaaccatcgatctctaattttttcgaactctttcgtataaatgcaaaacatctcttaataaggtgaaacacattatgcaatctatcaaattcatttttccctctcagg

SEQ ID NO: 747701 - DNA, 473 bp, Homo sapiens
catcacattccttctgtccttgcccttacattccattctcaacagggcagccagcatgatcctgttgacacacaagtctctgctcaaagccctgccaagatttcccacctccactgtagtcaagggcaggccctacactggcttgggctgattgccctctgcctatctgtagcccttctgaatgttgttctgcctcatcctctggcgcccttgccatttctccaaactgccagctgcaacactttccaaactaccacccagccgttgtcttgttggtacactaaaacaatgcctgatggaggagctctgtaaaatgtgttaaaggcraaaactaaagtatgaatgaataaatgtccctagttttctaaccatcgatctctaattttttcgaactctttcgtataaatgcaaaacatctcttaataaggtgaaacacattatgcaatctatcaaattcatttttccctctcagg

SEQ ID NO: 747702 - DNA, 555 bp, Homo sapiens
tagtaaacattgtgaggaggacagctgggggggtggagatcaagagggcactgtagacctactcctctctgcccatttaaaccacataaggtttttaaactccactttttaaaacaggatattaatttacttatttgttgattgtgcacactygtttatacatacatatgcacagaactgcaattactttggaatttggaatctcactgttaatttatggattcagccaattattatttatccagcccctctatttctacttgtgagatataatatgtgaggtgttattcacccagaaagaactcagtacaaggatagcagatgctccctgggactggggaagatctcagtgttctccctttagaaaggagtagtgcaggcccaagctctggcccaaaggcataataacagcctctgtttggattgtgtggcttgcagtttgctaaaggaaattatcaaagtggaccacatcttagacagatcggatgatgaggatgacatttcctccgaaaaccctcaaactgacttccttcacaaggtagacactgaaaattg

SEQ ID NO: 747703 - DNA, 555 bp, Homo sapiens
tagtaaacattgtgaggaggacagctgggggggtggagatcaagagggcactgtagacctactcctctctgcccatttaaaccacataaggtttttaaactccactttttaaaacaggatattaatttacttatttgttgattgtgcacacttrtttatacatacatatgcacagaactgcaattactttggaatttggaatctcactgttaatttatggattcagccaattattatttatccagcccctctatttctacttgtgagatataatatgtgaggtgttattcacccagaaagaactcagtacaaggatagcagatgctccctgggactggggaagatctcagtgttctccctttagaaaggagtagtgcaggcccaagctctggcccaaaggcataataacagcctctgtttggattgtgtggcttgcagtttgctaaaggaaattatcaaagtggaccacatcttagacagatcggatgatgaggatgacatttcctccgaaaaccctcaaactgacttccttcacaaggtagacactgaaaattg

SEQ ID NO: 747704 - DNA, 591 bp, Homo sapiens
agagaagaacttcacgccacatatctcaaagtggtaagaaaatatctgagggttttcttctaattggtgcagaacttcaaagcttgaaatcaggagggaggcagggaatatggcattgttcccactggatgctgctgttaccacatgaaggacttactagccttcccatgcgaacaaaaaagaaaaaaaagtgaattatatgttatttttgtcctcgggaatttatgaaataactgtgacatttctcaccttcgagcaaatcaccatatgaccaaatcaccatatgaccataccccctcctcacagattatcttccartagaattcagctattcacccctaatgcagcctccaggagagaatccttcttcaggcttctgggactccaggccttcagtggcttgtagctacataactcctggtctcttgtcttcatcctcacatggtcttctctttgtctgtcttctcctcctctgtctctcattaggatgtttgtcattggatttaggaacccattcaagtaatctgagacgatcttatatcaagattcttagtttcatctgcaaagactctttttccaaataagataata

SEQ ID NO: 747705 - DNA, 638 bp, Homo sapiens
gtttttgtcataaagttagttgttttctggttcctttgttcatttctttttctcttgtttgtcattgtggtttggtaattttatgtagtagtatcacttgagtcctttctcttcctcatttgtgtgtttggttaaccaatgggttttatattctcgtgtgttttcatggtggtaartgttgtcctttcacttcacttccaggtttaggacttctttgtgcctttcttgtagggccagccggtctagtggtcataaattctctcagcatttgcttgtctgagaaatactttattttttctttatttatgaagagtaattttgctggatatagtatccttgggtgcaaccttttttcattcagtacttttcacatgccatcccattcttttctggcctgtaaggtttctaatgagaagtctgctgttagtcagataggggttcctttataggtgactataaacttttcttgtgctgttgttagaatcctctcattgtcattaactttagacagtttgactataatatgctgtggagaagacctttttgcattgtatctgtttgagcatctttgagccccctgtatctggatgtctaagtcttttctaaacatggaaagttttcatctattatttcattaa

SEQ ID NO: 747706 - DNA, 638 bp, Homo sapiens
gtttttgtcataaagttagttgttttctggttcctttgttcatttctttttctcttgtttgtcattgtggtttggtaattttatgtagtagtatcacttgagtcctttctcttcctcatttgtgtgtttggttaaccaatgggttttatattctcgtgtgttttcatggtggtaaatgttgtcctttcacttcacttccaggtttaggacttctttgtgcctttcttgtagggccagccggtctagtggtcataaattctctcagcatttgcttgtctgagaaatactttattttttctttatttatgaagagtaattttgctggatatagtatccttgggtgcaaycttttttcattcagtacttttcacatgccatcccattcttttctggcctgtaaggtttctaatgagaagtctgctgttagtcagataggggttcctttataggtgactataaacttttcttgtgctgttgttagaatcctctcattgtcattaactttagacagtttgactataatatgctgtggagaagacctttttgcattgtatctgtttgagcatctttgagccccctgtatctggatgtctaagtcttttctaaacatggaaagttttcatctattatttcattaa

SEQ ID NO: 747707 - DNA, 638 bp, Homo sapiens
gtttttgtcataaagttagttgttttctggttcctttgttcatttctttttctcttgtttgtcattgtggtttggtaattttatgtagtagtatcacttgagtcctttctcttcctcatttgtgtgtttggttaaccaatgggttttatattctcgtgtgttttcatggtggtaaatgttgtcctttcacttcacttccaggtttaggacttctttgtgcctttcttgtagggccagccggtctagtggtcataaattctctcagcatttgcttgtctgagaaatactttattttttctttatttatgaagagtaattttgctggatatagtatccttgggtgcaaccttttttcattcagtacttttcacatgccatcccattcttttctggcctgtaaggtttctaatgagaagtcygctgttagtcagataggggttcctttataggtgactataaacttttcttgtgctgttgttagaatcctctcattgtcattaactttagacagtttgactataatatgctgtggagaagacctttttgcattgtatctgtttgagcatctttgagccccctgtatctggatgtctaagtcttttctaaacatggaaagttttcatctattatttcattaa

SEQ ID NO: 747708 - DNA, 525 bp, Homo sapiens
acttgtaatcccagctacttgggaggctgaggtgggaggatccattgagtctgtgaggtggaggttgcagtgagctcagatggtgcctctgcactccagccaggggacaaagtgaaactccgttttttttttttttaaaaaaaagtcccaaatctcattgtctaaattaggtatgggtgagattctgggtacaaaccatcctggggcacggccgggtgcggtggctcacgcctgtaatcccagtactttgggaggccgaggcaggcakattacaaggtcaggagatcgagatcatcctggctaacgcggtgaaaccccgtctctactaaaaataaaaaaaattagccgggcgtgttggcgggtacctgtagtcccagctactcgggaggctgaggtaggagaatggcgtgaacctgggaggcagagcttgcagtgagcggagatcatgccactgcactccagcctgggcaacagagcgagactccatctcaaaaaaaaaaaaaaaagaacaaaccatccctgggc

SEQ ID NO: 747709 - DNA, 564 bp, Homo sapiens
catcaatcatcttagctagatattttggataacttgctgcagcttctccatcagcacctgctgtttcaccttgcactgttatgttacagagatggcttctttccataatcctcatgaaccaacctcttctcacttccarcttttattgtgcagcttccttacctctcagctttcatagaatcgaagagagttagggcctggctctggattcaattttggccaaggcaatgttacagctgtttgatcttctatccagaccactaaaactttctccatatcagcaataagtctatttcactttcttatcatttgtgtattcactagagtagcacttccaatttctttgaagaacttttcttttgcatttacaacttggctatttggtgcaagaggcctagcttttggctgtctcagctttttacatgccttcctcactaagcttaatcatttctagcttttgatttaaagtgagagatgtgtgactcctcttttcacttgaacattttgagaccattgtaggattattaattggcctaatttcaatactactgtgtttcaggtaat

SEQ ID NO: 747710 - DNA, 602 bp, Homo sapiens
cttgactatgggactgtgatatcgggcaaaaagcaacaggggtccacatggccatgtttgtctttttccaaagaaatatttggccattggaaatattgcttctgagttgcaagataaccaaaaagcctggcatggggccctaaacttagtttgggaagcttgggattggccatgcttagctcttgggatgtgtttgttgagctgcaaatgtacccttccaggaaaagttaagtctgtgacaatgacttctcaagcagagacaccagacagctgttttagaatccctgagggccaaaaaaaaaaagtgctgaagggaacaatggcttgcttatgaactaggagagatattcaatagataatacccttttcatcaaccaagttttaaagaaattgaggataagaycaaacagcaaacaataaggtgaccaaaatgtattgtggttaatgctgaagtatagagagcatggctcataactggagtgaggacttgtcctaaacccagaatgtggtggacttagctataaggtcatcatgtgttcgggaagactcaggcctcacccagcagggcagtcctgtaatgacctggaagagtggtgcgaaag

SEQ ID NO: 747711 - DNA, 561 bp, Homo sapiens
gggcatcagaacattcagaaaaatgttctccccagacatccttctaagtcttttttctcttagaacataccagtcacaaattttcagatgtgatgttggattccagtatgtaggagacaaactttaacaactaaccaaaaataaacataccctaaaatatgtcacttaatcctcttttcttcaccagagcctatggtttgcactccttccaaatttaaaattcttcagcaaaattctacagataccttcatatcatttacaaatcatttcwtattcatgatctgagttctagtcaaatctgctaagtacaaaacttacgaaattttgcatgcgtcaccattaagttagttcaccatgccaactctgagaaaactttagaggctaaaataaagtgaagaaagaagcaaatgtcttgctgagattacagtttataagttattaaactgggaattaaattcagtctactgattccgtgccatttgctctttttcctcatctttcacaagatgctttgctaaatattataccttcctgtgttactgtaacttcccatttatcttt

SEQ ID NO: 747712 - DNA, 560 bp, Homo sapiens
gctttctgtggtatctccctgagcagcttaataataaacctcaattctttatctgccaattcagagatttctttgtgatttggatccattgctggggagctagtatgatcttttggggtgttatagaaccctgttttttcatattactagaattacttttccgttttctcctcatttgggtggatcacttcctaaaattgttcttaaattcatttttgattgttctgtgttatttttaatttaaatttctttttttctctcwtaaagatcagactttaatgtttatttttgcctaattttttatttggtgcttgtgggggtgaagactctttatgagattcttagttattgaaagtcttgtgcactcactttcccaaagctggttgtagcagttatattcttggtgtgtgggtgagttcacagtctcctatggatttggaatgtcagagatctgttgaagtttatgtcattttctcatggtgtacaacttatttatttattaatttttttccaaatgttttatttactcagtttataattcagacttcaggtcaataggg

SEQ ID NO: 747713 - DNA, 580 bp, Homo sapiens
ttgctggggagctagtatgatcttttggggtgttatagaaccctgttttttcatattactagaattacttttccgttttctcctcatttgggtggatcacttcctaaaattgttcttaaattcatttttgattgttctgtgttatttttaatttaaatttctttttttctctcttaaagatcagactttaatgtttatttttgcctaattttttatttggtgcttgtggggrtgaagactctttatgagattcttagttattgaaagtcttgtgcactcactttcccaaagctggttgtagcagttatattcttggtgtgtgggtgagttcacagtctcctatggatttggaatgtcagagatctgttgaagtttatgtcattttctcatggtgtacaacttatttatttattaatttttttccaaatgttttatttactcagtttataattcagacttcaggtcaatagggaaagtatctctgattaggcgctggttgtggctaaggcgggttagtagatgtaatacccaatggtgggccaaggtctcagccttgatgagagcagctgggggaactctc

SEQ ID NO: 747714 - DNA, 645 bp, Homo sapiens
ggcttgcacttgaattcttttctggcaaagccaagaactttccttggctgagcccaaatttgggggctcacctgccttacatcaccaggatattgctctgctgctctgcttaaaatgtcagcttctattcttctctgtgcacctctcttttagaggagcagttaaacaaaacaaattatacttttgtattgcatggtttaattgtattgtatatgttttacgttactttagaatgtttactattgctgtttttaaatataatatgggtaagaaaggaatgatggtagcaacagcatagtctttaaatctttacagttctttcttaaaaagagatggacaactaggataaaaagaaatcttccaaaatgttgttgataaaggatttccataagcctcagagtatgagcatgcaagtccaacccaaatgtagcaagaaaaaatatgggaaaggaagctgtgtgggaacagcacaggaaaggyaaaagggcttctaacagatctaagatctgtgaaacaaattcccgacactctcatttcaataaagagaggtttcccactcttagtggaagagtcacttggtaaattgggaaagagctccaaacgctctaatttgtaggcaaaaacaaaggggattataggaaaatt

SEQ ID NO: 747715 - DNA, 460 bp, Homo sapiens
atttgagaatttgtgatatagctattagtctaccgatttagcatacataaaaaatacaatgtgaaaaaatgtttcaatatgacaataaagcaattaaattaaatgtaaccacttgctattaacacatctttcttaaataatagtaaataaaaataacaggatacctaataaaatgcacatgtgtttaagaaatgaagcacaaatgtaactgtgaaacatagtttagaaaatagaaataacgttgacatattggaattagaggcacttgaggccaggaggttcagaccagccttggcaaagagtgagatccctgtctcttcaaaawactttttaaattacctgggtttggcggtgtgcacctgtagtcccagctagtcaggaagctgagacgagaagatcgcttgagctcaggagttcaaggctgcagttggctaagatctcaccactgcactccagcctg

SEQ ID NO: 747716 - DNA, 633 bp, Homo sapiens
  misc_feature 7: n = A,T,C or G
ctttcangtgttaatctaaaataaaatgttaatgtaacatttggaatgattcctcactttgactttttaaaccgtctgataacaattctcaagagccttttactacacaccatttacatgctcaccttccaaatgttatgttcattaatttctcgatgcctattcaatgaactctaaactttgtggtctagcaaatctacacatttttacctaactccatgttctatttttattttttattcatataccttatctttagtccaattaracttattattctctgagcacatgctttaattttaagctcatgttatactatttaggaaaggaaagaaggaaggagggaaggaaggaaggaaggaaggaaggaaggaaggaaggaaggaaggaaggaaggaaggaaggaaagaaggaaggaaggaagggacggacctgggtgcacctttggagaataggatgaggaggctccagttacaggttgaggcagtagcaatgtcatcccatcatgggtgggatagttgtaaagtgaattaggagaaactaaaggactctggggtgggaaggaaaagacaggaccctctattagttgaccatcagttgagtcccaaccaagaggttctagaacaaccaatg

SEQ ID NO: 747717 - DNA, 489 bp, Homo sapiens
gtctatgaaatatcactgcagtttgtttcccatccatgtaaatacatttcagatacatctacctttggaaactaaagactgtccatataaggtcctaatgattttgtgaggctaagcagcaaacgtaagaagctatgtttgctcatttctccttgcccgcatgattttacaaagcccctgactctgtgagaacatacagctctccagaagcatgctttgaagacaaaacaggatagagcaaacagccccaaaatgtttcttgcctgaatcactacattccttagaagttaaatgatcctmgtctttgccttttcctatacataaaataacatcggacggggttagcgattatgcttcttaatctataaccagatgcactcttacatgtaaactttgatgtgacgctgctttaatgtaacttctgagcaagtttgacatgttttggcatgcaccgaacctccaacacctgtatgtatgcagtgggctgaa

SEQ ID NO: 747718 - DNA, 501 bp, Homo sapiens
ctggagcgaggtagtgtctcattgtggttttgattggcatttccctgatgattagtagtgttgagcattttttcatatacctgttggccatggtacgtcgtcttctgagaaatgtctgttgaggtctttttcccttttgaatcaggttttttttttttttttctgctgttaagttcctgatatattctggatattaacgctttgtcagatggatagtttgcaaatattttctcccattctgtaggttgtttcttcactcttaattgcttcctttgctgtgcagaagtttttagtttgatgtcatttcatttgtccatttttgcttttgttaccagtgcttttaaggtcttactgaaaaaaacactygctcagcccagtgttgtgaggcatttctcctgtgctttcttctagtagtttcatggttttggattttacatttaagtcttgaatccattttgagttaatttttgtatgtggggaaaggtaggggtctggtctcct

SEQ ID NO: 747719 - DNA, 583 bp, Homo sapiens
attgtgctaccgcactctctcaaaacaaacaaaaaaacatgccccacaggacagtaccttaattagctagagtagatctgagagggcctcttcttgcctgcactgtgctccccagagctgatctaattctgtatcaataggctgttcccatggtcttgccatgcgcttgaagctgcrggagccttctcactgttcaggctggggtgtggttttcagaaccaccgggttgactactgaaaaccaagtgagccttacagctcttatcgctgggtaaagtgatcttgcctggtgcctcttggtcttcagctcaattttccaggttgtcctggccaagtcttgctctgttacgctcagtgcctctgcccactctttccccgccagcccttccctcccgccctgcaaacttgtcccttggctgtttcaccaggttctgcctgtatccttgcctccttggtacacaccatttcaggttcttccctttctgtgtcccattgtcctagttatgttctgttgtttgtgtaatgcccaaatttttctgctcgtgtggccttgaaaagtaggccagcctcagaggctgctgagc

SEQ ID NO: 747720 - DNA, 583 bp, Homo sapiens
attgtgctaccgcactctctcaaaacaaacaaaaaaacatgccccacaggacagtaccttaattagctagagtagatctgagagggcctcttcttgcctgcactgtgctccccagagctgatctaattctgtatcaataggctgttcccatggtcttgccatgcgcttgaagctgcaggagccttctcactgttcaggctggggtgtggttttcagaaccaccgggttgactactgaaaaccaagtgagccttacagctcttatcgctgggtaaagtgatcttgcctggtgcctcttggtcttcagctcaattttccaggttgtcctggccaagycttgctctgttacgctcagtgcctctgcccactctttccccgccagcccttccctcccgccctgcaaacttgtcccttggctgtttcaccaggttctgcctgtatccttgcctccttggtacacaccatttcaggttcttccctttctgtgtcccattgtcctagttatgttctgttgtttgtgtaatgcccaaatttttctgctcgtgtggccttgaaaagtaggccagcctcagaggctgctgagc

SEQ ID NO: 747721 - DNA, 612 bp, Homo sapiens
gtggggtgagtaagcctccttcaccacccagatggggggaaaagggagaagagaggtgtgtgcatgcagacagaggcgctgctaccaccctcttcactcatgccctgtggcatcaacacttgccaagcctcaccatggggaaaacaaaggtggggggagcctggggagggaatgttgtagttcaaaggacatcagaaaagacggcttaccaaatgggagaaactttctaccagtctgaaatctgataagagacttacttctgtagggtatgtaactgagcatatgatccttcccaacagggcctgggacacyggcttgatcatcatgaggcccaggacggagccacacataggtcatgatagtggaagcagcacagggtgtgaagctgatggccacaaccgaccccttccagccccactgtggaaccggggtggcagttcagagtttgggtgtctgctgtgtgcagaagggagaccaatcagagccaggcttagacgcaggcaaatcatgggccctttcgaaaagacaggctggccaagtgcgatggctcacacctgaaatccctgcactttggaaggtcgaggcaggaagatgagttgagcccgggagttt

SEQ ID NO: 747722 - DNA, 572 bp, Homo sapiens
aactcttacaactcaataataaaaaggtaacccaactttttaaacagccaaaggatttggacagatatttatctaaggaagacccagaagcacaagaaaagaaagacgccaataagcacatgaaaggatgctcaacatcggcaaccattagggaaatgcaaatcaaaccctcaaatgaggtatcacttcatacccactaggaagactataataaaaaaaaaaaaagacagacaataacaagtgttgacaaggatgtggggaaactggaaccctcctatgttgctggtgggaaagtaaaatagtgctgcaactytggaaaagtttgacagctcctcaaaaagttaaacatagagttaccatatgacccagcaatttcactcttaggtatatactcaagagaaataaaaatatacacctggccaggcacagtggctcacacctgtaatcccagcactttgggaggccgaggcaggaggatcacctgaggtcgggagtttgagaccagcctgaccaacatggaaaaaccctgtctctataaaaatacaaaattagccaggcatggtggtgcatgc

SEQ ID NO: 747723 - DNA, 466 bp, Homo sapiens
gagcccagcagttcaagaccagactgggcaacacagagagagcttgtctctccacaaaatttaaaaattagtcgggtgtggtggtgtgggcctgtagtcccagctactcaggaggctgaggttgggggatggcctggcccrggaggtcaaggctgcagtgagccgagatcatgccactccagctggggccactccagccggggccacagagtaagactctgtctcaaaaaaaaaaaagaaaaaaaaagaagcatgggcaggagagaagagaagcctgggacccactaaggtttatttcgcctttacacaggaaaagtcaataaaagccactagttaaccacaaggctgtgctgtccatccctctcctgccagagttaaccagaccgaatctcctgccagagttaaccagactgaatccttcaacagatatacaattcaacagacacctgcagacgtgcctaatgca

SEQ ID NO: 747724 - DNA, 466 bp, Homo sapiens
gagcccagcagttcaagaccagactgggcaacacagagagagcttgtctctccacaaaatttaaaaattagtcgggtgtggtggtgtgggcctgtagtcccagctactcaggaggctgaggttgggggatggcctggcccaggaggtcaaggctgcagtgagcsgagatcatgccactccagctggggccactccagccggggccacagagtaagactctgtctcaaaaaaaaaaaagaaaaaaaaagaagcatgggcaggagagaagagaagcctgggacccactaaggtttatttcgcctttacacaggaaaagtcaataaaagccactagttaaccacaaggctgtgctgtccatccctctcctgccagagttaaccagaccgaatctcctgccagagttaaccagactgaatccttcaacagatatacaattcaacagacacctgcagacgtgcctaatgca

SEQ ID NO: 747725 - DNA, 546 bp, Homo sapiens
gaaaatgagacctgtgcaatgcctgacaatgaattcaaaataattgtgttgaaggagctcattatgctactaagaaacagagatagatagctaaataaatcaggaaagcaataaatcaacaaaattagaagctcaaaaaaaagcctacccagaatcaaaccatagaggttaaaaaaaaaaaaaaaaaaaagaaaaacaagaaaagagaaaaaamcaattaaaagaaccaaatagaaattccggtgctgaaaatacaataactgacctaaaaaattaaataaagaacttcaacagaagttcaatcaatcagaggaaagaatcagtgaacttgaagatagattgtatagaattatctagtcaaagttgcaaaattaatgaaaaagagtcaagaaagcctgtgggatgtatgggatataatcaataacaccaatatatgcactatggcaatgcagaaggagcatacaaagagaaaggagcaaaaagcttatgtaaagaaattttggctgaaaacttctcaaatattgggatgtaaatggacatttagat

SEQ ID NO: 747726 - DNA, 609 bp, Homo sapiens
accaggctggtgcagtgtggggatttggatgcagcaggctgagttttcttaagctatttatcctgcacagaactgggcaggggggttaggtggaaatgatccttctattttaacagctctaaaaggacaattaaatttaatctgtggaagcaagaaaggtgtgggaaagaaaaaaaaagctgtataattgaggatgtgatcaattgactgaagagggcctaatagtttagcaactagaggtaggtctcttgtagcattaataaatgcagctgtggctgggcacgagtggctcatgcctgtaatcccagcactttgggaggccgaggtgagcagatcacgagatcaggagatygagaccatcctggctaacatggtgaaaccctgtctctactaaaaatacaaaacattagccgggcatggtggcaggcacatgtaatcccagctacttgggaggctgaggcaggagaatcgcttgaacccaggagatggaggttgcagtgagccgagatcacaccactgtactccagcttgggcgacagagcgacactccatctcaaaataaaataaaaataaaaataaaaataaatgcagctgtagaggactgactga

SEQ ID NO: 747727 - DNA, 559 bp, Homo sapiens
agcaattcctctctcttcccttcctctatcctgacttcctgatgttttcgtttatcgctttattgaccaaaagcctcctggaaaacaagtattcttcattacgttccagaaataaagaccactcaaagaaagcctctgttacatcctgagaaacactaactttaactcaayttgcctgatctttccagtgcactggacagcccatagaatttacaaactcaataaacagataataatatggtcatgatgggtatctgaaacctaggatgtaaaaaaacagattatggagagctgcatgagtacaatcaattactgagattttcccgaatacaaatcctatccaagcaaaactaatataacccccaaattaggagaagtccacagtcattttagatgaaatctcaaaagaaaccacaatctcattctctttttttcaaatttcaggactttaacatttattaaacaacaaaaacaaaaatgctgacatattatattgtacatatttgcaaatccaactgtgtaagaaggtgctttggtgggatttgagattatagctaaa

SEQ ID NO: 747728 - DNA, 579 bp, Homo sapiens
tctgaagtatttcttatatccactgtcatgaaaaagtacagtaagactgaggataggctgggcacggtggctcacacctgtaatcccagcactttgggaggccgaggcaggtagatcacgaggtcaggagatcgagaccatcctggctaacacggtgaaaccccgtctctactaaaaatataaaaaaattagcctggcgtggtggcttgcgcctgtagtcccagctactcgggaggctgaggcaggagaatggcgtgaacacgggaggtggagcttgcagtgagccgagatcgcgccactgcactccagcctgagctaaagagcgagactccatctcagaaaaaaaaaaaaaaaagactgaggataaagaagcttggtcaaygtggtataatttgtgactggaagactggaagatccttcttcttacccaccatattatgttaatggagctagccaactgggcacattgcacactctcagtgtaaacatacacatacataccccaacctaatatcactatcaccaccactacatatgttacaaatatatttctcagtcttatatgacccaaggggggga

SEQ ID NO: 747729 - DNA, 578 bp, Homo sapiens
  misc_feature 194, 398: n = A,T,C or G
ttttctttccctccctccatccttccttccttcttttttttttaccgaattcatagttatgagctacaccaggcattcacaacaagagcaaaatggcactgagggagcaaacattgtttcttatgtgggtgaaataaattgtactaatttttggggtaaaccacagatatacatatagtacataaaaagatatncaacatatctgtggtattaagatttcagggagggggagtaattaggaaaaaaaatgtctaaatagtattttcaagggggcagtgggagaatgaaaaaaaatggctgggaaacactgagctagataatgattaccatgtgggaraaaaaaacagcaaaaagtaaaagcatcacgggagcctcaccaacctcaccatggtgaggtnttcatgacgcttttactttctgctgttttttttcttacccacggtaatcactggggaagaaatgagaaggtcaaggaagtttgggtacttcagtattcaaaaccaggactgagactatttggacaggttcatgtgaaggactttgtcttatcagctccttctgcattcaacacatcccag

SEQ ID NO: 747730 - DNA, 553 bp, Homo sapiens
tgcaatgcctttacctggtgctgaactttgagcaggttaatgcagattacatttgtaccctatcgaaggtgtgagttaagcacatatcatgagatgacacttgtgctcttccctttgtcatgtttgtcagccgttagggctctagggaatgaaaaatgactggactttggaataaaatagacttcaatatgagccccagttctaccgaacaacagctgtgtgatgcagagcaaacgactcaacccctattaatctagagatggcttaaaaattcgactttcaaggtgttgggaggtttagtattaatatatgcaaaacattttgcacatgctgggcacatagtgagtattcagtaagtgttattactatcrtcagtatcgtcaccatcagtgtcatcctcgtcatcattacttttggtaccaagcatatctattaccaatggagtccattttgactatacacagtgaatctcctttacaatgttatttgcaatggaatgaaattcagtctatggacctcactagatgaatcatataaagtagtatatgtgaca

SEQ ID NO: 747731 - DNA, 493 bp, Homo sapiens
gctggctttcaacactgggggatgtgattgtttttaacctggattggggcaagtttgtgagagactttaaaacaactatagcaattggtagttatcctggggctcttagcattctagttgctttttcacttctctatatcaccctccccaatttcccttagcaaaaacaaggactcttttgtattttccttaccaccattatgtctatcatatagcaaacattaagaaataaggtgaacagactattttggtatcaattactcattttattccctaatcatagttcatgattccatctcttccaacaaaagatcaaggcctctcatttcttctatcagccacagaraacgagttggacccaggcactggtggacacataatgagtctctgagtggaagaattctgtcctctctttgttatcctgtctactatatgtgttgtttatccttctgaatgaaaagagaattgaactccaattattctggaattcaat

SEQ ID NO: 747732 - DNA, 538 bp, Homo sapiens
  misc_feature 1, 2, 3, 4, 5, 6, 7, 8, 9, 10, 11, 12, 13, 14, 15, 16, 17,18: n = A,T,C or G
nnnnnnnnnnnnnnnnnnaattccttctctgtgttatcttgaatttctttgagtttcctcaaaagagctattctgaattctctgtgtgaaacatcatatgtctctgtttctccaagattagcacctggtgccttacttagttcagttgttggagtaatgtgttcctggatgttgttgatgcttgtagatgtttctcagtgtctgtgtattgcagttagatatttattgtagtcttcacagcccgggcttctttytgcctgtcttttttgggaaggttttacaggtaactaaacggacttgggctccgaggctgataacactgtgtaacactgtggtttttgcataattgtagagataccaccttggtagttttggataatatatggaagactcctccggaatactagacagtgacttttttttttttttttttttttttttttgagatgaagtctcgctgtgtcacccaggctggagtgcagtggcatgatcttggctcactgcaagctccacctcccaggttcacaccattctcctg

SEQ ID NO: 747733 - DNA, 538 bp, Homo sapiens
  misc_feature 1, 2, 3, 4, 5, 6, 7, 8, 9, 10, 11, 12, 13, 14, 15, 16, 17,18: n = A,T,C or G
nnnnnnnnnnnnnnnnnnaattccttctctgtgttatcttgaatttctttgagtttcctcaaaagagctattctgaattctctgtgtgaaacatcatatgtctctgtttctccaagattagcacctggtgccttacttagttcagttgttggagtaatgtgttcctggatgttgttgatgcttgtagatgtttctcagtgtctgtgtattgcagttagatatttattgtagtcttcacagcccgggcttctttttgcctgtcttttytgggaaggttttacaggtaactaaacggacttgggctccgaggctgataacactgtgtaacactgtggtttttgcataattgtagagataccaccttggtagttttggataatatatggaagactcctccggaatactagacagtgacttttttttttttttttttttttttttttgagatgaagtctcgctgtgtcacccaggctggagtgcagtggcatgatcttggctcactgcaagctccacctcccaggttcacaccattctcctg

SEQ ID NO: 747734 - DNA, 516 bp, Homo sapiens
ccttcctggccagtacttctcagcttcctgttctccatgcatttcttgctcattggctgcagctttcatcagagcctgctcatttcctaccaagtgcccgcttcaggggatttcccagatactttgccgtaactcagtggacttaatgtgttcccaagaacttacattcctaagtccaacctgttccgccatccaccaagccctcggttctgatatcacacttattttttaccagaactaaggcaattttcaattatctggatttgcctatgggtatctaaagtttttatgcagcagcaataagtatttgcaaaggcattaactgaatatgctataatgtacgaggggaggattttcaggctcattgccagtcatctgrtactaaaaactagtttgttaaaattgagatggtgcctactccataccacatgactttacctgctattagcaattgactgtgcttagacaaatgtttttcattttccttaatcattctcacaaaggaaatgataagtg

SEQ ID NO: 747735 - DNA, 538 bp, Homo sapiens
  misc_feature 1, 2, 3, 4, 5, 6, 7, 8, 9, 10, 11, 12, 13, 14, 15, 16, 17,18: n = A,T,C or G
nnnnnnnnnnnnnnnnnnaattccttctctgtgttatcttgaatttctttgagtttcctcaaaagagctattctgaattctctgtgtgaaacatcatatgtctctgtttctccaagattagcacctggtgccttacttagttcagttgttggagtaatgtgttcctggatgttgttgatgcttgtagatgtttctcagtgtctgtgtattgcagttagatatttattgtagtcttcacagcccgggcttctttttgcctgtcttttttgggaaggttttacaggtaactaaacggacttgggctccgaggctgataacactgtgtaacactgtggtttttgcataattgtagagataccaccttggtagtyttggataatatatggaagactcctccggaatactagacagtgacttttttttttttttttttttttttttttgagatgaagtctcgctgtgtcacccaggctggagtgcagtggcatgatcttggctcactgcaagctccacctcccaggttcacaccattctcctg

SEQ ID NO: 747736 - DNA, 589 bp, Homo sapiens
tgcagtattccttgtagtgtctttgtttctggtatcagaataatggtggccttgtcaaatgagtttggaagttttccctccacttcaattttctggaatagtttgagaagaattggtattatttcttttaatatttggtagaattcagcagtgatgccattaggttctgggtttatctctgatggagacttataattactgaatcaattttcttactcattacaagtctattctacttcataatttaaccttgttaagttatatgtgtccagggatttatctatttctcttgggttattaaatttgttggaatataattgttcataatagtctcttacaatcctttgtattgctgttgtttcagttgcaatgtctttttctttcatttatcattttatttatttaagtatcctctttttaaaaaaacttartctaactaagggtttattgatcttatcattagccctgagttatgaaagccaactctttgttttgttgatcttttgtatgtatttagtctctacttcatttattattgcacttatctttattatttccttcctttgatcaattttaggtttaatttttc

SEQ ID NO: 747737 - DNA, 595 bp, Homo sapiens
ttgctaagaaactcccttcgagaaatagccaatgttaattgtactgctaactgaactatgcatatctaactcatctcaaatgactcataatgaggcgctatatatttgctttaaaaattatgcacagaatggtttggtgcagataacttaagctttctcagctgggaatttcagaagatgggggagaacttctacaagggagggcaggtacctgtacatggaaggagctgagatgtctaaagtcacccacatttgtcatttraaaaagtatatataaataaaagatactattttgaagaagtataaaagttggaaacaattttttcttagtttgtaagctaagtgtaagatattcccaccttctgacattcaaagtcattatactttcaactggtctgctttttggtccacttggtgggtggaaaatcttatcatctttgccagaaatatttgccaatttagccacataagggtcagcagaatgtgatgggtaaggatcaaatgttcctgccttcattccaccaggctgcgaagaaaaacgagacaacttaatgtgattttgtaaaatgcctctacaaaattagcttgtgaagaa

SEQ ID NO: 747738 - DNA, 595 bp, Homo sapiens
ttgctaagaaactcccttcgagaaatagccaatgttaattgtactgctaactgaactatgcatatctaactcatctcaaatgactcataatgaggcgctatatatttgctttaaaaattatgcacagaatggtttggtgcagataacttaagctttctcagctgggaatttcagaagatgggggagaacttctacaagggagggcaggtacctgtacatggaaggagctgagatgtctaaagtcacccacatttgtcatttaaaaaagtatatataaataaaagatactattttgaagaagtataaaagttggaaacaattttttcttrgtttgtaagctaagtgtaagatattcccaccttctgacattcaaagtcattatactttcaactggtctgctttttggtccacttggtgggtggaaaatcttatcatctttgccagaaatatttgccaatttagccacataagggtcagcagaatgtgatgggtaaggatcaaatgttcctgccttcattccaccaggctgcgaagaaaaacgagacaacttaatgtgattttgtaaaatgcctctacaaaattagcttgtgaagaa

SEQ ID NO: 747739 - DNA, 672 bp, Homo sapiens
agtctaattttaggtctgaaattatctcagtaaacaagtaactctcaaacagtatttaatattggtaactataatcagagatgactgggaaacagttggctttgctgaaataagaaaaccaaccagttatgcggcaatgtgatatcaaaagtcaagggaggatgggcgaggtggctcccgcctgtaatcccagcactttgggaggctgaggcagacagatcacctgaggtcaggagttagagaccatcccagccaacatggcgaaaccccatctctactaaaaatacaaaarttagctgggcatggtagtgcatgcctgtaatcccagctactcgggaggctgaggcaggagaatcacttgaacccagcaggcagaggttgcagtgagccaagatcgtgccattgcactccagcctgggggacaagagcgaaactctgtctcaaaaaaaaaaaaaaaaaaaaaagtcaagggagatgactagtatgtgagaatgagagtgctgcagccactggggcacatgttttttctgaccaaacgaagaaacagacaaaaataaagcaggaaaccccctgggctttaatttactcacatataacagatgcttgttggctcttgtttcttgcagtgcattgaatatttttattataccgtggcgggcattttgctgtcca

SEQ ID NO: 747740 - DNA, 539 bp, Homo sapiens
ccagccccccaggagcttggggctgcccacaagcatggtggtgagtagagccctcaggcggggtgggcaggcaggagcaggggggctctcactgagctcagatccccgcctccctctctccaaagatctttgtgaggtgagcctcactgacagcgtggagcctgtgcaagkagaggccagggagggttctccccacgacaaccctactgcacagccgatcgtgcaggaccaccaggagcacccaggcttgggcagcaactgctgtgtgccattcttttgctgggcttggctgccaagaagaaggagataaacatcaccatcgtcaaagagctgctcaagaaatttttaaaaaagaaacaaagttatggggttaatctcctacacaattcatttacttcgtttgaatgttatagccacttatgattatttgtgtttctaatttatagtttaagtttatttgtaaatagttaaaagagagtgggtctctgtggctttcactgatgttcactctggcatactttcgcaattttctttttcaa

SEQ ID NO: 747741 - DNA, 597 bp, Homo sapiens
tcctacacaattcatttacttcgtttgaatgttatagccacttatgattatttgtgtttctaatttatagtttaagtttatttgtaaatagttaaaagagagtgggtctctgtggctttcactgatgttcactctggcatactttcgcaattttctttttcaatttcatgattgtaggtyattagcgtgcatattgagtttgcccttacgtggtggggttcaaacacacaaagacccactatttgcacaaaactattcttgctggtttggaataggctgccatgtgtttttaatgttattgcagcatgtatattcattacagaattcagataaaatttgcctatgttctgctattgtttgatctaatcttaatcacagtgagctcttcattagcacaatatgtggtttgccccaagtgtgcactatttaatactttgtaatatgccaccaagagtactgacatttagagttgtttaaaggccgagaactggaaacagcctttccctcattttctgtgtattggtgatgggagtaataacattttgggggagctttttaaatttcacagaagaggaaagttgcctgctctggcaggta

SEQ ID NO: 747742 - DNA, 656 bp, Homo sapiens
atgattatttgtgtttctaatttatagtttaagtttatttgtaaatagttaaaagagagtgggtctctgtggctttcactgatgttcactctggcatactttcgcaattttctttttcaatttcatgattgtaggtcattagcrtgcatattgagtttgcccttacgtggtggggttcaaacacacaaagacccactatttgcacaaaactattcttgctggtttggaataggctgccatgtgtttttaatgttattgcagcatgtatattcattacagaattcagataaaatttgcctatgttctgctattgtttgatctaatcttaatcacagtgagctcttcattagcacaatatgtggtttgccccaagtgtgcactatttaatactttgtaatatgccaccaagagtactgacatttagagttgtttaaaggccgagaactggaaacagcctttccctcattttctgtgtattggtgatgggagtaataacattttgggggagctttttaaatttcacagaagaggaaagttgcctgctctggcaggtatgtgcaagatagagtgtgtttcatttgttctgttgccaagaattagtgctgtactattgtagttcctttaggatttgtatgtgctctgggctcatgaagata

SEQ ID NO: 747743 - DNA, 656 bp, Homo sapiens
atgattatttgtgtttctaatttatagtttaagtttatttgtaaatagttaaaagagagtgggtctctgtggctttcactgatgttcactctggcatactttcgcaattttctttttcaatttcatgattgtaggtcattagcgtgcatattgagtttgcccttacgtggtggggttcaaacacacaaagacccactatttgcacaaaactattcttgctggtttggaataggctgccatgtgtttttaatgttattgcagcatgtatattcattacagaattcagataaaatttgcctatgttctgctattgtttgatctaatcttaatcacagtgagctcttcattagcacaatatgtggtttgccccaagtgtgcactatttaatactttgtaatatgccaccaagagtactgacatttagagttgtttaaaggcygagaactggaaacagcctttccctcattttctgtgtattggtgatgggagtaataacattttgggggagctttttaaatttcacagaagaggaaagttgcctgctctggcaggtatgtgcaagatagagtgtgtttcatttgttctgttgccaagaattagtgctgtactattgtagttcctttaggatttgtatgtgctctgggctcatgaagata

SEQ ID NO: 747744 - DNA, 496 bp, Homo sapiens
gcagggttaaggattttagggacttcacagaaggaggctggagagcatcagcagaggcagcctagaccttggatctgtaaaaagaagacactgtttgaaactgcacaaatgagttggggtttccaacagggcaggtgggggcctgtgggtggatgggtgtggcagccacagaggctgggatagcttggcactggggtcagggctcagccagcctgtgtgccttcacacctggtaatgagatcacttgtaaacaatttctgtttrtcaattacaggatacaaaaaaagaagcacggaaggaaaaagaaatttatgaacaggaagcaaatgcctcaacatttcatagaaggaggactccattggataaaggccttattaatacggggatctgtgagtcttctggcaaacagtgtttgcctctggttcagctcatacaacagcttcttaggtaaatcatattagctgtattgtattgtgttttatttatttactttttt

SEQ ID NO: 747745 - DNA, 590 bp, Homo sapiens
taatacgactaagaacattttgaattgcacctgtggctccattggtgtcctgggcaggtggctctgtgctgtccacacaggttgtctcctgtgtcttcgtcttcgctgcgtgtgactttttggttcctgtggcacgtggggtcctgtatgggacattggttctacagcagatttatagtaaggatgtacctactaaaaaatacaaaataaaaagaatagacacaaacatagaaataagtatcacctcacaaaacttttggaaagtagaaaaagaaaaatgcattcgcagctttccagtagccgatatccaggctgtcttcatcagcatggatcatgtktccctctcctgcatgggtagacactgttttctcaccttaagtgtttgtgagtgaaggattcttgatgtgttgacttggcagatgcagttgttgaacagtagtttatctaaagatcgtaagagacttttggagacatttcatgtccttttttcccttggaaaacgtgggttggagaaatcgctgcttgccaaaaataagccgtgaaatgtatttcagagtagatcgttatttacatgctggcgaggagccaca

SEQ ID NO: 747746 - DNA, 691 bp, Homo sapiens
tcaggaagagacacccagttttgtatcagatgtgtagagcgtgggatgctgttcattgacggagggaggaggaggaggaagaggtatggcatggggaggaggtagctgagctctgtcgtgaatgtcatttgaagtccccagggaaagccaggccggccagcaccttcactgcttcagccagctctcagggtgtctgtgctccctggccctctcagctcctgcttcatagctgtcakctgcagtgggagacagctgcacaagggcccagcatgtctgtgtgtttacccaggggactgccgcatggcccatgccgagcagaaactgatggacgaccttctgaacaaaacctgttacaacaacctgatccgcccagccaccagctcctcacagctcatctccatccagacggcgctctccctggcccagtgcatcagcgtggtaggtgcagagggtacctgtggctcaggctcaggtgaagaggcagctcatgcccaagccctaagcagtcaatgtccagaggaatgaaatgactagagttgacttagactcaccggtacacggtggggaggctggaggagggtccatgaggtttataggtgtccagtatttaatgaggtcatggttttgttaacaaagaagaaatgagggtgggagcgagatcaccactggctaggcagccaatgggcctgca

SEQ ID NO: 747747 - DNA, 597 bp, Homo sapiens
gaggcagggacatggctgtagccgtggagatgggaggacagacaggacttggtggccacttgggtgaaccaagggaggagtcaggaagagacacccagttttgtatcagatgtgtagagcgtgggatgctgttcattgacggagggaggaggaggaggaagaggtatggcatggggaggaggtagctgagctctgtcgtgaatgtcatttgaagtccccagggaaagccaggccggccagcaccttcactgcttcagccagctctcagggtgtctgtgctccctggccctctcagctcctgcttcatagctgtcagctgcagtgggagacagctgcacaagggcccagcatgtctgtgtgtttacccaggggactgccgcatggcccatgccgagcagaaactgatggacgaccttctgaacaaaacctgttacaacaacctgatccgcccagccrccagctcctcacagctcatctccatccagacggcgctctccctggcccagtgcatcagcgtggtaggtgcagagggtacctgtggctcaggctcaggtgaagaggcagctcatgcccaagccctaagcagtcaatgtccag

SEQ ID NO: 747748 - DNA, 571 bp, Homo sapiens
aaactgactatgttagtccatctcaatgctataaaggaatacctgagactgggtaatttataaagaaaagaggagtatttggctgatggtttgcaggctgtacaaacaggccaccagtatctgctcagcttctgctgaggcccgggaagctgacaatcatggcttaaggcaaagggggagctggcatattacatggggagagagggagcaagggagatgccaggctcttttaaacaacaagatctctcgtgaattcatagagcaagaactcactcattaccrggaggacagcacaaaaccattcatggggatccacccttgggaaacaaacacctattactaggcccacctccaacactggaggtcgcatttcaacatgagatttggaggggacaaaccatccaaaccatatcactaacggaaagtgattgtttaaattgctgtattcagtcccttggcctttttgagaaatgccattcatttcagccatcaagcaaattattatttgagacatttatacctcttcatcctttaaaagtttcagaagcatgaatttaaaaagtattcattg

SEQ ID NO: 747749 - DNA, 649 bp, Homo sapiens
gggtcataagatcaaaggccagtctcgcagtaatgacagttactggatggaccgtgacatcactacattccactcttcctggtgagggggagggaccacatcagcatgatgtccgagtcaccgctccatgataggggagggaaaaacagagctgggacccaggtccttggagacgccagtgcacacagcctagggaggtccaccttgaggcagcaggagggaagggaagagtcagcagcagggagccccaggattcaccagcctaaagtcasccagggatgactggtgagggtggggtctggggctgtgggacccaggtccttggagatgtgagcccaaaaagccctgggaggtcaagcttggggtggcaggagatgagggcccagtaaaggagcggggagccccaggattcacctgcccaaagtcaccctggggtgattggtgagggcagagactgggctgcttgctgaaggggtggggctgactggcaaaactttggtgggggtagcccagaggcaccggtgtgggggtcccagtccggtgaacctcgggagtggtatggactctggcagcagtcttgtcgttggagaggatctatggctgggttgggggtccgtgacctggtgtgttttttccctttctcttggct

SEQ ID NO: 747750 - DNA, 525 bp, Homo sapiens
cctccagtcttgacttcccaaagtactgggactacaggtgtgagccaccagccccgccagccctgttacactattcttggcccctcaagtgactgtatgaattttaggatcagcctctcgagttccacaaaaaaattctattgggatttgtgtaggaatttcttgaatttatagattaatttgttgagaagtagtatgtttatagcattgagtcctacgattcataatatatatggcatrtatttcagtttagtcagttctccctttaagtccctgggtaatttttatatttgtcttagtcccttcatagtgccataacaaaacacctgagactgggtaatttacacagagcagaagtttattttctcagttctggaggttgggaagaacaagatcaagactccagcagacacagtgtctagtgagggcctggtctctgcttccaagatggtacgttgaatgctgcttcctctggagcaggcaaatgctatgttctcatgaggcagaagggacagatttaccacc

SEQ ID NO: 747751 - DNA, 525 bp, Homo sapiens
cctccagtcttgacttcccaaagtactgggactacaggtgtgagccaccagccccgccagccctgttacactattcttggcccctcaagtgactgtatgaattttaggatcagcctctcgagttccacaaaaaaattctattgggatttgtgtaggaatttcttgaatttatagattaatttgttgagaagtagtatgtttatagcattgagtcctacgattcataatatatatggcatatatttcagtttagtcagttctccctttaagtccctgggtaatttttatatttgtcttagtcccttcatagtgcyataacaaaacacctgagactgggtaatttacacagagcagaagtttattttctcagttctggaggttgggaagaacaagatcaagactccagcagacacagtgtctagtgagggcctggtctctgcttccaagatggtacgttgaatgctgcttcctctggagcaggcaaatgctatgttctcatgaggcagaagggacagatttaccacc

SEQ ID NO: 747752 - DNA, 620 bp, Homo sapiens
gtccctgggtaatttttatatttgtcttagtcccttcatagtgccataacaaaacacctgagactgggtaatttacacagagcagaagtttattttctcagttctggaggttgggaagaacaagatcaagactccagcagacacagtgtctagtgagggcctggtctctgcttccaagatggtacgttgaatgctgcttcctctggagcaggcaaatgctatgttctcatgaggcagaagggacagatttaccaccacccacaagcccttttataaggaaggcactaatctcatgcatgagggctcacccttatgtcttaatcacttcttaaaggccccacttcttagtactatcatcttgggaattaagttttaatacatgaattttgggagacacattcaggctatggcaatactcttcatgaaaggcctgtgtatactttgctagatatattctcagggttttgttgctattgtsaatagaatctcttttttttttttttttttgccacggagtctggctcctttgcccaggctggagtgcagtggcgtgatctcggctcactgcaagctctgcccctccaggtttaagcagcctgttgcccaggctggaatgcagt

SEQ ID NO: 747753 - DNA, 575 bp, Homo sapiens
gcttaacactgaggtgatgagttgataggtggaccaaaccaccatggcacacgtttccctacgtaacactcctgcacatgtaccctagaacttaaaacaaaattttaaaaataataaaaaataaaaatgtgaaattcagcacataaactgttggttttattattcatattttcttaattcagaaattattttctgaactatggtttattagataattttgacgtaacaattttttaagaggaaatttaagttttactttttaattggggctcttggttctttttaagaaagacagagataaatcatttatacatttaattagaagagactgggcttgaatttttaaaaagtactagaaatcgtagccmctatatatgttatctttgaaatgttttagacaataattacctaaacaaggagcaaataagttaaacctcttggattttaataagaactaaaatgtacagttgtattttctggttttttaaattgttacagtctaaatttattcttcctaatgaagaaatgtatgtgccgtcaatatcaggttctttgtgggtactcacagttccctt

SEQ ID NO: 747754 - DNA, 602 bp, Homo sapiens
tcaacttcataagaattagaatcaagtgtaataagaatgaactatatagaatcattgatataatttataggtgttcagacataacctttagacatatttgtcagtgtacatgtaaacaatactcaataacttctttaatagagttctccagagaaacagaaccaattggatgtgggtatataactcagttatatrtttcatcagcttcctttttatgtaatagaaactaactacagctaatgatgaatttttttcattcattcatcattaaaaggggagagagaaatccaggctgggtttgtgccatttttattccctcacagttctcttcttgctgcatgattcttcctttcagatattaaccagaaagaatggttagcctgactatagctctagaggagcaacacaggctctggataatgaggatgcacaggctttaatcagtcctagcaggaggtcttggcttagacaactatgtagttgatggtatccctataggaaaaaaaaaaaaatatatatatatgtttttgtggtagcaggacagagtcagtttcagacatttgttcaacaactgttggtgttcaacatatattagtattttg

SEQ ID NO: 747755 - DNA, 615 bp, Homo sapiens
ccttttatcattcattctaccaaacatcaacttcataagaattagaatcaagtgtaataagaatgaactatatagaatcattgatataatttataggtgttcagacataacctttagacatatttgtcagtgtacatgtaaacaatactcaataacttctttaatagagttctccagagaaacagaaccaattggatgtgggtatataactcagttatatatttcatcagcttcctttttatgtaatagaaactaactacagctaatgatgaatttttttcattcattcatcattaaaaggggagagagaaatccaggctgggtttgtgccatttttattccctcacagttctcttcttgctgcatgattcttcctttcagatattaaccagaargaatggttagcctgactatagctctagaggagcaacacaggctctggataatgaggatgcacaggctttaatcagtcctagcaggaggtcttggcttagacaactatgtagttgatggtatccctataggaaaaaaaaaaaaatatatatatatgtttttgtggtagcaggacagagtcagtttcagacatttgttcaacaactgttggtgttcaacata

SEQ ID NO: 747756 - DNA, 602 bp, Homo sapiens
tcaacttcataagaattagaatcaagtgtaataagaatgaactatatagaatcattgatataatttataggtgttcagacataacctttagacatatttgtcagtgtacatgtaaacaatactcaataacttctttaatagagttctccagagaaacagaaccaattggatgtgggtatataactcagttatatatttcatcagcttcctttttatgtaatagaaactaactacagctaatgatgaatttttttcattcattcatcattaaaaggggagagagaaatccaggctgggtttgtgccatttttattccctcacagttctcttcttgctgcatgattcttcctttcagatattaaccagaaagaatggttagcctgactatagctctagaggagcaacacaggctctggataatgaggatgcacrggctttaatcagtcctagcaggaggtcttggcttagacaactatgtagttgatggtatccctataggaaaaaaaaaaaaatatatatatatgtttttgtggtagcaggacagagtcagtttcagacatttgttcaacaactgttggtgttcaacatatattagtattttg

SEQ ID NO: 747757 - DNA, 608 bp, Homo sapiens
tagttcagccattagtctctgcccaggcaagtgtttcagccttgttctaacacaagtatttggatttttccaagagctgatgtcagggcttttcacagagacagaacagcatttataggctagagaaggaaaaagggtttccccagcagctatgctcaatgtggcctttgtactgctctactgccaaaggcaggaagaccctgctagatagagctatttaattcctggaaaaaattctaccctgggagggtggaggatggtgattggccagattccccattaaggaaacagcttaattttctatcaaattaaacccaaatttaaataagctcatcatcagaacaaaggtttcttaattcttattagaaaaaaatcattctgtggaacttgtatataaggaagagatgaaccagctasaataaacatacattatagaggtaaggaacaatacagtaaattgtgtcacatttcctggggttagcttccctgaaaaatattcatttgggaagaatggttaggtgaaaaacactcaaaagcctcaaactacatttggtagtcagaaattgtgctaggtgatagcttcaaacacatcatccattatctataag

SEQ ID NO: 747758 - DNA, 629 bp, Homo sapiens
agactcaatggtctgaatattttctactcactgtaaatttacagcatttgagactatacagtgacacataaacaaaaaagaaactttgctgctttttttctttgcttatatggaatgctttagtaaactactttcaaatagaacactgggtaaacaaacctatggttagcaagttctatactaccaataattttgtatgggggrattccagcaaacttcagattacttgactacacttgattgtttcgtaggtgttcttctttttaagattcttacacttagttccttaaaggatcactgtaatagaaagattaataattttggcccccaggggaatcttttggtgttaagaattatgaagttacttatatattttgccaatgtactatacaagtctattattcctattcattcattcaaaaaattagtttataactgcatactatgtagccaggctctagtctaggtcctcgtgacatatttgggggaagggaataaggaagatgacagacagtaataatcttaataaataaatgtatattgtatgtaatatgttagaagatgatatgcactgtatcaccctccccccccaccacacacaatccaacatgtacagcacattatgaagg

SEQ ID NO: 747759 - DNA, 588 bp, Homo sapiens
aagttgttatatactccattttgtacctaacttgaaattctacttggattacccaccccattaaatggttacctgcgctttctctgccttcctgatcagaacacgtttctctagtacttatttgaaaacaagagttttgcaatgctcttaattctttttcacttttgactgatcccctattcctaacttccaggttttgccaggatattttgttaattttagttcaatagycttagtcaaatgtatctcacagatagttccttcaatttctgagtccttatttacaactgaactttacctgaagtctaaacttctttttctgttatacacataagaaattattgaaatatttagtcccagcctcagtacatgcctccatttcctttcttttcttcacattcccaccaattgttgttcaggttcacatcagtgacaatgtttggaaagtcttctctcaaataggtttctctgttggggaacacaggagataaactgtctgaattgctgtgtatctttccttcaacctaacagaggggccacatctcagctgggtccaggattgttgggctgtagtcctttctctcagta

SEQ ID NO: 747760 - DNA, 526 bp, Homo sapiens
gttgtctcctaatagactgcaaaccccttgagggcaaaaggtagacttctttatctgcccttccagatcagccagaaaagttcctagaacatagtaaatgctcggtaaatgttccttgtgtcagtattgacagacaatgacttcctattacagctcattgctgactctagcccagcaaggggattgtactaactaggcccatgccattatctaggctcctgtagtgtcaggggcatgattacatcataaaaattacaactttgasgttatctttcatagttctagcatcctcattatactagactcaatgaccagaactgtgcatattcatcttggctcactgctcatacagtacctggatactttaggaattcagttcttaattgtgttttgttttttagagacaaggtcttgctctgtcacctactctggagtacagtggcacaatcaaagctcactgcagccttgaactcctggaatccagtgatcctcagcctcctaagtagctagaactatatgagtgtac

SEQ ID NO: 747761 - DNA, 526 bp, Homo sapiens
gttgtctcctaatagactgcaaaccccttgagggcaaaaggtagacttctttatctgcccttccagatcagccagaaaagttcctagaacatagtaaatgctcggtaaatgttccttgtgtcagtattgacagacaatgacttcctattacagctcattgctgactctagcccagcaaggggattgtactaactaggcccatgccattatctaggctcctgtagtgtcaggggcatgattacatcataaaaattacaactttgaggttatctttcatagttctakcatcctcattatactagactcaatgaccagaactgtgcatattcatcttggctcactgctcatacagtacctggatactttaggaattcagttcttaattgtgttttgttttttagagacaaggtcttgctctgtcacctactctggagtacagtggcacaatcaaagctcactgcagccttgaactcctggaatccagtgatcctcagcctcctaagtagctagaactatatgagtgtac

SEQ ID NO: 747762 - DNA, 495 bp, Homo sapiens
cacactaacgatctgtataatgtttcctggtgtccagcatcctattgttacctggagattcagttctttatatagtcttatgaaattttcctgagttttatctctgaatattttttctatttcatatatattcagctctctatagcaggggttggcaaactagagcccatgggccaaatctagccttctgcatgtttttgttaactaaagttttattggaacacagccatgctaattcgtttacatgttgcttcctggatacatcmgcagagtttcatagctgtgacagacagaaactcatggcctgcacagtttaaaatatttactattagatcctttacagaaaagtctgaagacccccgttttaagtgattgattgttaatcatgtgcatccatttgttcctgtttcaaatgtaattagtgtgttgcctttcatttcattttgttgttgctgtttatcactttagtttgggcatttgttttacagatgttgt

SEQ ID NO: 747763 - DNA, 542 bp, Homo sapiens
atgagggatatgcccccataacctgaacacctcccactaggcccacctccaacattgggggttgcattttaacatgagatttggaggggacaaatattcaaactatgtcaaccccacacataacttatggaggccaaatacaggagaggtcaagagtgtcctcttaggatagcccctctatctgactgaggaggatactctactttcagaagcggggaaaccaaggatcctgggatagcggcaaaagggagaggtcagagytccaatccagctatgcagcctcacatccttctggagtgtccctctccaccagctaccttcaggttctctatcaataaaatgatggtaatatctacagtgcaggattatggaaaatctagcaaggagcccaacatatggtggctcctcagcttacagctgatatgctaagccaagcatttgcaacgttgctttcatcccttggacagcctcctgtccttcagagctcctcttcctgctagcagcttcctgcgggcccatcgaggtgaaataaactctaatag

SEQ ID NO: 747764 - DNA, 626 bp, Homo sapiens
atcttggcagggtggccagggccttctcttcttttctgactgctgcttcccacaccagcctcaactcttgcctgtcccgccgcatgccttgatgataccaagcaaccctgtccaccctccatttcctggtgcccagcaccctttgctcttactgttccctctacctagaatgccattttcgccttcctctctggtcactgtgcctttatcctttaagactcagaccctcttgcaggaagcccacctggtcctctgtttctgcactgtgatcaaacctactttgtcatatttttaatctgttctagggtctgcttgctccactaggcccttattcctccctggggagccctctgctcaccaatgctggcacgttgcagggacttggtaaatattattaagctaaaaatgtctgagctgggaccagcctcaccagtggtagattgcaagctccccacggacacagccagtcttcaaacttgggstctctccatctctttactgaaatacaagcagtattattgaaatacatacaggggcagtctgtgcatgcaatgtgactgtgtgtaatcagcaaattcatggaaactacaaaaagcacaatttatcaggatatttccatgttttct

SEQ ID NO: 747765 - DNA, 560 bp, Homo sapiens
atgcaatcacacctattgtggggcaggaatgttgactgcatgaaagagtgtgtgtggggccagggagaagatgagagaaacatagaccctcttgtgcccaggaagaaaggaagttaattcagaattgaggagtctgccttctgaattttaagttcccacctgatgcctatagaaactgtttattacttgccagctcacattattctcctactgtcacagtctttaaaaaaaaaaaaaaaaggcatgagaccagagttttggactcattttgaaacagaacttagccaccgagatgggaagttccttgctgctttagttttatttattcctttcttgtctgcccccctccttctccctttcacacacrtctccccaatagcaagacctccacaaagttggggaagggaatgggtgacctttctatgataggagaagagttctgatttcttcatttttgagacaaaaaaagtgttgaattaagtcaaggaaatactcaagagaagcaaattcatcatcaaattggaacatcactggaacacgggagagaagttgggtggagg

SEQ ID NO: 747766 - DNA, 458 bp, Homo sapiens
atttaaaatagctacaagtgaaataaaatgtctgggaattaacttaaccaaagaagtgaaagatctctacaattgaaattataagacactgatgaaagaaattgaagagaatacacaaaaaaacggatttggaaaaatattgttaaaatgtccaaactacccaaaggttctatagattaaacataatgcctatcaaaatactaatgacattcttcacagaaagaatgatyctaaaatttatatgaaaccacaaaagacccagaatagccaaagccatcctgagcaaaaagaacaaaacaggaggcatcacattaccagacttgaaattatattacaaagccataatagtcaaaacagcattgtactggcataaaaacagaaatatagaccaatgcaacagaatagagactccagaaataaattcacacatttacagtcaactcgttttttacaagggt

SEQ ID NO: 747767 - DNA, 605 bp, Homo sapiens
gaatgaaactagacccctacctctcaccatatacgaaaataaaatcaaaatggattaaagacttacatctaacacatgaaactatgaaaatactagaagaaaacactggagaaacactccaggacattggtctgggcagatttcttgagtaggacctcaaaagcacaggtaaccaaagcaaaaaatgggcaaaggcatcacatcaagctaaaaaaatcytctgcacagcaaaggaaacaatcaacacagtgaagagacaacccacagaatgagagaaaatattttcaaagtaccctctgacaagggattaataaccagaatatacaaagttgtcaaacaactcaatagggaaaaaaagatcttatttttaaatgggcaaaagatctgaatagaacttttctcaaaagacaacatatgttattagcccgttttcacactgctataaagaactgcccaagactgagtaatttataaaggaaaggggtttaattgactcacagttcagcatggctgaggaggcctcagggaacttgcaatcatggcggaaggggaaggggaaggaaggcaccttctacaaagggtggcagggaggataatgaacacag

SEQ ID NO: 747768 - DNA, 604 bp, Homo sapiens
tccctaatattaacattcctaagagtaactgcaggacaataattgaaaccaggaaatggacatttgtacaataccgttaattactccacagatataatttgaagtttgccagctttctcactaatgctctttttcttgtccaggatccaatgattcrttatcttctattatatttatttgtcttgtctcctggactcctctaatctgtgatagctcctccatctttcttgaccttcacactttattttttttattttttatttttatttttgagacagggtcacccaggctggagtgcagtggcgcgaccatcagggctcactgcagcctcgacctcctggggtcaggaactcctcccacctcagcctcgtgagtagctgggaccacaggtgcgtgccaccacacctagtgatatggtttggttctgtgtccccacccaaatctcatctcaaattgtaatccccataatccccaagtgttgagagagggaccgggtgggaggtgattggatcacggggatggtttcccccatgctgttctcgggatagtgagtgagttcttacaagatctgatggttttataaggcagttttcccttgctggct

SEQ ID NO: 747769 - DNA, 573 bp, Homo sapiens
aaaagtatgagctctgagagcctacattgttagtgaactgattttgttaggcaacagaatttaaaatactcttggataaaatttctcaataaggaaaaatcatgtgagttgttaattttataagtatattcattattattactattagtgaaactaatgaattccacttggccttggattgccatataattagagaaataraattctctctttgcatgctgaactcattggcaatgggtaatttgacaactccagccagctctattattaatttcaggcttgttcaattcagcttcaattaaaatcaaacatttattttattactttcagttgaattgaattgaattgttatctttgaataggtaatgtgggtaatatatgcacaaggtaatatatgcaatggtaataaaattcaaacgtctaaatgtacacagagagaggaagtttctgttccaccactgacccttcatgtctgccccctcctcagtggtaactgctgtcgtcagggtttttttttttttttttgtgtgtgtgtcctttgaaagatttatcagagatacatctacttatatc

SEQ ID NO: 747770 - DNA, 600 bp, Homo sapiens
gtctttggttatgcaaatgtaaagtacagatcctagtctggaaaggagagtttgaaactatgaggaaggagccaaattcaaatggtggaaagtgttgtacactgtaggagttgcctctctgcagggattgttttggtactgactggaagacaaaggggaaatttactcttctagatgcagagaggggttgtcaggcattagtctcatggtggggaacttctgttcatggaggtggtaaattggctttgaaacatggtggcatgtatgagaggaaactaagggagagataccttcagaggcataactctatggactctgggagcagtggtctcacaccaagttttrtgggttctccctgtgttgtaactcccctttgtcctcctcaaattttcagtaagttctgttgaacaccatagtctgcctaaggctgtgtattgggaaattaagggagggtcagcatcctcactggggaagaattgggactgagaatgctcaggtggactggaaaagctggctaagccaagtggtgatgcacagaggcctagcatagtaatccagatctagatgtgacaaaagtgacagccaagatgacctctgggg

SEQ ID NO: 747771 - DNA, 580 bp, Homo sapiens
ccaagttttgtgggttctccctgtgttgtaactcccctttgtcctcctcaaattttcagtaagttctgttgaacaccatagtctgcctaaggctgtgtattgggaaattaagggagggtcagcatcctcactggggaagaattgggactgagaatgctcaggtggactggaaaagctggctaagccaagtggtgatgcacagaggcctagcatagtaatccagatctagatgtgacaaaagtgacagccaagatgacctctggggggcaaatacatccctcaggtacttcgaaaatacctggggaggaaaatctggctaaagactttgcaggaagtaggatacagtaaaacaaggagcccataccattgtttcttagcttgtraaggaaagggtaatcccagggctagagaactgaagactgatgggctgtacatggactcaacaaatatttgttgagcacctactctgtgcctggcacagcgctaggtactggggatacaaagatatcaaagaaatgctctgtcctgatacaactcattataacatgtactggattttcttggtggtagcatggaaata

SEQ ID NO: 747772 - DNA, 625 bp, Homo sapiens
ttttgaggtaggcactgggcttcatgctttcatatgatatctctaaataaaaataatctctatttgcactagcaatatgagacaaagtagctactatttattgagtgcctagcactgtgctgggttttgttgcttttctttgtggatggtaaaacaaaacagaaggtcagaargtgacttgcctggggtcacacagctggtaagtgatgtctgttttccatctctttctcagtggatctggtagagtagagaccttgcttggaagctgtagagggtggcaatggagagggccaatctctggagtctaaggaattccagaaagaaggtgatcgggattgtctgcctgtttgtgtgaggatttgcagtgacagtgcgaggaggcagctatatctcctccacttttcgccccctgtggaacctgtttttgaccctcacattctcttgacttctgtctcattccctatcctgggagccagtgttttggagctgggggaggtgaatttccagtcccatgagttggcaagtggggaagggagttccaatctcactgcttctgaggacactatgtttcttggaacacagtggaaccctgactcaattttcccagggcaccctccatagatgt

SEQ ID NO: 747773 - DNA, 640 bp, Homo sapiens
atggttttgaggtaggcactgggcttcatgctttcatatgatatctctaaataaaaataatctctatttgcactagcaatatgagacaaagtagctactatttattgagtgcctagcactgtgctgggttttgttgcttttctttgtggatggtaaaacaaaacagaaggtcagaaggtgacttgcctggggtcacacagctggtaagtgatgtctgttttccatctctttctcagtggatctggtagagtagagaccttgcttggaagctgtagagggtggcaatggagagggccartctctggagtctaaggaattccagaaagaaggtgatcgggattgtctgcctgtttgtgtgaggatttgcagtgacagtgcgaggaggcagctatatctcctccacttttcgccccctgtggaacctgtttttgaccctcacattctcttgacttctgtctcattccctatcctgggagccagtgttttggagctgggggaggtgaatttccagtcccatgagttggcaagtggggaagggagttccaatctcactgcttctgaggacactatgtttcttggaacacagtggaaccctgactcaattttcccagggcaccctccatagatgtggttattaccg

SEQ ID NO: 747774 - DNA, 583 bp, Homo sapiens
actctccagcactcagtgtctgatttctgctctgttggcttgcaccacggggggtgttcacaccccacctgggtgtttgcttgtaccctgttgacttcatttgctataaatgcaacctggatcatgtgaatcctgaaacatttcttactttggttcctttcaatggcagagctagattaacccaatctacatgggggtggtgtagaaagagttaccatctaacctgactcatgtctgatcatttcctgagtttgtgaagcacaactgattgcatagcaattctcacctgtgacttggtgctgcatcagactggggcttctaacatgttagaatgacaggttgatagaagctgtgtaggctggaaagcgctttgtcctgctctcacgctttcctctgtggtatgtcggagcttagaaatggggaggaggtaagacaacctgcagagacrcacagccctgctaactatcccttcttgccctcctcttcccttgtggcacagattttgggataatggaaggatgggggcctgaacagtggagtgtatgacatggtttctgaatgctggggcacttgtattatctgg

SEQ ID NO: 747775 - DNA, 521 bp, Homo sapiens
caaaaatacttaatttttagagaagttttaggttcacagcaaaattgagttaaagatactgaaatgtttccattttacacccctctcgcttcccatgcacagcctctaccattataaacctctttcaccagagcggtacatttgttacaattgcttaacatacactgatgcattataattacccaaaatctatagtttaaattagagctcactcttggtgttgaacattctctgggctttggcaaatgaataatgtgatgtgtccaccaytaccgtgtaatacagaattgtttcactgccctacaaatcttttgtgccctgcctactcatctctccctccccacaatccctggcaaccactgatcttattactgttaccatagttttgccttttacagaatgtcatatggttggaatcatacaacatgtagccttctcaggtgggcttctttcttttagtaatacacaattaagtttcttctatgtcttttttctggcttgatagctcatttctttttagt

SEQ ID NO: 747776 - DNA, 592 bp, Homo sapiens
ttagagctcactcttggtgttgaacattctctgggctttggcaaatgaataatgtgatgtgtccaccactaccgtgtaatacagaattgtttcactgccctacaaatcttttgtgccctgcctactcatctctccctccccacaatccctggcaaccactgatcttattactgttaccatagttttgccttttacagaatgtcatatggttggaatcatacaacatgtagccttctcaggtgggcttctttcttttagtaatacacaattaagtttcttctatgtcttttttctggcttgatagctcatttctttttagtgctgaataatattccatctattgtctaaatgtaccacrgtttatttattcatttacctactgaaagacatcttggttgcttccacattttggcaattatgaataaagctgctataaacatatgtgtgcaggtttttgtgtgaacatagtttttcaactcctttgagtaaatcctaaggaatgttattgctggatcatataataagaatgtgtttagttttctaaacaactgcaaaactgtctttcaaagtggtcgtaccattttacattccc

SEQ ID NO: 747777 - DNA, 555 bp, Homo sapiens
aacaaattagataactaggagaaatagatacattcctagaaacatacaactgatcacaactgaatcaagaagaaacagaaagtctaatcagagcagtgacaaataagaagatttactcagtaatgaaaaactttttaataaagaaaaaccagatagcctcacaggtcaattctaccaaatatttaaagaagaattaatgccaattctttttattttttaatttttatttatttatttaagactgggtttcactccgtcacccaggctgaactgcagtggcatgatcatacctcactgtaacctcaaactcctgggctcaagtgatccttctgcctcagcctctctagtarcttggattacaggtgtgagccaccacattcagccactaataccaataatttgaaaatccaaataatagaataaaacattccaaattctttttatgaggctagcatcaccctgctagcaaagccagacaaagatgccagaagaaaactacaggccaatatacccgatgaacatggaagcaaaaatcctgaaaaatattagcatttt

SEQ ID NO: 747778 - DNA, 572 bp, Homo sapiens
tgtatattcccttatattatttatttataaatcatatacatgtgttagtatactactatattgtgcacattataaaacatacacaatacaaagacatttttttgagacaggatctcaccctgttgcccaggctggatacagtggtgcaatcttggcacactgcaacctctgcctccgtgggctcaagcgatcctctcacctcagcctctggagtagctggcactacaggtgcgtgctgccacaacctggctaatttttttgaattttttttttttatagagatggggtctcaccatgtttcctaggctggtcttgarctcctgggctcaagcagtctgcccaccttggcctcccattagaggtgtgagccactgcccccagcccacaatactaaaatttttaaagggatacaataaaaataaatagacatggaattctcttctagagatgcatctgcttgccaggctctggagtgtattcaccctacttacggggccactggtccaaccattagtaaatataagagtgataatttcagaatggacatgaagggagggctcagtcatgaaaga

SEQ ID NO: 747779 - DNA, 647 bp, Homo sapiens
gctggttatagagagagtagaaactctgagttattctttttgtttgccagtacaaaataaataccacttaatgtaatatacacattaatactgacaagagagatatttatctagataaataatcctagtaaaatcacatattttgatttttggtggaaatcaaatttttcttttcctttttggttagcggtggaaaggcccagatagaaaaaataatgggaaaagggcaagaaattggctggaactatttcctaagtagcagggagtggcaggaggtgtgagctgacagacagcagagactgtccttggatagccaccctctctttcatgctctgctcttctactctccctctgtcattttctctttctaagatgtgctgatctgttgaataggaagggaaacatttttgcaccctcccccaacattttgcttgacatacctatggggaaagttttcgacaagtgcttcccaggggtgtgtcccacagwgtcactccctgagaacaccatcaatttgttctacaggaatgattggtgtgggcccagagaactctcattatctacttcttgggctttccatgtgaagacaaggggcctcttggagttagactatggaaaactgccctgaagctcttggaaacaaggta

SEQ ID NO: 747780 - DNA, 613 bp, Homo sapiens
tcagaatatgaaacattattgaaatacatattaatatttcatatgtcttagtcatggctgggagggttcagcctaattggcaaactcagctttatcagggaatccttggtatctgctgctgaaatgcaactcagatccttgtcacctttgagcctgtccttcacagataaaagacatgagtttggaatgggtttctgcrctgtggaagggggaatagacttactcaacgtcttggctttaagtcctagctctggtacttgttaatcttggtattttaaataagtctcttggcaggcacggtggcttatgcttgtaatccagcactttaggaggccaaggtgggagatcccttgagcctgggagttggagactagcctgggcaacttagtgagaccatttctacaaaaaactttaaaatcagttgggcgtggtggtgcacacctgtagtcccagctaactcgagaggatagcttgagtccagaaggtcaaggttgcagtgagctatgatcacaccactgcactccagcctgggtgaccaaacaaacaaacaaacagaaaaaaacaacaaaaacaagtttcttgacctccccggggctcagcaactaacagataa

SEQ ID NO: 747781 - DNA, 531 bp, Homo sapiens
acatatacactatgaaatactatgcagtcataaaaaaagaatgaaatcatgtatttttcctaccaacatagatgcagctggaggccattaccctaaagtgaattaattcaggaacagaaaaatcaaatactgcatgttctcatgtataagtgtgagctaaacttttgagtacacataaacacaaaaaggaaaaccataaatgccagggcttacttgatggtgaagggtgaaagttagaatcagaaaactacytattgggtactatgctcactacctgtgtgataaaatcatttttacaccaaaccccagtgacacacaatttactcatgtaagaaatatgcacatgaacccctgaacttaaaagttggaaaaaaaccttggtcttctcttaaaattactgggtttcttttggagagactataataagagtttataaaaggctttttaaaactctctttacacaaacttcttggaaaaaaaaattctgtgtttaatcaaaataatttattgtgctctgtattttattaggtc

SEQ ID NO: 747782 - DNA, 531 bp, Homo sapiens
acatatacactatgaaatactatgcagtcataaaaaaagaatgaaatcatgtatttttcctaccaacatagatgcagctggaggccattaccctaaagtgaattaattcaggaacagaaaaatcaaatactgcatgttctcatgtataagtgtgagctaaacttttgagtacacataaacacaaaaaggaaaaccataaatgccagggcttacttgatggtgaagggtgaaagttagaatcagaaaactacttattgggtactatgctcastacctgtgtgataaaatcatttttacaccaaaccccagtgacacacaatttactcatgtaagaaatatgcacatgaacccctgaacttaaaagttggaaaaaaaccttggtcttctcttaaaattactgggtttcttttggagagactataataagagtttataaaaggctttttaaaactctctttacacaaacttcttggaaaaaaaaattctgtgtttaatcaaaataatttattgtgctctgtattttattaggtc

SEQ ID NO: 747783 - DNA, 588 bp, Homo sapiens
ccctctatgtgtccatgtgttctcatcatttagctctcatttacaagtaagaacatgtagtatttgtttttctgtttctgcattagttttctaaagataatagcctccagctccatccttgctcctgcaaaggacatgatcttgtttgttttcataactgcatactattccctggtgtatatgtaccatattttctttatccagtctgttactgataaacatttaggttgattccatgtgtttggtattgggaataatgctgcatgcatgtatctatataatagtagaatgttttctattcctttgggtatagacccagtaatggaattgctgggtggaatggmaattctatttttaggtctttgaggaattgccacactgtcttccacaatgattgaactaatttacacttccaacaatgtatgtgttcttttttctccacacctctgccagcatctgttattttttgactttttaatactagccattccaactgatgtgagatggtatctcatggtggttttgctttgcatttccgtaatgctcagtgaagttcagctttttaaaatatgcttgttggatccacat

SEQ ID NO: 747784 - DNA, 586 bp, Homo sapiens
agaaagaaagaagttaaactgtttattctcagattatatgaagaaaatctgattgactctacaaataagctactagagctaataagtgagtttagcaagattgcaagattcaggtgggtatacacaaatcaattgtatttgtatatgctaacaatgaattgaaattaaaataatggtactatattagtccattctcacactgctgataaagacatacctgagactgggtaatttataaagaaaaagaggtttaatggattcacagttccacatggctgaggaggcctcacaatcatggtgaaaggtgaaaggcatgtcttacacggcagcaggcaagaaaaagaacgagaaccaagctaaagggatttccccttataaaaccatcagatctcrtgagacttattcactgccatgagaacagtatgggggaaacagcccccaggattcaattatctcccactgggtccctcccacaacacatgggaattatgggagctataattcaagctgagatttgggtggggacacagccaaaccccatcaggtaccctttttaagcacataaaaaatatgaaataggtttgga

SEQ ID NO: 747785 - DNA, 610 bp, Homo sapiens
gagtgcttatgtgattctcactcctgccccaggtcccctccagctcctcccttttgcggtcccgaggtctagcctaagtcccccttgcttctcttgcagggtgtttatttctctcggcttcttcctctccctacgctctcactttgttttatttcatctccgtccctctgccctccccttttcgctatcggtttcaattctccgctgaaacctctgaggaggccctgcccgccccactgtcccgccgaccctccccgcagcacccaccctgcccggcttctccggggcttgccctcctgtagcccaggagttggggctgggggcggctgtgctgacatcactggcgtttatgcactgctccttgcccaacgcaaatctcatcctcsttctctctgaatcaattcacttttattgcctcagctgctcaaaagcaatttttcaagaacaaaaaggtcagcacgtccaagactaatcaattctcggagagctcctgccgctgccaggggagccgggctccagcagccccccgcccttcccgccagcccctcccaccagccccatcacttttattgcttcatgatgcctgtcattagtggtgtgtttgagacgc

SEQ ID NO: 747786 - DNA, 552 bp, Homo sapiens
tcccagctgagacaggagaatcgcttgaatccaggaggcagaggttgcagtgagccgagatcgcgccattgcactccagcctgggcaacaagagcaaaactccatctcaaaaaaaaaaaaaaattagccaggtgtggtggtgggcgcctataatcccagctacttgggggagactgaggcaggagaagtgcttgaacccaggagttggaggttgctgtcagccgagattgtgccactgcactgccgcctgggtgacagagtgggactccatctcaaaaaaaaaaagmaaaaaaaaaagcccgataacttcccattcccccctcacactccaagcaacatcaactgtctgtctcaatgaatctgactactcctagcacctaatctcagtgaaattatacagtattgtctttttgtgactggcttatgtcacttagcacaatgtcctccaggttcatccatgccgtagcgtgggtcagaatttccttcccttttatggctgaataatattccattgtacggatggaccgcgttttgtttatcttttcatccacc

SEQ ID NO: 747787 - DNA, 625 bp, Homo sapiens
tagtacccaaatattttttaaaaacacttaagatgtaagaataaaaagacaaatgactcaatttaaaaatgggcaaataatttaaatagacatatctccaatgaagatataaatggccaataagcacatgaaaaattctccacatcattattccctggagaaatgcaaatcaaggccgagcgtggtggctcacgcctgtaatcccagtactttgggaggccaaggtgggcaggtcacctgaggtcaggagttcgagaccagcctggccaacatggtgaaaccccatctctctaaaaatacaaaaattagccgggtgtggtggtgcacacctataatcccagctactcgggaggctgaggcaggagaatcgcttgaacctaggaagtggaggttgcagtgagccaacactgcaccactgcactactgcctgggcaacagagtgagactccatctcraaacaaacaaacaaaaagaaatacaagtcaaaaacaacgttgagataccactccacacccactgggatggctataataaaaaaatgggaaataataagtgttggtgaggaggtcctagagaaatcggaaccctcattccatggtgatgggaatataaaatggagcagcca

SEQ ID NO: 747788 - DNA, 511 bp, Homo sapiens
gctgctatgaatgtgtgtgtatctgtcagagttcctgttttcagtgctttagggaatatacctaggagcggaattgctgggccgtctggtaattctatgtttaactttttgaggaaatgccaaaccagtttccacagcagctgcaccatttcacattcccaccagcaatgtatacaggctccaatttctccacatcccttgccaacccttgttattctctctttttaaaaaataatagccatcctagtgggcgtgaggtagtgtctcatagaggttttgatttgcatttcaccaatgattgtgacgcrggacatcttttcatgtttcttggccctttgtgtaccttctgtggagaatatctattcaagtcgtttgcccgtttgttaattgagttgtctttttgtagtcaaatctaatagttccttacaaattctggatactagatacttatcagatacatgatgatatgggttggctctgtgtccccacccaaatctcatctcaaattgta

SEQ ID NO: 747789 - DNA, 634 bp, Homo sapiens
gctactccctgctatctgcatgcctgtccctaacagtcatgctcacttctacatctcccttctcatcctccgtgaaccaacaaaaaggctgtgtggttcttaagattgtgtgtggggccgggagaaggggctcactcctgtaatcccagcactttgggaggccrgagtggacgagtcacctgaagtcaggagttcgagaccagcctgaccaacatggagaaaccccgtctgcactaaaaatacacaaattaagccaggcacggtgactcacacatgtaatcccagcactttgggaggccgaggtgggcggatcacgaggtcaggagatcgagaccatcctggctaacacagtgaaaccccgtctctactaaaaatacgaaaaattagccgggtgtggtggcgggcgcctgtagtcccagctacttgggaggctgaggcaggagaatgccgtgaacccgggaggcggagcttgaagtgagccgagatcacgccactgcactccagcctgggtgacagagcaagactctgtctcaaaacaaacaaacaaacaaaacccgacacaccccatcatggaactggaggcctgggacttgaatgaaggttacaggacaaaaggacttgaggtgaccaaggt

SEQ ID NO: 747790 - DNA, 634 bp, Homo sapiens
gctactccctgctatctgcatgcctgtccctaacagtcatgctcacttctacatctcccttctcatcctccgtgaaccaacaaaaaggctgtgtggttcttaagattgtgtgtggggccgggagaaggggctcactcctgtaatcccagcactttgggaggccggagtggacgagtcacctgaagtcaggagttcgagaccagcctgaccaacatggagaaaccccgtctgcactaaaaatacacaaattaagccaggcacggtgactcacacatgtaatcccagcactttgggaggccgaggtgggcggatcacgaggtcaggagatcgagaccatcctggctaacacagtgaaaccccgtctctactaaaaatacgaaaaattagccgggtgtggtggcgggcgcctgtagtcccagctactygggaggctgaggcaggagaatgccgtgaacccgggaggcggagcttgaagtgagccgagatcacgccactgcactccagcctgggtgacagagcaagactctgtctcaaaacaaacaaacaaacaaaacccgacacaccccatcatggaactggaggcctgggacttgaatgaaggttacaggacaaaaggacttgaggtgaccaaggt

SEQ ID NO: 747791 - DNA, 617 bp, Homo sapiens
acacaatcctctgagctctgcttatcccctggagaggtgagtttagggcagatgtagtgggtttgggagcctcagagggcgagacctgtcctacccacgcccagatattcatagggaagggagcagtctgtgatgcaggaccttcctggttaagtaaatagccttgttttatttcttctttctaagacaattaggacattatgccaagtgattgaaatttatttgcataggaacattatattacttgtgaataccactaggagaatgaaggggcagtggggctgtttgggttgagaaactgagactcttttgtgtgatggaacaaatacactgttctggaagaagaaggaaactcagatcttttgctggccctratgttgagcagctgagtgaccttgggcaagttacttcatctctccaggcccccatctccttgtttttggagtgttgaggttacattattacatcactttgtagagccttctcatttgggactttgtaatccatgagggaaactgtctgcaagccccaaagcccttaatcttgattgaaatatggtcaaaaatagatctggaagtaattttaaaaagcaatttaaaatgttaaatatgatgtat

SEQ ID NO: 747792 - DNA, 606 bp, Homo sapiens
cagctacttgggaggctaaggtgggaggatcacctgaacctgcgaggtcgaggctgcaatgagctgagatcacaccactacactccagcacaggcaacagagtgaaaccctgtctcaaaaaaaaaaaaaaaaaaaaaaggaaagaaaagaggaagggctggaaagtcaacaacctaagctttcagcttaagaaattagtaagcaaacagcaaattaaatccaaagaaagctgaaggagaaaataatacagataaaagcagaaattaatgaagtagaaaataagcataaaaatagaggatgaacatgttatctgtattattattatttctgttttttttgttttttgttttttkttttttgagacagaatctcactctgctgctcaggctagagtgcagtggtgtgatcttatctcactgcaacctccatttcccaggttcaagtgattctcatgcctcagtctcccaagtagctgggattacaggcatctgccactactccgggctaatttttatatttttagtagagacagggtttcaccatattggccaggctggtctcgaactcctgacctcaggtgatccgcccacctcggcctcccaaagg

SEQ ID NO: 747793 - DNA, 580 bp, Homo sapiens
acaacatattaatcttttaaccaatcataaaaagtgtgaaaagataagccacaagccagaaggtatttgcaacacacattatttaagatgagtatctagaactcttacaaatctagaaaaagacaatcaaattgaaaagtaagcaaaagatttatataggcccttcataaagaggaaayacaaatagccaataaactcattaaaggatgctcaatatgactggaaaccagggaaatacaaattaaaatcactcagacatttcaagtttataatgttggtaagcattttaaggtctgattctatcaagtgttggctaggatgtgaagttactggaattcttacatacagctggaaaaacaacaatctgcttttcttggtaaaatagcagatacgcatacctgtaactcaaaaattgtcttaactataccctaaagaattcgtgtgcatgtgtgccagttgatgtgtgcaagaaagtttacagcagaactgtatgcaacagcaaaacactggaaccaactgaaatgtccatcaacagcagaaaagagaaggaaaagacgctctattcatacaaggctgtgaa

SEQ ID NO: 747794 - DNA, 518 bp, Homo sapiens
ttccagaggaggtgatgcctcaccctgctttggctctcacacagtgggatgcacccactgtcctgcacccactgtccagcactccccagtgagatgagcacagtacctcatttggaaatgcagaaatcacccatcttctgtgtcacacaggctgggagctgtagactggagctattcctattcagccatctttgagttcctctgaacaaggaaatatcttcagaaaaaactgkaaagaagcattatgagaaactgctttctgatatattctttcttctcacagatttaaatccttcttttgatggaatagtttagaaacactgtttgtatacaatctgcaaaaggatatttgggcacatggaagcctgtgttgaaaaatgaattatctccagatatgaactagaaggaatctttcagaggaactgctttgtgaggtgtgcattcatctcacagagtaaaactttcttttgattgagcagtttggaaacaatgttcttgtagaatctacaaaggcataa

SEQ ID NO: 747795 - DNA, 527 bp, Homo sapiens
gttgataaaggaaaaatcttcgaaaaaaactacaaataagctttttgagaaactgatttttgatgtgtgcattcgtctcacagagttaaacctttattttgattgagcagtttggaaacactgtatttgtagaatctgcaaatggatatttggcagtgcatgagacctatggtgaaaaaggaattatctttggataaaaactagaaagaagctatttgagaaacttctttgtgatgttgcattcaactcacaattttaaacctttttttagattgagcagtttggaaacagygcttttgtagaatctgctatggcatatttaagagcgcattgaagcttatgctgataaaggaaatatctttggataaaaactagaaagaagctttttgagtaactgctttgtgaaacatacattcatctcacagtgttaagtttcttttgactaagtagtttagaaacaccgtgtttgcaaaatctccaaagcaatattaggtagctcaaaaatgctagggtgaaaaaggaaacat

SEQ ID NO: 747796 - DNA, 594 bp, Homo sapiens
aaggatttttgggaacacatagaatcctatgatgaaaatggaaatatcttcagataaaaactagaaagaagctttttgagaaactgctttgtgatgtatgcattcatctcacagagttaatattttcttttgactgatcagtttggaaacactgtttttgcataagctkcaaagtgatgtttggtagtgcaaaaaggcctatggtgaacaaggaatatcttcagataaaaattggaaagaagcattaagagaaactgctttctgatgtctgggttcatctcatatagtttaatacttctttaatggaacagttcagagacactgtttttatagaatctgtgaagggatatttgggagcgcattaagggcagtggtggaaaaggaaatatcttcagaaaagaactagacagaaactatctgagaaacggtgaagttatgtgtacattcatctcacacagtgaaaactttcttttattgggcagtttggaaacactgtgtttgtagtatctgcaaaggtctattttggcatgcactgaggcgtattctgaaaaaagaaatatcttcgaacaaaaactagaaagaagttctttgaca

SEQ ID NO: 747797 - DNA, 572 bp, Homo sapiens
tggttctaaagtccatattcttaaccactctcctgcactttcatatgacctcaaatgagagcgcatcaaaagagaaagtgagggggtggggtgcccatcactgtcatctgcttcctgacaaccaaagccaaaagggaaatatgttatatgcatacatatatrtgtatatatgagtagatgtataaatatagcatattgatacatgaatttttatatatgcatgtatatatattatatatattcatatatatgatatataccctaaaagtagtttattttataatgtatatacataatatatctatatgttatatctacatacacacaatatatactgtatatagtttattttataatgtgtatatatatttatatactaaaatatttttatatatttatattaaaaccatataaatatatatttattttaatatataaatatgtatttattttacatacacacacacacacacacacacacacacacacacacacatattataaaataagctacctttaggaaaacaccccccatgcttggattaaatcactatacaccaacaatttaaaaa

SEQ ID NO: 747798 - DNA, 572 bp, Homo sapiens
tggttctaaagtccatattcttaaccactctcctgcactttcatatgacctcaaatgagagcgcatcaaaagagaaagtgagggggtggggtgcccatcactgtcatctgcttcctgacaaccaaagccaaaagggaaatatgttatatgcatacatatatgtgtatatatgagtakatgtataaatatagcatattgatacatgaatttttatatatgcatgtatatatattatatatattcatatatatgatatataccctaaaagtagtttattttataatgtatatacataatatatctatatgttatatctacatacacacaatatatactgtatatagtttattttataatgtgtatatatatttatatactaaaatatttttatatatttatattaaaaccatataaatatatatttattttaatatataaatatgtatttattttacatacacacacacacacacacacacacacacacacacacacatattataaaataagctacctttaggaaaacaccccccatgcttggattaaatcactatacaccaacaatttaaaaa

SEQ ID NO: 747799 - DNA, 406 bp, Homo sapiens
tttattattgagggcatataataaaatagatatatagaatttcccatgggtagattgtcaaaatttcacgtgatctggctcccaaaacctggagaagacagaaggtggtgcatggggacgtgggggatgatgataagcagagaggaggaagaaactttagagacttgatataaattaacagagcatagcaagaaataagaatgggctttcaaaaattttaaattygattgagttggtaaaaattattcattatcattgtcaagaatggccccacacaaaactgttgactatatatagtacagaacattgtgcttaggatcagagagataaaaagacattaatattaatattttaatccatttaacatcatttattatgtgccctccatgtatgagatattgtgtta

SEQ ID NO: 747800 - DNA, 627 bp, Homo sapiens
tatctcatccctggtgagccaacagaaaaataaaaccaaaacaaccaaacaaaagacagattactactgtttttcatagtaatccaccatattataattttaataaagatgtaggtcatttttccacttaagtttttgccttctaatagaatataaaaggcatattattttagtttttaataggatcaaagattctataactaaatatacaatacattatttctgtatcactttttgttctttgagatttgttacagacaactcagtattaccttttaatttttgagagattttcttaatacaaccacgattttctattctactaattccagttttgctaattgtctataagctgttctttgtcagtcagagattttttttactgcayacgaaatgcctgctattaaaatgtttagctttggctaataaataataactcaattatattattatcacataagcaggcttcaaaatacccttactgatcctacatactttgaaatgttgttgtcatgaggtccacaagtcattactgttgcttatagtgtaattttctatcactctaatattgaaattttaaaatcattattgcaaatttcaacactcagtatgacttctgagtaataa

SEQ ID NO: 747801 - DNA, 627 bp, Homo sapiens
tatctcatccctggtgagccaacagaaaaataaaaccaaaacaaccaaacaaaagacagattactactgtttttcatagtaatccaccatattataattttaataaagatgtaggtcatttttccacttaagtttttgccttctaatagaatataaaaggcatattattttagtttttaataggatcaaagattctataactaaatatacaatacattatttctgtatcactttttgttctttgagatttgttacagacaactcagtattaccttttaatttttgagagattttcttaatacaaccacgattttctattctactaattccagttttgctaattgtctataagctgttctttgtcagtcagagattttttttactgcataygaaatgcctgctattaaaatgtttagctttggctaataaataataactcaattatattattatcacataagcaggcttcaaaatacccttactgatcctacatactttgaaatgttgttgtcatgaggtccacaagtcattactgttgcttatagtgtaattttctatcactctaatattgaaattttaaaatcattattgcaaatttcaacactcagtatgacttctgagtaataa

SEQ ID NO: 747802 - DNA, 637 bp, Homo sapiens
aatttttctcttcacattatttgaatactttctctaagagtgttttcaaggtagatctttgcgtagaaaatctgaggcctgatgtgtcactgagtatttgtattacacattcatattttaataacattttagcttgttatcaaattctggaataaagttatttttctttaatacgtacaaatattagtgtattgtgtatctagcattgctgttggtaagtctgatcgcaactttatttttattcttttgtagatgatctgttatttccttctgcatgcttttagaatctctcttggtatttgatattcttaagcctcacttcgtttgatatttttaagtctctattgttaaatccccccacttcttatctgtactgtttaacacattcaaatagaagtctttatcttttattaattktaaaaaaattatgttttttcaaagattttttcttctcttcatatgctttctttctggtactcttatcacgcatatgttggcacttctacatctgtcctttatatctattacttctctttgtctatattttctctttttacatatttaaaattttcttcttggagaattactgaatcaggctttctatctctttaaaattcttcaactgcacccaacctat

SEQ ID NO: 747803 - DNA, 639 bp, Homo sapiens
tttaatatttactccccctgtttagtccagatttgtctagaccagtgttcttgacctgggctcatttggcacacagggaacatctggcattgtctgcattcatttttggttgtcataactggactggggtggatgctactggtatctagtgggtagaagccaggagccaggaatgctgctaagcaatttacgatatacaagacagtccccctccmcaaaaaaaaaaaaaaaaaaaaaaaaagaagaagaagaagaagaagaaaaaagaattatctggctacaaagttcaatagtgccaagtgtgagaaaccctgatcttcattctgaactctggaaccatgctccagcctttccttaatagggtatacaaaaattcttcatattttgaaacaactggaaaaggaataagccagttttaaatttacaccaggtacaatagtttttcttttgatattaaaaatgcttaaaggatgtggaaataattcaagcttgttttacctttgaagatacaataagaaattcatccaatagaagtaaacagcaattgctccacattgccactgcagatgagctggtatttcaacaaacaagggcagcacaaaaatgatgcccgtcgtgtagataatccattcaagaaca

SEQ ID NO: 747804 - DNA, 623 bp, Homo sapiens
taagtataactgtagtgtagttactgttagatcactgggctattgattatgaactatactaatagcaaaacacaacatactcaaggagagctaaagcgcttacagcaatggttagtcagttgccatcaccagtgttaaaggcataaaatccccacgagtctgcattctccatactccaagtgctcagtaagccttgtaggtttaacttgggtgacggctgctaccatggtctgtaccaaagtcttcaatttagggaaatgaactcaytgaaggtgaataaaaattcttcattggcctagagcagtgtcgtctaatagaactttctgcaatgacgaaaatgttttctacctgtgcagtgcaatatgagagctgcaagccaaatgggctactgagcatttaaaatgtggctagtgttactggaaaacaaatttttaactttatttaatttaaactagtttttaagttaggaagccacatgcaactattggttcccatactagatagcccaaatctagaccaaaatttgcaactccagtcctcaaatatgttttgttttacatgcacacaattttaatttgttgccaatatttacacaattgtgggctgctattgccacatggcaa

SEQ ID NO: 747805 - DNA, 623 bp, Homo sapiens
taagtataactgtagtgtagttactgttagatcactgggctattgattatgaactatactaatagcaaaacacaacatactcaaggagagctaaagcgcttacagcaatggttagtcagttgccatcaccagtgttaaaggcataaaatccccacgagtctgcattctccatactccaagtgctcagtaagccttgtaggtttaacttgggtgacggctgctaccatggtctgtaccaaagtcttcaatttagggaaatgaactcattgaaggtgaataaaaattcttcattggcctagagcagtgtygtctaatagaactttctgcaatgacgaaaatgttttctacctgtgcagtgcaatatgagagctgcaagccaaatgggctactgagcatttaaaatgtggctagtgttactggaaaacaaatttttaactttatttaatttaaactagtttttaagttaggaagccacatgcaactattggttcccatactagatagcccaaatctagaccaaaatttgcaactccagtcctcaaatatgttttgttttacatgcacacaattttaatttgttgccaatatttacacaattgtgggctgctattgccacatggcaa

SEQ ID NO: 747806 - DNA, 615 bp, Homo sapiens
ttcatgcacatttgaaacaacaatagcatgcatgccaagcgaaacatatacaaaagctttaccagccaacaaacaccagtttgtagtctctgttacaggtgtagattatttaaataaaaaatattttaccatattattctctattacatataataactaataggattctttaatccaagaaggccttccttaaatagttattgtctcatttcccttacagcctatggaaaatgagaagctttgtttaaagctggaaattattattattaggttgtgattacaacaacatatgtcaagcataaacccrggaagaattttgttttagagaatttaccttcatgcattcagggaggtattctatcatttctgtaattggacatttattgcctggagaattatgactgaaaatcttaagacattcatcccatctgtaaaaaataaataagtaagataagcacaggtcttcatccttctgttctgtacaacagctgaaactcaagattatttctttaggggaaacctaaacttaagcatattcatgaaatgcaatgctcacccttggttccaatggaaccaacatgtaaagcaagatcaactcagtaataggatccttgc

SEQ ID NO: 747807 - DNA, 680 bp, Homo sapiens
acctgcttggatcccttccatgctgtggaagctttgttcttttgctctttgcaataaatcttactgctgctcactctttgggtccatgctgccttaatgagccataacactcactgcataggtctgcagcttcactcctgaagttagtgagaccatgaacccactggaaggaagaaactctggacacatctgaacatctgatggaacaaactcatgacacrccatctttaagaactgtaacactcaccatgagggcccacagcttcattcttgaagtcagtgagatcaagaacccaccaattctggacacaaaaacatggaaaagacagccatctacatgccaaggagcaataattttttcctttttcagaataaaatacccctgtgagggtttatcttggactttgatgctctagaattgtgacaaaataaatatctgttgcttaagccacctatgtgatggcaggcatggtaaactaatacagcaattcagttaatcaaatgaaaagttggccttcatatattgttttcacctctgtccttcatggtataaagttttatgcttattgttgtcaaaaattaattaaaatatttttaataaaagaaaaatgtaaaacatgcaataatgattttatgtttcatgtaaaataaattgttaaagctattaaatttatctgcac

SEQ ID NO: 747808 - DNA, 585 bp, Homo sapiens
tttagcatttcttgtaagacaagtctggtggtgatgaattcccttcgcatttttgttgttgttctggagtgtttttatctttcatttctaaaggacatttttgctgtgcacagtctatttggctggcaattatttgttttagaactttgggtatgtaatctcactctttcctggcttgcaaggcttctgttaggaagtccactgatagccttytgagagatcctttatatataacaagttttttctctcttgctacttttaagattctttgtctctgaattttgtcaatttgatcacaacgtgcctaggaggattcttttttgaattgatcatgtttgggattctttgaacttcctaaatctgtatgttcatatgcccccaaagatttaggaaatttttagacatcattttttttaaaaaagctattcgtccctttgtctcttctccttctagtactcccataattcttgtatttgtatgtctagtagtattccatagtttccttatgctttctttactcttttaaatatcttttttttttattctcctaattggttactttaaaatgacctatctttgagtttt

SEQ ID NO: 747809 - DNA, 503 bp, Homo sapiens
cagtgcttgagatattttgcagaccctgcacttgatggatcagctggctccacccagattgataaactggctcatctgatcttgtagcccctgcccatgaactgactcactgcaagaagacagcttcaactccctatgatttcatctctgacctgaccaatcagcactcctggctcactgggttctccccacccactaggttgtccttaaaaattctgctcccaaaatgctcggggagactgatttgagtaataaaactctggtttctgcacagctggctctgtgtgaattactccttctctattgcaattcccctgtcttgagaaatcrgctctgtctaggcagtgggcaaggtgaacccattgggtgcttacaccatcatcttcagttttttctttgtaatcatgtttacattccacaaatgttaggaacttaacactttagccagaactctaaagttaaatacacgggtattttgttaatcagaggacacggttgttttc

SEQ ID NO: 747810 - DNA, 603 bp, Homo sapiens
tggcttcctctaggcagggcactggctagccctggggacactcaaaggtaaatgggccttgttttttccttccaggagtttgcttatcttagaagagactggaaagtagccaagtggctacagagcacgagtcagaatagggtcactgttgtaggagcacaaaggagagaaagaaattcaggtagggctggcaggaagagttcagggacctttctaaggaaggagaactcctgctgactcttgggagaaagaagggctctccaagcagtttggcaaggaagtccatycggtgcagggggacacacatcagtcatggtcagctgggacaagctggagggcagcctcagaggctaagggctggtagggcaggggctgaaccttaggcagcttccctggcagcacttgtagtccagcttctaggaggcagagtctgggtgggaacacctgaggatgaggaggtattagagcagaaaccagagctgggcagcgggaacagagaggaagaccaacaggaaggacactgctgagggaaagacagaagactgtggacagggagagggcaggggagaaaggcccaaaggaggccctgccttcgggccacca

SEQ ID NO: 747811 - DNA, 594 bp, Homo sapiens
  misc_feature 581, 582, 583, 584, 585, 586, 587, 588, 589, 590, 591, 592,593, 594: n = A,T,C or G
cccagctacttgggaggctgaggtgggagaatggcatgaatccgggaggcggagcttgcagtgatctgagatcgcaccactgcactccagcctgggtgataaagcgagactccatctcaaaaaaatatataaaaaataaaaaataaataaataaatctgttcttattggactttaaaggtatctgcaatcattttagtgaaaaaagcaaactagaaaacaattagaaaagcaaactaggccgggagcggtggctcacgccrgtaatcccagcactttgggaggccgaagccagtggatcacctgaggtcaggaatttgagaccagcctggccaacatggtgaaaccccatgtctactaaaaatacaaaaattaagctgggcatggtggcaggcacctgtaatcccacgtacttgagagactgaggcaggagaatcacttgaacctgggagacagaggttgcagtgagccaagatcacaccactgcactctagcctgggcgacaagagcgaaactccatctcaaaaaaaataaaaaagcaaactagaaaacaaaaatgatgccatttttgtttataaaatannnnnnnnnnnnnn

SEQ ID NO: 747812 - DNA, 599 bp, Homo sapiens
ctcttgttttttttttttttgttttttttttgagacagttttgctctgttgatcaagctggagtgcagtggcatggtcatggctcactgcaaccttgaccttctggacttaatcaatcctcctgcttcagccttttgagtagctgggactacaggcatgcaccaccacacctggctaattttctaaattttgttttagaagtgttttgtagagatagggcctcaccatgttgcccatgctggtctcgaactgctgggctcaagtgatcctcctgccttggcctaccaaagtgctaggaagcctggcccaactattccccyacaccggcccccaagacggagtcttgctctgtcaccaaggctggagtgcagtggcgtgatgtcagctcactgcagcctccatctcccaggttcaagcaattctcctgcctcagcctcctgagtagcttgggactacaggcgtggtggcacatgcctggctaatttttgttatatttctagtagagacggggttttaccatgttgggccaggctgatctcaaactcctgacctcaggtgatctgcctgcctctgcctcccaaagtgctgggattgcaggt

SEQ ID NO: 747813 - DNA, 488 bp, Homo sapiens
ggttcgtgcctgtagtctcagcaactcgggaggctgaggcaggagaatcacttcaacccgggaggtggcggttacagtgagccaagattgtgccattgcactccagcctgggtaacacagcaagactccatctccaaaaaaaaaaaaaaaaaagatactgtattcaygcaacatgatcagaagattattttttaataggatcctaaagagctcttggaaattaagaaaagatgacataagtaaaaaaattttctacagaaatatcagacaatgaagttgagtaaagctcactggtagtagaagagaagaaccagaagacggacaacaggagacaaaaggcaagaacatcagaagctcagaccaggagatccaacagccaatcaacagaagttaaagaatacaggaatacacaaaatggagaaaatattattaaagaaataatcaaagaaaagtttctcaaactaaaggatatgcattctagatcaaaa

SEQ ID NO: 747814 - DNA, 488 bp, Homo sapiens
ggttcgtgcctgtagtctcagcaactcgggaggctgaggcaggagaatcacttcaacccgggaggtggcggttacagtgagccaagattgtgccattgcactccagcctgggtaacacagcaagactccatctccaaaaaaaaaaaaaaaaaagatactgtattcacgcaacatgatcagaagattattttttaataggatcctaaagagctcttggaaattaagaaaagatgacataagtaaaaaaattttctacagaaatatcagacaatgaagttgagwaaagctcactggtagtagaagagaagaaccagaagacggacaacaggagacaaaaggcaagaacatcagaagctcagaccaggagatccaacagccaatcaacagaagttaaagaatacaggaatacacaaaatggagaaaatattattaaagaaataatcaaagaaaagtttctcaaactaaaggatatgcattctagatcaaaa

SEQ ID NO: 747815 - DNA, 488 bp, Homo sapiens
ggttcgtgcctgtagtctcagcaactcgggaggctgaggcaggagaatcacttcaacccgggaggtggcggttacagtgagccaagattgtgccattgcactccagcctgggtaacacagcaagactccatctccaaaaaaaaaaaaaaaaaagatactgtattcacgcaacatgatcagaagattattttttaataggatcctaaagagctcttggaaattaagaaaagatgacataagtaaaaaaattttctacagaaatatcagacaatgaagttgagtaaagctcactggtagtagaagagaagaaccagaagacggacaacaggagacaaaaggcaagaacatcagragctcagaccaggagatccaacagccaatcaacagaagttaaagaatacaggaatacacaaaatggagaaaatattattaaagaaataatcaaagaaaagtttctcaaactaaaggatatgcattctagatcaaaa

SEQ ID NO: 747816 - DNA, 640 bp, Homo sapiens
caaataatatatgttgcatgtccaggcaaaaaaaaaaaaaaaatgctacaggatcagaatatggtaatatttaaaaatccaggattctccatgtgcaaaatgtatgtttttaaaaatattttgggacaaactagcctaacaagatgttgcattgcaaaaaaataaaatattataatcacaaattattccccatccctcatttccctccctgatatttcaccttctctacacccaggaacaagagttgatttttctggcttaccattctattgtcctattattytaggctgtgggaacgtaactgtggaaagagagtgaaagaaaactcaggaagtaggctccaaagaacaagcgtgttctaaatagtacaatgctaaatcagaaggatgcacaagggcattagtaccaactattgtgagtcaggacactcatgatcttcatgctctaaccagcttataacaccaaccacagacgtatctgccctctgtcaaacccaaccctgttgggaggcctggaaaccaaagaaatggtgacaataacacctgtgacttggccaggcacggtgattcaagcccgtaatcccagcattctgggaggccaaggcggacagatcacgatgtcaggagttcaagaccagctt

SEQ ID NO: 747817 - DNA, 436 bp, Homo sapiens
cgaagtcaggggtttgagaccagccgggccaacatggtgaaaaaccatctctactaaaagatacaaaaaattagccgagcatggtggcgggcacctgtaatcccagctactgggaggctgaggcaggagaatcacttgaacccgggaggcagaggttgcagtgagccgagatygcgccattgcactccagcctgggtgacagggcgagacccgtttcaaaaaaaaaaaaagaaaaaagtaaaacaaaaatttactctactggccaggtgtggtggctcatgctgtaattgcagcactctggaaggccaaggcagtgggatcacttgggcacagaagtttgagaccagcctgggcaacatagtgaaaccctgtctctaaaaaaaattttgtttttaattagccaggaatggtggcgagtggctgtagtcccagctac

SEQ ID NO: 747818 - DNA, 622 bp, Homo sapiens
tttctcccttaagccacatgtagggcatctcattaatactgttagttggcttattgcaaggtgcataatagagacctggaaagggcacatttctcacagcagcacctccctttgatagatgcaggaggcagataaggcaggctccctggagaatctctgaccctccccacaagtgtttacatcagatgcttttgtaaacatgaaggaaccttccyagggccttgtctgggcttgcccacaatgtactggaggcccgcctgtgcactgggagaatggggtggagccactgggatttgcgccttatgcagaggggaggagcctggcctcttcagctaacgtatgtgcatctgtgtgtgtctgtgtgtgttttggtggcctggtattcaatctgtgaggtgggagcctgttggcagaaccccctttttgtttgccgacagctttcttttaataaatcccgctctcctcacctttgagtgtattcgtgtgcctaatttttcctggttgtgtggcaagaacctggattttacatgaactaaggagcaaaaaactcctgcatcgctttgatagctcccctgttcgggtggcatgtgggtggggcacggagcctattttccttcataaa

SEQ ID NO: 747819 - DNA, 516 bp, Homo sapiens
gcattcttctcaaatttttttggtgtaataatccatttaagcattattatagaatacagggcaataaatgatatgttactggaagaaaaaaagacaacagaaagtcttcctaaattgaagttagtttactactatcacttccttaaacccacagggcctgtcattctgtcatggaaccgttacaatgcgaagcaaaattgaaataatttgcatgcaaacagtaggcaaggttgataaggcatcctgtgttgattctgctgatcaatgctgacaggtgagttaaagtacttcttagtaactccattttattgttttatttattttaataaggcaacaataaaaaataataaaggaccattaataatttagtaakacatttttctggggataagaaagtcttcgatggacttaatttttaaatgacatttataaatcacctaatcgttttattctaactggtgccaagagtgaaaatgcctgtgcttctgcttatttcagtgagtctaattcatccta

SEQ ID NO: 747820 - DNA, 620 bp, Homo sapiens
ttagtttaaaatctcaaatcaagtaatacattccattaatagaatccaggggggaaacatatgatcacttcaatagatgccgaaaaagggctttttaaaaatccaatatcctttcatgataaaaacacgaaacaaactaggaatacaagggaacttcctcagcattgtaaagggcatgtacaaaaatccatggytaatatcattcttaatggtaaaatattgaatcttatttcctaagatacagaacaacttagggatatcttcccttaccacttatattcaattgtaatcaaggttctatccagggatattatgcaagaaaataaaaggcatgaagattggaaagaatgaagaaaaccagtctatttggagatgaaattgtctgtatatagaaaataatgagaaacacacaaaaacctattagaatgaataaataagcttagcaagtttgctaagctcttaggatgcaaaatcaatatatggaaattaatgtatttctatatattagaaatgaataattcaataatagttttttacaaaacctcatagaattcaaataaataaaattttaaaatacaacaaataaatttacaaatagaattttaaaaagaaatgcaata

SEQ ID NO: 747821 - DNA, 526 bp, Homo sapiens
tgtagaatggagctaggcacagagtaagcttcaatcaatgtcagctcttcattacccaaccttggcgctgcatgacgaacacctgtggatgattaaaaactgcactgcaggttacttccctcagagcctctggggtgggacccaggcttccgtatttttttttaagccccttaggtaatttcattgtgtgcacagggctgaaaactgcctgaggctgcagtctctcaagtgctagttcacacagatatttatttatttattttttgagacagagttkcgctcttgtcatccaggctgaagtgcaatggcgcaattttggctcactgcagtctccgcctcccaggttcaagagattcttcttccacagcctgccgaatagctgggattacaggtacgcgccaccatgccgggctaactttgtatttttagtagagacggggtttcaccatgtttcaccatgttgtccaggttgctctcaaaatcccgacctcaggtgatccacctactttggcctcccaaagtgctg

SEQ ID NO: 747822 - DNA, 526 bp, Homo sapiens
tgtagaatggagctaggcacagagtaagcttcaatcaatgtcagctcttcattacccaaccttggcgctgcatgacgaacacctgtggatgattaaaaactgcactgcaggttacttccctcagagcctctggggtgggacccaggcttccgtatttttttttaagccccttaggtaatttcattgtgtgcacagggctgaaaactgcctgaggctgcagtctctcaagtgctagttcacacagatatttatttatttattttttgagacagagtttcgctcttgtcatccaggctgaagtgcaatggcgcaattttggctcactgcagtctccgcctcccaggttcaagagattcttcttccacagcctgccgaatagctgggawtacaggtacgcgccaccatgccgggctaactttgtatttttagtagagacggggtttcaccatgtttcaccatgttgtccaggttgctctcaaaatcccgacctcaggtgatccacctactttggcctcccaaagtgctg

SEQ ID NO: 747823 - DNA, 621 bp, Homo sapiens
agactggagaagatacaaagatcctgaaagctttacgtgtgcttccagcatgccagttgccaaatagatatgatcctattctctcttccctttgagcctctgaccccttgctctccatcaagcatggcccccagcacakgccacagtgcagctgccccaccccatgactgaatcccatagcagagcctccccattggctgagtctctgcttttctctggattggatcccccataggcaaccgaaagctcctctgtcactgccattgcagtggtactgcccttgctgcccttgcactgcagaatgaataaagacccggaaggctttactatacctctagcatgccacagctgccctaaagagaagaggacaggacagtctgtcttccccatgatactcctgcacctctgaccattaccaggtagggccccctggcttgggcccacaatgcagatgccccataaaggtgactgctccaactggtagcagttctgtgtttctctatattggcaccccaagatgcaagtgaaaggccctctgccattgccactgccaaggtccctgccactgctaaccccaagctggggataaaacataaagcctgatcttgcctcatggctgta

SEQ ID NO: 747824 - DNA, 607 bp, Homo sapiens
tacaattctatgattttttagtaaatttattatagagttgtgagactatcatcacaattcagttttagaacattttcatcaccacccaaatatttttatgcccattttcagtcaactccagctacccagggcaagtgccaagcaaccattaatctgcttcaattacacttttaagggatttgctgaccccaagattctatgaaactagaattctgagacttgggcacagatacaccttgggcccaaaatgtaagctcactccaggaaattccaaaggygtttttttttttttttttttttttctgagaacacacgccttccttgtacttgccattttgacacttagcagctttcctcattagcgcacttttcacactgagcagctttgcagacacctgttgattattttgctgttaacggagactctggtatcctagaaatactgagggtgaaaagtctgtgtcacatattataaatatcagcttctttgctaatgtaggcactttgcttccagataattcattatggatgaaatcaacagaacacaaggttttgaaaactttgaagtaccagatattttcttctgggctttccgtagaatgttatc

SEQ ID NO: 747825 - DNA, 498 bp, Homo sapiens
aatttatcagaaaaaatttaacaaagagattgaaataatttttaaaaatcaaacaaaaatcctggattttagaagtacatttgctaaactgaaaaatgcattacaggctctcaacagcaaaacgtaacagaagaaagaatcagtgagttcaaagagaagatatttgaaaatatacagtcagaggataaaaaaagaaaaaagaataaaaaggaatgaagaacacttacaagatgtagataaaaacctgaaaggagcaaatctaagaattattggcattcaagagggacttgagaacaagcaaaagatatctttttctcaaaaaccagtwaatgaaaactttccaaatatagagaaaagtaaaaatattcaggcacaggaaggttagagatcacgaagaagattcaagtcaaacaagactaacccaaggcattacaatattcaaactttcaaaggtcaatgacaaagagaggatcctaaaagcagcaagagaaaagaagc

SEQ ID NO: 747826 - DNA, 636 bp, Homo sapiens
aagatttgctatacaatcatgtatttttttaaagagaaggataacattggagggaaatgtgaattacagttatttgtgaacttatctgaataaagacagaatatcaggcaatgaagattatgaatgattaatttcacatctacatcattgggccaggtttcagagcaagatagaagaggagtacatctcaaatgcttttgaagttacatttccaaagtgaggtcccagctggaagtataaatggttctccaattttgcagatggaattttatccaatattcagatgtataatctgcttcaagtatgtacacaggggaagtaataagagtactgtgaattctcaactgaccattttctgacacrttaaagaaatagcaaaggtagggcaaattcgataatctacctgaacttcccagaaattggggaatgtaagataatctcatggaagtgatcactaattaaaaaatgactgttctaggataccatcttgttttattttttcagttgctttattcaatggctgtcaagtgagaagggattaaactctcactgacatgtctcctttctccctttcccaagtttacaagagcgttatctgatagatacagcaaacctgagcttgataatactccaaga

SEQ ID NO: 747827 - DNA, 574 bp, Homo sapiens
tgtaagagtcagtgaagatttgagggtaaactgtacatagttcctgtgttttttcctgtgttatgtttcctgtctgggatttctccctaacttccagcttctctggcatcacaatgtctacattttaagttccataagactttcactttctcattaagcctttctctctcatgtgccccttgcaaactgggaagtgtcttcaaagaaaaaccattcaatatcaagactcctagtttcttwcctttcaaccaagtctacttgccagcatctgcctagtttcattgttctctagggcctcaaatattattttttaaatttctaacttccaagctttcataattgttatgtttctaaaggttaacagctcaatagaagcaactagccattctcaagaataatttttcatttattcttgtagcatatttttactgaaagtagaattgtacattgacagtcttttatttttagtctttaaaaatgtcattctattgcttctgttatacttttgagactttaggttgtcagttttattgttgcttcaacaaaggtaagtttattttcctagttattttag

SEQ ID NO: 747828 - DNA, 673 bp, Homo sapiens
aaggcctctcaagcccagccaaggatccatctgcacctgcagttacttacatgaattgggagaaccttttgtttcttgaggccccaaaacaaattgaggatcttaggcctgtcagaaagtgactctctctatttaccacaggacaggaactctctaaaggcacagcatagataaggtacaaagccaacccttccaaaaggctcccattggctctataaagtcaattycaattttttagagcaatctgcttatatccaaaaacatgctattccagtcaaatccatgataaaataatcagtgcttccaattgtaccccattattaaaagaaaggactcttatcaaacttatgcaaaaaaccacattgtcatgaattaagaatattcataaatagttatgaattctgtagaaatcaggcagagatagagaaatatgcctaaaattctgtttataagggtatactttactcaatagttaaaggctatgaaataattcaaaagaaaattgttcttcagaccctgaaaaataaagcaaaaagaatcagcaatatttcaatctatgcaatcaactctggctctgcttcgtattgagttagctatcattatgaacacattagccttttaattgtagtcttggaagttttctctctagtccaatggcacaatctcctaagtt

SEQ ID NO: 747829 - DNA, 446 bp, Homo sapiens
atgtattttgtcccttgtatctagcttacatggtttacatggtagagctcatagtcaggctaaatttctttcatcaatttgcagacaatctacttttctggatgctttaaaaatgctgttatctcactttgcgttttacccagcttttaattccacctrtagttacatttgatattttttcaaataaatgatttagccaatttttctctaattatctaagttaacagaaaaacaaatcactcaatttataaatttagaaaagagagctttattgcttaagaaggggattatcacctgcaggtgggaagcacatcctccagctgagaattgaaagcaagctcttagagggaggaagggataaaacaggaatttatggtgaatgagttgggcaagtatacatactcaagaggatacaggaggaactatgaatatttataaatgggaag

SEQ ID NO: 747830 - DNA, 621 bp, Homo sapiens
atacagaaggaaataagagacaaaatgagaaagtaaaagttgacactcagcttggagcctgggtaacttggagaatactggcattatttataagatttagagagacagaaaaaggcacttgttttggaaagataatgactttttgaaaaaagaagcatggcgaatctttgacgtttcaggagggagtcatctgaattgaagtgttctatcagcagtataggacatggagatagtataaaagacaccagagctacagttaagaattacaggtgatctaaaattttgtgatcaagatgtcaattttccastgataagtaaagaactggggataaagtactaaatctttggaaatatccatacatatgggggcaaagcaggagaatcaattaaatggtccggagatgatgcagtcagtgctgcttctgtgtgtacaagatctgtgctggaatacagtacacatgcttttaagggccttaacccctaggtcacggttagggttaggacaccagttctcagattcaaaaacctaatttatcccaagtggaagaagtaaagaagccaaacagttaaacattaataaaacattaataaaaaacatttatgacctcactagtaacaggt

SEQ ID NO: 747831 - DNA, 638 bp, Homo sapiens
tcgctctccaatttagagcccctaaaatgaccttattgatttgccttgggacaatctccttccaacacaggtttcttttcattgaatggatgtcctttgaagtcaattaaacttgggcatggcacacctaagactacaagcacttttatagctgaaggcaaaaagtatttgackagtgacatggaaatcacactcctgatatgaagcactattttcaaccttcaagtatgtgggaaatacaaagtaagtgtatttgtttgatatttaaaattgagctgtttcagagctttggagaataaatatacaaatttagctgagcttttcttaactttttttaagtgcaggcctacagaactttattctgttcccagttgccagttttcttataaatgtgcggccttgcctactatagtgatcatgtgagagattcaagagcagatcaaagacaattcaacaaccacagatgctgggaatggctaaatgtgggtaatctgggtcatctgtcaaaacgggaaacttagatttggctcagttatttcagaaatctttgattgataccaggttattcccatttgatacatttctaaatctagtggtgaatctaaactagtaattcagaatagccccctttgtggtag

SEQ ID NO: 747832 - DNA, 631 bp, Homo sapiens
acttctaataatgattaacatctgttttgccaatccctttagctgtcgaagagtcaaaatctgtagatgtcccttgagaccacttcacatcctgaaagtatatggacctgtgatttactgagttttccctactttccctcaaaaaaatgcgcaagacaaaaaagaatgtttaagatttgattacttcccataatgagcaactttaaaatattgatgtgaagatacaatcagacatttttgcttgtcctctattatttttacttgcacatatttaacattaaataaggcacaatatttccttactgcctttcttttcccttatcttggtagcataaaatatattgcattaacatttagactcatgcatataataaacactcaggggtggtctgacatgtggtaatgcctttgtacaaacacagtctaacttacaatgattcttttatacaaacacacacacaraaacagagtaacgcatcattgcatgattccagtcacatccatatatatagttaaacatatgtagctctttaacagagtatagcactctttccttcctgttctatctcatcgttattactcttgttttgtcaatgtctttctcatcatttactctcacatttttgacatt

SEQ ID NO: 747833 - DNA, 608 bp, Homo sapiens
ataataaacccctgtcaaacaaacaactatgaaaaccaggaagtacctcatacagaaatgttgacattaaccatggaataatcagaaagaaccttgaggtcatgtttatcactttcttaatttatagatgagtttgtgcattacaagagaggttgtattagtctgttttcacaccgctaataaggaaatacccaggactgggtaatttataaaggaaagaggtttaatggactcacaattcacatggctgtggaggactcacaatcatggcagaacgtgaatgaggagcaaagtcacaccttacgtgggagcagccaagaggcttgtgcagggggactcccatttataaaaccatcagatatcgtgagacttattcagtaccatgagaacagtatgggggagactggccycataattcaattatctccacctggtcccacccttgacaaatggggattattacaattcaaggtgagatttggattgggacacagccaagccatatcagaggtagattgatttgtcagagctttcaattatgcttagtggctaagtgttgaccaaagttcaggtctccagaattgtttcattatggctcaccatttgtg

SEQ ID NO: 747834 - DNA, 616 bp, Homo sapiens
ttggtatatgctggcttttcaccatataaatccacagaaatcaagatacagcaggtactatgagtgccaaattttacagagggtcagcatagctaggggtccatataacctggaggttgattttggtttcatgttgatagaaaaataaattagtgataaattaaagatgatagaagcctttcagcccaaaatacaacctgtgttaaatttactgmgtgaaacacaaattgcagaatctctggttattttgtgaacctctctatcaaatctgcatcccatgagactccttgccagctataatcttttggagaaggatcactttagaataggctgctgctagatttacctgagcttaacatttatttggaaatattgattactcaaaatctgagtaggctgtcaatatgattgtctgtggttaattttatgtgcaaataatcatggccaatgatgtcacaacatacattttaaaacatgataaggtttgttccttagccatgagcctttctgcttggttcattccttctttttatttttttcttctatggtataaggacatttggaaaaataaactcaaatgaaaaacaaacttacttagtgcagttaatcccaaaat

SEQ ID NO: 747835 - DNA, 586 bp, Homo sapiens
ccagagctcaaagacgagggctgagctagagatataaatgaatcctgctggaggtcctagggcagagggagagtggtgggggagaggctgttgagagtctgagaaaaaggtgggggagggaacaggtcattactcacccagggaggggatgctggggtacagggattcatgggattcttccttgtgggatttcaaatgctgaaagagggtgcattttgttctggaatgtatataacatgatacaacttacaaagtcccttctggaatatgatcttattgaaagctggcctttttcctcctgtttggttccactscctgcctagctctttctgctctattcatgatattccttctgttcctccaatgcatcataaactttcttgcctcagtactgtgccttaggagaccaaggcagcagcacattaaaataaatccttaggcagagctgtgttacctggatctgatgccaaaccctgtgacttttctatcacacctcagagcacgctcgagccatcttccctttagcaaggggagctggtcgattgctggatttagacaactggttcctccagggagagtttgagaa

SEQ ID NO: 747836 - DNA, 586 bp, Homo sapiens
ccagagctcaaagacgagggctgagctagagatataaatgaatcctgctggaggtcctagggcagagggagagtggtgggggagaggctgttgagagtctgagaaaaaggtgggggagggaacaggtcattactcacccagggaggggatgctggggtacagggattcatgggattcttccttgtgggatttcaaatgctgaaagagggtgcattttgttctggaatgtatataacatgatacaacttacaaagtcccttctggaatatgatcttattgaaagctggcctttttcctcctgtttggttccactgcctgcctagctctttctgctctattcatgatattccttctgttcctccaatgcatcataaactttcttgcctcagtactgtgccttaggagaccaaggcagcagcacattaaaataaatccttaggcagagctrtgttacctggatctgatgccaaaccctgtgacttttctatcacacctcagagcacgctcgagccatcttccctttagcaaggggagctggtcgattgctggatttagacaactggttcctccagggagagtttgagaa

SEQ ID NO: 747837 - DNA, 643 bp, Homo sapiens
ctgttagaaacagccaggtaacatcttgaatgctttgctgcttagttatttcttcctccagataccctaaattatctctctcaagttccaagttccacatatctctagggcaggggaaaatgctgccaatctctttgctaaagcatagcaagagtgacctttattccagttcccaataagttcctaatctccttctgataccacctcagcctgagttcattgtccatatcactatcagaattgtggtcaaaacmattcaacagtcagtaggaatttcaaaactttcccacatcttcctgttttctcccaagccctccatactgttccaacctctgcctgttactcagttccagagttgcttccacattttcaggtatctttatagcagtaccctactcttctagcatcaattttctgtattagtccattttcacactgctataaagaactacctgagactgggtaatttataaagtaaagaggtttaattgactcacagttccatattgctgaggaggcctcaggaaacttacaatcatggtggaaggggaagaggaggcaaggaacatcttacatggtggcaggagaagagagagagagcttgaagggggaactgccacacacttttaaaccatcagatctc

SEQ ID NO: 747838 - DNA, 649 bp, Homo sapiens
cccaggttcctctgtgagtaggttgtccaggacatggaccctgcttcactctccaacaccagtgcatactgtattgtgatgtgcatgagaaatgatcttttactatgttaaaacaccaggattctggaattgtttgttatagaattygtcttccctgatatactcacaaaatggaggtgacctagaaagttcacaagatatgacatatctgtcattctctggctactaatagatcctatcagtgcatgtaagaaaagggtctagtagaaaaggaaacacgttggtagctgtacatactgcttattgtaattgtccacttattcatgcatttaacaaatatttattatgtacttactatgtgccaagctctgtgtaagtattgggggtgcacaagtaagcaaagtagacatgggccctgcccttgtatagctgacagtctggtgggataccaaacatgaaacaaattattcttatatgaacagctattatgaaagaagacattatagaccactgttgggaacaggggtctcacctagacaccaaggagatctatttttttttcctatttagcacatcaaaaaaccaggaaatgggagcaggagagcctgtgttgctaggaattagacggaatcatgaacatcactctgtc

SEQ ID NO: 747839 - DNA, 642 bp, Homo sapiens
agttgcttctggcttaatcagtggatcctaatagacttttatgatgggcatttgatttttcagcagggaaggtggtgctgacatccttccttttgtttttgcttttgttcctggaggcttcctgaccttggtaccaaagctcaggaagctcactgacaaagtctggcattgggtaattgttggaaaatctgccctccagctagcaccctgtacttggaactgaagggaatcctaggaaaatgtactccctccctttttcctatcacaacctggatgtacagatggtgacgtgctatctrtgcttctaaatgttgagattccatcaagaactttaatacaagaacctattactttatgaaataggactgccctaaaaagtcacatataaatctgattgtgttcaaggggagagatgggcagattgagtcaaattggattttaaatgtattagagactctgaatgtttgagagaacactgggtgatgcttagaagagtgaagaattttatgaagagaaaataaccaaccctaaacattctgcttggctcatgtattcatccatttcatcaaaaaaattgccttattgggcacctactgtgtgttcgacattattctagtgactggtgatacaaagataaataag

SEQ ID NO: 747840 - DNA, 619 bp, Homo sapiens
cagaggcaggaggccatgagaggacagccctgagatgcagcggccaagtgattgcacttcagcagccgattagtgggcaaatgcttttcaattagcaaattttaatttagacctaaatctccattactgctcaaggcttaaggaaaattggtgaccatttaaaattactaattgaagcctgtggggagtcagtggagggtgaaaagcagaaatggtctggataatgaagcgggctggaagatcagggtggaggggcaagaaaggtggggcaacagctggcgacagactgacraggagctgcggctggctgggaatcaggagacttgtcagggatcctggctgccatgccctggaaacagcttggcagcagcagcaacaccaaaggacctgaggggagatgagtatccagggctttgaaggtaatcccagcggtctggaactggagcccaacccatttccatggggaacctgctatggcagggacagaggcaggagaacaagtcctcaaatagggaggccagtgggcattttcctaaagtattaaagcactttggtgctgtgctttacaaaactgtttgagtggctgaattgattcttctctctcattagactcagaaaa

SEQ ID NO: 747841 - DNA, 619 bp, Homo sapiens
cagaggcaggaggccatgagaggacagccctgagatgcagcggccaagtgattgcacttcagcagccgattagtgggcaaatgcttttcaattagcaaattttaatttagacctaaatctccattactgctcaaggcttaaggaaaattggtgaccatttaaaattactaattgaagcctgtggggagtcagtggagggtgaaaagcagaaatggtctggataatgaagcgggctggaagatcagggtggaggggcaagaaaggtggggcaacagctggcgacagactgacaaggagctgcggctggctgggaatcaggagacttgtcagggatcctggctgccatgccctggaaacagcttggcagcagcagcaacaccaaaggacctgaggggagatgagtatccagggctttgaaggtaatcccagcggtctggarctggagcccaacccatttccatggggaacctgctatggcagggacagaggcaggagaacaagtcctcaaatagggaggccagtgggcattttcctaaagtattaaagcactttggtgctgtgctttacaaaactgtttgagtggctgaattgattcttctctctcattagactcagaaaa

SEQ ID NO: 747842 - DNA, 619 bp, Homo sapiens
aaaagtagttagtgtattaaagtcaagacatggacattagctcctcacattctctggtcagtctcaactctagccttatgtaatgcttcccacaaccatctgatacagcacatagactcagaaagataaaggggttcctyaaatgacatacagatagtagtgacctggagagggcatgaatgcaggtctttcgatcttggtgtggtgtttttttcactccaccatgctgtttctcaaacagttgggaaccattatagtggctcaggccaaatgaccttggaacagtaatttttgccctggtagggcaagctttagttattgtgctcattcctttatttctccttcctcttaacatactgatactgcccccacagatgtccagggtccttgaaatgccgcaggttgccttgggccctttctatgctgcctccacaggcctccttcacaggcaggtccctgggtcctgagcctggctctctaagaacttacagagcctggtgctgtgacccagagcctggctaagtggcagccacagtcaattctgaaatctgatgctgagtcttaaagagggatgtacctctgccaaccctccctcttctccactgatattaagcctggg

SEQ ID NO: 747843 - DNA, 619 bp, Homo sapiens
aaaagtagttagtgtattaaagtcaagacatggacattagctcctcacattctctggtcagtctcaactctagccttatgtaatgcttcccacaaccatctgatacagcacatagactcagaaagataaaggggttccttaaatgacatacagatagtagtgacctggagagggcatgaatgcaggtctttcgatcttggtgtggtgtttttttcactccaccatgctgtttctcaaacagttgggaaccattatagtggctcaggccaaatgaccttrgaacagtaatttttgccctggtagggcaagctttagttattgtgctcattcctttatttctccttcctcttaacatactgatactgcccccacagatgtccagggtccttgaaatgccgcaggttgccttgggccctttctatgctgcctccacaggcctccttcacaggcaggtccctgggtcctgagcctggctctctaagaacttacagagcctggtgctgtgacccagagcctggctaagtggcagccacagtcaattctgaaatctgatgctgagtcttaaagagggatgtacctctgccaaccctccctcttctccactgatattaagcctggg

SEQ ID NO: 747844 - DNA, 619 bp, Homo sapiens
aaaagtagttagtgtattaaagtcaagacatggacattagctcctcacattctctggtcagtctcaactctagccttatgtaatgcttcccacaaccatctgatacagcacatagactcagaaagataaaggggttccttaaatgacatacagatagtagtgacctggagagggcatgaatgcaggtctttcgatcttggtgtggtgtttttttcactccaccatgctgtttctcaaacagttgggaaccattatagtggctcaggccaaatgaccttggaacagtaatttttgycctggtagggcaagctttagttattgtgctcattcctttatttctccttcctcttaacatactgatactgcccccacagatgtccagggtccttgaaatgccgcaggttgccttgggccctttctatgctgcctccacaggcctccttcacaggcaggtccctgggtcctgagcctggctctctaagaacttacagagcctggtgctgtgacccagagcctggctaagtggcagccacagtcaattctgaaatctgatgctgagtcttaaagagggatgtacctctgccaaccctccctcttctccactgatattaagcctggg

SEQ ID NO: 747845 - DNA, 565 bp, Homo sapiens
caggaagaataggcaaagagcatggaagatgagtctgtctcttaaaaaaattgttccaggagattcacctagaaactttgacttacctcttattgaccagactttcttattgcaagagaaagtataaaaaacaatattttatactttgggaaggaagccgaggcgggcggatcacaaggtcaggagatcaagaccatcctggctaaaayggtgaaaccccatctctacaaaaaatacaaaaaaattagccaggcatggtggtgggcacctgtagtcccagctactcgggaggctgaggcaggagaatggtgtgaacccaggaggtggagcttgtcgtgagccaatatcacacacgccactgcactccagcctgggtgacagagcgagattccgtctaaaaaaaaaatgcaatattttagctttctaatctctatagcaaggaaatcaagggagaagccagttgtaaatgttttattatctgtgtgaccttggttatgttacttgacctagaagcactttccattcatgcctctataaaatgggcatgatgttgccccaccttgta

SEQ ID NO: 747846 - DNA, 604 bp, Homo sapiens
atttcagggactgaaataagaccgggatggcttgtgtagagaaaacaagggggagaggcatgggatgaaacttgagaagttcaaaaggattagatcctgaataaccctgtaaaccatgatgaaaacattaacattatgcaaaggggaatgagagaacaaagcgttttaagcccagaatgcaacgctttagagagatctctctgtgtgttaagaccagaggcacagggtccagggaggtggctaggcagtgggtaacagtgatgatgacggtgccttagactagaataggggctgtgaatctttagagaaatggtcaggttcaacagatgcctagaagatagaactcacagcacaatgcttgatcagatgaagggaaaggtgagggcaaagacgcaattagggtgattctcaggcttctggctcaagtgatgggatggatggtgacacttcactgagccaakggaccgtggagtaaaggcagatttggggagctgatagaaatatgacaagtttagttgtagaaatgtttcatttagaatacctatgcaacatccaagcagaaatgtccagtaaatgatttgatatatagctccggtggtcaaca

SEQ ID NO: 747847 - DNA, 628 bp, Homo sapiens
tggctgcttctgaagtggcggctgctggctccactcgctcccctgttcagagaggacatatgggccaggcagtgatcaatgagggaacatctggcacaggagcaaatcaaacagcaccgatgactaatttaggagtgttgccttgccattgttctttctgtggccccatgcaaaggtcacccagtgtggcaggctcagagaagctgctgcttcaccttcagcagtccccaggatccaacttgtttgccttaaaaatgaatcgatagcttcttctttgagggctgaaacagcagctccctatcactgaatcctgaattctcacgtgcatggtcagccccctccttgcaagcccctaggcacccctgtttcttattagccatttatcatcttgcctctgaagtctctctcttamaaaaaaaaaaaaagaaaaagaaaaaaaaacactctactgaattcatgttctatttctgcaactgagatttttctcctttgggttcaaataaaagaaatagcaaatattaaagagcatgagagaaaaaggcacacatgcctggcccatgaatagacaagattgcctgtagttctcattttggtggtttatataatagcttcaaatgctggtgaagac

SEQ ID NO: 747848 - DNA, 591 bp, Homo sapiens
cctagattcccaagattacatgccctttgtcttcactactagggtgtatagggaagtaccatcaggttggggcagggctaggtgtgtctgagctcagactctccttgggtggatcttgttgcacctgctgtcagggatggaggtgagattctcaggtcactggagttgtgtacctaggaggattatggctgcctctgctgagtcttgcaggttgtcagggaagcagggtaaagccagcagtcacaggcctcacccagctcccatgcaaactgaacggccagtattacttccaccgtgacccccaaccagtatccctgagtatatttccaggtagagggcgagaagggcttgaaaacttgcctgaggctatctgtctccaagctgtgggggaaaaaaagggcttaagttcttcccctgcctatgaagtctgtactccagatttgcaccctccyccgagttctggccaggaggcttcccgcccgttccaattgttacaaagttcagctagagaattctttctccctgtggagttttaccacctgcccctctggccgccctccctatggatccccgtggtgccagtcaggaatt

SEQ ID NO: 747849 - DNA, 646 bp, Homo sapiens
ctgggaagtttaagatcgagatgacagcagactctgtgttcgggggtgttaacggtgaagggtatacaggttcttggggtttcgaacaaagaattggacaaaatgcacaaacaaagcaaggaaggaatgaagggttttattgaaaatgaaagtacactccacagtgtgggagcgggcctaagcataggggctcaagggccctgttacagagcttttgtgagtttaaatascctctacttggggtacgccctatgtaaaagaagaggatgtagtaaagttacaaagtcatctatggcattcaccctatggagagggcatttcctgttatagctgaagtgtgaattggccttatgtttcctgcctccagatcctattttcctgcctcaatgagggtccgctctcttattcatagatggtgacttctggctatttcctcacatggtggaagagggaaggcagccgttggaggtctcctttataaaagcactaatctcattcatgaggggtctagccacttcccagaggctgcactcctaataccatcacattggtcattagtttcaacatatgaactttccagaggacacaggcatccagaccatagcagattggttctttggttcggatcctctctcctctgttctgt

SEQ ID NO: 747850 - DNA, 646 bp, Homo sapiens
ctgggaagtttaagatcgagatgacagcagactctgtgttcgggggtgttaacggtgaagggtatacaggttcttggggtttcgaacaaagaattggacaaaatgcacaaacaaagcaaggaaggaatgaagggttttattgaaaatgaaagtacactccacagtgtgggagcgggcctaagcataggggctcaagggccctgttacagagcttttgtgagtttaaatacyctctacttggggtacgccctatgtaaaagaagaggatgtagtaaagttacaaagtcatctatggcattcaccctatggagagggcatttcctgttatagctgaagtgtgaattggccttatgtttcctgcctccagatcctattttcctgcctcaatgagggtccgctctcttattcatagatggtgacttctggctatttcctcacatggtggaagagggaaggcagccgttggaggtctcctttataaaagcactaatctcattcatgaggggtctagccacttcccagaggctgcactcctaataccatcacattggtcattagtttcaacatatgaactttccagaggacacaggcatccagaccatagcagattggttctttggttcggatcctctctcctctgttctgt

SEQ ID NO: 747851 - DNA, 643 bp, Homo sapiens
tacagagcttttgtgagtttaaataccctctacttggggtacgccctatgtaaaagaagaggatgtagtaaagttacaaagtcatctatggcattcaccctatggagagggcatttcctgttatagctgaagtgtgaattggccttatgtttcctgcctccagatcctattttcctgcctcaatgagggtcygctctcttattcatagatggtgacttctggctatttcctcacatggtggaagagggaaggcagccgttggaggtctcctttataaaagcactaatctcattcatgaggggtctagccacttcccagaggctgcactcctaataccatcacattggtcattagtttcaacatatgaactttccagaggacacaggcatccagaccatagcagattggttctttggttcggatcctctctcctctgttctgtctgtctcatctgaccctcatgcctctgctgctgataactctcattagtttatcattctgcttgacaaagctgtcctttgttggtgaccaccagtgccactagtagttttggcaacagacgttgttctttacttttacttcacgccaaatatgggataggcccttgtcttcgattctctaaagaacagaaggtatgagagag

SEQ ID NO: 747852 - DNA, 587 bp, Homo sapiens
tgttctgtctgtctcatctgaccctcatgcctctgctgctgataactctcattagtttatcattctgcttgacaaagctgtcctttgttggtgaccaccagtgccactagtagttttggcaacagacgttgttctttacttttacttmacgccaaatatgggataggcccttgtcttcgattctctaaagaacagaaggtatgagagagagcattataacacagagatgagcttacaaatacttcccagggccagaactggactcaggacttctggttgacctgcctctctgtatctctcctaccttattgccatgggccagtgggtagtttacttttcaacacccaagttcctctactcactgatgggctttggagtctagactaaaattcgaagtcctaaagaggggaattttcatgctcctttccccaggccaatccccaccttcccagtccctattctctgccaggaatgactgccactcatagtcattgcaggaggatgttttgtgtgtgtgtatgtgtgtgttttcccagaaaagtccagagagatatggctctaacctatgcacccctatctaagacgtt

SEQ ID NO: 747853 - DNA, 587 bp, Homo sapiens
tgttctgtctgtctcatctgaccctcatgcctctgctgctgataactctcattagtttatcattctgcttgacaaagctgtcctttgttggtgaccaccagtgccactagtagttttggcaacagacgttgttctttacttttacttcacgccaaatatgggataggcccttgtcttcgattctctaaagaacagaaggtatgagagagagcattataacacagagatgagcttacaaatacttcccagggccagaactggactcaggacttctggttgacctgcctctctgtatctctcctaccttattgmcatgggccagtgggtagtttacttttcaacacccaagttcctctactcactgatgggctttggagtctagactaaaattcgaagtcctaaagaggggaattttcatgctcctttccccaggccaatccccaccttcccagtccctattctctgccaggaatgactgccactcatagtcattgcaggaggatgttttgtgtgtgtgtatgtgtgtgttttcccagaaaagtccagagagatatggctctaacctatgcacccctatctaagacgtt

SEQ ID NO: 747854 - DNA, 610 bp, Homo sapiens
atggtgaaaccccatctctactaaatatacagaaaattagctgggcgaggtggcaggtgcctgtagtcccagctactcgggaggctgagacaggagaatggcatgaacccaggaggtggagctttcagtgagccgagatcgcgccactgcactccagcctgggtgacagagtgagactccatctcaaaaaaaaaaaaaaagaaaaagaaaaaaaaaaaagaaacctccctaactgaaattcaaggagaaaaaggagtgggagaggaacagaatatccacgtactgcaggacaatgtaaaagggtgtaacatatgcagaattggaataccagaaagaaaagaagagaaaggagaagaagaaagatttgagtaatgaagaactttccaaaattaatgacagacaccaaagcacagatctaagaagcttagagaaaaytcagcatgagaattttcaaaacattaacacctaggtatagcatattcaacctacaagaaaccaaagacaaacataaatcttgaaagatgccagaggggaagaatcatgttgcatgtataggaacaaagataggaattaccaaagatctatttccagaagttgttataaactgaat

SEQ ID NO: 747855 - DNA, 634 bp, Homo sapiens
cctctggagaaccctgactgataaaccaactacatcaaatgtatcagtgtaatcaatctacataaatgcaaaatatatatacagcaaacatttagtaatggtttactaggtgtcaaaaactatttttttttttaaagttttgcagatgatgaaactgargcccaggaccacttgcccaaagtcacacaacttacaagttgcagagatggaactcaaataaagattagcttaatccttacgtatgtttcatactagtttttaactctgatttgggaaactgattgcctgacacggaaagatatttatttctaccgtaagtagattatatcctccaccttgccaacagagcaaggacacaggcactgaataaactgtctgaaccaaaaagctgtctgaatatccacttctaagttttaattggtgagagtatcagtatttcattgagctgtcgggaatctggcagttattccataggattttgagactgtcagaaagataacagtaaaggctattccacaacaaggagaaaaatgtgagtacattatgtaggttctcaatacaataataagtgaatacacaagagaaggtaaaaaaacaggcaccaagaatacatacatggattctgattctagtg

SEQ ID NO: 747856 - DNA, 607 bp, Homo sapiens
aagtagaatcttgaaacacttaaatagttaaccaatttattgtgaaatcagttcgccctttcacacttaactctgtaagtgtctcagttcatcatatctggagattcaatgtagcacatgtgttgggaaggagagttttttctttgtgtagtgtgttgtcttttgtcctggaataggacaatgggtaagtaatggattatcaggagaagtgagaaaactgatttccaattagttttcttcctcraagtgatttaggagaggtgaactttatttcctcagctggcatttttcaaactttcaaagattgattcattcaaaaaaatgttcctgtgtgcttctatgtatgtgaataggatacactagggatacactgatcccagcgcacctccaggatttctctgtacaaaggtccatgggcagcatctgactggaacggagagagccatggcaccttctacaaagccttatgtgtacagcaaggatgtgcaccaaaggatgctgtttctcctttagttatttatttgaggcagtttggggtgaaggtcctgatcagcatcatttcaaatccattttcctactctgagccttagaagaggggctgaagcta

SEQ ID NO: 747857 - DNA, 476 bp, Homo sapiens
tggtgccatccattgtcatgtggcagattaacaagttctaggggtaaggataaatacagttttgaatttcataaatttgaggcacctgttcaggagaataatactaggctagaccagagatacagatttgggagtcaccagcatatcaaaggcaaaatcaagtagggagaaagtactaagaagaaaatacagcataraagaaagcccttaggataaccaattagtaaatgactaaattaaccattatacaactctaaattacgcaagtgctaaaaattataattaggaaaaatgctttacgatattctgttgcatttaagagatatatcataaaaccaaatgtattacctctatgtacttacaagggaacatcctaggcccttctctggacattcttagagaacctcatgccctcatatttcttatggcagtggaaggttgggacaaggagtcaggaaaactatctgctgatattt

SEQ ID NO: 747858 - DNA, 537 bp, Homo sapiens
atcacatcatagggatatatcatagtttatttattcattcacccagtgaagaacatctttggtggagtgcatggtaagagtaaatctagttttacaagaagctgccaaactgttttgcacagtggctgtaccattttgcatttctaccagcagtgaakgagttcctgttgctccatgtactcaccagcatttgatgttgtcagtgttttggatttttacaatcctaatcaatgtgtactggtatctcatttttttaaatttgcaattccataatgacatatgatgttgtacatattttcttatgcttatttgtcacttgtataccttctttgattatgtgtgtgtgttcagatcttttgcccattttttaattgggttgttcattttcttattcctgagttttaaaagtttttaaatattttagataatagtcctttatcatacatgtcttttgcaaatatttttctcccagtctgtcacttatcattctcttgacagtgtcttttgcagagcagaaatattaaattttaatgcagt

SEQ ID NO: 747859 - DNA, 537 bp, Homo sapiens
atcacatcatagggatatatcatagtttatttattcattcacccagtgaagaacatctttggtggagtgcatggtaagagtaaatctagttttacaagaagctgccaaactgttttgcacagtggctgtaccattttgcatttctaccagcagtgaatgagttcctgttgctccatgtactcaccagcatttgatgttgtcagtgttttggatttttacaatcctaatcaatgtgtactggtatctcatttttttaaatttgcaattccataatgacatatgatgttgwacatattttcttatgcttatttgtcacttgtataccttctttgattatgtgtgtgtgttcagatcttttgcccattttttaattgggttgttcattttcttattcctgagttttaaaagtttttaaatattttagataatagtcctttatcatacatgtcttttgcaaatatttttctcccagtctgtcacttatcattctcttgacagtgtcttttgcagagcagaaatattaaattttaatgcagt

SEQ ID NO: 747860 - DNA, 628 bp, Homo sapiens
atcaatttagtcaataaagcagcagcagggtttgagaggattgactcaaattttgaaagaagttctgtgtgtaaaatgcacatcatcacatgctttacagagaaatcttttctgaaagagaaagtccattgatgtggcaagcttcattgttgtcttaagaaattaccacagccaccccaactttcagtgacctccatcctggtgaatattcagacagtcaatcctttgaaggtttgaagctaggcttctctctagctttgaaaatgmcagatagcatcttcttctattataaggctgttttacctacattgaaaatctgttgtttagtgtaaccaccttcatcagtcagggaccatcaatatcaaggcaagaccctacaatggcaaaaagataactcactgaaggctcagttaattattagaattttttttagcaatgaagtattttagtaagctatctacatttttagagataatgctatttcacacttaacagacctacagtagtgtaaacataaattctatatgcacgggaaaaccaaattttcatgtgactcactttatgacaatattcaatttgttgtgctggtctgaaaccaaacctgcaatatctgcaaggtatgcctgta

SEQ ID NO: 747861 - DNA, 586 bp, Homo sapiens
ccttactggcagctaattagattgtgcctgcccaaattaagggtgggtctgcctttctcaacccactgactcaaatgttaatctcctttggcaacaccctcacagacacacccaggatcaatactttgtattcttcattccgatcaagttgacacccaatattaaccaccacaacaccctgtgaggttgggaatacaatttgctttgtaaccaaccactttcaggatgaaatcctgggtttggtttttagccatttcagctctctaggttggtatcactacatttttgtagctttacrgtaattttattgtttgaacatcactgtgggctcatagccttttatacatccaacttgtttcaattagttattatttgcttaaatagacacaacctggtcagtgagagacctcttaaatgggctcctttgtcctctggaatccttggaagcaatctttactttttggtcacagtagatttctaaccctattgtaattttgttcttcttcacgatgtggaatcatttaccctcttttaagtatcagtgacttacctcagggaagaatattagagatttaagtttgagtac

SEQ ID NO: 747862 - DNA, 615 bp, Homo sapiens
accatggtactgggttctgcccaagacccatgttaactactgcctggctaccactaatgtttattcaagtcccaaagactctttagtcagcagatgatgaatcttgcaaggactgagtctttctcttcagggcagcaagtttccttctggttcagggtgggtctagaactgtcatctaggaactagggcctgaaatgagggcttcaggactctgcttggtgctttatttaatatggctaagccrgtatccaaggtgcaggacaaagtcctctttcctctcacctctcctttcctcaagcagaagaagtctctccaggagctgcaagctgtgttgactggccttggggaagggtgacacaaacactcctttggctgccccagctgtatctcactgagtcatgtgcaccccaagtccactggttccaagcccagcaaagcaccagaacttgctcaggaatcacagtctttgtggcctagactgcctttcaaatttatttagtaccctagagcactttagctggaccattcccctccagtgagggctggtctaaatactgcctctgtgggcaccaggtgaattctgcccttcactgttactgggcagcactgagttcc

SEQ ID NO: 747863 - DNA, 629 bp, Homo sapiens
ccagatagtccccagcaacagggccttgggcaaaaattatatctttctaattggtgatcccaggtgcctaaagaagggaacagagtcccaaaatttatactagaaatcattcttataggagaaactagaagagcaccagagacaggagtggtttttagaagcatgactagcctcagagaagagaggcagaaggaagtttgtctgacaggcattaggacccaggaggcaagggtcagaacagataggacagatgggcgagtctcacttgggtgatgtaactttaagagttccacttatggctgcagggccaaccaactttttttcgggacccgagagctgaatggcttccctctctgttgaccctcagctcagtccagaagtataggaaaagcagaagctggttccaggcaaaccaatgcttccaactctgaagagtcgggggtggttagagagccctttcccaraaaggctgacacccatgtgtttagtccagcggctgcactagtcacttttaactggccaacaggtgtctgatgtttagcctccgaattctaaggaaaaataggacagaacagcaagcaaaagggttctgatggtactcaccacgtggcgataccccggataagccc

SEQ ID NO: 747864 - DNA, 629 bp, Homo sapiens
ccagatagtccccagcaacagggccttgggcaaaaattatatctttctaattggtgatcccaggtgcctaaagaagggaacagagtcccaaaatttatactagaaatcattcttataggagaaactagaagagcaccagagacaggagtggtttttagaagcatgactagcctcagagaagagaggcagaaggaagtttgtctgacaggcattaggacccaggaggcaagggtcagaacagataggacagatgggcgagtctcacttgggtgatgtaactttaagagttccacttatggctgcagggccaaccaactttttttcgggacccgagagctgaatggcttccctctctgttgaccctcagctcagtccagaagtataggaaaagcagaagctggttccaggcaaaccaatgcttccaactctgaagagtcgggggtggttagagagccctttcccagaaaggctgacacccatgtrtttagtccagcggctgcactagtcacttttaactggccaacaggtgtctgatgtttagcctccgaattctaaggaaaaataggacagaacagcaagcaaaagggttctgatggtactcaccacgtggcgataccccggataagccc

SEQ ID NO: 747865 - DNA, 620 bp, Homo sapiens
tcgggggtggttagagagccctttcccagaaaggctgacacccatgtgtttagtccagcggctgcactagtcacttttaactggccaacaggtgtctgatgtttagcctccgaattctaaggaaaaataggacagaacagcaagcaaaagggttctgatggtactcaccacgtggcgataccccggataagcccccaagatgtgtctggagttggttccttctggtgggttcatgatctcactaacttcaagaatgaagccacgggcctcygtggtgagtgttacagctcttaaaggtggcacagacccaaagagtgagcagccgcaagatttattgtgaagagcgaaagaacaaagcttccacagcatggaaggggacccaggtgggttgctgctgctggctggggtggccagcttttattcccttatttgtcccctcccatgtctgtttctgtcctatcagaatgccttttttccaatcctccctgtgactggctactcttagactcctgctgaatggtccattttataaagtgctgattggtccattttacagagtgctgattggtccattttacagggtgctgattggtacatcttacacagtgctgattggtaca

SEQ ID NO: 747866 - DNA, 538 bp, Homo sapiens
gatgtagaacatagattttcaataagaatgagacaaatgccaagcatttagatgtgggagaggtgagaatggaatacaatagggattggcaaactatggcctgcagaccaaatttgcccaccaccccatctgtttttgtaaagttcaatggaacacaatatgctcatttatttatatattgtctatggctgtttttgtgctacaacagtaaagtcaagtcatccttacagagaccacagggcctgcaaagcctaaaatatttactatctggctagttacataaaaagttgactgaaccctagagkgggaaaatgatctatatcaatggttctcaaactttagtgggtaccagaatcacctggaggccttgttaaaattcagattgctgagtgccctagattttctgactaaaaatatctgggggtagggcctgagcatttgtatttctaacaagttccaatggccacactttgagaactgccgctttaagtttatgctgaccaatgcaccaatttaagcgtgatgtaagacaggagtg

SEQ ID NO: 747867 - DNA, 621 bp, Homo sapiens
cctaggagggacaggaaacctttctgtcactggtcccaggtaaaggtacaatgctgttgagggagaaatagaaacaaagtctgttaatatgttttctagagtttttagatgcaattaggggaagaagtaggctctactgggtttacatcaccatagtgggactggaattatgcatattaaatgttcatgtagtgaagaagaagcatttcaaatcaattacctaarattcaaactttaaatgtatagaaagaagagagaaaataaaatccaacgaaagcagggataaaataacaataatagtacaaataaaaatttaaaatagagaaaaattatttattattaagaaatattttatttttctgtatcaggtaattatactacatgatgaatcatcaatcatgattaaaatgtccataaaaaagaatagagggaaatgttctcaactcagtaaagggctttttgaaaaaccaacagcgaatatcatatgcaatagtagaagagcaatgctttcaggatgaaatttgaaaaaaagtaagaatttcaactccaagcttctatgcaatgatccaagaatctacaaagtgcttctagacaaaattagtgaatttagtaagattgtag

SEQ ID NO: 747868 - DNA, 621 bp, Homo sapiens
cctaggagggacaggaaacctttctgtcactggtcccaggtaaaggtacaatgctgttgagggagaaatagaaacaaagtctgttaatatgttttctagagtttttagatgcaattaggggaagaagtaggctctactgggtttacatcaccatagtgggactggaattatgcatattaaatgttcatgtagtgaagaagaagcatttcaaatcaattacctaagattcaaactttaaatgtatagaaagaagagagaaaataaaatccaacgaaagcagggataaaataacaataatagtacaaataaaaatttaaaatagagaaaaattatttattattaaraaatattttatttttctgtatcaggtaattatactacatgatgaatcatcaatcatgattaaaatgtccataaaaaagaatagagggaaatgttctcaactcagtaaagggctttttgaaaaaccaacagcgaatatcatatgcaatagtagaagagcaatgctttcaggatgaaatttgaaaaaaagtaagaatttcaactccaagcttctatgcaatgatccaagaatctacaaagtgcttctagacaaaattagtgaatttagtaagattgtag

SEQ ID NO: 747869 - DNA, 599 bp, Homo sapiens
tttagggaggattccttctttctctatcttttaaaatagttttattggaattggtagcaattcttctttgaatgtctgatataatttagctgtgactccatctggtcctggattttttttattggaaattgttttwttacttatttaatcttgctgcttgttattggtttgtttagggtttctatttattcctgatctaatctaagaggattgtatatctccaggaatttatccatttcctctagatttcttagtttgtgtgtgtaaaggtgttcatgatagtccggagtggtcttttgtatttctgtggtatcagttgtaatatctctactttcatttctaattgaacttatttggatcatctctcttttcttggttaatctcactaatgatctatcaattttgtttatcttttcaaaggactagctttctgttgcttttacttttttttgtttgtttcatttagttctgctcttatcttttgtatttcttttcttctgttgggtttgggtttagtttgttttgtttctctagttccttgaagtgtgatattagattgtctatttgtgctctttcaaactttttgatgaaggcattaa

SEQ ID NO: 747870 - DNA, 599 bp, Homo sapiens
tttagggaggattccttctttctctatcttttaaaatagttttattggaattggtagcaattcttctttgaatgtctgatataatttagctgtgactccatctggtcctggattttttttattggaaattgttttattacttatttaatcttgctgcttgttattggtttgtttagggtttctatttattcctgatctaatctaagaggattgtatatctccaggaatttatccatttcctctagatttcttagtttgtgtgtgtaaaggtgttcatgatagtccggagtggtcttttgtatttctgtggtatcagttgtaatatctctactttcatttctaattgaacttatttggatcatctctcttttcttggttaatctcactaatgatctatcaattttgtttatcttttcaaaggactagctttctgttgcttttacttttttttgtttgtttcayttagttctgctcttatcttttgtatttcttttcttctgttgggtttgggtttagtttgttttgtttctctagttccttgaagtgtgatattagattgtctatttgtgctctttcaaactttttgatgaaggcattaa

SEQ ID NO: 747871 - DNA, 612 bp, Homo sapiens
aactaaaaataagatgcattttaagatatagctaatttttagcttatttgttttgcattgacttgcaataaaataaaataaaaacaaaaataaaaacatatacttgtatatattttagtattttaagaaacttaagcatgccagttgtttaaagaattatttgattattgtgtggcacctttcagtgtagagtcctgaaagattacccactgtaaggcagaaaaggcaaatctgaaatgtttttatagttttgactagatggtttattagaataaagatgaagaaacattccaataaaatgattcatatcaaaattttcacaatccacattgtctgaagttctgttttgtttgtttgtttgtttgttttatatcatamagatacatgaacatcatctgaaaatcctggaaaaaaggcttttataacattatgtaatcctatagtgtaaaggcatagaccttttaactacatagaaatcagcagtgtgtttttgtgtgctcaattgtgtatgtatgcagactcaattctacttgtatgttagctttgtgaaagaaacagcctttgattatgagtttatatcctggctcaattattgaccagatgaatgacttt

SEQ ID NO: 747872 - DNA, 539 bp, Homo sapiens
ggccaagaatatactttacatgacaattaggtacttataaaaaaacatagtgattattttactcttctgtctaaaactctccaattatcctctatttttattaaagcctcagattattaacattgcccatgatgtgtcattgtccaatgagataaaccgtgtttatatcttacccaattctttgtaaggtacattccacctagaatgactcatttttttcttttgtgttatttcccstcttaatgcgtttgcatataacactaccttacgtaaatcacatgctactagcctccttcccacccacctatatactacgtatacataaagccacttttgcctcattagtgtcacacttgatgtaactaactcagggaagacttatgaacttgacgcaagtttgattttaccattaattgtagaaatttcttaaaatgccactcatttctaccaaattgtttaatgtgactctaatgttgactgcaacagtatagacaatgtgcattttattcatcactgtatgtccatagtcttgaacagta

SEQ ID NO: 747873 - DNA, 594 bp, Homo sapiens
tatgtttttattaaagtataaaggctcagtgctgctttcctttcctagaggaaggcactccctatatacacatacacacccttgttgattattttaaatgaatgggagccaatgggacctgatttttcaaggtgtctattttaatacttttgtctgaacaagtatttctatgttaatgaaattagatttgagcatttgatagaacatgaaactataagtgttgaatttcagaatttataaaaaagaaaaggcagccttataattgtggtataaggtttgatagttaagactccttcatgtgaaataccagatgttttgagtccttgatataaaggtcagaagaaaagaaggatattggtttcataataaaytaacatgtttacagtaatgactatgcagtgtaagctgtggatattttgttatataagaatggcagggggtcctagaactgggggctggaaggcccatttaaaaggtcatccaatacgataatttttagtctggagcacacaagcagagttcaggtgaactccctggaattatttgcaaaattgggagtattttttgtatgtatagtttgaggggaatttctgt

SEQ ID NO: 747874 - DNA, 496 bp, Homo sapiens
taggtgtgagccaccatacccacccatgaataagttctttagcagtaatttgtgagattttggtgcaccaatcacctgaacagtatacactgaacccaatttgtagtcttttatccctcactcccctctcaccctttctcctgagttggcaaagtccattgtatcattcttatgcctttgcatcctcatagcttagctcccacttatgagtgagaacatagaatgtttggttttccattcctgggttacttcacttggactaatagtctccagttccatccaggttgctgtgaatgctattaacrcattcctttctatggctgagtagtattctatcatgtatagatatatacaccacaatttctttatccacttgttgattgatgggcattttggctggttccatgtttttgcaattgcgaattgtgctgctatagacatgcatgtgcaagtatctttttcgtataatgatttcttttcctctgggtagataccc

SEQ ID NO: 747875 - DNA, 597 bp, Homo sapiens
ataagaaccaaaaatcaggtgagcaatcacagtacctggttttaacttcatattgctgaaaaaggcactgaagaggttagaataaacacccttgcattacctacaccagccccaaccatccctcagcagtggctgggtggcatggagaaagaatctgtgcacttggaggagatagagtacagtgattgtgagactttgcattttttaattttatttatttatttagagacagagtctcgctctgtcgcccaggctggagtgcagtggtgtgatctcggctcactgcaacctccgcctcctgagttcaagcgattctcctgcctcatcctccygagtagagtagctgggattacaggtgcccaccaccacgcccggccattttagacttcgcatttaaacccattgctgccctgtcacagcaaaaagtgacacaggaccaaatctggctagcacccaggacagcgtaattagactagcctgggggcaaatcatctaccccaggagtcagaactttagttttggcaagccttaccaccatgggctaaagaactctggggtcctaaagaaacttgatagtctttccttcaggagctcttg

SEQ ID NO: 747876 - DNA, 656 bp, Homo sapiens
gcttctaaagatatatgtatatctgcttaccagatggaaggcaggcctctgtaacagatatgagacaggcctggattggaatcccagctctgttacctcctctgtgtccttggctaagactcagttttctcatcaattacacggcgagccattgcaacttccgttttctcctagccactaaaactaaggacttcccttccatatttcagccaccccccgaagttttccagaacccactttctccattctccttctgtgggctctgtgtccccacccaaatctcatcttgaattgtaattcccataatccccacgcattgagggagggasaaggtgggaggtgattggatcatgggggcagtttctcccatgctgttttcatgatagtgagtgagttctcatatggtctgatggttttatatggcagttctccctgctcttgctagctccctcttgttgccatgtgaagaaggtctttgctcccacttggcttctgccatgattgtaagtttcctgagacctccccagccatgcggaactgtgagtcaattaaacctcttttctttataaataacccagtctagggcagtttttgatagcagtgtgaaaatagactaatataccttctttgctaatacatcccagagcctattaatt

SEQ ID NO: 747877 - DNA, 587 bp, Homo sapiens
gtatcatacttggtggcttaaacaacagaaatttattttctcataggtttggaagtcctagactgagatgtcagcagtttggtttcttctgaggcctctctccatggcttgcagatggtcaccttctgcatggacamctttctgcgtcctcacctggtccttcctctggaatggcccttcctcaggatgcctgcacatgcctggtgtctctttttatgaccgactctttttttataaggatatgagtcagatcagtttagagcccatgctaacagcctcattttaacttggtcacctctataaagaccttatctccaaatacaaccacattatgagataccaggtttagagcttcaatgtattaaaatgtgtgtagggggacacaattcagccccaaacagcctacatatttgaagcagttcattgatgagataaactggaaggacagaaaacttttacccaacactaatgagattaaaggaatgagccttacgtggcacatacacacatttgttaatgtttaaaagtcatgtttgcacccctgtgtttcactttcaccacgtgttgtcctaagactgacaatgaca

SEQ ID NO: 747878 - DNA, 647 bp, Homo sapiens
agtgggaagaatagggagaaggttgtctactccaaattgtcctgtgtcttcctttttcaacaacaatgtgagagctggatattgagttcaatccacttttctataacctgatgttatagaaacgtggtagcaggagagctctgtgcaattgtgaattgccttaattagagaaactgtagtttgttttgtctttaaactttgttcctagctttcatattggaagatacccttgcatatttctccacrtgagaacttatgtctgagagagtctcttctggttattttattaccgttgatcttctaacaatgtgggagttaagcgtgccagccccctgtgcagtcaaaaatctgcacataacttttgactcccccaaacttaactactaatatcctactgttgaccagaaaccttaaagccttactgataacataaaccattgattcatatgtttttatgttatacatattttatatatatgttatatatatctatatatatagctaaagaaaagaaaatgttattaagaaaatcataaagaagagaaaatatatttactattcattaagtggaagtggatcatcataaaggctttatcctcatcatttcccatggattaggctgaggaggaagaagagggttggtcttg

SEQ ID NO: 747879 - DNA, 424 bp, Homo sapiens
ctctactgaaagggtggtatagaaattaaaagaccaacacacacacacacacacacacgaaaagaattggagaaaagaatagcatatgtcaacaacattttgaaattggagagcaggtggtaattgacacagcagaccagaraaggctgaaacttaggccagtatgcgcgtgaagctccttagaaacagaaacaaaatgattgctctcatcgtaactcaaatattaaaggtaactggtagctctgaagacagaaaggcagggcaagttctgattgtaggtatttttaaaaatcagttaaaccccttcatcccttccctaccccaaatagccatgagacctcctctcctgagcctcagcagatctctggatattacttgctggagaacctgaaacatacagactaactctgcacttggggacatc

SEQ ID NO: 747880 - DNA, 646 bp, Homo sapiens
aattttcctataatcccctttgtttttgcctacaaattagagcgtttggagctctttcccaatttaccaagtgactcttccactaagagtgggaaacctctctttattgaaatgagagtgtcgggaatttgtttcacagatcttagatctgttagaagcccttttrcctttcctgtgctgttcccacacagcttcctttcccatattttttcttgctacatttgggttggacttgcatgctcatactctgaggcttatggaaatcctttatcaacaacattttggaagatttctttttatcctagttgtccatctctttttaagaaagaactgtaaagatttaaagactatgctgttgctaccatcattcctttcttacccatattatatttaaaaacagcaatagtaaacattctaaagtaacgtaaaacatatacaatacaattaaaccatgcaatacaaaagtataatttgttttgtttaactgctcctctaaaagagaggtgcacagagaagaatagaagctgacattttaagcagagcagcagagcaatatcctggtgatgtaaggcaggtgagcccccaaatttgggctcagccaaggaaagttcttggctttgccagaaaagaattcaagtgcaagcca

SEQ ID NO: 747881 - DNA, 603 bp, Homo sapiens
tagaaaagggtcttcataggcccagtgcggtggctcacgcctgtaatgccagcacttcagaaagctgaggcgggcagatcatgaggtcaggagatcgagagcatcctggctaacaggttgaaaccctgtatctactaaaaatacaaaaaattagccaggcgtggtggcgggtgcctgtagtcccagctactcaggaggctgaggcaggagaatggcatgaacctgggaggtggagcttgcagtgagctgagatcgccccactgcmctccagcctgggcgacagagcaagactccgtctcaaaaaaaaaaaaaaaaaatagggtcttcataagcttccatcattacttgcactcatttaacatattctgttctgtaccaacaaatgctgccttcctcttgaaactataaactgttcatgtagttcactaagatgcttaatttcatcttctctcacacactcaggacacctccttaacaactctcttattttcaacattatccactctatcctgtgctactcccctcagcacacacctatgctgttattacctccttctcaaaaaatttctctggactttacttacacctccagctacgatctaa

SEQ ID NO: 747882 - DNA, 603 bp, Homo sapiens
tagaaaagggtcttcataggcccagtgcggtggctcacgcctgtaatgccagcacttcagaaagctgaggcgggcagatcatgaggtcaggagatcgagagcatcctggctaacaggttgaaaccctgtatctactaaaaatacaaaaaattagccaggcgtggtggcgggtgcctgtagtcccagctactcaggaggctgaggcaggagaatggcatgaacctgggaggtggagcttgcagtgagctgagatcgccccactgccctccagcctgggcgacagagcaagactccgtctcaaaaaaaaaaaaaaaaaatagggtcttcataagcttccatcattacttgcactcatttaacatattctgttctgtaccaacaaatgctgccttcctcttgaaactataaactgttcatgtagttcactargatgcttaatttcatcttctctcacacactcaggacacctccttaacaactctcttattttcaacattatccactctatcctgtgctactcccctcagcacacacctatgctgttattacctccttctcaaaaaatttctctggactttacttacacctccagctacgatctaa

SEQ ID NO: 747883 - DNA, 439 bp, Homo sapiens
ctattagtctaccgatttagcatacataaaaaatacaatgtgaaaaaatgtttcaatatgacaataaagcaattaaattaaatgtaaccacttgctattaacacatctttcttaaataatagtaaataaaaataacaggatacctaataaaatgcacatgtgtttaagaaatgaagcacaaatgtaactgtgaaacatagtttagaaaatagaaataacgttgacatattggaattagaggcacttgaggccaggaggttcagaccagccttggcaaagagtgagatccctgtctcttcaaaawactttttaaattacctgggtttggcggtgtgcacctgtagtcccagctagtcaggaagctgagacgagaagatcgcttgagctcaggagttcaaggctgcagttggctaagatctcaccactgcactccagcctg

SEQ ID NO: 747884 - DNA, 636 bp, Homo sapiens
aggaaacttatcacagataaaaaagggcattatataatgacttaatgtgtatgtgcctaacaacagagcatgaaactgtgtgaggcaaaaattgatagaacttcaaggagaaatagatgaatccactaatatacttggggacttcgatatgacttcatcaaaaatgggcagatctggcaagcagaatttcaatkagttcataattaaactcaacaacaccatcaatcaactagacattatagacagtaatctataatgaacatctatagattacttcatccaacaatagcagaatacacattcttctcaagcttgcatgaatcattcatgaaggtagactacatgctgggccataaaacaaactttaccaaaattaaaagagtagaaatcaagcaatacctatattcagactacaaataaattaaactagaaatcaataacagaaagctaactgaaaaattgcaaaatatgtggaggttaaacaaagaacacacttttaaataagacataagtcaaagaaatgtcaagagaagtttaaaatatttactaagtgaaaatatgacacaacttagtaaaatttgtaggatccagcaaaaatcatgcttagaagaaaagatctaaagtcaataatataaa

SEQ ID NO: 747885 - DNA, 504 bp, Homo sapiens
ccacagagaaaatgtaaagctactgccatttaatatatagagagcacttcacattttcaagacttttaattagatactcctcacataaacttgaagagtcagagttagtcaccctcagctaatagatgaggaaagtagaatatagaaagtcaggggaattgccaaagatttgaggccttttagtagaagacaagattgaagaaggatgtagactctgaggattgtgcttaaagccgggtcagtgcttcccgccacaaatctttgtatttcagcctcctcctatcacacaacacacccagkaacagaaacaaagaaacaaaccactgccctaatgtttaaaatttcatatttaattttgttcttatgtataaatgtaagatttaagtgtcatccattcatttgcatttaaaaataaactttagttctgaagttaacttaaaattttagtttaaaatctgctgtctttattcatgtagctggtttgttaagtacaatgcaaaagat

SEQ ID NO: 747886 - DNA, 625 bp, Homo sapiens
attgtgcataattcctcatttatttaattttttgggtgcattactactaaatgggtacattactactaaatatgctactgactttatttggatttcaccagtttttccattaatgtcttttttgtgttctgggatccaacccaggatttcaccttgcatttagtcctcacatcttctcagtcaccttgggtctgtgacagtgtctgagactttctttattttcatgatcttggtagttttgaaraatactggtcagatatttagaagaatgccccccaatttgggtttgtctcatgtttttctcatggtcagattggggtcatggagttttatgaagtactgtgacctaccaccactggcgacgttaaccttgattgcttgtttcatgtagtgtttttcaggtcttttcactgtaaagtttttctcctttccccactgtatactttgtaagagggtcactaagtcctaaatgcagcccagactcaagacaggagagatgattaaaccggcatagggagtatctacatatcttaatcggaatcctttcataaaagacatttgtcccttccttttttattttactaatttatatcaggatagactcatttatatttattttatattt

SEQ ID NO: 747887 - DNA, 622 bp, Homo sapiens
gcaccaactgggcagttccatttttcaggagtcactttcaattctgtagagtcctcttagaagctccctggttgtgaaaatgaagcagcatcattgtctggggtaaatcccagggttcgtcgtctcgcaccaagaagattaaccacacggacatacacacactggagtgggttaaggagcagaaattttaatagcagaaaggagagaggagagcagctcccgctctcttgtgagagagaggcatccaaaagggaaaggctgcagatcgcagcagatggtataggcagccttgaggaggcggtgtctgatttgtagggcccacagattggtttaaccaggtgtgatgtttacatagggcatggaaagcctggttgccccaccctaatcttattwcgcaaacggcctttccatttggccagtgccatcttgtctgctctttactgtacacatggctggcaaaaggagaagatggagccaccattttgaacatgcttactcccaggtagtatatttgtattggcacaactgctagcattcacctgtgcaagcttccagcttgcttgtctatgtctgcagttcgattttacaggctgctctttattagaaaagaaaatgattttgg

SEQ ID NO: 747888 - DNA, 647 bp, Homo sapiens
agcaccaactgggcagttccatttttcaggagtcactttcaattctgtagagtcctcttagaagctccctggttgtgaaaatgaagcagcatcattgtctggggtaaatcccagggttcgtcgtctcgcaccaagaagattaaccacacggacatacacacactggagtgggttaaggagcagaaattttaatagcagaaaggagagaggagagcagctcccgctctcttgtgagagagaggcatccaaaagggaaaggctgcagatcgcagcagatggtataggcagccttgaggaggcggtgtctgatttgtagggcccacagattggtttaaccaggtgtgatgtttacatagggcatggaaagcctggttgccccaccctaatcttattacgcaaacggcctttccatttggccagtgccatcttgtctgctctttactgtacacatggctggcaaaaggagaagatrgagccaccattttgaacatgcttactcccaggtagtatatttgtattggcacaactgctagcattcacctgtgcaagcttccagcttgcttgtctatgtctgcagttcgattttacaggctgctctttattagaaaagaaaatgattttggggctgcttttcattaaaaggaaga

SEQ ID NO: 747889 - DNA, 552 bp, Homo sapiens
  misc_feature 1, 2, 3, 4, 5, 6, 7, 8, 9, 10, 11, 12, 13, 14, 15, 16, 17,18, 19, 20, 21, 22, 23, 24, 25, 26: n = A,T,C or G
nnnnnnnnnnnnnnnnnnnnnnnnnntaaactcttccttggtagctataggctactctttcctcctcctctctcccatttccaactgtctccgttttctggatcctacttcaataaggtggcatgagaaaatagactttactgtgatccttctttccttcctctaccctgctccagaaagatattgtctctcaaccttaraattctacacagtttttatccggagttgttacataagcagttccattaacaactattttgttctaattcttaaaaccaattgccaatcattataattggcaagtccatttatcttcaagtccctttctattttataactactaatcggatttgatagatcttaccatagtacattcctgtggtttttgcttgtttttgctgttttgttacccacttgaggtcctttatcttcacactagactacataatctatattactttttatctccattagatgctaggctactaggaatcgtggaatgtgtttaaatactctttgtattcatataagccatcagagtatctctacgga

SEQ ID NO: 747890 - DNA, 617 bp, Homo sapiens
ggtgtgagttaccattccacaaagtgtgagacagatgtccaagtgttcatgtaatttttgaaactattagttctctgcagcctccaagttcttgtgattctcacgtacaaagcatcttggaaaaaggtgctatgtaaagggtgcttattaccatctgaaggcatctcatcgccctcccagtcaccatgccaagagaaatgaatgggagtcatgaatgtgaaaatctaaaacccatggctgggtgtggtggctcatacctgtaatcccagcaccttaggggtccaaggtgggaggattgcttaagctcaggagttcgagaccagtctgaacaacatagtgagaacttgtctctattttttttcaaaataaaaaacttaaaaaaagaaaaaaaaaaagaamatctaaaacctctccttcgtgggtgagcccataagtgattctgttacccacaaaagggcctatgcacacaaaaagagcactgctatttggagatttctcagggccttaaaatatttctgtaatttcaatttacagcaatcacttgtccatcaggttgttctatatattgaaacatttggaagcgtaacccctgacaatcagatactactttaattact

SEQ ID NO: 747891 - DNA, 572 bp, Homo sapiens
acagcatgggggaaatcctcctccatgatctaatcatctcccaccaggtccctcccctgacatatgcggattaaaattccacattgggtgggaacacagagccaaaccgtatcagtacctctgaatgataaaatgcgacaaatttcctatggtataattatactctgcctgttaagtttctatgtcctgcctttcacatagtctcttgtaaggagtagggcatcattcctgccttcaaggggtttatggtctagtgggtacaacagacaaataaatggattgcttcaatttatgaagcagatttaatgaaggggggaaaacagtgatgttcaagcagagaagagagtgatccaaccaaggttagtggtcargaagattcttgaagcagtcttcttacctctacaagacgaatgttcctaaaacagaacctataactgtttcatcttagtgatccacggtgtctgctatgatacctggtttatttacccttaaaaaatattgctttcacttttgcatgacagttttcttacacaatactatagccaaatagttttcagaactttgcaaacacc

SEQ ID NO: 747892 - DNA, 550 bp, Homo sapiens
tgagaaatgaaagagttagaaattctatttaacaaaataatagataaaaacttcctgaatctagcaagagagttagacatccagatacaggaggctcatagattcccaaataaatgcaatataaaaaggtcttctgcatggcacattatagtaaaactatcaaaagtcacaaacmgggaaaaaaattctaaaaacagcaagagaaaagcatctagtcacttataagggaacccctatcagactaacagtggatttctaggcagaaccttacagaccaagagagaatggaattatattttcaaaatgctgaaagaaaaaaaaaaactgtcagccaagaatactatacccagaaacgttatccttcataaatgaaagataaataaagtctttttccgataagcagcagctgagggaattcattatcactgaaccagtcctaaaaatatgtgccaatcctatacctgaaagtgaaaggacagtgtctatcatcattaaaacacacaaaaataaaaaccactggtagaatgaacacataaagaaagataaaaga

SEQ ID NO: 747893 - DNA, 618 bp, Homo sapiens
tttttgtttattaatatctcctcacactccttttcataatgcttggctgtaagtacgagcaatttttggctccctttattctcatgcttttagtttagctcttgagttttgcttgatagtattcagcttccaatctagttatttttcaaagtagaataataaaagatagatttgaaggtcttgggcttcctatatattatcaaattttcaagtcctggctctgtttcttactagttgtgtgactttacataaccttacttagctattctgggcttagcttcctcaattgtagtgggaatgaggtattatgcataaagttatgagaataaaataaattagtacatatgaagctggtagaagagtactttgacattgtaagtgccaatacatgtggctagctttrtaactttcccttcaaatcctaggtgtgtcaaaccctataaaacatttgaattaagtagcaagcatccttcaacaactataatgttctctttttgtctcattttctcaacctgaatttttctcttaactctgtcattccttaagagtacccactattgaaatccctttttttgacttgttcattcagcctctttattttgcttgttcattattttt

SEQ ID NO: 747894 - DNA, 646 bp, Homo sapiens
tgagatgataattttggacaaagacccaaataaagtaagggggtgagcatgcccatatctagggaaagataattctaggcagagggagtagcaagtacaaatgccttgagagtggagtgtgctcggtgtgttaaaagtacagcaaagagataagtggtgaattgtcaggggagctactatagaaccatgtaggttgtggtaagaatttgagattttaagtgtgataagaagctatgaggtggttttcagtaaagtggtaacttaatctgacttatatttaaagaaattaagcactggctaccataytgaaaacagccaggagcaggacaagtatggaagcacagaaagcagccaagaggctgttggaatggtgaagatattttaagaacttccacctgctttccagtgaaaaactaattatggggaagctggtgttttaaatcatccaaagaatttttaaatcagcacttaaaatgttgaaatactttgtctttcttttttaatttctatagattttactgaaaatagagaatatttcaagtatcagctgatagtgaagtttcagaataaattttcagagcacttgctaaccaaaggctgtaaggcttgtggcatttatatatacatgttaaaaacccttgtcaag

SEQ ID NO: 747895 - DNA, 646 bp, Homo sapiens
tgagatgataattttggacaaagacccaaataaagtaagggggtgagcatgcccatatctagggaaagataattctaggcagagggagtagcaagtacaaatgccttgagagtggagtgtgctcggtgtgttaaaagtacagcaaagagataagtggtgaattgtcaggggagctactatagaaccatgtaggttgtggtaagaatttgagattttaagtgtgataagaagctatgaggtggttttcagtaaagtggtaacttaatctgacttatatttaaagaaattaagcactggctaccatactgaaaacagccaggagcaggacaagtatggaagcacagaaagcagccaagaggctgttggaatggtgaagatattttaagaacttccacctgctttccagtgaaaaactaatyatggggaagctggtgttttaaatcatccaaagaatttttaaatcagcacttaaaatgttgaaatactttgtctttcttttttaatttctatagattttactgaaaatagagaatatttcaagtatcagctgatagtgaagtttcagaataaattttcagagcacttgctaaccaaaggctgtaaggcttgtggcatttatatatacatgttaaaaacccttgtcaag

SEQ ID NO: 747896 - DNA, 462 bp, Homo sapiens
aactccagatttgcctattaaggtagaaatgtcatgaggattattcgaaatgtaaatactgagctagcatgtcagtaaaatcaaacatacagatgacagataaataacaacaaacacaaaatacaactgtggcaatgtgcatctatgtaggaaacagagagggaagtttagtgtctcatgcatgccacgtgggattgaagagaatctgggaaagttaagtcagatcctgcaactacctacttaactatatctatgagtttgctttaatgttcctcctcttgcctagtgccacatgggtgcagaggcagcccatgaggmcaacttctcccagccttccacatttatagcagactaaaagctccctccccctgtcaactccctcccccaacctgtgccctctttctcataacataggtaatgatcctcattcactctgttctaaatctgaggggcaagtaagta

SEQ ID NO: 747897 - DNA, 581 bp, Homo sapiens
tcgcccaggctggagtgcagtggcgcaatctcggctcactgcaagctccgcctcccaggttcacgccattctcctgcctcagcctcccgagtagctgggactacaggcacccatcaccacgcccggttaattttttgtatttttagtaragacaggctttcaccatgttagccaggatggtctcgatctcctgaccttgggttctgcccgcctcggcctcccaaagtgctgggattacaggtgtgagccaccgcgcctggcgtagctaataatttttttcacagtatcctggaatcctaagagctcaaactggaaaaaaatatgaaagtcttcgcacaatctttcatttaagataagggaattgagaaccaaaacatgacatatttgatgaaggaaagtggccacatagtgacaaggggagatataccttaaacgcaatgttaacacctctttaaagtctttgagcatctttaagactcgtttgaattacaaaattaatggtttctaacctattattcagataaatgaagtgtctactagcacatttaaagcagttattacctgatatctgctgagcttat

SEQ ID NO: 747898 - DNA, 531 bp, Homo sapiens
tggattcaatctgtattttaactataagattttgcaattgctgaaattaacgaaaaatatttgcttaaaaatcaatttacattgcaaatttttttaaaattattgttttaaagcctgttaacaagcactgctaaccagaacctgataggagtaaggtgtgtggacatccgcygggaagattgagatcctgaaaaccatttcagtgtcttctgtacgccatctttgttctaactccatatttgagttttattgaaaaaggcagcctgtcagagattaggactggagactaagtaatctatttcaggctcactatttgtttttcccttcagaaacataaataatacatcaaagaaggatttttttgtcactgttttgccttttgatccttcctagtcaaagactaatattaaagtgcatttcacttggttgtactagtaagataaaaaataatcacataatatacaggaaaagtgaaaaaaaaaaaaaaaaacagtgttgaaaacaaatacacttctcaacatattgaacaca

SEQ ID NO: 747899 - DNA, 654 bp, Homo sapiens
actatttgtttttcccttcagaaacataaataatacatcaaagaaggatttttttgtcactgttttgccttttgatccttcctagtcaaagactaatattaaagtgcatttcacttggttgtactagtaagataaaaaataatcacataatatacaggaaaagtgaaaaaaaaaaaaaaaaacagtgttgaaaacaaatacacttctcaacatattgaacacagttcaaaagaagtaacggatacttcagtcggccagataggtcctcaagcgatttcagkgatgaggtttaaattctcaagggagctgggagaggagagtgacattgtcttcccatttctcctgggaattcttaatgctcatcccccagagccaaaaatgactttatgaaggttttgaggccatgtctttctctggagaaccttaatgttcttatgtagtttaaggaaaaagttgcggtgatgaaattttagttgtttattaacaagagaataacacagtggggaaaagcgagatgtagtgaaccaaggaatattttgcttaaaaataaaataaaatttgcctgttgcaagtccttacacaaaagcctcattggcctctgtgaagtcttaagcaagtctttgtgggatgaaagaatatactcttgttaagttg

SEQ ID NO: 747900 - DNA, 654 bp, Homo sapiens
actatttgtttttcccttcagaaacataaataatacatcaaagaaggatttttttgtcactgttttgccttttgatccttcctagtcaaagactaatattaaagtgcatttcacttggttgtactagtaagataaaaaataatcacataatatacaggaaaagtgaaaaaaaaaaaaaaaaacagtgttgaaaacaaatacacttctcaacatattgaacacagttcaaaagaagtaacggatacttcagtcggccagataggtcctcaagcgatttcagggatgaggtttarattctcaagggagctgggagaggagagtgacattgtcttcccatttctcctgggaattcttaatgctcatcccccagagccaaaaatgactttatgaaggttttgaggccatgtctttctctggagaaccttaatgttcttatgtagtttaaggaaaaagttgcggtgatgaaattttagttgtttattaacaagagaataacacagtggggaaaagcgagatgtagtgaaccaaggaatattttgcttaaaaataaaataaaatttgcctgttgcaagtccttacacaaaagcctcattggcctctgtgaagtcttaagcaagtctttgtgggatgaaagaatatactcttgttaagttg

SEQ ID NO: 747901 - DNA, 625 bp, Homo sapiens
aatgcagcaacaaattcaactctatttttatatagttagccataaaatttaataatagaataaaataaaacctaaacttattttaagtgagttgtcataggataatttgataactgttaataaattatggttatgcttttgcatgaattatttgataaaaagtcccaggcatagtttcaccatcctaaaaatcctctactctgtatgatactgtagtggtggatacatatcattgtacatttgtccagattctagaatgtacaaaaccaaaaatgaactctaatgtaaactgtggactttgagtgatgatgatgtgtcaatgtagttcatcgaytgtaacaaatgtacagctctagtagagaatattgatagttggggaggttatgcatgtgtgagggcagggagtattttgaaaatctttgtatcttcagctcaattttgctgtgaacctaacactgctgtgaaaaataaagcctacttttctaaaaaaaggttgcaggcataatgatcaagtttatgaagatttttaaaaatgtaattgttgtcttagaaatgaagagataagttcagataataaacagtactgttgatgataaaacaaatctccttactgaaaatataagtc

SEQ ID NO: 747902 - DNA, 625 bp, Homo sapiens
aatgcagcaacaaattcaactctatttttatatagttagccataaaatttaataatagaataaaataaaacctaaacttattttaagtgagttgtcataggataatttgataactgttaataaattatggttatgcttttgcatgaattatttgataaaaagtcccaggcatagtttcaccatcctaaaaatcctctactctgtatgatactgtagtggtggatacatatcattgtacatttgtccagattctagaatgtacaaaaccaaaaatgaactctaatgtaaactgtggactttgagtgatgatgatgtgtcaatgtagttcatcgactgtaacaaatgtacagctctagtagagaatattgatagttggggaggttatgcatgtgtgagggcagggagtattttgaaaatctttgtatcttcagctcaattttgctgtgaacctaamactgctgtgaaaaataaagcctacttttctaaaaaaaggttgcaggcataatgatcaagtttatgaagatttttaaaaatgtaattgttgtcttagaaatgaagagataagttcagataataaacagtactgttgatgataaaacaaatctccttactgaaaatataagtc

SEQ ID NO: 747903 - DNA, 615 bp, Homo sapiens
ctcaattttgctgtgaacctaacactgctgtgaaaaataaagcctacttttctaaaaaaaggttgcaggcataatgatcaagtttatgaagatttttaaaaatgtaattgttgtcttagaaatgaagagataagttcagataataaacagtactgttgatgataaaacaaatctccttactgaaaatataagtcactttagctaatggtgtcatrctgttgacctaaaggcaggttacgggctggcactgacaccagattagatgcatgagcccctgggggctccagctcaggctctccaggacctgaacatgtgaaagcagtagattttcggtatatgcagtggtctgttggtgagacggatggacaccagtcccagttcttctcctgccttgaaccttatgttggtcaacaaggaggaagctattgaaagacttggtgcagatctctatggcaaatcaaagctcaggaagaggtgtcattaagttactggcagtcacatcaaaggaaaagcgtatcagtaattcttccagttaggtaaattatacaaaaatattagaatggattatgacttatttgcacaaaaatgtatgcctaacatttgggaagcgatttg

SEQ ID NO: 747904 - DNA, 528 bp, Homo sapiens
cagtgttatacaaatgttctcttaaacaatttttgatttttgttatagtttttatacttaataatccacagaaaacttattttttaaaaaatattatttactgttcagggctattgtttctcttgcttattttttagcagctacttttaaccacatcttttatttaataacttttttcrtcactgaagtgaaatgcaacttatcctacataatatctccatattatatttggatcattttccagactttctgtccttttcaaataatccatgcattattattaaaaataccatctgatttaaataaggcacttataatatattttgatatctttaaaaaatacacatatcccattttaaaaaattgatgtgtcagcggattctgactagaattttaacaaatttataagcacattgaaataattaaaatcatgacttttctattcagaacttcttttgttctatactcattgcataagggttgatagctatctttgtctacatataggtcctgtatttgttctattta

SEQ ID NO: 747905 - DNA, 612 bp, Homo sapiens
  misc_feature 587: n = A,T,C or G
ttgtctacatataggtcctgtatttgttctatttaatttatttaatgctatttcacatgtatttttccattttcattagaatgcatttttatttgaaatttaaatttgttctaatttatcaaaaatattgatttatatatatgcatgtagtattcagccatattaaaactatggagctcatcataacatgtttatagcaaaatcttttcaaaatatgtaaacataaaatgaagctaaacttattttgctgaacatttagttttttaaatttattgtgttagacctctccaagaccatattgaaaatgtctactgatagttttatttctgamtttaatgaaaatagaactgacaagttatcatttagtatgctgacttttgaaaattttgaccaatagtcttcataagtttccattattttttctatattctgatgctatccatttttaattaacttgttttttttgtatattgtgacataaatgttactttaatattcatataagcagataatgtagttacatggaaagtttagaaattacatggatgtgcatgtacagaaaactaaccaaagaaaatacacatatngagaaaaaatttgtatacaacttaa

SEQ ID NO: 747906 - DNA, 605 bp, Homo sapiens
atgacatatttaaagtgcagaagaaataatacttttaccctagaatagtatgttcagcaaaaatattcttcaaagattaaaaagcaattggaacaaaagcctaaattgagaagtgaaatttaattaaactgaagagcttctgcacagcaaaaagaactaacatcagagtgaacaagccacctacagaatgggagaatatttttgcaatctacccatctgataaaggtctaatatccataatctacacggaacttaaacatatttaaaagaataaaacaaacaaccccatcaaaaagtgggcaaaggatatggacagggacttckcaaaagaagacatttatgcagccaaaaaacatatgaaaaaaagctcaacatcaatgatcattaaagaaattcaaatcaaaaccatgatgagataccatctcataccactcagaatggcgattattaaaaaatcaagaaacaatagatgctggtgaggatgtggagaaataggaacgcttttacactgttggtgggagtgtaaattagttcaaccattgtggaagacagtttggtgattcctcaaggatctagaaccagaaatatcatttgacccagcaatc

SEQ ID NO: 747907 - DNA, 425 bp, Homo sapiens
taagaaacaccctgaagggcttgaaaaatggattatggttttctgcttacaggaaataaagttctaatatgttatgatggggaaaagagtctagaggaagccatccaatattaattgccctgtcataggcgaaaattgggccttaggtctttgatgtccaaaatagctgactcatatatttatagttaccatatacattttcaattattcttgtgagccttaaggaaatcatgtttgttttcttgttgcattatrtcacgaccatattttatatactttagaaaaaaagatagaaaactgattattgtttttgctttctaagctaaagtttaaaatttcatataccagggcttatttgaatgtggattaataataaaataataacaatatgaatgtgttgattgatttgaaaatccataagtaaa

SEQ ID NO: 747908 - DNA, 426 bp, Homo sapiens
aaaatgtgacaaaataacataaagtaaatataaaatagtatgttaaagagctggcagtaaagtaaaggtattaccagctataaaatatgcaaataatctaagaattacatccacataattaaccakaatactgcctgagttgccaaggaaaataattttcatttttattactgggtaagaaggaccatctgagacttcggatggtgagtaagggtgactttgccctagttcataaaatatcaggacagcacatttcaatatgatcagattagaaagagcccagggaacatccatgatgataaaagatgactaagattaaaccttgtgtgagttagacattgttattgatgccataagtaacacaataccatgtgctctctaagctgcaatgtgctctcaaggtggtcatgtggataacaagaccaa

SEQ ID NO: 747909 - DNA, 625 bp, Homo sapiens
attatgtatagagaaacacaaataaaaattatagccaacttcttgtcagaaactttgcaagaaagaaaaactatagcaatgcatttatatgttgtaaaaagcaaaacaaaacaaaaaaccttgccaccctagcaactatrcccagtacacatacctttctgaaataaaaacaaataaagactctttctggaaatcaatagctgaaactattgccaacagacttgcaatataagacaggttaaaacaagatctttaggcagaaataacatgacaccaaatggaaattcagatcttcccacaaaaataaatagccatataggtggttaatatttccatgaatataaaaaagacatacttttccatttttaatctttaaaaaatagttgaatattaaaagcaaaaggaataacaatacatgctatgctggggtggggactaactgccagggaaagtagatttggtctacttataaataatgacaagcaaatatacattctagatagaatgcagagcaaagagatataaacctaaacaaaacagtttcagagaagtcaaccatattaaaggatgaagggacaaggagtgtcattaaatcatcactttctactctgcatctactatctgc

SEQ ID NO: 747910 - DNA, 625 bp, Homo sapiens
attatgtatagagaaacacaaataaaaattatagccaacttcttgtcagaaactttgcaagaaagaaaaactatagcaatgcatttatatgttgtaaaaagcaaaacaaaacaaaaaaccttgccaccctagcaactatgcccagtacacatacctttctgaaataaaaacaaataaagactctttctggaaatcaatagctgaaactattgccaacagacttgcaatataagacaggttaaarcaagatctttaggcagaaataacatgacaccaaatggaaattcagatcttcccacaaaaataaatagccatataggtggttaatatttccatgaatataaaaaagacatacttttccatttttaatctttaaaaaatagttgaatattaaaagcaaaaggaataacaatacatgctatgctggggtggggactaactgccagggaaagtagatttggtctacttataaataatgacaagcaaatatacattctagatagaatgcagagcaaagagatataaacctaaacaaaacagtttcagagaagtcaaccatattaaaggatgaagggacaaggagtgtcattaaatcatcactttctactctgcatctactatctgc

SEQ ID NO: 747911 - DNA, 611 bp, Homo sapiens
catttttcacaaaaatagactaaaattttacacctgctttagagtagagtatatactttgaatgaaaaggtaagatgtccacagagcacattttatatttcaaaaactagaaaggaagaaaaaatcttcaattcataagaacaaattaaaataaccattggataattcaaactgtgattgagaggcttatwtccttagaagcgtaagaaactgcattaaactcctatagctattaccctgaacctgtaattacatcagcacatttttgctttcttttagggatcatcacagcatgagagaaaggaggagtggggaaggaaagatagtattcattacattctacagaatgtctaaccatagagtaaacgaacagatgatcggaatgccgttccaataagaacttttcccattgttaattacgtggtcttagaatccttgaaagacaacgtgacagacttaggcatcaagagtatttgggcaagcacaaatcctcttaataaaataaaaatatttgaaaacaaaagcagaaaaactgtataatcaggattttagcccttgacattacatttctgtctcattatgaaaacaaccttggagctaatcatataaaa

SEQ ID NO: 747912 - DNA, 614 bp, Homo sapiens
agcataatttattaaattttcatattgtttaaaactatctgaaaatatccctgaatgattttttgtttgcttgtttttttgagaccgagtctcactctgttgccaggctggagtgcagtggcacgatctcggctcactgcaatctccgcctccggggttcaagcaattctcctgcctcagcctcctsagtagctggaattgcaggcatacgccaccacacccagctaatttttgtattttcagtagagacagggtttcaccatgttggccaggatggtctcaatctcctgacctcaggtgatctgtcctcccaaaatgctgagattacaggcgcgatcctgaatgatttttaatgctttgaattgggtcaccctaaggagatgtttaataacagataagagtaattgttcatagtcttatagttgttaaataatgaaaactcaaatcaaactttctttaaagaaatacagataatttttcaactcagctacatagttccaggcacaactgaattttgctgctaaaaaattcattagaaatatttttcccttcctcctggctctttttcctggattcaggtagcttttttttccatatatatatatatatatata

SEQ ID NO: 747913 - DNA, 617 bp, Homo sapiens
ggctcacctgagcccagggatgtcaaggctgcagtgagccatgattactccactgcactccagcctaggcaacagagtgagactctgtctcaaacaaacaaacaaacaaacaaacaaacaaaaggtgaaaaccctttggggggaattaaatttccttcatggtctgtcctcacctatattacaacactctttctctactctcatcgcctcccctcccctctgtctttattctagtggcataggtatatacatacccagctctgaatgcttctmatattgtctcaatcccaagtttctttcattttttgctctttgttttattgtgcctgaagtatgtttctctgcctccttcacttctttgtttgagtgtgtgcagattaaatatcactcactagagtgtaaacaccctgagagtaggataatttttaatacatttttgtgcacatgacacctagcaacatgtttgtcttgtagcatgcttgaacactggatttaaaatggatgaaaaactgttggtggagagtcattttatctccagtggtcatttgtttcccccctttattctcaaagcatttcatgcttctttcaaagtttttattgtagcttacttgaattat

SEQ ID NO: 747914 - DNA, 617 bp, Homo sapiens
ggctcacctgagcccagggatgtcaaggctgcagtgagccatgattactccactgcactccagcctaggcaacagagtgagactctgtctcaaacaaacaaacaaacaaacaaacaaacaaaaggtgaaaaccctttggggggaattaaatttccttcatggtctgtcctcacctatattacaacactctttctctactctcatcgcctcccctcccctctgtctttattctagtggcataggtatatacatacccagctctgaatgcttctaatattgtctcaatcccaagtttctttcattttttgctctttrttttattgtgcctgaagtatgtttctctgcctccttcacttctttgtttgagtgtgtgcagattaaatatcactcactagagtgtaaacaccctgagagtaggataatttttaatacatttttgtgcacatgacacctagcaacatgtttgtcttgtagcatgcttgaacactggatttaaaatggatgaaaaactgttggtggagagtcattttatctccagtggtcatttgtttcccccctttattctcaaagcatttcatgcttctttcaaagtttttattgtagcttacttgaattat

SEQ ID NO: 747915 - DNA, 617 bp, Homo sapiens
ggctcacctgagcccagggatgtcaaggctgcagtgagccatgattactccactgcactccagcctaggcaacagagtgagactctgtctcaaacaaacaaacaaacaaacaaacaaacaaaaggtgaaaaccctttggggggaattaaatttccttcatggtctgtcctcacctatattacaacactctttctctactctcatcgcctcccctcccctctgtctttattctagtggcataggtatatacatacccagctctgaatgcttctaatattgtctcaatcccaagtttctttcattttttgctctttgttttattgtgcctgaagtatgtttctctgcctccttcacttctttgtttgagtgtgtgcagattaaatatcactcactagagtgtaaacwccctgagagtaggataatttttaatacatttttgtgcacatgacacctagcaacatgtttgtcttgtagcatgcttgaacactggatttaaaatggatgaaaaactgttggtggagagtcattttatctccagtggtcatttgtttcccccctttattctcaaagcatttcatgcttctttcaaagtttttattgtagcttacttgaattat

SEQ ID NO: 747916 - DNA, 611 bp, Homo sapiens
ggttggtgaaaaattaagtaatctaggcatgatttatgggatgcaggaggatgtggataggttacatgcaaatgtcattttataaaaggaacacagcatctgtggatttaggtatgcttagggggtctggaaccaatcccctgcatatggttaggggataaccatattcaaaagaaacatcaagctttaagttcaagatctaatcaccaaatttttataaaatggaaatgacgctttccccaactacatcacatgactacatcaaggatcatgttaagtacaggtgagtagatatatatatatatatatatatatatatatatatatatatatayacacacatatatagatatacacaaaataatttatacacaaacataaaatcatgaaggctttttaaaaataggaactgttaattatacataaagcatctccattcgtgcaatttttatgtcttcttccaggtaattaattttatggaaatatacaatcctcctcctgcctgcacctctcccacatacacactaccttcctagtactctggggaatattgggcaaacattctcaccacaaaattatattaagaagttaaataaacattaaatattgta

SEQ ID NO: 747917 - DNA, 611 bp, Homo sapiens
ggttggtgaaaaattaagtaatctaggcatgatttatgggatgcaggaggatgtggataggttacatgcaaatgtcattttataaaaggaacacagcatctgtggatttaggtatgcttagggggtctggaaccaatcccctgcatatggttaggggataaccatattcaaaagaaacatcaagctttaagttcaagatctaatcaccaaatttttataaaatggaaatgacgctttccccaactacatcacatgactacatcaaggatcatgttaagtacaggtgagtagatatatatatatatatatatatatatatatatatatatatatacayacacatatatagatatacacaaaataatttatacacaaacataaaatcatgaaggctttttaaaaataggaactgttaattatacataaagcatctccattcgtgcaatttttatgtcttcttccaggtaattaattttatggaaatatacaatcctcctcctgcctgcacctctcccacatacacactaccttcctagtactctggggaatattgggcaaacattctcaccacaaaattatattaagaagttaaataaacattaaatattgta

SEQ ID NO: 747918 - DNA, 544 bp, Homo sapiens
tcactcacccccaccccgctcaccttctggtgtgtggccctggttcctaacaggccattgaccagtactagtctgtggactgggggttggggacaactgctctataagatacaattgctggccgggcacggtggctcgcacctgtaatcccagcactttgggagaccgaggagggcagatygcaaggtcaggagattgagaccatcctggctaacacagtgataacccatctctactaaaaaaaaatacaaaaaaattagctgggcatggtggcacatgcctgtagtcccagctactcgggaggctgaggcaggagaatcgcttgaacctggaaggttgcagagagctgagatcacgccactgcactccagcctgggtgacagagagagactcagtctcaaaacaaacaaacaaaaatacaattgctagatataattgccttttctccccttaactacaactttaaaaaaatacccttaacaatgtaacatcacacacacacacgtacacacacttctcatattcttagaatattgctttcact

SEQ ID NO: 747919 - DNA, 624 bp, Homo sapiens
ttaactctgtaaagcatcatgcaaatggctcattgacacatcccccagacaagtagagctggtagccaaactccagcagagcctgaaaaggaaagtcccaggactcagtttccaggactgcaggccacctttaccctcggcaatcaagctgctccctaagcccacccccctcctttctaccccacttccttcatctasaggataaagaaggaaaagtaacatttcagccctgactctctcaggatgtgactgttggtaagaccctaccctggatgtaatgacgcgggccgtccatttttcgatcgttggcactcatgcatctatgttggccttgtggcgtctggtgataggaagactgcactttgcaatcacacagaacttgatttcacttttgctgtgtgtccccagcaaatgtcttaacttctgaagactttcatttctcctctatatactgaaatattattacatctgaggttttcttgagtgccactgaaaagatgaaataagttaacacatgcaaggtgtctagaagtttctcattgattgatagttgctgcgagtggaagtgatggtgctggggttagaacaacatagaaataatgtgtgtgagtttctttacccctt

SEQ ID NO: 747920 - DNA, 601 bp, Homo sapiens
aaatggctcattgacacatcccccagacaagtagagctggtagccaaactccagcagagcctgaaaaggaaagtcccaggactcagtttccaggactgcaggccacctttaccctcggcaatcaagctgctccctaagcccacccccctcctttctaccccacttccttcatctacaggataaagaaggaaaagtaacatttcagccctgactctctcaggatgtgactgttggtaagaccctaccctggatgtaatgacgcgggccgtccatttttcgatcgttggcactcatgcatctatgttggccttgtggcgtctggtgataggaagacygcactttgcaatcacacagaacttgatttcacttttgctgtgtgtccccagcaaatgtcttaacttctgaagactttcatttctcctctatatactgaaatattattacatctgaggttttcttgagtgccactgaaaagatgaaataagttaacacatgcaaggtgtctagaagtttctcattgattgatagttgctgcgagtggaagtgatggtgctggggttagaacaacatagaaataatgtgtgtgagtttctttacccct

SEQ ID NO: 747921 - DNA, 462 bp, Homo sapiens
tttccccgattgtatttaacaaatgataagaacaatttaacaattattggaattatcctgttttttattgttttttttttctgttaatttgaaagatgagacattatcagacgtttgtaaaggtctttttttttcctaatggagccaacgcagtcacagctatgcttttatttttaatttactcagttttggtacatgcacaagaaaaattgaatttaaaatgaggaaaataaatttagaataatcattgatctaaataaaaagcmatgtttcacactttctgtaattgggaatgttaatttgtcttgtattagtggaggctgcaatcagtgatattactgtggtcctcatggtggatatttaaatgtcaacaaatattttaggcaagttcccccaattatcatcagctttctagagaaatgaaaatctcattccaaatgttttattaaacatgaacttttg

SEQ ID NO: 747922 - DNA, 614 bp, Homo sapiens
cctatttccaaataaggtcacattcacaggtactgggagttaatggtcaaacataactctttaggggacataattctaagcataacaagtacactctatgctagataggggaagcggtccatggtttggcagtccctaacaactatgtcaattgtgaactcattcaacatcattccaaaatgtatttaccaagtcccaaatatttcccatgcataggctgagcacagggatagggaatgcagccagttattctcagagtcaccagctaggacactatctgcttgaacagctgttataagatgtataagtaagaaaactgacatagaaaaagtgagcctrgtacacagcacagagtaagtattcaacaactgatagctgttacaataggcagggttctggctacttcatgataatgatgaccattaataaacgctaagtgagaggtgatgccaaacactttgtatcatctcatcccatggcatcagcaactccatcaggtgtgttttcatcagctctgttctccaagtgatgacattgaagcttagagaggctaaggaactttcccaggtcacacagttagtcactttcaggactaggacttttcagaatgcaga

SEQ ID NO: 747923 - DNA, 514 bp, Homo sapiens
ttagagaggctaaggaactttcccaggtcacacagttagtcactttcaggactaggacttttcagaatgcagattagtctaaccatgctatgccagttttttcattgtctctcaaaggatggtcctgagtcaatcagtggcaatttctaacccctcccttgaggcttaaattttattttacatgttattacagtacaggtcttgcttgggcagacctggaaagcggacagcaagcttcagctgaccccagggaggcgtgcccctgaagcaggcactagctgtgaaacaagcttctccttcttgaatttggaggaagctgatgtatctgagkgccactttttaatcaagaagaccgtctatctcccattgtcacttgatctttcttgaaacaacagctacaaatctccaggcaacacagacatgatgcagacaaaatgaaaacagaggaagcagcatctttctctcattaatgggagaggagaaaaagcacagctctgcctcaagtgttttggga

SEQ ID NO: 747924 - DNA, 593 bp, Homo sapiens
tgcttgataaatataatcaatggtttgatttaaacattacaaagaaaaataatacttaaaaaaaagattaagccaaatggtgattttgcaaacttgcaactcagaggaaaaattaattcttcaatgattagaatacatttgaattaagttgaagcctaatattgactctaactcttacccttagcccaacattaatccttaccctataaaataatatttacatattattatacttcctctyggtgcttgcttttctttctatttctcctcaggagcgaagaaacacttctatgtagggagccgcttgaaatatttactatgtatacttactcaataaaataacttaaaaatagcactcctctactataatgtgtagattataaaatctttagcattactcccaaatgttgcaaccactcttgtgatcaagtacgcagttattggaaagagttttgatattctggtctgaagagcggacatttgggggaagctgcgaaattcagcaatgctccaaggtttccttttattgtgtcccccactaccgctgtccctaggcaccattcgtctgtttttgaaatgctactgtagccagt

SEQ ID NO: 747925 - DNA, 476 bp, Homo sapiens
aagtataaaggcacagggatagaacttggaaaaatatttgacagcagaacagcccccatccctgggccctaagggctctccaggctgtgtagttgccctttacactcatctggaatgtgtgaggcacatgttcacttcaatcaattacatcagaacacattccactcatttatacctgtggatgtctacctctgagcagtcaactctctgggtatgaactccacttgaatcccactaaggggcctctcaaaaagaaaaccccaaacacccatgttatatgtgctattgccagaaaaatgtaattgttttagccactcaaagcttgcrcctcaggtcagtcacattacgttcctcttcaagagacagcacatcattagcatactctgaaaaccttgttaacattttcatagtttctaacagcaatggcaaatggatttttaggtacaaaatgttcctcacagaatatgaaaacttat

SEQ ID NO: 747926 - DNA, 329 bp, Homo sapiens
tgttgagacttaaattatataatagataggtaactgccaaaaaaaaaaaggaccattagttagagttggagttaggtctctcctctggggagctgtacctccaatctattgtggtacaactagaaagaatgaattttatatccagmaacttattcccaaattgactgctcctgtcacttccaaaccttagtctgtgtaaccctcttccaaaggctgttcaccgattagatgttctgattgcagttatttaaactcagcctgacttcagtctacattagaatggttggcaggtaatcaagaggccagagattcatagaggcaatattttc

SEQ ID NO: 747927 - DNA, 604 bp, Homo sapiens
ggtgagaggtgacaacgtgctagcagccccttcctgctcctggcagctccttggccttggcatccactctggccatgcttgaggagcccttcagcccactgctgcaccatgggagcccctctctgggctggtcgaggctggagccagctccctctgcttgtggggaggtgcggagggagaagtgcagatgggaaccaggactgcacatggcacttgctggcaagcrtgagttccaggtgggcgcgggcttggcgggccccacacttggagcagctggctggcacccccggccccaggcagtgaggggcttagtgcctggaccagcagctgcatagggggcgccagttgccccagcactgccgacccacccttgccacgcttgaattcccactgggcctcagctgccttcctgaggggcagggctcaggacctgcagcccaccatgcccaagcccccccggggtgggctcctgcacagcccaagcctccccagtgggcactgctccctgctctgtggcacacagtcccatcaactgcccaagggctgaggagttcaggtgtgcgtcacgggactggtgggcagctccacccgtggccccggcatg

SEQ ID NO: 747928 - DNA, 604 bp, Homo sapiens
ggtgagaggtgacaacgtgctagcagccccttcctgctcctggcagctccttggccttggcatccactctggccatgcttgaggagcccttcagcccactgctgcaccatgggagcccctctctgggctggtcgaggctggagccagctccctctgcttgtggggaggtgcggagggagaagtgcagatgggaaccaggactgcacatggcacttgctggcaagcgtgagttccaggtgggcrcgggcttggcgggccccacacttggagcagctggctggcacccccggccccaggcagtgaggggcttagtgcctggaccagcagctgcatagggggcgccagttgccccagcactgccgacccacccttgccacgcttgaattcccactgggcctcagctgccttcctgaggggcagggctcaggacctgcagcccaccatgcccaagcccccccggggtgggctcctgcacagcccaagcctccccagtgggcactgctccctgctctgtggcacacagtcccatcaactgcccaagggctgaggagttcaggtgtgcgtcacgggactggtgggcagctccacccgtggccccggcatg

SEQ ID NO: 747929 - DNA, 604 bp, Homo sapiens
ggtgagaggtgacaacgtgctagcagccccttcctgctcctggcagctccttggccttggcatccactctggccatgcttgaggagcccttcagcccactgctgcaccatgggagcccctctctgggctggtcgaggctggagccagctccctctgcttgtggggaggtgcggagggagaagtgcagatgggaaccaggactgcacatggcacttgctggcaagcgtgagttccaggtgggcgcgggcttggcgggccccacacttggagcagctggctggcacccccggccccaggcagtgaggggcttagtgcctggaccagcagctgcataggggrcgccagttgccccagcactgccgacccacccttgccacgcttgaattcccactgggcctcagctgccttcctgaggggcagggctcaggacctgcagcccaccatgcccaagcccccccggggtgggctcctgcacagcccaagcctccccagtgggcactgctccctgctctgtggcacacagtcccatcaactgcccaagggctgaggagttcaggtgtgcgtcacgggactggtgggcagctccacccgtggccccggcatg

SEQ ID NO: 747930 - DNA, 604 bp, Homo sapiens
ggtgagaggtgacaacgtgctagcagccccttcctgctcctggcagctccttggccttggcatccactctggccatgcttgaggagcccttcagcccactgctgcaccatgggagcccctctctgggctggtcgaggctggagccagctccctctgcttgtggggaggtgcggagggagaagtgcagatgggaaccaggactgcacatggcacttgctggcaagcgtgagttccaggtgggcgcgggcttggcgggccccacacttggagcagctggctggcacccccggccccaggcagtgaggggcttagtgcctggaccagcagctgcatagggggcgccagttgccccagcactgccgacccacccttgccacgcttgaattcccactgggcctcagctgccttcctgaggggcagggctcaggacctgcagcccaccatgcccaagyccccccggggtgggctcctgcacagcccaagcctccccagtgggcactgctccctgctctgtggcacacagtcccatcaactgcccaagggctgaggagttcaggtgtgcgtcacgggactggtgggcagctccacccgtggccccggcatg

SEQ ID NO: 747931 - DNA, 636 bp, Homo sapiens
aagacagtagctttggtggcaaaagtaggtagaccagtttgataaaaacagctaatttagatttcaatactgtgttttaggaatctaaataaatcaggtattactgtcaattagctctaggtttttggataatttaatcaaagcaatccatttcatgctatatagatagtgtctctacctaacaaagattaataagccttttttcttggagattagtaacagtctacttaaaactaagggatacaagattttttaagataaaatatatggtaaaaaaaaatgatatttgtaatagggcattacaataatatgccctgaactgctttcataattatattcattcatgaggtattgtaagtcacatctttaaaaaaaattcaraagtaaattttgtgttttaaaatgtcctctgtatgttgccacatgacttcccatggcaaatgatggtttatgtcgcactttaaaaagcgtttgtagttgactgacatggttaactttgaagattcccaggaactgcaacattggatgacactagatggaatgatctcattacttctgtattctctacacttgcctgcatgagtgaatacttgaaatacgaatggatttttctaatacgattcacgacacctggag

SEQ ID NO: 747932 - DNA, 644 bp, Homo sapiens
cagagtgcctggacttgagaagtggcctaggtcttgggccagtgcctgaccaaacaggtgagggctatccgtaaacccttggggcaagactgtccacataagttgggaaatgtggtctgtgggatcctcaaaggcaaagagaaactrggagtcagagtgcaggggaaaacagaagacatctttgaggtccagaacactgaaccattctgcttcctttggtatttgagagagcagggtataggggttgggtacaactggatatagaggaattattgactcattaatgagtctaagatcttacactagtttccagtgaccattcgatttttgtactccaagaattggagtgttgtggggactgctgcatttccttactaagccttgagcttttaaatgtttaacaatatcctgtaatcctttatgaggttcagccttaagggatattgcctttgataaggaaaactggtgggatcttttaacctgatttggactgggtgggcattttttgcccttccaaattgtccttccaatgcccagacttcacggttgattccctcctcaagtaagggacaacaattggctaacttgttccccatattcacgtagataatagctccagccttggataatatatccctccctaa

SEQ ID NO: 747933 - DNA, 598 bp, Homo sapiens
aaagtcaggctgcagagttatcccatgtgtgaaattcatttagttcatttttccttaacaagctactgtggcaaagaagtagaaggcagaatttcataggacagtactcgcaaacctgaaagtgcatatgtttcacctggggatcttgttaaaatgcagattgtcattcaggagggctggcctgtcctgggattctgcatttctaacaagttcccaggcaatgccgacaccgctggtccatgaactgcacttggaatagtgasaacataaagaaatacaaaatgttagggttggtattcactttataagaataagatcattgacaatataataaaatcttcaggttatttggtatggatcatgcaaagcattttcacagagagctttgctggtcatcttgtgtccacgtcctaaagagctgtcatataagaagatgtgctgctaattttgctttcacaaaaatacaatattttccaatttctgaccttttaaataatgacaaatagttgttggtagaattctatctagcaggaaataaataaatacatctcatctatttctttatgtaaaagaggcaatttaacaatgaatgggaaag

SEQ ID NO: 747934 - DNA, 630 bp, Homo sapiens
caagatttgaaaacataaagtatttacaagtgcattgttctcacgaatattaataatgtgtaaaaagggtttagtgagaataacgttttatcattaataacacaattacttaaaaagcattgtttcttttttatcttatcctttataatttacatttttgtgtatattttcacatatataaaacattgatacatctgaataacctatgcaaatacacatatattttagggggttgtttaccttttttaacatatgtgtcgtgtaacccaaaaagagcagaagacactgatgtaaattaacacatttatagactgtaaactctgtgtggctattttcttccttttttttttttttttaaratggagccttgctctgtcacatatgctggagtgcagtggtgtgatctcggctcactgcaagctctgcctcccaggttcatgcgattctcctgcctcagcctccccagcagctcggactataggcgcccaccaccacgtctggctaacttttttctatttttagtacagaccggatttcaccatgttagccaggatgatctcgatctcctgaccttgtgatccgcccacctcggcctcccaaagtgctgggattacatgtgtggcaattttc

SEQ ID NO: 747935 - DNA, 617 bp, Homo sapiens
aaactataactaaagagaagttgaaagtggcctcagatgcattctctgtggagatcagaaaagagacatcttgaagacctggtgttactaaagaaacaaacttgtcactcttcatcaacaccctcagccacttcttgtcctccctctgtcccctcccacaatctaactctgaagttgggcttcaaatctaacatctactcaagccctcytattcaccaaatacagtgaattagaataattcactatattaattgcttccagacccaccctcatgttccctcttattgtcctgctatgtcctcccttcatttcaaagagagtattttctctaagaaacctccccaaatctaccaagaggtatctgtatccttcttgtccccccatttatatgtgaagagtcctccaggatgtatatatgttgagacattttcacaactaatgacattcatggctgtttcgtgccataaccccccatgtgggacctgctctgtgttctgcagccctgtctccatgtctcacatgtttgccagttttcactaggctacactgtggtaacaaatatccccaacatctcagtggcttataacaaccaatgcttatttttcactcctatacat

SEQ ID NO: 747936 - DNA, 563 bp, Homo sapiens
ataatgtcaattagggcagaaggtatggatagagaataactgagggcccaggaatgaggtgaaggccacaccgacatttaccaatggggtaggggaaaggaggaggtggctttttacagatgatcaagtatgagctaccagggaagtgagcagaaaaccaacacatgtaagctgagagaagacagtgatttagaaatacattaggatcaattatgtcaaatgcttctgagagggcaagaaagatgagaggggkgaagtgatcatgggatgtgggcttatggaagtctttgtccattaattagttactttaagtaaaagcagttagcacactgcctgacacatagtaggttcccagtacacatttgctgaatgcaatcaatcttgtgtgtggtggcacagggtaggttctgcagtagcatcttaattccattgtggtttgggcagaccttccttcttcctcacctgcccctcgagcttccatcttattgagaggtaatgtctagtgctggggaattgcagaagctgaatctggccagagaaggtcttgagggccagggcgagga

SEQ ID NO: 747937 - DNA, 632 bp, Homo sapiens
tgagcaagtggaaggagtaggtaccatgttcacttttgggtacaatggtttagagatgtctacatgtggagctgtcgagtagactctgaggtgaaaggtgctgtcctggagtatgtggcgattctttcctggtttctcttttccagtgaaagcagccagcatggttatcaactaagagtgagcaggagagagaaagggttgagaaacagtgtcagatttctggaaggcaccaggggacacttgacgttgttggacatgtatgtcaaataaggctcatcaagcatagttgaatatttttctccagctacattcagcaactcagctgtagatgccaaatagatgaataaggttcagagagtastagcctgggttctctgttttgaaggtaatccttcctgaacccactagcacggagtggcaataataacgggcatacccaatatgctggcttgtcattattagccaggtgctttatctgtcaaaacctcatttcatctctaaagccatcttatgatgtaggtactttcattctctttactttaatggagcatgaagcacagagatatgacatcatttgtccaagatcacacagaaaaagtgacagaaggggagggaactgagccccggtatca

SEQ ID NO: 747938 - DNA, 584 bp, Homo sapiens
tcctatttcttatctgtaacactgtcaggggagaaaagccgtccctctgggaattccttcctcttttgccccttgctccattcctccacttctcctcacctgactttttgccaccacctcccacttctcatgcctttgggcggacagatcttctaagcaggagatgtggatcacagtaccattcgccttgaagctgccagaaacaaatgccttgttcttggaggtcttaatgaaccacattgtgaagtgggctttcagcagcaaataagtgccccattttcttgtatctgggcatcacttgggctgctcgtgtctgacacactggcaaggctgctaagtgtatgatttgtgcgctctgaattgtgccgtcaccctggcttgcgctggagcgaaaggagatcctgctgcataccgaastgctttttagggtgagaaaatgaacatgggccatatttatatagtcacgtgattagctcttgatcagctgtggcttagaacatccccaaaattttaataccaaattttttttgttgcgtggctttggaatgtatcccatcccatttgcaaagttaacatcgtatatt

SEQ ID NO: 747939 - DNA, 483 bp, Homo sapiens
cttctccccactgcgtgtctatagtactgtgcctcgaaccttctctgcccacttgtgttgtccttacagctgatcctattttccttgactcctcccatgtgacttactacattgctggggggaatgaatgtgtgaatacagtacctagcatgtggcaaacgctgtctaagtaagggtgtgatggtgtttattattcctrctgagtgcttaagcatgggaagtcaggtatcacattttcgtgttttgtttttttttttcttttggggaaaaagaacttgtttggtgttgagagctgtcaataaagcaaggcctgtgattggcaaaattggttatgggtgtagctataggagatgtatgtactatacagctgtttacttatccctgaatttccacaatgcaaacaatgtttgggaggctgaccaatgggttatataggaatctcaattttcaaatgtgaattggtagttataattttgaatttct

SEQ ID NO: 747940 - DNA, 630 bp, Homo sapiens
ttctcagctttcaacatgccttcctcattaagcttaatcatttttagcttttgatttaaagtgagagacttacagttcttcctttcacttgaacactcagaggccattgtagggttattaatcaacctcaattaatgcgtcttagggaatggggggcccaaggagagggagaaagaagggggaatggctggttagtggagcagccagatcacacacaacatttatcaactaagtttgttgtcttatgtgggcatggtttgtggtgctccaaaacaattaaaatagtaacatcaaagatcactgatcatagatcaccataacaaatatagcagtcatgaaaaatttgaagtattgggagaattaccaaaatgtgacacagagacacgaagtgagctcatactgttggaaaaatgatgccaatggacttattcatggcagggttgccacacaccttcaatttgttaaagaaaaaaagtggtrtctgtgaagtgcaataaaatgaggcatgcctgtatttcttatatatttgtccaaattctaaatgtataatataaatattagtgaagttaattatattttctgtctattactttcattgtgagaattaacattgcctttaatcgtaggaac

SEQ ID NO: 747941 - DNA, 419 bp, Homo sapiens
aagatgctaaagcagcgtaattataaatgcaaaggttcagataaaaaaacccggggagcatatttaggaaataaggagtagttgagtatacagcagcaggaggaaggaaagctgggtccagagtattgaggcccttatatgctaagctaaggagttgaggtgcaacttggtgctcattgtttgtcttagagttctcactaaccttaaagttactgaraatttacaaaggagttgttgagcctagagaagcgatacagtttcttatcgttgatgtaagattgtacatcatttgaaccttagttttgtgacattagcgtctaacatttatttgtaggtatttcctcttagtttttttttttgagatggaatctcgctctgtcgcccaggctggaatacaatggtgcgatctcggctctctg

SEQ ID NO: 747942 - DNA, 419 bp, Homo sapiens
aagatgctaaagcagcgtaattataaatgcaaaggttcagataaaaaaacccggggagcatatttaggaaataaggagtagttgagtatacagcagcaggaggaaggaaagctgggtccagagtattgaggcccttatatgctaagctaaggagttgaggtgcaacttggtgctcattgtttgtcttagagttctcactaaccttaaagttactgagaatttacaaaggagttgttgagcctagagaagcgatacagtttcttatcgttgatgtaarattgtacatcatttgaaccttagttttgtgacattagcgtctaacatttatttgtaggtatttcctcttagtttttttttttgagatggaatctcgctctgtcgcccaggctggaatacaatggtgcgatctcggctctctg

SEQ ID NO: 747943 - DNA, 622 bp, Homo sapiens
tgtactccaagaatagctagctgtgtactgttctttaaacacactgtgcactttacgcctccatgccttggctcaggtagttcccatctgcctgcctagctgtactttgtctgcctgaaaaacttgtattcatctttaaattctagcttagacactcctcctccataaatcttttccgacccactcagggagggwcaattctctctcttcccttcccttccctactcctaccttgtctctttataataaacacgttgaagattcatactggatcttatatatcaccgaatctaatctgttagcatggaatctgacatagaacaagtattcagataagcttgttgaataaatagacatgttgacctatagatcgaaatactgacagtcctcaattgcatttgtttttccgttctggaacataaatgaataattgtatgtatatacaaaagcagaatacagtttgagtgctcaccctcccccagttaaaagtggttggttacgttacccacatccaaaaaatcatctgggataccttctgacatcatgcatccatttgggagcacaaaggtcaaatttggagttgaatttgcacatagggagcagggagaagataaccggcttg

SEQ ID NO: 747944 - DNA, 569 bp, Homo sapiens
ccacgtcagcccgtgtagctatcaaaagctatgctggtttctcttgtccctagcagtgtaccactacttatgccaagccagtcctctgctcgtaccagaattagcctgtgtctccagggaagataacagctaacaatctcagtccacataggaaaatctttaaatttttctagaattgcagctggaatgatggcttgctgctgcctctgatttcctgcctctacgaaagggatgttttcacatctataatccatagcarcttccacctgtactttgaattcatgcagggccaacattcttagaaccctctaggtcatttggaacttaacaaacaaatggatatgcagattactgtttgcaaccttttaaaatccccaggaccatgcacattgaaggttataaaacaagacaaaataatttattgagcatgtactatattttaggcaatgttctaagccctttctttataaccctgtaaggatggtattactataaccttgtcttacagatacagaaattgaagtttcaagaggtaaagtgaactgttcaaataataaatgacagaacta

SEQ ID NO: 747945 - DNA, 606 bp, Homo sapiens
tcaaatggtagaatcatggattatgattctaaatccaataaatttttcataacacaattgagacattcaataaatcaatttgtactccctaaaatatatcctattcaaatttaaattataaaatgcatgttaatcctatgttataacctaattatcatttgagtaagcaaaattcttcccttccaagtatccagtccctttttattttctcaccaattgttatctcaatatatattcttacagcgacaatttccctayattacgctccatttttcatttgttacttgttcagataatgaaatgaatataaaaagagtgccatgttttaatgcttcatagcttacaaagttatttcagagatctcatctcacttgttcctcagaatagcttggtgagaatgaacaaattaaactactttgtagctcgccaacgtctcttattttatgagatacatatgctcttacattgttctatgccttttgtacacctagctctcaaaatgaaatgtcttaacccctctgccatatgaaatgctccttagcaaccttaaagactcagctaaaaagttatgttttatacaaaagccttttactgcctaatttacta

SEQ ID NO: 747946 - DNA, 404 bp, Homo sapiens
aggaatgcggcagccctgggtaggtgtggttagaaggcctggacggggaggctgtgcggaggggatgatgaaagcatgggtgaggggagaagaccctaaacagctgtctttgttagtccccgcccacctggccgggatgccagcaacaaggccayctgcagtctgccctgcccttcctcccctcagtggctttgaaggcaggtgtccttgaagctaagctctgctggctgcaggtaaaaccacaggtgggggagttctctgagacctaggagctggggtgtacggagaagcggggccctggggagcctcggagattcctggtgggaaggcctgggcagaacagaaggcttgtcaagtcagagggccacctcttcctcctcaattctgccagagaaagctcctgt

SEQ ID NO: 747947 - DNA, 567 bp, Homo sapiens
ttttttttttttttttttttttgagacgggatcccgctctgtcacctaggctggaatgctgtggtgtgatctcggcttactgcaacatttgcctcctggattcaagtgattctcctgcacccagctaattttttgcatttttagtagaaatggggtttcaccatgttggtcaggctggcctcaaactagtgacctccagtgatcctcccgcctcagcctcccaaagttctgggattacagacatgagccaccatgcccagcccaggkgcagtattaaatatgcgtgttattcttcggcaaaaagtcaatttaccccccacccctgcaatttaatgggtgataggacaatatcccatgattatttcattttggagattgagccttcttttgatatttggccttctggattccttcttctgggtcttttgatagtgctttgcctgacagggaaacccttttttggaaaggggaaaaggggcttgactgttttctgagcatctactatatagatgctctcgaatcctcacagcaactttcaggtaggtactgttaccccattttacagac

SEQ ID NO: 747948 - DNA, 529 bp, Homo sapiens
tttggcttcacccttgctctgctaaaacctggatgaattaaggtccctctcacactattgctgttataagaattagtgattttagtatataagtagatgattcttccaacaccgtggcctcctagctctttgaccctctctactccaattatcttgtcttccattctaccttggccactcacacctagggtcacactctagaccttgtcaatgctaataacaacaaccctctatagtctcaatttcatgcagcaagttwtctgatcactagctcctatctttctaattcacctcctctaatatactgggtcctgattcctcaatattctcagtaactccaatttattaattctaccaccttgtcattctccctcacatccttgatgttctctttctctcctttcacagcttaaattctaggccaaccattataatccctccattgcatacactctccattctcttgcccctctcttgtcattaggttttcttggcacaactaagtcctcattagatcacatttaaacac

SEQ ID NO: 747949 - DNA, 630 bp, Homo sapiens
gtggtgcacctgcaaccaaggaaagccaagaattcacggccaccaccagaagctaggaagaggcaaggaatcttctctcctacaggtttcagagaaagaatggccctgccaacacatttattttggacttctagcctcaaaaactctaagacaataaatttccagttttagacaagtttgggggtatttggttacagcagccctaggaaactaagacagccgctattctttcacatcttcatttaacttttctgttttaccactgaaaacaatagatagttcttggagaatgatattggaatatcttaacaggtcaggtagtcacctgaattggaactgctttgccaaacacggacactttactggagtgaatcagcaaagcwttttagcaaactgatatgaaactattgagataaaaattgatttttaagtaccaataagccaggattatcagaatcaattttcttttatgtgaaagagtcaacagtattttttcacaatcttattcatgtctatgttaactttctgattctctataatgaattagtcaacagggatgttgatcatggtatatttccacagcacattacctttgcctacaacattgaaacatcagacttattgtacctg

SEQ ID NO: 747950 - DNA, 516 bp, Homo sapiens
tcacccatccataaagggatcccaaagtgctcagaaggtagaaagccagaaacataaatattacagcaatcactacactgtgttaataacctttacatctacttcttatttcttttccccactaaatgcagaagtgccagtctaaggctttggcactatttgccccttgtttactaattttattttttgcaagcatgtgttgcacaaacagctctttttactctgccttctatattacttccctttaatctccagtttcctttttctaaaaattatcccccaaatattttatctgtgctatagaggagcccaaagttgaaatgtgaaacttttccaaattgattctaaaatgtgacttagaagttttctgcatagarattttcagaaaataatcagcagactctcagtctcttccactcaattattctaagaaatgctactgtctagccagatattgatttgtggtggagagaaaccaaaattaatttttgttacttgcaatatttagtttatttg

SEQ ID NO: 747951 - DNA, 617 bp, Homo sapiens
tgtttagagagttatgccaaataaatgcatttgacactcctgactcaccactcttgagaggcaaggagtttagtgactctatctgtaatacctttgtccatatatagagaaccaaggaacataattaagctggctggttgcttctcagttcagtggaaaaagtgatggaagaaaatggtaagctcagggattctaactcttggcttcagaagcagatactaaacctcaaatctgctaagattgtcctgaatgacagtcttatctcctgtagagaaacrgctgaaattgtggaaaaacagacacaagcttttatcgtgcaagtggctgacttgcaatgacaaaggtacatgcacagcctcaccaggtgtctactgttaaagtgagggcatcagttggaaaagaacgggaccctgcaacgtggaatggggatgtatgggaggacactgatgaagctggggacactgagtttgtaaattctggtgaaacttttttgccaggagtaacagcttccccatccccagtagtggcaacatcccctctacaacccgactcatgctgccatcagcctttccacctttgtctgaggagataaaccctgtgctgcctaaggcaacagt

SEQ ID NO: 747952 - DNA, 617 bp, Homo sapiens
tgtttagagagttatgccaaataaatgcatttgacactcctgactcaccactcttgagaggcaaggagtttagtgactctatctgtaatacctttgtccatatatagagaaccaaggaacataattaagctggctggttgcttctcagttcagtggaaaaagtgatggaagaaaatggtaagctcagggattctaactcttggcttcagaagcagatactaaacctcaaatctgctaagattgtcctgaatgacagtcttatctcctgtagagaaacagctgaaattgtggaaaaacagacacaagcttttatcgtgcaagtggctgacttgcaatgacaaaggtacatgcacagcctcrccaggtgtctactgttaaagtgagggcatcagttggaaaagaacgggaccctgcaacgtggaatggggatgtatgggaggacactgatgaagctggggacactgagtttgtaaattctggtgaaacttttttgccaggagtaacagcttccccatccccagtagtggcaacatcccctctacaacccgactcatgctgccatcagcctttccacctttgtctgaggagataaaccctgtgctgcctaaggcaacagt

SEQ ID NO: 747953 - DNA, 591 bp, Homo sapiens
gtaatggtaggctttaatgtggagtcagccaaatacaatttgttcagctttattcctctggtatcctaaaaatttcccgtaagtttagtcaatgactgaaaattgtcccatgccccataagatagaaattttttctactgccaaatgtcacatacatggatagataatgactaaatataaatctaattattttmcctgttatttagtagtaagtaaaattaaacctgttttttgaatgagtttgtagaggaaaataaaaccccacatgtaattccagatggtataattagttacatgactctagttttttattttgctattttatatacaacttctttatctcatttgtaccatcctcttctgttattttttttgatagaaaccagttttttttttcagaactggataagattaatttttaataaaaactatgtaatcttgaataaaatacactgtaatgttattcttttggtttatttctaatccaaatagactattatactgatattaaacattttcattaaaaaacataagcagaaaaataaaatctgaatctttagaactttattaaaatggtgataaatggaacac

SEQ ID NO: 747954 - DNA, 618 bp, Homo sapiens
aggtcaagtcaatcaactgaaaacattttataagtacagtgttcccttcttttccaatgaaaaactaaaaaatgttttaatgtgtttcttcaggcatctcactgaggtaggaaatgcagcacttggaaagagaagcacattttcattttaagcagatgtctgtcttaataagtgaccctggttagaattatcaacaytctgctgaattattacccagaattgttaatagtctacagcgcaggactttatttttttaaaagcaagaacctaaacactccttgctattgctggtgtttagataagacatctgttgataaaatcatatcattgagaagacaaagaaataacgaggagctaattttatgtatcagaagaaccaagtagctagtgatgtatttgagaacaaaagatattccttctcatcaaatataagttgttacaattttcggttctttggctcttacaaatgtgcagtaatttttaaaaactaaagtaggatgagctttttttggtctctttgggagtcttattttttttcattgctggataagtgaggagtataattttaatacgttaaattttaattgttacatcatattggatgtgattttttgtggc

SEQ ID NO: 747955 - DNA, 589 bp, Homo sapiens
ctacttatgaagtttgttttaatatgtgagtgtgcctatgtttatatctctgtgcagttttagctcatgtgcagattcatgtaactgccgtcacagtgacaaagctccttcatgctacccctttatactcacaccttgtttctgccccaatccctggcagccaccaatctgttctgtactataattgttatttcacaaatttacataaatttgataatgcagtatgtgtccttcggagattgacttcttccgagggtcatccacattcttgtgtaacagtagtgtgttcctctttattgccaagagtagcccgtgstgtggatgcatcataatttctttattcataaacccattgaaagacatctggcttgttggggacttttacacatttattttcttcctgtggtacatacttttttccctaaccacaacaatagcagctaagaggacgcacagagaaacagaaactggggtataacatgaaaatgtagacagagagtgacaacagtgtctgtcgtctttcacagatttaaggaaaaagaagtgaaatacagtcgtggggctggggatcagttataaggtctcattg

SEQ ID NO: 747956 - DNA, 653 bp, Homo sapiens
ttcaatctgtagcaatatcacccgtcgattttccagaggcttctagaaaattccatgtactctcctgactcagagaatgaaaaaagcaaaatcatctttatattattataaaaatagtataattataaaaataggattgacattaaagattacccctagatccctggagcatatttgrggaactggctggttggagtatgttattccattgatgacccaacctagattgtccggacttgcctcatttttctcctaactggaagtgacaaggcaggcagctctagcctcatgacaagcgtggtggctcacgcctgtaatcccagcactttgggaggccgaagcaggtggattacctgaggtcgggagttcatgaccagcctgatcaacattgagaaaccccgtctctactaaaaataaaaaaaaaacttagccaggcactgtggcgcatgcctataatcccagctacttgttgggggcagaggtaggagaagcgcttgaacccgggaggcggaggttgtggtgagccgagatcgcgccattgcactccagcctaggcaacaagagcaaaactctgtcaaataaataaataaattaattaatgaaaaagagggcattatggatctaatctactgttgtatttcctgtattttcta

SEQ ID NO: 747957 - DNA, 564 bp, Homo sapiens
aatattgaaagccatggccttgcccgcagcatgattaatattcataaaagacctgagaagatcctaccctatgattttaactctggctgattgttagagaaaaaaggaactgaatgctaaagcagagacaaagagctccaagaaaggtaaatgcaaagggctccacactaacatgttatatcatcaaactgtcaaataccaaagatacagagagaatcttgaaagcagcaagagagaggcactctgtcaggtaaaggggatcctccaaaagatcaacagccaatttctcagcagaaaccaaggaggtcagaagacagtgggatgacaaatttraagtgctgaaagaaaaaacaaaacaaaaacaaaggaaaaaaaataaacaaccacactgtcaaccaggaattcgatacctggcaaaactaagccttcaaaagggaaaaaaaaaataggacattgccagataaacaaaagctgaagaaatacgtaactagcaaacctgccctacaaaaaatgctaaaaagactcctttgggctgggtgcagtggctcacacctataatcccag

SEQ ID NO: 747958 - DNA, 612 bp, Homo sapiens
gatgtgagttacagtggtgggacgtgtggtttcgaagggtggaatgggtgcagagttagcaaccaagggaacagatgtgagttattgattagaactgataggaaggttgtttacactaattaggggcaaggaggcatggagaacaagaaagttgagtttgagaacaaagaataaggaagttaacaagctaaacctttgaagaggaatttattatatcttatatgtagaagggtttttctgatgttatcttctagaatttttatagtttcaggtcttagatttaaatccttgatccattttttttttattgagactttttttttaatgagccattctcttgcctcagcctyctaagtagctgagactacaggcccctgcaaccacgcccagctaattttttgaattttaatagagacagggtttcacggcgttagccaggacgatctcgatctcctgacctcatgatccgcccgcctgggcctcccaaagtgctgggattacaggcgtgagccaccatgcccagcctccttgatccatcttgagttgatttttgtctaaggtgagagatgaggatccagtttcattctcctacatgtggcttgccagttatcc

SEQ ID NO: 747959 - DNA, 737 bp, Homo sapiens
cattggaaaatctagagaaaatggatccattcctaggcacatacaacctacaaagattgaaccattaagaaatcaaaaacctgaacagaccagtaaaaagtaatgacataaaagccgtaataaaacattgcccagcaaagaaaagcctgygccctaattgcttcactgctgaattctactgaacatttaaagaagtaataccaatcctactgaaatcattttgaaaaatagatgaggaggtaatacttccaaactcattccatgaggttacccaataccaaaaccaaacagacacataaaaataaataaaattacagaccaatatgagtattgatgtaaaaatcagcaaaatggtagaaaactgaatttaacagtgcatgaagaagattattaatcatgactaagtaggatttcacctggcttcaacatgtgctagctatcaatgtgatacattatatcaacaaaatgaaggacaaaaatatggtcatttcatttgatgctgaaaatgcatttgataacattcaacttccctacatgataaaaaccctcaagaaactgggtatagaaggaatgtatctcaacgtaataaaagccgtatatgacagaccacagttagtatcatcctgaatggggaaaatctacaaaagaactacaaacctttggtttaagatctggaacacaacaaggctgcccgttttcaccacagttactgaacatagtactataagtcctagcta

SEQ ID NO: 747960 - DNA, 665 bp, Homo sapiens
cattggaaaatctagagaaaatggatccattcctaggcacatacaacctacaaagattgaaccattaagaaatcaaaaacctgaacagaccagtaaaaagtaatgacataaaagccgtaataaaacattgcccagcaaagaaaagcctgtgccctarttgcttcactgctgaattctactgaacatttaaagaagtaataccaatcctactgaaatcattttgaaaaatagatgaggaggtaatacttccaaactcattccatgaggttacccaataccaaaaccaaacagacacataaaaataaataaaattacagaccaatatgagtattgatgtaaaaatcagcaaaatggtagaaaactgaatttaacagtgcatgaagaagattattaatcatgactaagtaggatttcacctggcttcaacatgtgctagctatcaatgtgatacattatatcaacaaaatgaaggacaaaaatatggtcatttcatttgatgctgaaaatgcatttgataacattcaacttccctacatgataaaaaccctcaagaaactgggtatagaaggaatgtatctcaacgtaataaaagccgtatatgacagaccacagttagtatcatcctgaatggggaaaatctacaaaagaactacaaacctttggtt

SEQ ID NO: 747961 - DNA, 665 bp, Homo sapiens
cattggaaaatctagagaaaatggatccattcctaggcacatacaacctacaaagattgaaccattaagaaatcaaaaacctgaacagaccagtaaaaagtaatgacataaaagccgtaataaaacattgcccagcaaagaaaagcctgtgccctaattgcttcactgctgaattctactgaacatttaaagaagtaataccaatcctactgaaatcattttgaaaaatagatgaggaggtaatacttccaaactcattccatgaggttacccaataccaaaaccaaacagacacataaaaataaataaaattacagaccaatatgagtattgatgtaaaaatcagcaaaatggtagaaaactgaatttaacartgcatgaagaagattattaatcatgactaagtaggatttcacctggcttcaacatgtgctagctatcaatgtgatacattatatcaacaaaatgaaggacaaaaatatggtcatttcatttgatgctgaaaatgcatttgataacattcaacttccctacatgataaaaaccctcaagaaactgggtatagaaggaatgtatctcaacgtaataaaagccgtatatgacagaccacagttagtatcatcctgaatggggaaaatctacaaaagaactacaaacctttggtt

SEQ ID NO: 747962 - DNA, 601 bp, Homo sapiens
tagtcaccgtggtatgtgaggatcctttccccaaggtcgccggtcagtttctttccgcgttgctgagagtgtgggtttattcatcataccgggtgggtctcaattccttacccgaggctgctgcaacaaggcagtggggcacttctcctgatgagagctgtctagacccgccccagatggagaatgggaatcttgggcaagcccccaaattgtttttctgagacggagtctggctctttcacccaggttggagtgcagtggcactatctcggcttactgcaagctccgcctcctgggttcaggccattctcctgcctcagmctcccgagtagctgggactacagacgcccgccaccgtgcccggataattttttgtatttttagtagagacgggatttcaccatgttagccaggatggatggtctcgatctcctgacctcgtgatccatctgcctcgtcctcccaaagtgctgggattacgggtgtgagccaccgcgcctggccgcaaattgttataaattttcggtaccacaaaagaaatagcactcgaacataaatttaattttctcagcaaggcaattttccttctatagaagggtgc

SEQ ID NO: 747963 - DNA, 601 bp, Homo sapiens
tagtcaccgtggtatgtgaggatcctttccccaaggtcgccggtcagtttctttccgcgttgctgagagtgtgggtttattcatcataccgggtgggtctcaattccttacccgaggctgctgcaacaaggcagtggggcacttctcctgatgagagctgtctagacccgccccagatggagaatgggaatcttgggcaagcccccaaattgtttttctgagacggagtctggctctttcacccaggttggagtgcagtggcactatctcggcttactgcaagctccgcctcctgggttcaggccattctcctgcctcagactcccgagtagctgggactacagacgcccgccaccgtgcccggataattttttgtatttttagtagagacgggatttcaccatgttagccasgatggatggtctcgatctcctgacctcgtgatccatctgcctcgtcctcccaaagtgctgggattacgggtgtgagccaccgcgcctggccgcaaattgttataaattttcggtaccacaaaagaaatagcactcgaacataaatttaattttctcagcaaggcaattttccttctatagaagggtgc

SEQ ID NO: 747964 - DNA, 640 bp, Homo sapiens
cacacactgacacatttagaaggaagagtgtcaatacagtttgtcagtctgcttttgaaattcctgcttagctagatccagatacataacccttatgatcacagaagcctgcaaaattttgcattattgcctttctcttagattgttcaggtgaggttaattctgtcactcccatatcatctgtaaaacaaaatctctcagctttgctcatttgcccatttctgcaagtccagagaaatgcattcatttatccattcaaaattggtgcaactgaccctcgtgaaggtggagaacaccaagcagtgatggcatgcaaagtgtcaagaaatcacggcagcacgtgggttgacttggcccaaggtcaccagaaaccaagagctgcctatagtgacagaggcctcaggcagatcaaacgatgatggatggacyacaatgctggccacagagtcaaagaattctagggtcctctagggcttctgaggggtgggtgaactctttctagctctaaaattccacggttgttggctcagagtcgcctcagtcttgacagccacaaaaaaaaaaagcaaagtattcactgaagtggcattgaattgacccagccagagatgaaatgttctttctttccttgtttgtcccc

SEQ ID NO: 747965 - DNA, 528 bp, Homo sapiens
gacctcctacaattatgggagctgattaacagtttctgtgaggctcttctcttccagtctgatgctggagaggcaatcaagagggaaaggcaggtggaaagtgagggacagcaagaacaagctggaacccacaagcacatccgcagctcacaaagccagctaaaacctgtgtcagttcctgctgcctctgaccgtaatggtatgggtgtcctggagaagccaggttcctttgtcgtgtagctaaacacacatacatgcctaggagtcagaaaaactaaagaaggatccagggaaaggtgctgcaattgcagatccagctgctgcctctcaccacgaggtgagctggcaggtaaatracaacgcacgtgaactacaaaatggctgctgcttcattttcagcctccaaatcccccaagactctctcttgtggtgcacatgaacagaaacataggaaagggaagtctaggcactgtatttcagcctagccgatttgacatatatcgaagccacggcagtctacctcttgtc

SEQ ID NO: 747966 - DNA, 659 bp, Homo sapiens
gctcatgcctgtaatcctgccacttcaggaagctgaagccgaatcacttgagctcaggtgttcaagaccagcctgggcaacatggtgaaaccctgttcctacaaaaaatacaaacattagccaagcctgatggtgtgtgcctgtaatcccagcyactcaagaggctaaggtgggaggatcccctgagcccaggaggttgaggctgcagtgagctgtgattatgccactgcactccagcttggatgacagaactagaccctgtctcgaaacaaaaaacaaaaaaaaaacactgagatttctgcatatacccttgggctctaccatccaacttcaaggaatttaactttaggaaataactatatttttgtgtacaaagatttggttatagcagtgctttaaaaaaaaaatctcagtaagaaaagagaatttaaatgaccacaaataggagcctgattaaataactctggtactgttatagaactgcaatatgtggccattaaatatgatcctaaagaatatttatcactgtagaaaagcagtcacgatgtgttagataaagaatgtgttagataaagaagcagattatgaaacagtgtagacaataggattcctcacctgtattgttctattctcaaattgctacaaagaaatacttgaga

SEQ ID NO: 747967 - DNA, 659 bp, Homo sapiens
gctcatgcctgtaatcctgccacttcaggaagctgaagccgaatcacttgagctcaggtgttcaagaccagcctgggcaacatggtgaaaccctgttcctacaaaaaatacaaacattagccaagcctgatggtgtgtgcctgtaatcccagccactcaagaggctaaggtgggaggatcccctgagcccaggaggttgaggctgcagtgagctgtgattatgccactgcactccagcttggatgacagaactagaccctgtctcgaaacaaaaaacaaaaaaaaaacactgagatttctgcatatacccttgggctctaccatccaacttcaaggaatttaactttaggaaataactatatttttgtgtacaaagatttggttatagcagtgctttaaaaaaaaaatctcagtaagaaaasagaatttaaatgaccacaaataggagcctgattaaataactctggtactgttatagaactgcaatatgtggccattaaatatgatcctaaagaatatttatcactgtagaaaagcagtcacgatgtgttagataaagaatgtgttagataaagaagcagattatgaaacagtgtagacaataggattcctcacctgtattgttctattctcaaattgctacaaagaaatacttgaga

SEQ ID NO: 747968 - DNA, 491 bp, Homo sapiens
tccacccccaagatccaaccacctgccccaggccccacctccaacattggggattacaattgaacatgagacttgatggggacatagacccaaaccatatcaccatctcacttgttttgtttttgtttttgtttttaaagaaaaactccaccratgtagaaataagtttgcaaggatgtatgcaaaatggtatagtggttatctttaggtgagggagattataggagattttaattttatactattttctatatgttctacatttaaaaataatcataactttagaaaacataatatgtaaaaatacacaaaatataatacatataatttaaaatgctgcttaatctaaccagttttccctctcaaaaaatttaaagaaatgaaaaaaaatcctcatcactgaaaaaccaatacaagggccaacttacacagctctatgaaaatgctatatgattaagagtagggaagggaagctcattgggaaaatctat

SEQ ID NO: 747969 - DNA, 575 bp, Homo sapiens
caatagggaaaggataccctatttaatgaatggtgttgggaaaactggctagccataggcagaaaactgaaactggaccccttccttacaccttatacaaaaattaactcaagatggactaaagacttaattgtaggacttaaaaccataaaaaccctagaagaaaacctaggcaataccattcaggatataggcatgggcaaatacttcatgactaaaacaccaaaagcaatggcaacaaaagccgaaattgacaaatgggatctaattaatctaaagagcttctgtgcagcaaaaaaaaatctatcatcagagtgaatgggaaacctacagagtgggagaaaatttttgcaatctacccatctgataaagggctaatatccagaatctacaaggaacttaaacaaatttwcaagaaaaaaacagccccatcaaaaagtgggccaaggatatgaacagacacttcttaaaagaagacatttatgtggccaacaaacatacaaaaaaaaaaaaagcttatcatcactggtcattagagaaatgcaaatcaagaccacaatgagatacataccatc

SEQ ID NO: 747970 - DNA, 575 bp, Homo sapiens
caatagggaaaggataccctatttaatgaatggtgttgggaaaactggctagccataggcagaaaactgaaactggaccccttccttacaccttatacaaaaattaactcaagatggactaaagacttaattgtaggacttaaaaccataaaaaccctagaagaaaacctaggcaataccattcaggatataggcatgggcaaatacttcatgactaaaacaccaaaagcaatggcaacaaaagccgaaattgacaaatgggatctaattaatctaaagagcttctgtgcagcaaaaaaaaatctatcatcagagtgaatgggaaacctacagagtgggagaaaatttttgcaatctacccatctgataaagggctaatatccagaatctacaaggaacttaaacaaatttacaagaaaaaaacarccccatcaaaaagtgggccaaggatatgaacagacacttcttaaaagaagacatttatgtggccaacaaacatacaaaaaaaaaaaaagcttatcatcactggtcattagagaaatgcaaatcaagaccacaatgagatacataccatc

SEQ ID NO: 747971 - DNA, 435 bp, Homo sapiens
tattagtcagaagctatctttggagaacagtaaggcgatagtgattaagtggggctggaagcggggtacctgggtgctgacaagattctttcttctgaaatgagtgttgatttcatagtatgaatactttgttatagctcattgggccaaatgttttctgtatgtctgccattctttaatgaaaaagggaaaaggaaagaatgtaataatacagtgttttacttaaagttgatgtcttaggttcattaccactcaacttgtgcagaaaccaaaattwgaaaataacattttttgagaaaccaggttaattttcaagcaatctgaaagttgttatgctctccaaaataatataagtagaccaaaagaaaaataaagtcaatccattaggcatttacaaatattttaaattatattacaccacatttaatgtataaa

SEQ ID NO: 747972 - DNA, 652 bp, Homo sapiens
gataaccaatctactttgggaaatgaccaatggttcttgatttcagggtagattatagaaaagagaaaagattatagtattttatatctgcaaaacttattccaaaacaaatcagtaaatccaggttaaaatacccaggtcagacagtcacatttttactaataaaaawtaactagcagcccgggcgaggtggctcatgcctgtaatcccagcactttcggaggccgcggccggcggatcacgaggtcaggagatcgagaccatcctggctaacacagtgaaaccctgtctctactaaaaatacaaaaaaaaattagccgggcgtgttggcgggcgcctgtagtcccagctactcaggaggctgaggcaggagaatggcatgaacccggagggcggagcttgcagtgagccgagattgcgccactgcacgccagcctgggcgacagagcgagaccctgtctcaaagaaataaaataaataaataaataaataaataaataaattgcagcccattgagtgaactttaaatgatcatgctactttgtgaaatagaatatcacattactagatctgttgtgtgctggacaaatgccagcacaatgcagtactttgctgatatagtgtggaatagattttgtgctgcagcaaagct

SEQ ID NO: 747973 - DNA, 652 bp, Homo sapiens
gataaccaatctactttgggaaatgaccaatggttcttgatttcagggtagattatagaaaagagaaaagattatagtattttatatctgcaaaacttattccaaaacaaatcagtaaatccaggttaaaatacccaggtcagacagtcacatttttactaataaaaattaactagcagcccgggygaggtggctcatgcctgtaatcccagcactttcggaggccgcggccggcggatcacgaggtcaggagatcgagaccatcctggctaacacagtgaaaccctgtctctactaaaaatacaaaaaaaaattagccgggcgtgttggcgggcgcctgtagtcccagctactcaggaggctgaggcaggagaatggcatgaacccggagggcggagcttgcagtgagccgagattgcgccactgcacgccagcctgggcgacagagcgagaccctgtctcaaagaaataaaataaataaataaataaataaataaataaattgcagcccattgagtgaactttaaatgatcatgctactttgtgaaatagaatatcacattactagatctgttgtgtgctggacaaatgccagcacaatgcagtactttgctgatatagtgtggaatagattttgtgctgcagcaaagct

SEQ ID NO: 747974 - DNA, 652 bp, Homo sapiens
gataaccaatctactttgggaaatgaccaatggttcttgatttcagggtagattatagaaaagagaaaagattatagtattttatatctgcaaaacttattccaaaacaaatcagtaaatccaggttaaaatacccaggtcagacagtcacatttttactaataaaaattaactagcagcccgggcgaggtggctcatgcctgtaatcccagcactttcggaggccgcggccggcggatcacgaggtcaggagatcgagaccatcctggctaacacagtgaaaccctgtctctactaaaaatacaaaraaaaattagccgggcgtgttggcgggcgcctgtagtcccagctactcaggaggctgaggcaggagaatggcatgaacccggagggcggagcttgcagtgagccgagattgcgccactgcacgccagcctgggcgacagagcgagaccctgtctcaaagaaataaaataaataaataaataaataaataaataaattgcagcccattgagtgaactttaaatgatcatgctactttgtgaaatagaatatcacattactagatctgttgtgtgctggacaaatgccagcacaatgcagtactttgctgatatagtgtggaatagattttgtgctgcagcaaagct

SEQ ID NO: 747975 - DNA, 652 bp, Homo sapiens
gataaccaatctactttgggaaatgaccaatggttcttgatttcagggtagattatagaaaagagaaaagattatagtattttatatctgcaaaacttattccaaaacaaatcagtaaatccaggttaaaatacccaggtcagacagtcacatttttactaataaaaattaactagcagcccgggcgaggtggctcatgcctgtaatcccagcactttcggaggccgcggccggcggatcacgaggtcaggagatcgagaccatcctggctaacacagtgaaaccctgtctctactaaaaatacaaaaaaaaattagccgggcgtgttggcgggcrcctgtagtcccagctactcaggaggctgaggcaggagaatggcatgaacccggagggcggagcttgcagtgagccgagattgcgccactgcacgccagcctgggcgacagagcgagaccctgtctcaaagaaataaaataaataaataaataaataaataaataaattgcagcccattgagtgaactttaaatgatcatgctactttgtgaaatagaatatcacattactagatctgttgtgtgctggacaaatgccagcacaatgcagtactttgctgatatagtgtggaatagattttgtgctgcagcaaagct

SEQ ID NO: 747976 - DNA, 582 bp, Homo sapiens
cagtttttccaacacttatttattgaaagagatgatcttttccccattgtgtattcttggcacccttgtcaaagattagatgaccatatatgtttgggtttatttctagtctttctattctgtcccagtgaccctagtggccgtttttaggccagttccatactgttttaattactagagctttgtaatgtagtttgaaaccaggaagtagtttgaaaccaggaagtggttcctccagctttgtccttctttctcaagattgctttggttacttggggtcttttgcrattccatacaaatattaggattgtttttctgatatctgtgaaaaatgccattaaaattttgataggcatcgcattgaatctgtatgttgctttcagtagtatggacattttaacaatattaactattccactctttgaacagaggatacctttccatttatttctgtcttcaatttttttttttttttttttggtctcactctgtcacacaggctgcagtgcagtggcacaatcatgacttactgcagcctcaaactcctggaatcacgcaatccttctgccccagccttcaatt

SEQ ID NO: 747977 - DNA, 619 bp, Homo sapiens
atttagcaaacactaataactgttacaggtaagaatcatcaatagtatctaaaattaatgggcaaaagtatgatgagaaacaggatgtttgcagagtcttaaagcatctccccacaaagtacttattaattctaatgggaagaacagtaactttgcagtggagaaacctggtagacaccacattatctaagtgaccaaaacttagatcaacagcaatgagacatactgacatcatgtaccctctcatataatacactgggggccgggtgcggtggctcacatctgtaatcccagctttttgggagacagaggtgggagacagatcatctgaggtcaggagttcaagaccagcctggccaacatggcaaaaccctgtctgtactaaaaatacaaaaattagccaggcgtggtggtgtgtgcctgtggtcccagctacacgggaggctgaggcmggagaatcacttgaacccgagagacggaggttgcagtgagctgagattgtgccactgcactccaggcagggcaacagatggagaccccttctccaaaacaaaaacaaaaacaacaacaacaaaaaacattgggaagggcacaacatcacttcagtggtattgttgtc

SEQ ID NO: 747978 - DNA, 626 bp, Homo sapiens
aaaatgtcctcaaaaaggcatttatgccattttatatcactgacagtataatataaactagtttaataaaacagcctctgtttaataaaacagcctctgttgtgttgaataaatagtgagagaagatgagaatctattttgtggaagttcaaggtcagatcccaccctccctctgggaacaaatctaagagcagaaacactaaagaattattggaatgatgaaagaaaaaakggagataagttacccaaaataaactttcctgcatcttacatttgctgaattaggtctgccaacaaggtcctgatggaataataaataaaagtagtgatcattacttagaaaaaagtaaagctaaggagggcaaggcatggaatattgacaaaatgaggaagttattctgcaatgaaacctctgtttcataactgccagggaacttgaaatgggaactataagaggtataagataactcatctttgtagaaacatttgtagaaacatttggcttgaaactactgtgggtttgactttgaatttttgcctagatgatcttgtagttctgtttcttttgtttgcaaaataggaataatgatggttatgatgatgatgactgaaaaaacttttgtaag

SEQ ID NO: 747979 - DNA, 626 bp, Homo sapiens
aaaatgtcctcaaaaaggcatttatgccattttatatcactgacagtataatataaactagtttaataaaacagcctctgtttaataaaacagcctctgttgtgttgaataaatagtgagagaagatgagaatctattttgtggaagttcaaggtcagatcccaccctccctctgggaacaaatctaagagcagaaacactaaagaattattggaatgatgaaagaaaaaagggagataagttacccaaaataaactttcctgcatcttacatttgctgaattaggtctgccaacaaggtcctgatggaataataaataaaagtagtgatcattacttagaaaaaagtaaagctaargagggcaaggcatggaatattgacaaaatgaggaagttattctgcaatgaaacctctgtttcataactgccagggaacttgaaatgggaactataagaggtataagataactcatctttgtagaaacatttgtagaaacatttggcttgaaactactgtgggtttgactttgaatttttgcctagatgatcttgtagttctgtttcttttgtttgcaaaataggaataatgatggttatgatgatgatgactgaaaaaacttttgtaag

SEQ ID NO: 747980 - DNA, 626 bp, Homo sapiens
aaaatgtcctcaaaaaggcatttatgccattttatatcactgacagtataatataaactagtttaataaaacagcctctgtttaataaaacagcctctgttgtgttgaataaatagtgagagaagatgagaatctattttgtggaagttcaaggtcagatcccaccctccctctgggaacaaatctaagagcagaaacactaaagaattattggaatgatgaaagaaaaaagggagataagttacccaaaataaactttcctgcatcttacatttgctgaattaggtctgccaacaaggtcctgatggaataataaataaaagtagtgatcattacttagaaaaaagtaaagctaaggagggcaaggcatggaatattgacaaaatgaggaagttattctgcaatgaaacctctgtttcataactgccagggaacttgaaatgggaactataagaggtataagataactcawctttgtagaaacatttgtagaaacatttggcttgaaactactgtgggtttgactttgaatttttgcctagatgatcttgtagttctgtttcttttgtttgcaaaataggaataatgatggttatgatgatgatgactgaaaaaacttttgtaag

SEQ ID NO: 747981 - DNA, 617 bp, Homo sapiens
ggtttgactttgaatttttgcctagatgatcttgtagttctgtttcttttgtttgcaaaataggaataatgatggttatgatgatgatgactgaaaaaacttttgtaaggattaagtaacctaattgagttccttgcacataataggaccctaaagtaatgtatggtgccttctctgagttctagrcattataacatattctatgcactgggcattttagtatatgttatctgatagtgttctcaacatcacttttaataggtattaagaaaaccaggatacagtcaaacaaatgtcctcagagagttaggtaaatcctcagattccatatttagtaaatggcagacctagatcttgaagactggatggcctggcaacaaagctgtaataattcccttataccatgctccttcacaaacatgtgacaatttgagcacatattttttcccttttcattttgtctagtactagccttgactccagcttttgagctttcacttacctttgagagtatgtagatggcatttgtgaatgcacctatgtatttcttaactctccagaccaccattgtaccaaatcgtaaatggaccttgagaaggaggccagttaaaaatttt

SEQ ID NO: 747982 - DNA, 617 bp, Homo sapiens
ggtttgactttgaatttttgcctagatgatcttgtagttctgtttcttttgtttgcaaaataggaataatgatggttatgatgatgatgactgaaaaaacttttgtaaggattaagtaacctaattgagttccttgcacataataggaccctaaagtaatgtatggtgccttctctgagttctaggcattataacatattctatgcactgggcattttagtatatgttatctgatagtgttctcaacatcacttttaataggtattaagaaaaccaggatacagtcaaacaaatgtcctcagagagttaggtaaatcctcagattccatatttagtaaatggcagacctagatcttraagactggatggcctggcaacaaagctgtaataattcccttataccatgctccttcacaaacatgtgacaatttgagcacatattttttcccttttcattttgtctagtactagccttgactccagcttttgagctttcacttacctttgagagtatgtagatggcatttgtgaatgcacctatgtatttcttaactctccagaccaccattgtaccaaatcgtaaatggaccttgagaaggaggccagttaaaaatttt

SEQ ID NO: 747983 - DNA, 614 bp, Homo sapiens
atacagctagcatattagaaatatagttcataacatttatatacttggggctataaatattagtactttacagagtgagttttacataataataagacaaacaactgataattttccggtaattagtattttagttataataaaaggaaattagtagattgaaatacatcagaattaaacagaaagtaatgggagtaaaagcaataatgtacagccatattagtacatacacaacctgagatatgccagaccaaacgtttcaataatattatagtgaggatgkatttcatgttcacagaaaaattaaaaattttagtgacttattttccttttttttttaataaaaatttatctgtattttttgtaaacattcgtttcttcttccagggacagtatgtgcttattccatggtatacgctattttcttcccaatttatttcttttgttaagtcctgagtgaaaacctttgcagggtctggttagagaaaagaacctgattgagcagtctgactaatatttgttatccccattcttttatccagattgtgaagagggcttaggaacaccccttggtgggtggcacttgaatgggttcgattcccacctaggtgctg

SEQ ID NO: 747984 - DNA, 640 bp, Homo sapiens
atgaaaatatgaatacaacatttgaaatctgtgggcacaattaatgccatgctgagaaggaaatttatagcataagtgtttatattagaataggaaaaaagtcaaaaataaataatctgagctccaatcttaagaatcagaaaaaggacaaaataaacctaaaacaagcaggaaaaaagaaataataaagagcagatgtcaataaagtgcaaaacagaaaaccagagaaaaatcaataaaacaaaaagctggttctttgaaaattttgatgaaattgaaaacctcttgtgagactgacaaagaaaaaaatgatgcaaattacaaatatcagtagtgaaacagagattttactaccatccccaaagacttaaaaataaaatctaaaaaatcattataactcttcatacacaaatgtggyaataatttagagacaatgaattccttaaaaagcataaactaccaaaactcacccaatataaaatagataatttgaatagacctataattgttaaatttgtagtttaaaaattctcaaaaaaaatactctatgctcagatgctaccaaacatttaaagaaaatttaacatcaattatacataatctcttccaaaaaacagaagaggaaggaacactttccatc

SEQ ID NO: 747985 - DNA, 682 bp, Homo sapiens
gtgtgtgtgagtttatgtgttatttgccctttggattttatcttagcattgagaagttaaagagggatcctagctgacagactttaacatctattttcattgcagaaacactttaatctagaatgttagtttattgattatttctgtctctactagaaaacagatgaaatactgggaaacttatgacatcatttcctgtatgtctttctatgagaagtgagcaaacacaaacctacttaggcagatatttcttaaatttcattttctttcctttgtttaaatactttttaccattctttagaaccttacatcttttacaggcatttgtccttgagttatgccactgattattactgatcaagagaaatgactatactcttcagatttataaatcaagaacaggatactgcgatactgtcytattttctgacaacttatattttgaatagttgctgactttatctcctaccccattctaaactcttcactatatccattgggatccctagtaaaccattagcagaagccatatattctcatttgtttctctaacagttcactttattttcttcatttgaactcgaggttctggaacttttttgttcaatggactactttgccagtctggtgcatgctataatttcagaataatgtttttaagtgcatgaaataaaaatatttg

SEQ ID NO: 747986 - DNA, 651 bp, Homo sapiens
caaaagctaggagagagttatagaatggattctccttcagaaccttcagaaggaactagccctaccaacactttggttttggatttctggtctgtagaaatgggaaagaataaattaatttctttctttctctctctctctctctctctcacactctcaytttctctcactccgtcacccaagctggagtgcagtggtgtgatcttggctcactgcaacttccacctcctgggttcaagtgattctcctgcctcagcctctcaaatagctgggaatataggcaagtgccaatctttctttctccctccctccctctttccttctttctttccttctttccttccttccttccttccttccttccttccttccttccttccttccttccttccttccttccttccttccttcgtctcactctgtcacccaagctggagtgcagtggtgagatcttggctcacagcaacttccacctcctgggttcaagtgattctcctgcctcagcctctcaaatagctgggaatataggcaagtgccatcacacctggtttatttttatatttttagtagagacagggttttaccatgttggccaggctggcatcgaacttctgacttcaagtgatctgcctgccttggcctcccaacatg

SEQ ID NO: 747987 - DNA, 595 bp, Homo sapiens
gtctcactctgtcacccaagctggagtgcagtggtgagatcttggctcacagcaacttccacctcctgggttcaagtgattctcctgcctcagcctctcaaatagctgggaatataggcaagtgccatcacacctggtttatttttatatttttagtagagacagggttttaccatgttggccaggctggcatcgaacttctgacytcaagtgatctgcctgccttggcctcccaacatgctgggattacaggcatgatccactgctcccggccaggaagaataaatttctattgtgttaagtttcctagtttgtaataatttgttacaacagccctaggaaactaatacgctacactctaccaatcattctgtaagaggcagcacgctggagtgagaaagacattggacttcgaaaacagcttctgagcttaatgcttctaccagtagctgtgtgaccttgagtgtactgcaactccaccctgagtctctgttgcttcatctacaaaagggaaggatgtggacttccttttcaagttctctctagctctgtccttgctctcccaccataaagaaacccagaaaattgaacaaaa

SEQ ID NO: 747988 - DNA, 575 bp, Homo sapiens
gctcccaattctctattctctctcttagcagtaactttatgcacctgccatttttttttgtacccattgcttccttgtattctccatccatcaatcaataagccttgggcttccaggactctgcttctttggatctaagcctggcctgctctctctgttatttgtggtgcatccaacctctaattttaactttgcttggccctatcatgtaaaaatgactatttagaacaaatcattttagcctactcaaactatagsattagcacatattgaaaataggtctgtattaggacaatataaaatcattctggcttgagtatatcagaatcaataaagtagtaaactcaggataaatgcaagctttaagaattttgcatctctctgtatatgtatgtctatgtatatgtatacatattatgctcggtttgctaggttctaatgtttacagacatacttcagatacaatgtaggattctcttttgccattcagtattttattttgtattggaataacctatattgttcacttgagggactttgaaactaaagtacctaggttaacatccactattagt

SEQ ID NO: 747989 - DNA, 560 bp, Homo sapiens
gcattctcctacaagtatttattgagtgctctgtaggaaaaaggcactctgcacagaggatttcaaccaagggtgatttttgcctctgaggggacattaggcaatatttggagccttctttttgtcatcgctgtcacaagtgagggtgggatgagggtgttataccggcatctaatgggatgctgctcaacatcctaaaatgcatagcacaggaagccccacgacgragaattatctggtccaaatgtcagtagtcgcaaggatcctgcctctgccctcagtgagcttcagtctagtcggggttacagaaaggagactgacaagtgcagcatagcgtgctatgatggtgggagtgcaggctacacaagtacagaagcagcagccttaactcagatgtcagctgccagcagaggctttaagaaacagactggttaattcacagaacaggctttcacctgccacacaagtgctcagcaggagacgattttccatctagcctctttgaacataagggggttggatggttgcttgagagagggtagactccttaagtttgtcaa

SEQ ID NO: 747990 - DNA, 626 bp, Homo sapiens
tagctgtttttcctaatgctctccctcccctcaccccaccacccaacaagccctgtgtgtgtcgttcccctccctgtgtgtccatgtgttctcatttttcagctcccacttataagtgagaacatgtggtgtttggttttctgttcctgcgttagtttgctgaggataatggctgccagcttcatccatgtccttgcaaaggacatgatcttgtttctttttataactcagaaataagacsacccatctacaaccatctgatctttgacaaacctaacaaaaacaagcaatggggaaaggattccctatttaataaatggtcctgggagaactgactactcatatgcagaaaattgaaactggaccccttccttacaccttataaaaaaactaactcaagatagattaaagacttaaatgtaaaacacaaaactataaaaaccctagaagaaaatcaaggcaataccattcaaaacataagcacaggcaaaatcaccaaaagcaattgcagcaaaagcaaaaattgacaaatgggatctaattaaaccacattttccttatccattcatttgtcaatggacatttgggctgcctctccctcttggctattgtgaataataataggt

SEQ ID NO: 747991 - DNA, 631 bp, Homo sapiens
tatctctttaagattccgctttaattcttttggatatgtaccctgaactgggacataatcgtatggtgattatattttcaattttttgagaaatcactatattgttttccataatggttgcaccattttacattctctacaacagtgaacaagggttacaatttctctacatcctttccaatgcctgttattttctgttgtgatagtgtccatcctaatgagtatgaggtgatatttcattgtgctttttatttgcatttctcttatgattagtgatatggagcattttttcatatgcttgtgggtcatttgyatgtctttggagaattgtctatttaagcccttcacccattttttaataaggttattttgttgtaggagtttataatatattctggatattaaccctttatcatatatataatttaaaaatattgtctcccattctgtaggtcatctttttttgctgttgattatctcctttgatgcacagaccttaagtttgaaatcatctcatttgtcttctgttgttgttgtcgttgcctgtgtttttggtgtcatatctaagaaaccattgccaaataccctgaagctttttccttatgttttcttctaggagttttataggttt

SEQ ID NO: 747992 - DNA, 481 bp, Homo sapiens
tgtccagaatgtgctgcccttctccttcttagcctctgtattagtccgttttcatgctgcttttcttcccgagactgggaagaaaaagaggtttaattggacttaacagtttcacatggctggagaggcctcagaatcatggtgggaggcaaaaggcactttttacatggtggcagcaggagaaaatgagagaaacaaaagcagaaaccctgataaacccatcagatcccatgagasttaatcatatcaggagagcagcacgggaaagaccagcccccatgattcagttacctccccggagtccatcccacaagacgtgggaattctgggagatacaattcaagttgagatttgggtggggccacagccaaaccatgtcaggccccatcaggttcctgggcttgctaggtgggtggccttgatacaccaaagctgagctctcaagcatcaagccacacacagcctcagccaggagaacaag

SEQ ID NO: 747993 - DNA, 625 bp, Homo sapiens
actcccattggaaataagataactgtggaaaccctttcagataaatacaagctaagtagcgaaggtaccttggaaatatctaacatacaaattgaagactcaggaagatacacatgtgttgcccagaatgtccaaggggcagacactcgggtggcaacaattaargttaatgggacccttctggatggtacccaggtgctaaaaatatacgtcaagcagacagaatcccattccatcttagtgtcctggaaagttaattccaatgtcatgacgtcaaacttaaaatggtcgtctgccaccatgaagattgataaccctcacataacatatactgccagggtcccagtcgatgtccatgaatacaacctaacgcatctgcagccttccacagattatgaagtgtgtctcacagtgtccaatattcatcagcagactcaaaagtcatgcgtaaatgtcacaaccaaaaatgccgccttcgcagtggacatctctgatcaagaaaccagtacagcccttgctgcagtaatggggtctatgtttgccgtcattagccttgcgtccattgctgtgtactttgccaaaagatttaagagaaaaaactaccaccactcattaaaaaagtata

SEQ ID NO: 747994 - DNA, 625 bp, Homo sapiens
actcccattggaaataagataactgtggaaaccctttcagataaatacaagctaagtagcgaaggtaccttggaaatatctaacatacaaattgaagactcaggaagatacacatgtgttgcccagaatgtccaaggggcagacactcgggtggcaacaattaaggttaaygggacccttctggatggtacccaggtgctaaaaatatacgtcaagcagacagaatcccattccatcttagtgtcctggaaagttaattccaatgtcatgacgtcaaacttaaaatggtcgtctgccaccatgaagattgataaccctcacataacatatactgccagggtcccagtcgatgtccatgaatacaacctaacgcatctgcagccttccacagattatgaagtgtgtctcacagtgtccaatattcatcagcagactcaaaagtcatgcgtaaatgtcacaaccaaaaatgccgccttcgcagtggacatctctgatcaagaaaccagtacagcccttgctgcagtaatggggtctatgtttgccgtcattagccttgcgtccattgctgtgtactttgccaaaagatttaagagaaaaaactaccaccactcattaaaaaagtata

SEQ ID NO: 747995 - DNA, 627 bp, Homo sapiens
cagaacaatcaatacatgaaaaaactcatctaggcacatcttggcaaaactaattttaaaaaagcaagggaaaaatcttaagccctgctaaagaaagatgacattattttcaaagaaacaacaataacattaacaggttacttctcaaaataagtaataggatcgaagaaaaagtgggatgacgtatytgacatgctacaataaagaaacttacaacatagaatttcattcagagcaaattattcttcaaatattaaagcaaatttaaaacattttagatagtgaaaaaatatggaggatggagataaaggcgtgttcagaagaaaatgattagccttacaatccatttatttgaaaagatgactgaacattaatgatttaagatttatctcaagaaattagaaaaacggccaataaaacccaaagaacatatgaggaaggcaacaataaaggtaagagcaaatattaatggaataaaacaaaacattcaatagaaaaatcaatagcaccaaataatggttctttataacaatgaataacttttataagcacctaacaaagctgattaagaaaaaagtgatagcatgaattttaaacatcaataattaaaaagggaacgtcactaaa

SEQ ID NO: 747996 - DNA, 627 bp, Homo sapiens
cagaacaatcaatacatgaaaaaactcatctaggcacatcttggcaaaactaattttaaaaaagcaagggaaaaatcttaagccctgctaaagaaagatgacattattttcaaagaaacaacaataacattaacaggttacttctcaaaataagtaataggatcgaagaaaaagtgggatgacgtatctgacatgctacaataaagaaacttacaacatagaatttcattcagagcaaattattcttcaaatattaaagcaaatttaaaacattttagatagtgaaaaaatatggaggatggagataaaggcgtgttcagaagaaaatgattagccttacaatccatttatttgaaaagatgactgaacattaatgatttaagatttatctcaagaaattagaaaaacrgccaataaaacccaaagaacatatgaggaaggcaacaataaaggtaagagcaaatattaatggaataaaacaaaacattcaatagaaaaatcaatagcaccaaataatggttctttataacaatgaataacttttataagcacctaacaaagctgattaagaaaaaagtgatagcatgaattttaaacatcaataattaaaaagggaacgtcactaaa

SEQ ID NO: 747997 - DNA, 628 bp, Homo sapiens
ctggatcccttccttactccttatacaaaaattaattcaagatggattaaagaattaaactttagacctaaaaccaaaaaaccctagaagaaaacctaggccatatcattcaggacataggcatgggcaaggacttcatgactagaacactaatatatatatacatatatacaggttatatatataattatatattttatatatataattaatatatattaattatactttaagttctagggtacttgtgcacaacgtacagatttgatacataggtatacatgtgccatgttggtttgctgcacccatcaactcatcatttacattaggtatttctcctaatgctatccctcccccagtcccccacccggcaacrggccccagtgtgagatgttccctgccctgtgtccaagtgttattgttcaattcccacctaagagtgagaacatgtggtgtttggttttctgactttgtggtactttgctgagaatgatggtttccagcctcatccatgtccctgcaaaggacaagaactcatccttttttatggctgcatagtatgccttggtgtatatgtgccacattttcttaatctagtctatcattgatggacatttgagttggttcc

SEQ ID NO: 747998 - DNA, 628 bp, Homo sapiens
ctggatcccttccttactccttatacaaaaattaattcaagatggattaaagaattaaactttagacctaaaaccaaaaaaccctagaagaaaacctaggccatatcattcaggacataggcatgggcaaggacttcatgactagaacactaatatatatatacatatatacaggttatatatataattatatattttatatatataattaatatatattaattatactttaagttctagggtacttgtgcacaacgtacagatttgatacataggtatacatgtgccatgttggtttgctgcacccatcaactcatcatttacattaggtatttctcctaatgctatccctcccccagtcccccacccggcaacgggccccagtgtgagatgttccctgccctgtgtccaagtgttattgttcaattcccacctaagagtgagaacatgtggtgtttggttttctgwctttgtggtactttgctgagaatgatggtttccagcctcatccatgtccctgcaaaggacaagaactcatccttttttatggctgcatagtatgccttggtgtatatgtgccacattttcttaatctagtctatcattgatggacatttgagttggttcc

SEQ ID NO: 747999 - DNA, 633 bp, Homo sapiens
accatcatatattattaggttactgcaaattaaaacaacaatgagatactaccacatatctaacagaatggccaaaatccaacacactgacaatgctaaatactcatgagcatgtggaacaacaagaactctcattcactgcttgtagtaatacaaaaggtacagccactttggaagacaatctgtcagtgtctttcaaaactaaacacactctcaaatataacatggatgaacctgaaggacattttgctaagtgaaataaaccagatacagaaagacaaatactgcattaactcattcatatttgaaatctaaaaaggttgaactcatagaagtagagagtccaatgatgattactcraggctaggaggctgaggagggaggaaatgggagatggtgatcaaagagtacaaagtttcagacagacaggagcaataagttttgagatctattgcacggcagggtgactacagccaataataatgtacagtatatttctaaataactaaaagtaaatttcaaatgcttcaacataaaaaatggtaggtaagtgacatgatcgctatgctgattagcttgatgtaaccattttacactgtataaatctatcaaaacatcacattggaatccaca

SEQ ID NO: 748000 - DNA, 541 bp, Homo sapiens
ataaatgcatattactaagtgaaaaatgccaatctgaaaaggatacttactgtatgattccaactgtatgacattctggaaaaagcaaaactatgcagacagtaaaaagatcactggttgccaggatttaggcgggagggaggaatgaataggtgataggtggagcacggaaatttttttttttttttttttttttgagacagggtcttgctctgtcacccacactggagtgcagtggtgcaatgtgggctcactgcaacctccacctttcgagttcaagtgattctcyaggctcaggctcctgaatagctgaaaatacaggcgtccgccaccacacccagctaatttttgtatttttatagtacaggtagggtttcaccatgttggccaggctggtctcaaactcctgacctcaactgatccacccgccttagcctgctaaagtgctgggattacaggcatgagccaccatgcccagctgagcacagataatttgtaggacactgaaaatactctgtatgatagaataatggtggataca

SEQ ID NO: 748001 - DNA, 541 bp, Homo sapiens
ataaatgcatattactaagtgaaaaatgccaatctgaaaaggatacttactgtatgattccaactgtatgacattctggaaaaagcaaaactatgcagacagtaaaaagatcactggttgccaggatttaggcgggagggaggaatgaataggtgataggtggagcacggaaatttttttttttttttttttttttgagacagggtcttgctctgtcacccacactggagtgcagtggtgcaatgtgggctcactgcaacctccacctttcgagttcaagtgattctccrggctcaggctcctgaatagctgaaaatacaggcgtccgccaccacacccagctaatttttgtatttttatagtacaggtagggtttcaccatgttggccaggctggtctcaaactcctgacctcaactgatccacccgccttagcctgctaaagtgctgggattacaggcatgagccaccatgcccagctgagcacagataatttgtaggacactgaaaatactctgtatgatagaataatggtggataca

SEQ ID NO: 748002 - DNA, 607 bp, Homo sapiens
tgaaaacatattcaaaactataataattaaaatagaatgttttgcctaaagatagacaaatatataaatggaatacaatcaaaactgtctcacacatatatgaccacttaatttaactgtaatctaaatataaaagtaataccacaaatttctaggagataggaaaatattgttatgacttgagtagacaaagattttttaagcaggacagtagtcactaaccataatgagaaggactgatgaaytggactacagttgacctttgactaacaagggttcaaactatgcaggcccatttatatgcagagtttttcaataaatgtactggaaaattttttggagatttgccacaatttgaaaaaactcacagatggaccatgtagtgtagtccaaaaatatatttaaaaaaaagaaacggttatgtatgtcatgaatgcacaaaatatatgtagatactaatgttttatcatttaataccataaaatatatacaaatctattataaaaagttaaaatttaacaaaactttggcatacaaacacaagaccttacatggcaatattcacagttgagagaaacgtaaacaaacataaagatacagtattaaa

SEQ ID NO: 748003 - DNA, 726 bp, Homo sapiens
agattactgaatgtccctcaatttggttttgtcagatcttttttcaagattagattccagctacacacttttggcagaaatatcacagaagtgatgctgagttcttctcggtgcatcatatcagaaggcacatgctacagatatatcccatatcccataagccaattaggtcatttggttaaggtggcatatcaggtttctccactataaagttattcttttaccctttgtaattatctcgtgagggaaatgctttgagactatgtaaatatcctgttactcctcaaactttcacctactggttttaagagtcattgaatattcttgtctggattagttattatyatgatgtttgccaaataatgatttgataatttcatcttcctttctatatttattagttggactttgactataagaaagagttttccattttcatttgtttgttttttgtttatctatggactcatggattcttataacactttattcaatacattataatcctttattataattatttattttggttcaccagttgtctcagatttggctattgggagttccttcaagctggcacctgtgtccttttgacctgtccctttgtccatcattatttgagcactcaaagaaattcactcataagaatttatagaagttaggcaactaagctataggaagcagaccctgagaaaaggatccaaatacgagtatttggatttggga

SEQ ID NO: 748004 - DNA, 590 bp, Homo sapiens
aaggccttgggcaggtctgcacctgtggctttgcagttttcagttcccgcagctgccctcatgggctgtgctggtgttgagtgcctgtagttttcacccacagagggtacaaagctcttggtgggtctatgaatctggggtctgcatgatggtggcctccagtgtgggggctccaaccccatattttccttctgcactgccctagtagaggtttcccaagaggctctggtttttggcagccttctgtctggacacccaaacattttcatacatcttccaaaatctatatgaaggctccgaagcctctgggctagtgatctatggactcgctggcttaacactatgtggaagccatgaagccttatagcttstaccctctgaagcagtgatgcaatctgtacctgtgcatctttcagccaaggtcggagcaggagatggggctgctgggatgcaggcagcagcgtcctgaggctgcactcagcagcagggccatggggctggccccggaaaccattcttctctcctaggccccagggactgtgacagcaagggctgctgcaaacatctctgaaatgcctccaaggtttttt

SEQ ID NO: 748005 - DNA, 597 bp, Homo sapiens
caaaatctatatgaaggctccgaagcctctgggctagtgatctatggactcgctggcttaacactatgtggaagccatgaagccttatagcttctaccctctgaagcagtgatgcaatctgtacctgtgcatctttcagccaaggtcggagcaggagatggggctgctgggatgcaggcagcagcgtcctgaggctgcactcagcagcagggccatggggctggccccggaaaccattcttctctcctaggccccagggactgtgacagcaagggctgctgcaaacatctctgaaatgcctccaaggytttttcccccattgtcttggctattagcactggcctccattttatgcaaatttctggagccttcatgaattttccccctgaaaatcagcttttctttttgaacacttggccaggctgcaaatgttccaaacttttgagctctgcttgtcatttttaaatataagttccaacttgaggtcatttcctcggtcacacataacctcggtcacacaagagcacaggctgtttgatgcagacaggatcccccttgtgctatgctgcctagaacttcattccaccagatatgtac

SEQ ID NO: 748006 - DNA, 599 bp, Homo sapiens
  misc_feature 41: n = A,T,C or G
accaaaaaatcaggctctcatatataataaaaattgccaanaaagactcataatacctacttaaaaaatttttccaacatttattcatttaaaatatatttgtatataattttcccagattgttaaccaaatagataattggttcataggactgttaaaactaaattattaaaagaattcatatctgtatttttattaactccatggacttcaatgtttaaaactgacattttgggtatgctaaagctctataaacttaacaaacatactgagctagttcataataaaacttcaactaaacgaatagtttaggatttgctactattctaattgagaaagcccaaattgtaatgaacatttgttgacacataatcrcgtgcatggtgacaaagggacatcaaatcatgaaagagccagcctctgcttattgaatgattacccataagcaaatttctaaagactctctgaatgttagtgaaggattcatggtgggaaggaaaaggtgctattctgtaaactgagagatattgccagtaatatttcctttcacttcccagtcacagatgtagagaaagacagataagtcaggctaatattac

SEQ ID NO: 748007 - DNA, 541 bp, Homo sapiens
tttagttatattcgtaaggtttctttccagtgtgaattttcatatgtctcatgagaaatgactgataagtaaaggctttcccacatttgggacatgtatggcttttctctccagtagtactactcctgtgtgaagtagagtttggagcaggggcagaggtttttccactttgatgattcttattcttactctctacagtacaggactgcatctgcrcagtgtggattgagttatttgcaaagatgttttcactttgagtaaaattatatgttttctccctaacatgagttatgagggccctaaggcatacatcctcactgcagtctattccaaatggactccactcatgaatgtttgccctcatattaatttgactttgcatatgatggacattgttctgactgcctgtccatgtgtttgattttagctctgtttttctcccatataaaacctagtgaatattgcacctcaagactatcattgttttcatatatattaccttatttcaatagtttttgggaaacaggtggtttctggttac

SEQ ID NO: 748008 - DNA, 550 bp, Homo sapiens
tcatatagtggcttctggaataagcactgtattggttttctgattttacaagtatctatagcagcagaaatcctgtggctttgtatctgaatcatatgcttcatttctttggggtgggtaaaccacaaatcaaaaagactttctggatctctagactgaggccaatgcctaatgtctaatttccaattagtgatatttgggtttatattttttgccatttgcatgtcaaactcttaatcatctttcattccaatcataattactgggttccttacttttccagtttctgtatcataacaaaaattttcattatctgtrttagaaacaagctatgtgtctggtttgttaccatttttatagtctgatttattttaatttaaatgaagcttagaagataactggtaagtgtatttcagggacctgcagtgagaatggaataaaaagacatttgacatgggcttcctctgttcaggcgctgcctggactgtcacagagttagatcctccagatgcatttttctcctcacaatcagggacatgattcatcagtt

SEQ ID NO: 748009 - DNA, 584 bp, Homo sapiens
agacatacctaatataaatgaccagttaatgggtgcagtacaccaacatggcacatgtatacgtatgtaagaaaccttcaccttgtgcacatgtaccctagaacttaaagtataataataataataaagagtaatgtatggcttgaaaaggtatatttaatagaacatgagttgggtctaataaaaaacttaagaaatgttaatctaaaatctcaatgttaagattccagttgaatratactagaaaatatattgtaaccctctttgctaccaatgacctatttctattttattttctttttaattatggcataatttctcaacataacatatcaaaacttatacaccctttaatattaaaaaataatacaatgtaagcaatattttaaaaacggtatttaattattagatccattaggtttattatattacttataatattccattatataaaaattcatttgtctatttattcagattaaacaactattaaagctgaatgtctcatgcctgtaaccccagcactttgagaggctgaggcgagcagaacacttgagcccaacagttaaagaccagcctgggca

SEQ ID NO: 748010 - DNA, 620 bp, Homo sapiens
ggaaaataccaggtacagactttccacgctcatccagagcaggacaaacaggccaggcgatgtcaggagaccaggtctccagctggagggaacgtcaaccctgcagtgggagcaagggcccattgcacatcctaggcacagatggtaacgtaggcaccacaggtaagctgggcttagtaccccttcstggcttcagaaagaagccaaacaaggagctttctgcagaatgaaacctcctttccttccagaagcactgctgactggtgcttgttgtttgtggcagtgagccctttgttcattctgcggttgggctgctttctcctctgggccctgccctgcagatcagaaaggagaacagtaagaggtccccagcaaacatccagagatggccctggagataagtcaccttctgagaaacacgtcatattctaggagggctaaggcattaagtaagtcttatggggttggaggatcccagggcaggtgtggcaatccatagccatgggggcttcccacgggaattgggaggtcccaaggcagagtcaggggttccacaggaggagtcacagagccaccaagggctctcctggcccaggaagcagtcaataccatggactgaa

SEQ ID NO: 748011 - DNA, 647 bp, Homo sapiens
tgctatttctgatggtatttatggctctacattttttatagctacaggctttcacagacttcacgtcattattggatcaacattcctctgccttctccgccaattaaaataccactttacatctagtcatcactttgcctttgaagccgctgcctgatatcgacactttgtagatgtagtatgactattcttgtatgtttctatttattgatgaggatcttaaactcttttagtataaatagtaccatcgaatttccacaaagtttcgatagcatccgaaaaacagtaattcacttaccattacttctagtaatcaacatccttaattagccctgttactaataattattaccattttggcttccacaacttaatatatatatatatatatagagagaaaaatatatatatatgtataaaataaatatatatagaaaaatctagcccttatgaatgcagatttgaccctctatcctctgcccacattcccttctccataaaattmtttctagtagccatcacatttcccctatttgagttagaactcaccctactactacccttactgtgagcccttcaaataaactgatactaataatctctgcgatatgtgtagtgacttcatacttcacccccccgatattaca

SEQ ID NO: 748012 - DNA, 518 bp, Homo sapiens
acctcctttgggtcccctcccattgtatgggagctctgttttcactctattaaatcttgcaactgcacactcttctggtccgtgtttgttccggctcgagctgagcttttatttgctaccaagcactgctgaatgctgctgtcacagacccactgttgaatcctacccctccggatctggcagggtgtctgctgtgcttctgatccagtgaggcacccattgctcctcccaatcaggctagaggttcaccattgttcctgtgcagctaagtgcccgggttcatcataattgagctgaacactagtcacygggttccacggttctcttccatgacccaaggcttctaatagagctataacactcactgcatggcccaaggttccattccttggaatccatgaggccaagaaccccaggtcagagaacaaaaggcttgctgccatcttgggagcagccgccaccatcttgagagcagctcaccaccatcttgggagctctaagaacaaagacctgctggt

SEQ ID NO: 748013 - DNA, 618 bp, Homo sapiens
ggcaaattgtatgccctgaatggtggggggtatccagcagcttgccctcatccctgctacataataactagctttgcaagtctgggctcctggaaatccagagggataacccaggtgaggccagggaattcctatgcacacccaggtttgtaactccggcatgctgtgttaccagaggaaatgcaggcccctttcctcagcccaccttcacatcaatgtcttcactgcrgagaacagggatttgctaaaagcaccaaggcctcagagtaaaaagctcacctcctggatgttctgcttggctggtgtcactccctgctatggaagttgtggcccctgagagagagaaaagaaaggaaggagtgaagactagtttttgagagagtacacactgcgctgtgggcagagtatgtcaatcaaggtgcccatgtccagattttgcatgtattttcagacgtgcctgtcttgtaacttccaggtttcagtgtttttccagagactacaacggtaatacctacaacaagagagagatggtgacactagctgaactctatttccacttcatttctataggaatctcaaatccccacttagaagcaaactattactctgagactcaca

SEQ ID NO: 748014 - DNA, 503 bp, Homo sapiens
  misc_feature 473, 482, 503: n = A,T,C or G
tgcaagtacttcagtgtttgaacttcttaacatgaatagcaggttaaaataacacgaatgttcattaagcttttattggaaactatcattagagaatttacattgcttaggttacataaggaagagtttgagcaaccactttgtgacgttaaaaaatttacctaaatttcctgagtctttgtttttatggaggaaagcataaatttgcttgtttactggttgtgataaattctacatggcaggtgacttagaagcagcaacctagctgaaatgggaggctagaggcttggtaaagtttttacttagattttatgtgtgtattttgaatttgttatgtaactgatgaggaaaagcaaccraatctcctttacaatccctaacctgtaagaagacaaaatttggcaacatatctcacagggatttttgatggtaaaacatgactttccataaatttaaatgatttgcatatgganctggtgtcnttgttcaaagggaaagtcacn

SEQ ID NO: 748015 - DNA, 578 bp, Homo sapiens
aaaatatgcattaatgctaatgtctgacaaaagaaataaagatgagatcaatgaaatacaaatagcaagcagctagaattaatcctaatcacatcagtgttcttattacgtacaaatggtctaaacaccctgattaaaaggttgagattgtcagttcacattgagaaagagagatctaagtatgttctgcctgcagggaataacttgatatataacaacacaatgtaaaaacatgaaattaacttcagaaacgttaaagatctcagtgaactcactctctcatgcaaaaacaacaaaatactggcaaaacaattaaaataaactccttcaggactctattaattaatgccacagaaagagttgaaaatcttctaccaagagaaactatggaacctcaataagaaagcagrgtgtatgatgtttgcccaggccagtggtgtggtagctagctatgaacgagtgacagcctcgtacctaacagagaagaataacctattgcggagctctgttaaaagctccatggccagaaatagtcaatatttagtccagattttcaggtctcaggaaaatttctacat

SEQ ID NO: 748016 - DNA, 632 bp, Homo sapiens
gctactatcatcacaccactgcactcctacctgggcgacagagtgagaccctgtctctaaaaaaattaaattaaattaaaactcacatgattggtctatgagagcatccatttatcaatcacccatgtacccaggatgacaaaaattccatctttacatgtgcttcttcaatgttagacttggggaagggaacatagtgatcctgcattggtttttcaggcttccatcttcaaatgatttgcataattgtacaaacattttattgatcaaagcaaattacatgggcacatccaacttcaaaagaagagataaaatrcaatcattctttgtgcccagaatgagaactggaaccgatgtgagtagcactaatgacccccacacatatcaaagatatcctgcttgcgtgattttgttctggtctggagttacataaacacaattagtggtaaacactttacatttaagtttccttgtaaccgtattccagttcctataatttacttagagtcacattctgtactttcattgcagggataaactgccctaagaaaatatagtctattaactcagagtctaataacaaacacttatcttgaaaatccctttttacttttctcacttgctaattgaac

SEQ ID NO: 748017 - DNA, 600 bp, Homo sapiens
gatgtaatatattgaaaataaaaggcttcaatcaatgacctttaggttctaagaggctaaaaaaatgagcaaagtatatccaaattaagaagaaggaagatgataaagataaaaatgtaaaccaacaacacagcaaataacaaaagctggagctaattaatatacccacaaattggttctttgaaaaaaaaaattttaaataaacaatggctagcaagatttatctcraaaaaaattagagaagctacattatgtagacaatgggaattaaatagaggatgtaactacagaacctacagacatcaatataattatgaaaaccttaggccaatacatttgacaaataaaataacatgggaaattatttgtaaaactaattcttaaaactgatgcaaaatgaaatagaaaaagtaatagcttctctatgtattgaagaattttttttaatttaaaaagatttctataattacaggctacatggtttcttaggtgaattctatcaaacatttaagaaagtacagagagtcctcaacttatggtggtttgacttgtgctcttctgacttgataatggtgctttcatctgtgtacattaatgatg

SEQ ID NO: 748018 - DNA, 600 bp, Homo sapiens
gatgtaatatattgaaaataaaaggcttcaatcaatgacctttaggttctaagaggctaaaaaaatgagcaaagtatatccaaattaagaagaaggaagatgataaagataaaaatgtaaaccaacaacacagcaaataacaaaagctggagctaattaatatacccacaaattggttctttgaaaaaaaaaattttaaataaacaatggctagcaagatttatctcaaaaaaaattagagaagctacatwatgtagacaatgggaattaaatagaggatgtaactacagaacctacagacatcaatataattatgaaaaccttaggccaatacatttgacaaataaaataacatgggaaattatttgtaaaactaattcttaaaactgatgcaaaatgaaatagaaaaagtaatagcttctctatgtattgaagaattttttttaatttaaaaagatttctataattacaggctacatggtttcttaggtgaattctatcaaacatttaagaaagtacagagagtcctcaacttatggtggtttgacttgtgctcttctgacttgataatggtgctttcatctgtgtacattaatgatg

SEQ ID NO: 748019 - DNA, 600 bp, Homo sapiens
gatgtaatatattgaaaataaaaggcttcaatcaatgacctttaggttctaagaggctaaaaaaatgagcaaagtatatccaaattaagaagaaggaagatgataaagataaaaatgtaaaccaacaacacagcaaataacaaaagctggagctaattaatatacccacaaattggttctttgaaaaaaaaaattttaaataaacaatggctagcaagatttatctcaaaaaaaattagagaagctacattatgtagayaatgggaattaaatagaggatgtaactacagaacctacagacatcaatataattatgaaaaccttaggccaatacatttgacaaataaaataacatgggaaattatttgtaaaactaattcttaaaactgatgcaaaatgaaatagaaaaagtaatagcttctctatgtattgaagaattttttttaatttaaaaagatttctataattacaggctacatggtttcttaggtgaattctatcaaacatttaagaaagtacagagagtcctcaacttatggtggtttgacttgtgctcttctgacttgataatggtgctttcatctgtgtacattaatgatg

SEQ ID NO: 748020 - DNA, 540 bp, Homo sapiens
gcttctggaataagcactgtattggttttctgattttacaagtatctatagcagcagaaatcctgtggctttgtatctgaatcatatgcttcatttctttggggtgggtaaaccacaaatcaaaaagactttctggatctctagactgaggccaatgcctaatgtctaatttccaattagtgatatttgggtttatattttttgccatttgcatgtcaaactcttaatcatctttcattccaatcataattactgggttccttacttttccagtttctgtatcataacaaaaattttcattatctgtrttagaaacaagctatgtgtctggtttgttaccatttttatagtctgatttattttaatttaaatgaagcttagaagataactggtaagtgtatttcagggacctgcagtgagaatggaataaaaagacatttgacatgggcttcctctgttcaggcgctgcctggactgtcacagagttagatcctccagatgcatttttctcctcacaatcagggacatgattcatcagtt

SEQ ID NO: 748021 - DNA, 617 bp, Homo sapiens
agtccatggtattgactgcttcctgggccaggagagcccttggtggctctgtgactcctcctgtggaacccctgactctgccttgggacctcccaattcccgtgggaagcccccatggctatggattgccacacctgccctgggatcctccaaccccataagacttacttaatgccttagccctcctagaatatgacgtgtttctcagaaggtgacttatctccagggccatctctggatgtttgctggggacctcttactgttctcctttctgatctgcagggcagggcccagaggagaaagcagcccaaccgcagaatgaacaaagggctcactgccacaaacaacaagcaccagtcagcagtgcttctggaaggaaaggaggtttcattctgcagaaagctccttgtttggcttctttctgaagccasgaaggggtactaagcccagcttacctgtggtgcctacgttaccatctgtgcctaggatgtgcaatgggcccttgctcccactgcagggttgacgttccctccagctggagacctggtctcctgacatcgcctggcctgtttgtcctgctctggatgagcgtggaaagtctgtacctggtattttcc

SEQ ID NO: 748022 - DNA, 593 bp, Homo sapiens
ttagcctgacttatctgtctttctctacatctgtgactgggaagtgaaaggaaatattactggcaatatctctcagtttacagaatagcaccttttccttcccaccatgaatccttcactaacattcagagagtctttagaaatttgcttatgggtaatcattcaataagcagaggctggctctttcatgatttgatgtccctttgtcaccatgcacgygattatgtgtcaacaaatgttcattacaatttgggctttctcaattagaatagtagcaaatcctaaactattcgtttagttgaagttttattatgaactagctcagtatgtttgttaagtttatagagctttagcatacccaaaatgtcagttttaaacattgaagtccatggagttaataaaaatacagatatgaattcttttaataatttagttttaacagtcctatgaaccaattatctatttggttaacaatctgggaaaattatatacaaatatattttaaatgaataaatgttggaaaaattttttaagtaggtattatgagtcttttttggcaatttttattatatatgagagcctgattttttggt

SEQ ID NO: 748023 - DNA, 632 bp, Homo sapiens
agtgaagccgcagaccttcgcagtgagtcttacagctcttaaaggcggcgcgtccaagattgttcgttcctcccggtgggtttgtggtctcactgacttcaggagtgaacctgcagacctttccagtgagtgtcatagctcataaatgcagtgcctcacccaaaccgtgagccagtggcaagatttattgcaaagaaaaaaaaacaaagtttccacagcgtggaacaggactcaagcgggttgccgctgccgcmgggggtggccagcttttattccattatttgccccgcccccccatcctgctgattggtccattttacagagtgctgattggtccattttacagagtgctgattggtccgttttgacagagtgctgattggtgcgtttacaaacctttagctagacacagagcgctgattggtgtgtttacaatcctttagttagacacaaaagttctccaagtccccacccgacccagaagcctagccgacttcacttctcagagggagggtagcagggctaggctcagaaaggacagccctcatgcagccgtgcgggttggggtggctggaaccaaagggttctatgagggtgctgctgtcgggcaaagccagtgctgggttcctcaa

SEQ ID NO: 748024 - DNA, 648 bp, Homo sapiens
aaggcagggctgggggctcaggctgagcacatttgtgcctcaggatcctccagggggccttcaacctggctctgcacccctctgagcagctgctgtgtgccaggccctggtgcagccagagggcgtgagctccctcagaggacccacccagacatggtgtggcttctccaggtgcagcctcggagcccagggaggccttgctcacagccacacggtctgctccttggctcatggcccttccctgcagaggcgtctttgtcctcctgtagtcctggctccagcgtcatggccagccagatgggacggcccccaggggctccacagggcagggcctgtgcctgtggggcaggtgtcagcagcgcaggtggtgcccaggactaatgcctgtgagctcggcgtggcaccaggtgatgcgaacccctaacaccactgcgaayccctaacaccactcagtcgaaccgcaggcatgaggcagggcctggccatgggctctccttcaccgcctgggcttcttctccagggagggagctggggtggcatggagcctgcagaccggaagattcttccctgactggggcttgcctcagaggccctgggcctggctggggttccatattgattcattctcacatgggggacccctcggtt

SEQ ID NO: 748025 - DNA, 529 bp, Homo sapiens
taacccagtaacccacggatggcccaaatgcattcaatctgtagcagcaactgctttgctaacagaagaaagtagaaaagtaacttttagaggaaacctcattgtgagcacacctcaccagttcagaattattctaagtcaaaaaagcaaaaagrtagcttactaactcaaaaatcttaaagtatggggctattctgttagaaaaaggtaatttaacaccaaccactgataattcccttaacccagcagatttcctaacaggggatttaaatcttaattaccgtacaaagatctgacaagacctaggaggaattcccttcaggacaggacaatagatggtttctcccaggtgattgagaaaaaaaccacaatgggtattcagtaattgataaggagactcttgtggaagcagagttaggagaactgcctaataattggtctgctcaaacgttggatctgtttgcactcagccaagccttaaagtacttacagaatcaaaaaactttatctcaatcctgactcaaaaagt

SEQ ID NO: 748026 - DNA, 503 bp, Homo sapiens
aggaaagcatccccagggatgtggaccgatttgggtaattcccaagaccatgtttatttgcagcatcagcagaaagatggtgagaaagccctatgcaatgggacaaatgagagaagttctcaatgttcctttacattccatccctgccctgactagtgcataaaatggagctttgaaatctgtcctcagcctgtgcttcaggtggaaactcgccatgctggcggatgcatgggctagtgggtatggttggtgtgcaggcacagycttgccctcacttcacctctggctctcatagacattgccctccccactcccctgcccccatccagagagctcctcactgtccctgaacgattagacaaagacactaaggagtctgtctaacccatcttcctccaggccagggcctctgcattctccacacatgggcaactttgacccagccatctcaagaccaacattgtacctttattggaatgaatcacagcagagctcctgcagaa

SEQ ID NO: 748027 - DNA, 658 bp, Homo sapiens
tacctctggtgatcagtcttggcagactcataaaatgaaatacatgatactccctcaaattccataggaattcaaagaatatatgagagatggggataataaggaaaaattttagaggtagtttttatataggacttaacagatatgcaggatttargtaggcagagaggatagggaaaggaattgggtccatactggtagcagagttactatatgactccagaaattcaaacctgactggtgaggtacagttacagtgatgatcacaccatgcactgagattaagcaggatccctggaggttttgtttaaagacagagaaatgagaacactatatctaagggcagatatgcctgctcacttaggactcaaatctattttatataaataatggagagggtttacttctatttgatgaataatatacttgaggatgttactgaaattgtgcttaaaatagaactacccatctcaaatataacatgccccaaatgattttcccttgcattgcgttctttctacacaggtacatacaaacttatacttctgcatgtatatactacctgaaatttgcttttagctgtgtaagtacatagttcaaatcaacttccaacctagacttgattattaagggagtcatttaattttctcttttctca

SEQ ID NO: 748028 - DNA, 658 bp, Homo sapiens
tacctctggtgatcagtcttggcagactcataaaatgaaatacatgatactccctcaaattccataggaattcaaagaatatatgagagatggggataataaggaaaaattttagaggtagtttttatataggacttaacagatatgcaggatttaggtaggcagagaggatagggaaaggaattgggtccatactggtagcagagttactatatgactccagaaattcaaacctgactggtgaggtacagttacagtgatgatcacaccatgcactgagattaagcaggatccctggaggttttgtttaaagacagagaaatgagaacactatatctaagggcagatatgcctgctcacttargactcaaatctattttatataaataatggagagggtttacttctatttgatgaataatatacttgaggatgttactgaaattgtgcttaaaatagaactacccatctcaaatataacatgccccaaatgattttcccttgcattgcgttctttctacacaggtacatacaaacttatacttctgcatgtatatactacctgaaatttgcttttagctgtgtaagtacatagttcaaatcaacttccaacctagacttgattattaagggagtcatttaattttctcttttctca

SEQ ID NO: 748029 - DNA, 553 bp, Homo sapiens
gcaggcggctttcacaggcccgggacacacccaccatttctctccctgaaaccagcaaccacagtgtccctgaaattgatggctctgcctgtgggtgtgatgggctctgccggtcgtgatggatggttgctatttcccaggagggagctgggaggtggcgcatattccccctccccctacaagttccctccttccccaggaggagacaaagggcagggcaggggagggaggcacaggccaggaccggaaaaaaatcagagaaacactggatgcgccagcagtaccacccccagcccaagaaggcagacctggagtccaggggtccactggaccytcagctctgctgcctgcagcaatatcctcaacagagaccaaaaaggcctgctcctgacctggggaacaggcctgcggacagaggctgcatcagaggcaccgctggaggcagacaggaaagcagaaaagaatgaaagaggggcaaaggactggatctgagggagaaagatggagctggggggcaggggctggatccgagggcacacagacagtgtcagag

SEQ ID NO: 748030 - DNA, 499 bp, Homo sapiens
ccagaccccagcctcagctccatcttcccaggcactgctgacccttttgctgcattgctttgcggtgcagagaacagcatcgtggcggagtgcagagccctgggcagccccgttgcccactagccatgtgacattgggatcatttcctaagccctctgggcctcaattttgtcaaccataaaaaggaactttagatgtaacctttgaggtgctctggggcccaacaaccctcatgtccgtgagatggcagaaaaggcccagcactgggaaagaagccccagagcccccaracggtaagctccaggcaggacttctagatcagggttcctagaagtgtggccaatcacccagcagcatctgaatcttctggccaggctgttaaaattcagatttctgggccttggtctagatttgcccattcaactctctaggacccggggcccgggaatctgcactttccttgctccccatggatccggacatgcagggaagttgggag

SEQ ID NO: 748031 - DNA, 623 bp, Homo sapiens
ccatccccataaatatgtacacatattatgtatcaatagaaacatttttaagtcaatgaaaaggaggaataaagccaagcacggtggctcatgcctgtaatcccagcactttgggaggctgaggtaggcgaatttcttgagcctaggagttcaagaccagcctaggcaacatagtgaaaccctgtctccactaaaaatacagaaattagccaggcgtagtagcgtacacctgtaatcccagctactcaggaggctgaggtgggagggttgcttgaggggaaggctgctgtgagccatgattgtgccactgcactccagcctgggcaacagagcgaggccctatctgaaaaaaaaaaaaaaaaagaagaaagaaagagaaagaaaggaaaraaagaaagaaaagagagaacagagaactccacaaaacacaaaattgctaactataaagaaaaagatggataacttttattacattaaaattaagaatttctgttactccccaaaaaaccataaagaaattaaaaaggcaagccacaaattagaagacttttttaacacatgtaacttccacagaatttatatccttaatatataaagagctcttacaactcaatatgaaaatg

SEQ ID NO: 748032 - DNA, 578 bp, Homo sapiens
catcaagaagtcttatatgagggttgtttctggaaaaaaatgtattcctatggaacttaaacaaataaatcagacagataatgacatgattaccaatgcttttcatgccgggggtcttgaagctgtgaacacttcatactagtctgagtaggaataataccaacattattattatagttacaattattagtacaaacataatgttttttattccttataacatttcacatatatttgatttgcaaaacagtcctcagaactcttgtcagagatattggcaaagtttgtttacatcctaatgtgcatgccaatcaattacaagatgtattactggattttagcagagaaattctgggttgaatgaaattgagaaaggtcatattacttaaatgaagtcctttcctgtaccctttctcagstgattttcctcctcatagctatatcctcctgctccatattttaaacattatgttattgttaaaattgccaagagagatgtttgcaattcatcattcaccgtgatctcttggacttacacatgctatacttttccaggttggtattgtgccatcaataac

SEQ ID NO: 748033 - DNA, 588 bp, Homo sapiens
atcagctctgtaggtcagaagtctgacatgaatcttactaggctaaaatcaagatgtcagaaggtctgtattcctttctacaagcactagaggacaatctgtttctatgccttttctggcttctaaaagctcccacattccttgactcctggtccccttccttcatcttcaaagccagcaatagctggttgagtctttctcacattacatcactatgaaactgactctcctgcttctctcattctcttataaraacttccgtgattacactgggcccatctatatatataggtaacagggattaggatgtggacatctatggagaggaggcacgattttgcccaccacactgtagaagatttctagaaatctgagaataaagagataacatccttatcacaaaatcatgagaaacgaaggctggggtccacccccgtcttaagctactaatgctactgcccaagaaagcagtctgctcccaatagcccctcagtagtctattccggggcactatgtttttgtcatcaatagaagaaaagcattctgtctagctcatcctttctgtacattgcttctcctcttaccaca

SEQ ID NO: 748034 - DNA, 603 bp, Homo sapiens
ggacttcctgttctatcattctttaagtctacctagagtggtcttaaggtgaaatgcctacatattaaaccataatcaatcattgtacacacacaaattactttctgtcctcccctttccttgttatcgtggtccaaagcaggtttttgagacagagtacatttatctgagctgttagctgcttcacgccactgcatccttgtgtatgatctgcctggtcccagacccctggagaaaatttgtgcktgcatactgtatgtgaactttagataaataaataaacacgcgaaacagcttccagataattgaaagtgaatgaaggagggagcaaaaagaaaacaatttctctgggggtaagcagctaaggtggcaggtatgattaaaatccatatgatttatgggtaggtggattactaacatgacaaccctgttagtgtttgtttgtttgggagcatttgacaataaagttttcttgttgttgttgtgcttgctgtgggttttgctccggacttagccactcaggaattcctagtgcctgactgagcagtcatttagcaagctctcttgtgctcttttcctgtcagcattaacatgtcaattcat

SEQ ID NO: 748035 - DNA, 597 bp, Homo sapiens
atctagcattttattttgggaatgcctagatacctctgactgtcaaaataataatatggcttcaatttttgatagtgacatcaaaaaataaaaccttttaccaaataaatcccccaaatcagaatagcaaagtcttttgtattcctcaaatcagtcaaaggtgttttgttttaatttttcatttatagtttcagagaaaaatttatattctwtagaatatatttgtagtagttggtgttctcatttctttttcttattttacatactagaatcatactcttgcatcaaattcaaaagcaaatatacaaaaagacaggataaaaatcgaccatcagccaaaaaaaaaacccagtatttaatctaaactcctttgctcttttttcttgaattattttgccatacaagtaaatgaacacaaaagagacaatcaagtattccctggctgataatgtataaagatgaatttcaacacttctctttggaagctttaagtaatgttcagtcctgaaacaggactttaaagggatccattttcattcacagtcacatagatagagtcaatgctttaactttggtcacaatctcattttggtccct

SEQ ID NO: 748036 - DNA, 665 bp, Homo sapiens
agctgaaatagctgttctttcttaacttttaaacctctatcttgaaatttaaaactgtgtcaaaataataattggtaatatactttcaaaatccaaatggtcatcaaatatgctggtcttaagtgaaattagcaatctagcattttattttgggaatgcctagatacctctgactgtcaaaataataatatggcttcaatttttgatagtgacatcaaaaaataaaaccttttaccaaataaatcccccaaatcagaatagcaaagtcttttgtattcctcaaatcagtcaaaggtgttttgttttaatttttcatttatagtttcagagaaaaatttatattctttagaatatatttgtagtagttggtgttctcatttctttttcttattttacayactagaatcatactcttgcatcaaattcaaaagcaaatatacaaaaagacaggataaaaatcgaccatcagccaaaaaaaaaacccagtatttaatctaaactcctttgctcttttttcttgaattattttgccatacaagtaaatgaacacaaaagagacaatcaagtattccctggctgataatgtataaagatgaatttcaacacttctctttggaagctttaagtaatgttcagtcctgaaacaggactttaaagggatccat

SEQ ID NO: 748037 - DNA, 533 bp, Homo sapiens
aaaaaatggggaaagacacaaatatctttaatacccataaacctgtgaggaatgctaggatggaaatgctaattaagcaccaagggtgaaatgacgagtcaacttttgtccacatttttgcctttttaagtaatttcataatagggtcccttcactttcctagttatttaaacaggaatactattggcttgagcagtttgactgacgtgtggagctgaactgtctcatttccagttctcattcacatgctaaaratccaagtgtgtttcccttactccagagtttcctctgaattggaaaggaagcttatcgccaaggaagtcccctgtctgcagggcaatctgttctacagtgacagccacacaggtggtaaagcttcctacagtgttgaagagagatgatgcaatgctcagggcgttccttattctgtctaactcgattcattatttttatttttgtaatacattacagatcagattttgttacagatgtgttttgtagtacctaatattaataaataatccatgaaacta

SEQ ID NO: 748038 - DNA, 418 bp, Homo sapiens
cctggggacatagtgaaaaagagcgctaattgggagtcaagagcctggctttttttttttttttttttaagacagggtctcactctgttgcccaggctggaataacaccatcttggctcactgcaacctctgcctcccaggttcaagcgattctcctgcctcagcctccagcatagctgggattagaggcacgggccascatgcccagctactttttgtatttttagtacagacagggtttccctatgtttgccaggctggtcaggaactcctgtcctcaggtgatccccttgcctcagtctcccaaagtgctgggattacaggtgtgagccacggcatccagccaagcctggcttttaagcctaacactgccactaatcagctctaaagtgaacttgttcaaatactgtcatatatc

SEQ ID NO: 748039 - DNA, 540 bp, Homo sapiens
gaggtgctacacacttttaaacaacctgatatcgcagaactcttatcatgagacagcactagagcagtggtgttaaaccattagaaaccacccccatcggccgggcgtggtggctcacgcctgtaatcccagcactttgggaggccgaggcgggyggatcacgaggtcaggagaccaagaccatcctggctaacacagtgaaaccccgtctctactaagaatacaaaaaaattagcccgatatggtgacgagcacctatagtcccagctacccagctactcgggaggctgaggcaggagaatggcgtgaacccgggaggcggagcttgcagtgagctgagatcgcgccactgcactccagcctgggagacagagtgagactccgtctgaaaaaaaaaaaaaaaaaaaaagaaaagaaaaagaaacgacccccattatccaatcacctcccaccaggccccacctccaacactggaggattacaattcaacaagatagttgggtgggaacacagagccaaaccataccagtttccataaga

SEQ ID NO: 748040 - DNA, 589 bp, Homo sapiens
caaaccataccagtttccataagaaaaatgaagagagttgaaaaggataattgaagagattttgaaagttatttctacagaacttctgtcataaagaggactatcatcatctcatcttggctctactctttatatgtatgcctacaattaaaatcgtagtttattctttcacccttagcttttggtggattcttttgttccacagataatcttgaatacataggactattgttgtggggcttagagcccagccttttcctcaattctcacgtttggctactgttgcaccctacattgcttcagaacgaaaggagttaatgtgaaaggacttaatatcataatgtgacacacaaagggatactcagtttatgtggatttgatgcctactagggatctatgagtttgattctcycagatctcccctagttgtagggtatactttaaaaaaaattaaactgttactaacactaaattcttagagttttcccattcattcatcttcttcactagtgaacaggggcagagagatggaaaaatgtaaaattgtgggaaacccaaacaggtttgaatttgaaattaaatttttgta

SEQ ID NO: 748041 - DNA, 595 bp, Homo sapiens
ctacagttttcatttaaatgctttaactatgtatctagaatttaagctgatgaatagtccaaaagaagcctcagaatttacttatttttcccaaatatttttcagggctatgttttgaatggtccttttctgctcacagatttatgtttctaactattatctagtaataatttgtggttaaagttactaagatttgtttctgggctatttttttcatccaacgttatgtttatcaataattctacaactaccattttgttttctaattgcaagtttagggtgaatttacaaatcaagtcaaacaagtctcttgtattataccatgtttttcagttatgtttctctctgtttttcattatcaaatttatttcttcagatgaacttcagaatcatgttatcaagttccaaaratttgagtcattagccaacacttgaaatttcattaaatctactcattattttaggacaaaataaacaggttatgatttggagtcaatctcaaagaaatttgtacgtcttttgctttatttaagtcttcgttttatgtttttgtaaagattggctttttttttcttacatatttgatctgtcctta

SEQ ID NO: 748042 - DNA, 463 bp, Homo sapiens
gggattttaagttcggaagttatccaaaagcatttgtttaaaggataaatgctttagcatgggccataacagcaggcaatctagcacattgtctctgttaaaggagtcttgcccaaaggcgacacagtctctctggagatccattttttggggagccaggcaaatccacaggtttaggaagtcaaaggggaatcacacaaggcagataagctaaggttgtgtgggtaagcgtggttagccccatcacctagttcatccagttccatggcttgcaggaccacgccttcaaccatggacagcacatttaacatggtgtcrggatccagaaaccagggaggggaagcagtcagagaattctccctgtcttcttctctgctctgggttacacggaaagaaaggagactaagaggacacttttattctcacttctttttctagatgagtaacagattatcttcagctt

SEQ ID NO: 748043 - DNA, 587 bp, Homo sapiens
tctcattatatattgcaagtgtattcctctgtcttcaagctgctaataaagatataaccaagactgggcaatttacaaaagaaagaggtttaatggacttacatttccacgtggttagggaggtctcacaatcatcgcagaaggcgaaaggcacatctcacacggtggcagacgagaggagagaatgagaaccaaaagaaagaggtttccccttataaaaccatcagatcttatgatacttattcactattacaagaatggtatggggggaacttctcccatgattcaattatctcccactgcatccctcccacaacaggagagaattatggtagctacaatycaagatgagatttgggtgtggacacagccaatcaatgaggtaataataaaaataaagtgcataataaatgtaatgtgtttaattatcccaaaacaatctcccccgctccagtctgtagaaaaattgtcttccatgaaccccatccctggtggggaccatatattcttgtcaagggaaaagggaaaaggagagaaattgagacttttctgtggttcttatacatgggaatccatatgacactata

SEQ ID NO: 748044 - DNA, 625 bp, Homo sapiens
ttgaaatctagtaattaaaggaaagtaaaaatagtcttatacatatttgaattatatgtcatgaaataaactatccacacacagcactgaaattatgcttagtacatcaattaattttgtcttatcatacacagatctatttaatatcactgtgaaaacttatttaagagtttaaatacaatatatcctatgtaatgtggctatattaatattttcagatagtttaggcagaactgtactgactctgtcattgkctgaatgctctctttcaaaatactggagaaaggttttactattaaccgtttatttattttatgtggtcctacaatatttctcaacttatttatttctttagtagtcatcattatatatataatattatcaaaatatgcttttcaagtactgtatttctgtgtttggggatcctccatctataatatgtacttaaataatgacatttctcagttctatctttcatggaaatttctataacctctatttctcatgaatgacaagagatctctatatggaagatagataactatttatatctcatcagtagagttacctataatttgcacatttttagtaagtccaatttttagaaatgatagtatataaacac

SEQ ID NO: 748045 - DNA, 602 bp, Homo sapiens
caagcagggagatgaaactggaataaagaatctaaataaatttctagaagtaaaaaacactgtggcagaaatgaagaatccctttgaagggctcaccagtatacacaatacaacaaagacagaatcattgaggtttaacacaggtcagttaaaacttcacaaactgaaatgtgaagagaagaratattttttttaaaaaacagaactgaatctccaagaactttgggacaatatcaaaatgggcagtgtatacgtatttgaaatatcaaaagagaagaaaaggtacagagaagaagaaatatttgaagtaataatggttaagaactttccaaaagtaatgacagacaccaaactatagatgcagagctcagagaacaccaaacatgataaataccaatagaataacatttagtaacatcctattgcaacttagaaaaccaaagacaaataggagtaataccaataaataccaatatatctaggaatagcctattgcaactaagaaaaccaaaacaaaaagaaaatcattaaagaagacagaggaaaaatacagcttaacgctaagagagcaaagatagagattagtttttggaagagaagaa

SEQ ID NO: 748046 - DNA, 427 bp, Homo sapiens
aagcgtataaagctataaacttccctctatgtactgcctttgctgagtcccacaacttttcatgtgtgttcattatcatttagctgaaaacatcttccaatgtttgacacatggggtatttaaacatgtgttttataaatatgcagatrttgggactttgccagatgtcttggtccattcagtgttgctttaaaggaatgcctgaagctgggaaatgtataaagaaaagaggtttatttggctcatagttctaaaggctgtacaagaagcatttgcttctggtgagggcttcaggctgcttccacttatggtgaaaggcaaaggggagctagtgtatgtagagaccatgtggtaaaagaagaagagagagataggggaggtgccaggctctttttaacaaccagctctcacaggaactaatagagtg

SEQ ID NO: 748047 - DNA, 604 bp, Homo sapiens
gtagaatggaatgaagcattacaattatgtaatctccttatctctccctctgcactttcttttttgaagcccctcgtttgtttcacgattctctttgttcatctctcttactgaatttgatgccaaggcctttatgtattgctcctatgccggcaatccttcccatttcctccctgccttcctgtctacccagagagtttgcacaaagtatgattttgttcctatccaggcacagctaagtggacaaaaaatgaacgttgtggtcaataatagtttgctcttttcagagggacaargccgggcagttggaggaggaatgcagagaaaaagacacagtgattgtcttggttcctgatggttttcaagttctcagttcccatcatccttgtatccattcattcattcgtgggacacacatacactgagtgcttacttggggtagagcaaagggaagttattacgagggcttcagctttcactctgagtaggagggggaagccactaaaacagcatggcatgatgttggcttaaaaggcacttgagctgttatgtagagaataacctcgagggccaggagcagaagcagagaggctagctagggggc

SEQ ID NO: 748048 - DNA, 604 bp, Homo sapiens
gtagaatggaatgaagcattacaattatgtaatctccttatctctccctctgcactttcttttttgaagcccctcgtttgtttcacgattctctttgttcatctctcttactgaatttgatgccaaggcctttatgtattgctcctatgccggcaatccttcccatttcctccctgccttcctgtctacccagagagtttgcacaaagtatgattttgttcctatccaggcacagctaagtggacaaaaaatgaacgttgtggtcaataatagtttgctcttttcagagggacaaagccgggcagttggaggaggaatrcagagaaaaagacacagtgattgtcttggttcctgatggttttcaagttctcagttcccatcatccttgtatccattcattcattcgtgggacacacatacactgagtgcttacttggggtagagcaaagggaagttattacgagggcttcagctttcactctgagtaggagggggaagccactaaaacagcatggcatgatgttggcttaaaaggcacttgagctgttatgtagagaataacctcgagggccaggagcagaagcagagaggctagctagggggc

SEQ ID NO: 748049 - DNA, 530 bp, Homo sapiens
agatttaatcaattgtgtcctagtaaattgtaagttctcctggtgaagcactgcatcctgctttattagttattcacagcctagtgtgaatgaggggagagggagatggatttgccatatcctccgctgcacgtggagttgtggaaggctcacattttcatggagagagaaaacattttaacacgaaaatgtcctttatgtatgtcccttccctgcttacatactttcgctgggctcccacgccacattatagaaaacaaaacttwtatttggccagagttccctctatagcttcatcatgagcgctctaatacttgtatactgcgccaaccctttgttataacaaacaacccaaactcttttacgcaggtatacctgtcacacactcctactgctaccttggttgcctctctgctctcttcagcctggagttcttagagatctagtacaatgaccatatgcttcgggaagatttccccaacttctctagggaggagaacttgctttctccttggggctaccacattgca

SEQ ID NO: 748050 - DNA, 573 bp, Homo sapiens
gcagagtctcgctctgtcatcgggctggagtgcagtggtgtgaccttggctcactgcaacctccaactccctggttcaagggattctcctgcctcagcctcccacgtagctgggattacgggcaggtgccaccacacccaactaaatttttgtatttttagtagagacagggttacatcacgttggccaggatggtcttgatctgctgacctcgtgatctgcccaccttggcctcccaaagtgctgggattacaggtgtgaaccaccatgcccagcctggaatgaagttttatcaattttattgatctcaaagaaccaacttttgattgaattgcttattgtttttctatttgtaatwttatttatttctattctgatttttcttatttccttcattttacttactttatatttcagtcttctttttatcctttcttatggtggaagctgaggttgttgattagagattccatctttcttcttttctgatatgtgcctactggtctataaatttcccccaagaatgtggcatcccagagattttaatatgctatactcatttcattcagttca

SEQ ID NO: 748051 - DNA, 549 bp, Homo sapiens
tgaatatcgagggatgactttattcctccctactgaggaaaaatcctgtgtactttatccaatgtcccatgagtcatgaggttttccagtctgtctttcagaaccaagtactacttccagtcctgtgtgtgtgtcagatattgttccctccatttcctgcaggtggtctttccttggctttggctaatttccctataagtacgcttgcatatccagctaaatacctgagggtaatccctgaagatctccagagttttccttctgtgcagctttctttctagkactctgtcctacaaatgctatgcaccttggtttctccaggccttcagctctgtctcccaactgtttctttaactcagggagtctgctgggctgcaagtcagttcattgtccctgcactgcaatctagaaactctctaagacaatgagctgggggaatttaagggcttatctctcaggaatcactgcccttcgttgcctaatgtccatcaacattggtttatatattttatctctagtttgttttttaaggtgagaacactaatatct

SEQ ID NO: 748052 - DNA, 549 bp, Homo sapiens
tgaatatcgagggatgactttattcctccctactgaggaaaaatcctgtgtactttatccaatgtcccatgagtcatgaggttttccagtctgtctttcagaaccaagtactacttccagtcctgtgtgtgtgtcagatattgttccctccatttcctgcaggtggtctttccttggctttggctaatttccctataagtacgcttgcatatccagctaaatacctgagggtaatccctgaagatctccagagttttccttctgtgcagctttctttctaggactctgtcctacaaatgctatgcaccttggtttctccaggccttcagctctgtctcccaactgtttctttaactcagggagtctgctgggctgcaagtcagttcattgtccctgcactgcawtctagaaactctctaagacaatgagctgggggaatttaagggcttatctctcaggaatcactgcccttcgttgcctaatgtccatcaacattggtttatatattttatctctagtttgttttttaaggtgagaacactaatatct

SEQ ID NO: 748053 - DNA, 690 bp, Homo sapiens
ttcttcacttcaccaaactttagtcaggatcctgaaccttctccaaattcgcctgtgcatttccttgtaaaatccagttttaacaaagaacactgttaagttggtttggtaggaaccccccatccttgatatctgatcaagttcctcatcctccaccatcccctgggtaatgtctgatcaccctggcccatcttcagaattctgtgaggtcagtttagccagaatcccccttacccrtgaggatgttccctcttaaggattcttcgttcactgaccccactctgctccttggtgataaattcccattctccagtgctgtatttggagttgagtccaatctctctcccccactgcaggaccccattgataggtcccggtacctatcatgatggtcccgaataaagtcttccttaccatgctttaaccagtgtcactgaataattattttctttaataaggcccagacttaacagagattttgagatgaacattcaggctgtaagaaatgacggctttagcttctgtctcagggctgcagttggcactgaagagcctcatcaggacctggggaaacgatgtctgtgtgggcatgtgtgtgtgcatgtgcgtgcgtccatgtgtgccttcagatatacactggcttgtctcacatttataatgtggcactgtctatctttccaggagaaatgg

SEQ ID NO: 748054 - DNA, 616 bp, Homo sapiens
agattttttttttttttttttgagatggagtctcactctgttgcccaggctggagtgcagcggtgcaatctcggctcaccgcaacctccatctcctgggttcaagtgattctcctgcctcagcctcctgagtagctgggattacaggagtgcaccaccatgcccggytaagttttgtatttttagtagagctggggtttcaccacgttgaccgggctggtctcaaactcctgagctcaggtgatccgcccagctcggcctcccaaagtgctgggattatagataggtgtgagccaccgcacccggcccatagatttaaattcataaatggcaaacaggatttctttcctgagagtagaagggagagagtaggtagcaggagagcatgccctgccatgaggatggcagcacaacttccaggagtcttagccgtgccttgaaagatgcagtgacttagcgctcaagagtgcaggtaccacaggcagaagaggaggcatgaaagcagggagttcctctactactgcacctggaaccagccccgctccactctaaacacagaacacgtggtttcaagcttttgctcccatgtctattagctatgtgacttggagctaagt

SEQ ID NO: 748055 - DNA, 616 bp, Homo sapiens
agattttttttttttttttttgagatggagtctcactctgttgcccaggctggagtgcagcggtgcaatctcggctcaccgcaacctccatctcctgggttcaagtgattctcctgcctcagcctcctgagtagctgggattacaggagtgcaccaccatgcccggctaagttttgtatttttagtagagctggggtttcaccacgttgaccgggctggtctcaaactcctgagctcaggtgatccgcccagctcggcctcccaaagtgytgggattatagataggtgtgagccaccgcacccggcccatagatttaaattcataaatggcaaacaggatttctttcctgagagtagaagggagagagtaggtagcaggagagcatgccctgccatgaggatggcagcacaacttccaggagtcttagccgtgccttgaaagatgcagtgacttagcgctcaagagtgcaggtaccacaggcagaagaggaggcatgaaagcagggagttcctctactactgcacctggaaccagccccgctccactctaaacacagaacacgtggtttcaagcttttgctcccatgtctattagctatgtgacttggagctaagt

SEQ ID NO: 748056 - DNA, 616 bp, Homo sapiens
agattttttttttttttttttgagatggagtctcactctgttgcccaggctggagtgcagcggtgcaatctcggctcaccgcaacctccatctcctgggttcaagtgattctcctgcctcagcctcctgagtagctgggattacaggagtgcaccaccatgcccggctaagttttgtatttttagtagagctggggtttcaccacgttgaccgggctggtctcaaactcctgagctcaggtgatccgcccagctcggcctcccaaagtgctgggattatagataggtgtgagccaccgcacccggcccatagatttaaattcataaatggcaaacaggatttctttcctgagagtagaagggagagagtaggtagcaggagagcatgccctgccatgaggatggcagcacaacttccaggagtcttagcygtgccttgaaagatgcagtgacttagcgctcaagagtgcaggtaccacaggcagaagaggaggcatgaaagcagggagttcctctactactgcacctggaaccagccccgctccactctaaacacagaacacgtggtttcaagcttttgctcccatgtctattagctatgtgacttggagctaagt

SEQ ID NO: 748057 - DNA, 520 bp, Homo sapiens
accaaaacagagatatagaccaatggaacagaacagaggcctcagaaataacaccacacatctataaccatctgatctttgataaacctgacaaaagcaagacagggggaagggattccctatttaataaatggtgctgggaaaacaggctagccatatrtagaaaggtgaaactggatcccttccttacaccttatacaaaaattaattgaaggtagattaatgacttaaatgttagatctaaaaccataaaaaccctagaaggaaacctaagcaataccattcaggacataggcatgggcaaggacttcatgactaaaacaccaaaagcaatggcaacaaaagccaaaatagagaaatgggatctaaactaaagagcttctgcacagcaaaataaactaccatcagagtgaccaggcaatctagagagtgggagaaaattttttcaatctacccttctgacaaagggctaatatccagaatctacaaagaccttaaacaaatttgcatgaaaaaaaca

SEQ ID NO: 748058 - DNA, 518 bp, Homo sapiens
ccagttcatttgcaaaataagttattgtataaatatcaaaaagacacctgtgtatgcatgtttattgcagcacaattcacaactgcaaagatatggaatmaaccaaagtgccccttaaccaatgactggttaaagaaaaagtggtgtatatgtgccatggaatactactcagccataaaaatacaaaataatgtcttttgcacaacttggatggaattggaggccattatcctaaaggaaataactcaggaatagaaaactgaataccacattctctcacttataagtgagagctaaactatggctatgcaaaggcatatagagaggtatgacattggagactcagacggggagaggttgggagcagggtgagggataaaaaattacctatttggtcaatgtatactatttgggtgatgggtacactaaaagcccacacttcaccactatacaactcatctatgtagccaaaagctacttgtacctctaaagttactgaaatacaaaataaaaaactt

SEQ ID NO: 748059 - DNA, 605 bp, Homo sapiens
tagcttttccaggtgcacagtgcaagctgtcggtggatctaccattctgaggtctggaggatggtggccctcttctcaagctctgctaggcagtgccccagtagcgactctgtgttgggactccaaccccacatttcccttccacactgccctagcagaggttctccatgagggccccatccytgcagcaaacttttgtctgggcatccaggcatttctataactcttctgaaatctagacagaggttcccaaacctcaattcttgatttctgggcacccacaggctcaacaccacatgtaagctgccaaggcttcgggcttccatcctctgaagcaacagcttgagctgtaccttggcccctgttagtcatggctggagtggccaggatgcaggccaccaacttcatagattgcacacagcacaggaaccctgggcctggcccatgaaaccattttctcctaggcctcctagtctgtgatgggaggggctgacaagaagacctctgacatgccctggagacattttctttactgtcttggggatgaacattaggctcctcattacttatgcaaatttctgcagccagcttcaatttctcctcag

SEQ ID NO: 748060 - DNA, 607 bp, Homo sapiens
agtctctgtcacccaggctggagtgtagtggcatgatcttggcttactgcaacctccgactcctgggttcaagccattctcctgcctctgcctcctgagtagctgggattacaggtgtgcactaccacgcctggctaatttttgcagttttagtagagatggggtttcaccatgctggcaaggctagtcccaaactcctgacctcaagtgatccatccgcctcggcctcccaaagtgctgggattacagatgtgagccactgtgcctggccctggcagagtgtctaagagtgcctttagtcatgctaatgagatgactaggtttgggaacccctaggtagcttcaggattggggctggtgaccagaaagaccagggcatgattagasagttggaactttgagccccacatctcaacctctggggaggggagaagagctaaaggttgaattgatcgccagtggccaataattctatccatcacgcttgtgtaatgaagccttcctaaaaactaaaaatatcttggtttggggagcttctggagagctgactatgtggaggttcctggagatggctttgaagctctgtatcccttctcccttacctcac

SEQ ID NO: 748061 - DNA, 694 bp, Homo sapiens
attgtgctttaaatttcacaatttctgtcgagagtaatagctcatcttattgtattgctttgtggttaacatttctttctttctctaagtaaatttaatatttccctttttgtccttggatataagcagttttactatgatgtgcctaaatacagtatggttttccttctatgtatcagagttggctaatatcttttcgagttttgcttttgcgcttctttctgttctctgcttctgtgattctaagaaaatttatattttgccatttcacttcatcctgtacccatcttatagttttctctattttctgttagttgtttcctctttcacgtcacctgttttctggacgaggtgtggtggctcacgcctgtaatcccagcactttgggakgccaaagtgggaggattgcttgagtccataagttcaagaccagcctgggcaacatgcagaaaccctgtctctatcaaaacaacaacaagaacaaaaaaaatcatgtcacctgttttctattgctctttcttctagtttcagaatttcatcttctgtgtctgatctgctcagaccacgtattgagttcctaatgttagttattattatttttcagttttagaatttacctttgttttttaaaaaatagattccaaaagctctggtaaatttatgtatattttcttaaagatatcattcaaggtca

SEQ ID NO: 748062 - DNA, 452 bp, Homo sapiens
tgggctgagacaatggaattttgtagatataagattatgtcatctgctaaaaaagatcatttgacttcctcttttcctatttgaacaccctttatacctttctcttgcctgactgccctggccagaacttccaatactgtgttgaataggagtggtaagagagggcaaacttgtcttgtcccagtttccaaggggaatgtttccagmttttgcccttttagtataatattggctgtgggtttgtcatatgtagttcttattattttgacgtatgttccttcaatacttagttattagagtttttaacatgaaagtatgttgatttttattgaaagccttttcttcatctattaaggtaattatgtggtttttgtctttagttctctttatgtgatgaattacatttattgatttgcatatgttgaaccaaccttgcatcccagagatgaagt

SEQ ID NO: 748063 - DNA, 452 bp, Homo sapiens
tgggctgagacaatggaattttgtagatataagattatgtcatctgctaaaaaagatcatttgacttcctcttttcctatttgaacaccctttatacctttctcttgcctgactgccctggccagaacttccaatactgtgttgaataggagtggtaagagagggcaaacttgtcttgtcccagtttccaaggggaatgtttccagattttgcycttttagtataatattggctgtgggtttgtcatatgtagttcttattattttgacgtatgttccttcaatacttagttattagagtttttaacatgaaagtatgttgatttttattgaaagccttttcttcatctattaaggtaattatgtggtttttgtctttagttctctttatgtgatgaattacatttattgatttgcatatgttgaaccaaccttgcatcccagagatgaagt

SEQ ID NO: 748064 - DNA, 560 bp, Homo sapiens
acgccaggcgaccacacgcttcccaccccgccgccgttcccactcccttcatgcttccttgcagtctcacgtcacacctttgctctggaatactcttcttcctacaaagcctggctcatgggcggcctcaccatgaagccaggcccttgttcttcccgcctccatgtgcccgttttggagcctctttctcctgcacagcgcagttcagcagaaggacggtgggagccacggattgaggccacatgtgtcattttaaattttgtggcagccactttaaaagagatcattccaacatgtaattgggataaaaataattgattcttttttggtacccagcatgtgaaatcctgccgctcacagtcagcttcttccygcttccgcacacctgttctttccctgaagtttgcagctcctgaagggtgaggcagatgttttcataacatcacttccactgtgcgctggccggaagagctgtcatcaaataccagtgggagttcattgaataagaatcagttgatgaatcaatcatctgattaggtctcatgaatttatatacatat

SEQ ID NO: 748065 - DNA, 560 bp, Homo sapiens
acgccaggcgaccacacgcttcccaccccgccgccgttcccactcccttcatgcttccttgcagtctcacgtcacacctttgctctggaatactcttcttcctacaaagcctggctcatgggcggcctcaccatgaagccaggcccttgttcttcccgcctccatgtgcccgttttggagcctctttctcctgcacagcgcagttcagcagaaggacggtgggagccacggattgaggccacatgtgtcattttaaattttgtggcagccactttaaaagagatcattccaacatgtaattgggataaaaataattgattcttttttggtacccagcatgtgaaatcctgccgctcacagtcagcttcttcccgcttccgcacacctgttctttccctgaagtttgcagctcctgaagggygaggcagatgttttcataacatcacttccactgtgcgctggccggaagagctgtcatcaaataccagtgggagttcattgaataagaatcagttgatgaatcaatcatctgattaggtctcatgaatttatatacatat

SEQ ID NO: 748066 - DNA, 487 bp, Homo sapiens
aggggtgggagccaaatgtcaggcacaggcgagcccatggctgaattctgaagcacacaccaaatgctttcctgcagccacgaggagcttcaggtttctctcccctgtggcttctttccatccacaacttacatgcagggtggcccggcccagccctagggccaaccttccccttccatcccagccccactgacttcacctcctcaattacaccgtttcctcgtgccaccccttaccaacgaggtcccctgcacagacaagatctccatgcacatctgggtcccgatggggcctctctgcagctgtcatgtgggctctgggctataggcygtcttcagttgtctggtacctgaccctgggtgatttagggcaggggaaatactggcttggtgtgagagttgggtaaaggggagtggttgagggtcggctggtttgcatatgcatgcccccagatgagccttttgctatctcaaagaattgcctagcc

SEQ ID NO: 748067 - DNA, 569 bp, Homo sapiens
agcaaaattaattattctcccacctgtattttgttacacgtttgctaccatacatgtaacctgtaatctgattctgttttcaatgtgtttgcctaaccaggctttgggaccctggagggcaagagctcaatggcaccacaccacccttcggtgcttggaacgttgcagagaggcaaggagggtctatctggcgtgtgaggtcacaggaaagctgacgagccagtyacccgacgtgaccccgaggccgcaggcaggggactttacctgcacggcaatcacagacaagacttccactgagatgcgattaaactcgtcaaagcagccccaggctcccgtctgggccaggcccttgtagatatttccacaggactggaaagggcgagatggagaaaggaagagctgggagggtgacagggagggcgggcgctgcaggggcctccccctgcctcttcggctgtgttttctcttcccaaagcttgctcaggccccggtgcattggagccttccgcaggccagcaggcaggtcagcttactgcccagggtaacaccgtggagggctggacacgagg

SEQ ID NO: 748068 - DNA, 528 bp, Homo sapiens
gaccctaggctgagtgaaagaagccacacgctcagaccacatagtgcacgcaaaggagatcagaacgtgccaccccaaaatatgccatcctgcaattgacaattttgagtcagaggcacttgaagggcagcagatgcaggactctctctctgagcctcatgctgttcctgggaagcaggagatgcaattcccaggtgaatgatgctcttctgataccagaatgaaacgatcattctcatcactaggatgggaagtggaggcggaaagaatcctgtcygctcagacccttttagaacagctctcaccttccagcctcttacacagattacttttctacaacttacgctttctgcaactcagtacttaagtgttcaactctaactgtgttttggagtcttcctttcctcccataccacagaaaacttggatttaaataatttgcatacttttctcctcttgatctatcttacgtcaatggaattctcagacccagctggaaaaaaccctaaaagcatagtgaaaatgttg

SEQ ID NO: 748069 - DNA, 528 bp, Homo sapiens
gaccctaggctgagtgaaagaagccacacgctcagaccacatagtgcacgcaaaggagatcagaacgtgccaccccaaaatatgccatcctgcaattgacaattttgagtcagaggcacttgaagggcagcagatgcaggactctctctctgagcctcatgctgttcctgggaagcaggagatgcaattcccaggtgaatgatgctcttctgataccagaatgaaacgatcattctcatcactaggatgggaagtggaggcggaaagaatcctgtctgctcagacccttttagaacagctctcaccttccagcctcttacacagattacttttctacaacttacgctttctgcaactcartacttaagtgttcaactctaactgtgttttggagtcttcctttcctcccataccacagaaaacttggatttaaataatttgcatacttttctcctcttgatctatcttacgtcaatggaattctcagacccagctggaaaaaaccctaaaagcatagtgaaaatgttg

SEQ ID NO: 748070 - DNA, 528 bp, Homo sapiens
gaccctaggctgagtgaaagaagccacacgctcagaccacatagtgcacgcaaaggagatcagaacgtgccaccccaaaatatgccatcctgcaattgacaattttgagtcagaggcacttgaagggcagcagatgcaggactctctctctgagcctcatgctgttcctgggaagcaggagatgcaattcccaggtgaatgatgctcttctgataccagaatgaaacgatcattctcatcactaggatgggaagtggaggcggaaagaatcctgtctgctcagacccttttagaacagctctcaccttccagcctcttacacagattacttttctacaacttacgctttctgcaactcagtacttaagtgttcaactctaactgygttttggagtcttcctttcctcccataccacagaaaacttggatttaaataatttgcatacttttctcctcttgatctatcttacgtcaatggaattctcagacccagctggaaaaaaccctaaaagcatagtgaaaatgttg

SEQ ID NO: 748071 - DNA, 372 bp, Homo sapiens
caaatgcatggagaagaacctcttcctttccttcctaagacagagtgagacctagaccatatctggcagataagaatatgtactgtgaatttagaaaagccacatattttgaataataatagcattacaccataaaatgatatcatcatagcayacaaatctggggcattaattgttacggaaaaaatgggatgaggactctggttgagtgtggaattgtggggctgtcacccgcaggatgcttacaccccgcactctgtcctggcacgctcctcacaacaacagagagcaggaagagctaaggctcagtatcaaatttcctcttccactcttaggacttattaacaaattaagaagctgggtaaatggagg

SEQ ID NO: 748072 - DNA, 372 bp, Homo sapiens
caaatgcatggagaagaacctcttcctttccttcctaagacagagtgagacctagaccatatctggcagataagaatatgtactgtgaatttagaaaagccacatattttgaataataatagcattacaccataaaatgatatcatcatagcatacaaatctggggcattaattgttayggaaaaaatgggatgaggactctggttgagtgtggaattgtggggctgtcacccgcaggatgcttacaccccgcactctgtcctggcacgctcctcacaacaacagagagcaggaagagctaaggctcagtatcaaatttcctcttccactcttaggacttattaacaaattaagaagctgggtaaatggagg

SEQ ID NO: 748073 - DNA, 649 bp, Homo sapiens
caataaaaaatgataatggggatatcaccactaatcccacagaattacaaactaccatcagagaatactattaacacctctccacaaataagctggaaaatctagaagaaatggataaatttctggacacatacaccctcccaaaacaaaaccaggaagaagtagaatctcgaatagaccgataacamgttctgaaattgaagcagtaattaatagcctgccaaaaaaaaaaaatcccaggaccagatggattcacaaccgaattctaccacaggtgcacagaggagctgggaccataccttttgaaactatttcaagcgctagaaaaagaggggctcctccctaactcttttcatgaggccagcatcatcctgataccaaaacctggcagacacaacaaaaaaagaaaattttgaggctgggcacggtggctcacacctctaattccagcactttgggaggctgaggcaggcggatcactaggtcaggagatagagaccatccttgctaacatggtgaaaccctgactctactaaaaatacaaaacattagctgggtgtggtggtgagtgcttgtattcccagctactccggaggaggctgaggcaggagaatggcgtgaacccaggaggcagagcttgcagtgagcc

SEQ ID NO: 748074 - DNA, 611 bp, Homo sapiens
ggattttatcacctctcagtaattgaaaggaaaaggagaccttataaatatcaataaggacattgataatttaacattatctgcctaattgacctaactgacatttatagaacattacgttcaataactgaaagttaaaaattcttttcaaatgcacatggaatattcaacaagttagactacatgctgggctataaaaacaagtcttaataaaggcaaaaagactgtaatcctatgaagtatgttattataataaatttaagtgagaaatcaataaccaacatattttttaaatccccaaagatttggagactgaggtaaaatttatcctaaagttttataaatattgaaccctaataaatttgaacataactacatgacctctctctaaggcgttttaaattgaaaaataggtragaaggagagttcaactatttaatgcccatttaactccatacaagggcctaagaatctgtgggaggagggagattcaactcccattatattcatttttatagaatttaaactttttatatgtactaaaaagagcaaaagccatttccacattttaaataattaaaatgcctttcatatatccatcaaaagaaaac

SEQ ID NO: 748075 - DNA, 584 bp, Homo sapiens
caagggtttgaccatttttaaagcctcttgacatgtattatttaactggttttctttttttgttgagacggagtctcgccctgtctcccaggctggagtgcagtggtgcgatcttggctcactgcaagctccgcctcccgggttcacgccattctcctgcctcagcctcctgagtaggctgggactacaggcgcccgctaccacacccggttaattttttgtatttttagtagagacggggtttcactgtgttagccgggatggtctcgaccwcctcacctcgtgatcctcctccctcggcctcccaaagggctgggattacagttgtgagccacggcgcccagcctgaactggttttctaaaaatactttaccaacttacgttcccaaagaaactacgaaatttcctatttcacctgagttaatactccattattgccattttgaatcttttctaagtaatgctcacacgtgataccacactagggctttaatttttatttttttgatgattaaataagttgatttcttcttatgaatttatttatttgtaaaagtgctaatgttcctgtcctgtttttcttt

SEQ ID NO: 748076 - DNA, 624 bp, Homo sapiens
aaatttttaactttagcatgatactgacttgctcatatatttgcctaacctcttcactattgtagatacaagattattaccttctaagtgacctataattaattgaaagaccaaatcatgtaaataatgtttaaagtagatgaayacgatgatagaaaattcacttatggtaaattatataaatatgctagtgaaagattgatgaatacttaagtagaaagtaatataattcttaatattaatttcattagttgctacagttcaggttttattttttgtaatagaaatagaaaaaatatcacgagatatatgtctacatttagtggggtattgggttagataaccatttggaatatgtaaccatgattgtaatttaaaatttagcctgtcctctcttttagttacactccttttaagcctgtatgattgtattatgaaagttgaaacttgtttttttttacgtttatgccaccactatttattaaatcttaattccctttatgtgaagattatgacacatttttagttgtatattgcaatcaaatgcccatgatatatgtggaagttgtctaataagtatattttttggcagttgaagcctggtttgttattagatattttatt

SEQ ID NO: 748077 - DNA, 666 bp, Homo sapiens
ctcctgaggcaggagtactgcttgagcccaagagttggagactgcagtgagaggctatgatcacaccactgcatgtcagcttgggtgacagagggagaccctgtatcaaaaagaaaaacaaacaaaaaaaaatgcaagcacagtcagctcttcatattcgtggtcttacactggtgttttcaaccaatttggatggaaaatattttttaaaatagcaataaaattaacaatacaaaaatgaaaacatacaaataaagaacaatatagtataacaactatctgagggagttcctagaatcaatcctctgtgaatacgagttaacaactgtaattaataaaaataactaaccaaggccagtgcagtggctcacgcctgtaatcccagcactttgggaggccaacacaggtggatcacgaggtcaagagtttgagaccagcctggccaacatggtgaaaccccatctctactaaaaacacaaaaattagctgggcaygatggcgcgtgcctgtagtcccagctgctcaggaggctgaggcaggagaatcacttgaacccaggaggcagaggttgcagtgagctgagatcataccactgcactccagcctgtccgacagagtgagactccataagaacaaaaaataaacaataataactaaccaggaaaa

SEQ ID NO: 748078 - DNA, 552 bp, Homo sapiens
gactcatgtcttcctaatcatgatagttttggcattccaagtttatataaaatagagcttaatgaactagtattatgtggtagttttaacactgatttatctgctctgtgatagcaggtaaattgttataactttttctggtacaagtctaccatttataaataagtttccttcaatctgcaacatccccttattctgtaagtcttccagttggctcggtaaatattacaaatttttagatagtttttaattcatataaattwgatatttactaactttttagttgatgattttctaataacattgtatagtgagggagtgtttcttcaattttcttctgtttagctttccatataaatcaattagtaaggaaagccaaggttatttggataatgtctttaaattgaaaacaaaagtcaacttctgattgtagagaagaatgctgaacaacataccaccagttcctggcacctgtagattttcacgctgtgtgtgtgtttttcttttttcttttttcaacagagataatggacttttctgaaggatttttta

SEQ ID NO: 748079 - DNA, 573 bp, Homo sapiens
tgatcaattggattctgtaatctccaaatttcaactgtggacctctctactgaactccagtcttctatgtccaatgacttaccagacagcttcacttggatattaaataaatctttcaaagttaaaatattcagttcaatactgtacttctttttccccttgatttgcttctccctcaatcatcccattctcattaagtggtgtctttttctgtttaggaaaatgcttgaaaacatctttggcttttatttatttttattctggctagaaatacattttttaactgttacttttggttcagacatacacgtacaggtttgttatataggtaaattgtacattgtggggtattgaagcacagattatagaaattcatatttttagcaaattttattagccctactttaaatatatccataattcaattacttttcaayaaccagctgttactgccttggccgaaaccatcgttacttgcctgcgttatttcagtaacttttttttttttggatgggttacagaccagcgtttgctttatttgaacagagtttgaacacaacagtgagttcttaa

SEQ ID NO: 748080 - DNA, 706 bp, Homo sapiens
catcaatctcccaaaaggccaaaggatttaatgactctaaaagtgttccatgacacagtagaaagaatagaaagttttggaatactggccacctcaaatatgctgtgaactctaattggattctaaatttgacaataaacrtctagtcaggtgaggccacaaaaaataacctataaataatgacacattatataatttcaattgtttgacaattaaaattgtcaacaaaaacttttagttgcaaataaactcaagaagtggttatcacatggatatttgattaagggatttttgaaaggacaataaactctaaaaataaccatattataaaaatattgaaataccatttaaataagcaattcttaaactgaccttctagaagggcaaagaacataacatcaaatcaaatttcagagagtgcgtttttgtaaaggatggaataataatgtacagtcagacactttgttttctaatcatcttacttaattcagtgatagaacctggaaatactagatagacagcaaaaatgctcattaacctgtctcaatcaaatatcagatgtcttaaatgaatctttagtaggtgttgaatcagagccaagatataaatgaattttctttcagatatttgtaatgcgtttctgtagcacaaagagacatgtcctttagaatgtcagaaacgaaaatagaaaatgaccttggacttt

SEQ ID NO: 748081 - DNA, 552 bp, Homo sapiens
atttgttatatttttaattaaaatttgtttatttaaaccaaaatttactttatgattttttttaatttttctaaatgtgaatctaaatgaagaaaaaaaaaacttaagcatgccaagatatgatttatatgagacctcctggcctcttccactgtcctacaaaagtgctaggctgctaggcaacatattatcttaatgaaactatatttaggacttttattctttgcatttcattaatattttaaaacatttgctrtatcataggattagtactaaatgtctgttgcaggtcctcagaaaagtggagtttatgagaaatgaacactatggatatttccaaagcacagtaaggcagagtggctcgtacaagatatgctagtattagaataataggactagctaatatgttaattaatagtgtgttatgtgtccctgagtcctcaatttccttagttataagataagagggtttaaagaagagactgttgggacctatttatactcaagcatttaaagatacttttattcaagcgtatccacattctccagaga

SEQ ID NO: 748082 - DNA, 608 bp, Homo sapiens
gaacaatgcagagagattaggtatcacagatgtgcaaacttttgactgcaaatatgcggcaacatgggtggaaaagggctagaaaatttattgaacatccttcttcatacaataattaaacaaaaaattttgcgtctctgtggaggcaactaaatgatataataatattcaagtcatataaaggatataaaaaagattatatctcaaatttattcaagggatttttttggcyaataagataatctgtattaggaataaatagattagattttgttattttatttcaagattccatttgtgtgtgtgtgtgtgtgtgcacatgcatatataaaaaaataagctggtatacagcctgcattcactgattgtgtaaagtaatctgctacagtaatctgtgacacctaagcagcatctcagcctggcattattttttgtgtctgccctgattttataagcatctcaatcttgctgccatgctaaaaccttttctctccttatcattcaaagaatgcttttacatatagtccaattttgaaactctttgtacaggcaatatctaaaatttccttaattaacacatccatagatctcattgactattatctgtt

SEQ ID NO: 748083 - DNA, 641 bp, Homo sapiens
ctccgtgctgtcttctcaggatcctgcttcaacctgctgccacttccccatgcctagctcactgtcactttctcccttacctgccctctcagcctcaaactgataatttggaaaaagaggcgcctggaaaaaaccacttccagggtacagcaggaaccagcctcactcttctttctctcttttaaaaattattacgatttttactgagatgggttccaagtatcactctcyaccacctcatcaccttctgggacctggatggactccagatcactatgttgcctaggctggtctcaaactcctgagctcaagtaatcctccggcctcggcctcccaaagtgttgggattacaggcgtgagccactgttgcctggtctggcctcgcttttaattttggcttcctggaggcttttgctgaggtagagatgcaggccacccttgcctgacaatgccttccaggcaattgagtggctgagccagtgggagaaggtgggcttctctcactcccaggtgtggtggtagtgaaccagcccaggtggtcaacatgaactgggaacatggaagacaaaggtaaaagagctggtaagggaagcaaagcaggtttgggaataaagcttaaaatctggtacagagtgggttac

SEQ ID NO: 748084 - DNA, 641 bp, Homo sapiens
ctccgtgctgtcttctcaggatcctgcttcaacctgctgccacttccccatgcctagctcactgtcactttctcccttacctgccctctcagcctcaaactgataatttggaaaaagaggcgcctggaaaaaaccacttccagggtacagcaggaaccagcctcactcttctttctctcttttaaaaattattacgatttttactgagatgggttccaagtatcactctccaccacctcatcacctyctgggacctggatggactccagatcactatgttgcctaggctggtctcaaactcctgagctcaagtaatcctccggcctcggcctcccaaagtgttgggattacaggcgtgagccactgttgcctggtctggcctcgcttttaattttggcttcctggaggcttttgctgaggtagagatgcaggccacccttgcctgacaatgccttccaggcaattgagtggctgagccagtgggagaaggtgggcttctctcactcccaggtgtggtggtagtgaaccagcccaggtggtcaacatgaactgggaacatggaagacaaaggtaaaagagctggtaagggaagcaaagcaggtttgggaataaagcttaaaatctggtacagagtgggttac

SEQ ID NO: 748085 - DNA, 641 bp, Homo sapiens
ctccgtgctgtcttctcaggatcctgcttcaacctgctgccacttccccatgcctagctcactgtcactttctcccttacctgccctctcagcctcaaactgataatttggaaaaagaggcgcctggaaaaaaccacttccagggtacagcaggaaccagcctcactcttctttctctcttttaaaaattattacgatttttactgagatgggttccaagtatcactctccaccacctcatcaccttctgggacctggatggactccagatcmctatgttgcctaggctggtctcaaactcctgagctcaagtaatcctccggcctcggcctcccaaagtgttgggattacaggcgtgagccactgttgcctggtctggcctcgcttttaattttggcttcctggaggcttttgctgaggtagagatgcaggccacccttgcctgacaatgccttccaggcaattgagtggctgagccagtgggagaaggtgggcttctctcactcccaggtgtggtggtagtgaaccagcccaggtggtcaacatgaactgggaacatggaagacaaaggtaaaagagctggtaagggaagcaaagcaggtttgggaataaagcttaaaatctggtacagagtgggttac

SEQ ID NO: 748086 - DNA, 547 bp, Homo sapiens
agaatatccaagccctgagcctatgcttcccaaattagaaaaaaaagaaaaaagaaaaacaaaaaaacacatattctaagttcccaggctaaaaatcccaagcacaattacatgattattttcccgaagctatagttatgttttttaaacatgtgcgtgtgcacatgtgtgygcatacacacacacacagacacacacatacacaccatggtacaaaatcagcggtacctaaattaaggagaaaaaatggaggaaactttttctttttaccttattagaatgctagttggcctatgccagttgcctgaaatttatgacctgcaaaactaaacttatttgggatctatacattcttagagggtaaaaaatccacatggctactctcagtgtaaaaattgagacttttgtcacaaagttcagaagtttggggtgactgtacttctggtagttttccttcatactcattattttcaataatatctgtcttcccctaccaataaattgtgtgtaggcccaaaatgtaaaaaaaaaaaaaaaaaaagaaaaa

SEQ ID NO: 748087 - DNA, 547 bp, Homo sapiens
agaatatccaagccctgagcctatgcttcccaaattagaaaaaaaagaaaaaagaaaaacaaaaaaacacatattctaagttcccaggctaaaaatcccaagcacaattacatgattattttcccgaagctatagttatgttttttaaacatgtgcgtgtgcacatgtgtgtgcatacacacacacacagacacacacatacacaccatggtacaaaatcagcggtacctaaattaaggagaaaaaatggaggaaackttttctttttaccttattagaatgctagttggcctatgccagttgcctgaaatttatgacctgcaaaactaaacttatttgggatctatacattcttagagggtaaaaaatccacatggctactctcagtgtaaaaattgagacttttgtcacaaagttcagaagtttggggtgactgtacttctggtagttttccttcatactcattattttcaataatatctgtcttcccctaccaataaattgtgtgtaggcccaaaatgtaaaaaaaaaaaaaaaaaaagaaaaa

SEQ ID NO: 748088 - DNA, 547 bp, Homo sapiens
agaatatccaagccctgagcctatgcttcccaaattagaaaaaaaagaaaaaagaaaaacaaaaaaacacatattctaagttcccaggctaaaaatcccaagcacaattacatgattattttcccgaagctatagttatgttttttaaacatgtgcgtgtgcacatgtgtgtgcatacacacacacacagacacacacatacacaccatggtacaaaatcagcggtacctaaattaaggagaaaaaatggaggaaactttttctttttaccttatwagaatgctagttggcctatgccagttgcctgaaatttatgacctgcaaaactaaacttatttgggatctatacattcttagagggtaaaaaatccacatggctactctcagtgtaaaaattgagacttttgtcacaaagttcagaagtttggggtgactgtacttctggtagttttccttcatactcattattttcaataatatctgtcttcccctaccaataaattgtgtgtaggcccaaaatgtaaaaaaaaaaaaaaaaaaagaaaaa

SEQ ID NO: 748089 - DNA, 547 bp, Homo sapiens
agaatatccaagccctgagcctatgcttcccaaattagaaaaaaaagaaaaaagaaaaacaaaaaaacacatattctaagttcccaggctaaaaatcccaagcacaattacatgattattttcccgaagctatagttatgttttttaaacatgtgcgtgtgcacatgtgtgtgcatacacacacacacagacacacacatacacaccatggtacaaaatcagcggtacctaaattaaggagaaaaaatggaggaaactttttctttttaccttattagaatgctagttggcctatgccagttgcctgaaatttatgacctgcaaaactaaacttatttgggatctatacattcttagagggtaaaaaatccacatggctactctcagtgtaaaaattgagacwtttgtcacaaagttcagaagtttggggtgactgtacttctggtagttttccttcatactcattattttcaataatatctgtcttcccctaccaataaattgtgtgtaggcccaaaatgtaaaaaaaaaaaaaaaaaaagaaaaa

SEQ ID NO: 748090 - DNA, 659 bp, Homo sapiens
ccctcataaatagtaaactggcattgtactgaatatatttattctttaactcctagtggaatggatggtaattaaactaggtggttgaacaaaacgtaagtcactgggcatccaggacttgcaaactttcttttctaccccagagcaacatctccttcttctgtgctgctactttctcatcactattagtgtacatttttgtgtaagtggataactatcagaatagactctgagcgccttaagggcacaggtgtgtgggtgcttgtgtgtgtgtgtgtgtgtgtgtgtgtgtrtatatatatatatatatatatatatatatttatgtatgtgtgtgtgtattctttgtttaggccattcttcaaactgtttgcagttttgcatttgagaatatatactgttttctatttgtcatttctaaatgtatataggtataagactgaatattttcaggagtggaaaagtatttttagatatatatcacagtatcatgcagtagaatgtagtaatcttcttcagttcacatctattaacttggttgggaattgcggcaaggtgtgggtaagtaccagaaagcagatacaggccttggaaatattgattcccttctaggttttcctttttggacttttacattgttacccatctgcaagacttct

SEQ ID NO: 748091 - DNA, 612 bp, Homo sapiens
taaatgattattagggataatttctcttttttttgtagaccacagaagttggaatgatgtatttttgttcaaaagtattccataaatattcaattagatatttaaagtgcaaacatgactttctacgtccaagttattcacaatctagtaagggaaacaaacacacaaaaagagatgattacagtagaaaggaattacactgggtactctgagagcccagaggaaggaatctaatataarctaggtgggtaatagcatattaatttgagatagttttaaagtaatgcacaggttttgataggtgaaaatttttggcagggacaaagaatattgctgattattactgtaaatcacaggcaaaaacaaaggcgccaggaaatgtggatctttggcaacacagtaagtgttttcttaaatctggaattcataagatgtaaatatgatcatattctttaaactttgaatgtcaacctaagaaattggcaatggtaacccagattatgttggataattttatgcattatctcctttagtcatgcagaaatcttgaggacagattcatttctttttatgtcattcttcacatcttcaataacacaatctctttccaaa

SEQ ID NO: 748092 - DNA, 564 bp, Homo sapiens
ttctgattgtgttcttttgaacagaacacattgcattaaactctagaaagaaaaaaagtgactgttttcatatttttatgattggagtcacattcttaagatctataatgtagattacagcaccattttgttatctgctagaagaaatatagctaatcatctctaaattagtaatgttacattttattttgcttcctatttactagtgtggcacattttaatgacagaaaatttccttgaaggcaagagctttacacayagtaggatttcactcagtttttgcatatattgaccattgcagaatacaaacaactgttaagtaatttctcccaaagacaggccataataaagaggaaaaatataaactatatgacactaaaaatcctgttaatcttgatcaatcagtgaatgaaacactaattgtgccaaacaacacattctacctgaacaaaaggaggtaattgcagtatgtttctatgaatacatagcagctgttctatgccattattatcactggtgagtaaagatcatggtgaatcattgtctaatatcttgtgatcttgc

SEQ ID NO: 748093 - DNA, 628 bp, Homo sapiens
tacattatttatttacttgaatggctagaaatatgtaattactctggattttttaattgaggaaaacaatggttaacttttggtttgagaaacctcatgtttatcattctccccaagtatagttgcacagggaagacaaaggaggaagttcatgtcagtaagttgctaagcctgaggaacaatagatttttaagaggtgttgagggattcagcttcaaagagaaccaaaattatgtgcctagagaaacaaaaactgaataaagggcatttctgatatgatagaagtggtgaagaaaaccaaagaagtgaactagaagaagccacaggttgctatactattcccttttttaaaaagtgcctccaaagtgtggatagagctactttttcattctgctatttgactgaaccacaaatgcatgttcaaaaagattaaaattaaaaaraaaaatgaatagatgcattttgtctatttcctaatgtaaaataaagcaattgcatacacattgcaaaaaaacataatcatggcacagtgtatttgcttagcaatgctattctgaatgttttattatattctagaaatactatcttaatagttttcaacaaaatatctgtgatgtaaagaaacaag

SEQ ID NO: 748094 - DNA, 550 bp, Homo sapiens
tttttaaatgtatagttgtaaaaattactaaatttcgaacttctgacttcaagttacctgcccaccttggcctcccaaagtgctgggattacaggcgtgagccacgccaccacacctggcaaaaattatcaaatttcaatcttaatatgggggaattcattttaaaaacaataagaataactttctatgtaggaaagcattttataaaaaaaattacttgagttgattttatttcttacatctttcagagatgtttgccagttttcctttcatataattctgtcgttatacagaaaaaatwaaaacaaaagtctaggtaaaaccatcacctagccaattcaattgtaagtttcataattcaatcataaaacaataaaacctttttaatatttatttatttcagttctcttaatctcagcctacagcatcattcttgatttgacactaataaatattgaccatatatatatattccttgttgttatatatatatttattataaaaaagttataaaaaagtagaattgtgtttttgaacacattcttcttct

SEQ ID NO: 748095 - DNA, 511 bp, Homo sapiens
ccgtatcagcctcttgagtagctgggactacaggtacatgccatcatgcccagttaatttttcaaaaaatttatgtagagacaaggtgtcactattttgcccagcctggtctcaaactcctgggctcaaacaatccacctgcctcagactcccaacatgctgggattacaagtattaaccactgcttttggcctcctattgccatagtcttgaataaactcttccttgctatttttacctagtgtctattatgatttttcttttaaagctgtcaacatttctttgaatttaagaattaaagtcatgttattcaactatrttttttaaacatctcatcatgggtaaattcaaaacaatattttgctgcctttattagaaagttagaaatgataatgacacagacatagctgattaaaacttaatgagctttgagggaaatcataaatgttcccttttgattataagaacatctttcctaatgatgtaagatgcttttttaaaagaaatactg

SEQ ID NO: 748096 - DNA, 641 bp, Homo sapiens
ataacctgatatacctattttgctacctggctacttccaagtaaatttatcagtaagagagcagactgtcctgaattctctcatgttatagctggttgttctgagaaagacactgcaatctacattcagttgtatacggtccctaacaacatcattatcaatttcccttcccagttcactcttgatcttctcctaattatgtatrtattttccaagtgtttttgtatccttttcatgtatgtttccttgttttgctattaaaaatgtaagttcattgagggaaatcactgtatcatgcaatcatgttggaattttgggctttatcaacacaagataggtaaatatattatttgcaggcaatgaatgttgttaactgaccggcaaccatttatttcctaaataaaaatgtcacattacgaagtggattttgaaagactctgaagattactcctgaaacttggcacctcctccaagttaacatagtcacatttataggactataggtacagctaataaactgcccatctcctatgtttcaatttaaagatcttccaaaggctggttctctttgggtcaccacacttgccagtttggacttttgaaacctactaacatgggctgacataacaaattagcaacaa

SEQ ID NO: 748097 - DNA, 556 bp, Homo sapiens
gatgtgtgtgtgtgtgtgtgtgtgtgtgtgtgtgtgtgtgtgtgtacgaaggggtggccttttcatgtgagtctttttgattgttgaggaagaattgtggaggtgtagttggctttacagtgggtaaaagggagaaacacatattttcagaaaagaagagccatatggtatgtgagcaaataacaaaatcagaaattataaaattaaagaagaagggtaaaaaagctgtctcaagcatggaaagcaaagaatgatcactggtgaaccatcagaaatagtatacttcatttcagaccatcctcaggaaggagtgaagagggtgcaggaaaatgcttgactcaaatttttatacaaatctaaggctgagagtgtgcagaacagtgcttttcagtgttctacatggaawtactttcttttcactcattgttgtctggctcttcagagctccagaagatactaaaaatagaggagagtgaaaatacaattcaaagggaaaatatttcagaatttagtatacaatgaaagatagcctatatttaaaagcagaaattgttca

SEQ ID NO: 748098 - DNA, 632 bp, Homo sapiens
caatggggaaactggcctgatacccttgtctatgcagtccctgtacagggttcctgactgtggtcagtaaagaatgtcactttctaacaggtctaggagctccaagtttatcttgggaccttaagagagaggatcatccaactcacaggtgtttgaggatacaaacccatggttgggcttggctttaaaaagtcttatctgagattccttgtggaagagaattccatcaaagccaatccaaaagccctatgtagaaataattattgtggctgtactttatacaaataatcaggccaagtataaaactaaagtctatttaaacaacttagtcctatgatgattttttttttttaacaaacatgaggaatggagagagatgaatcatgtttcaaaacttatayttgtcattaatttctaaactcattacttgtttttaagtttttgcctacatttttagactaaccatgcttgttcgtgtgaaccaaccagcaatctctggttgcagctcaaaaagaacaagagggatgggtaatgtagaaatccagattaatattctagttctgagcaattatcctgcagatcctgccaggtgatggaataaataggatccgcatcacccagaggtttctttt

SEQ ID NO: 748099 - DNA, 613 bp, Homo sapiens
gagcagactacaaaaagcctgaattgccataaatacaacattaagggtgattgtggtgagagttcagagaaagacaacaaagtgaggaaaagtttagaacttcttagaaattggttaagtggttgtgaccaaaatgctgctagaattatagatgataaaatagaaattaaaataaattaaatatttaaaaaataataaagaaatataaatsgtgaaggctgttttaatgaagtctcttcatggaaatgaataaaaaacttattgggaactgaaggaaagttcatcctttttaactatgggaaagaatttggctgcattttgtctatgctctaggggtttgtggaaggctgaacttaagggtaatgaaatagtgcatctggtggaagaagttttgaagcaagaaagcgctcaggctgctgcattgttacctctaactacttacagcgagcttctagagaaaaaggaaatagagcaaaaagatttggaaaatttgcaatctggctatctgatagggaataaaagactattttcagagagaaacccaagggtgcagccaaacagactgcttactcttagtaacattatcatatataaaagggaaccaggtgctatg

SEQ ID NO: 748100 - DNA, 682 bp, Homo sapiens
agttattaaaatggttggggagggagtctgaaattagatggatccctggttctagagccacaattttttttctattaatctgagaacagggtaaaataaatgggaatgtgttgcttaatggatactatgattgagtagactggttaaacttattaagagggttaagaaatgagactcttcacgtagaagaaaagagtatgagctttaaaatcagatgaaacatgctgtgcatcctggttgccccatgttgtagcttgggtgcttctagtaccctcttggagccttgggattctcctatataaaaggatttggttgtaatgattaaagatcacagatggaaagtccaatatatggctggcattcaatatgagaatctgggaaataaaaccacatgaaaggaataatgaatgatgaaaatcacagtgttcccctgccaggcctttggcttttaaataatgactcaatccgaaggaccgattttgtaaaatactagacaccagcaatargggccttttagtgatctacacgtcccaccgtgtgggtggtgagcatattatgtgttcacacagaactatgtgaatgtagacttaatcctagtgacaattgtgtgggagctataaataaaacaatgttttaaattaataacatttagtatataacttggaacagaatatgcagacac

SEQ ID NO: 748101 - DNA, 640 bp, Homo sapiens
cttttggaatgatactgtagaataatgtttaattacatgcaaagatgttaattatatactttgcatgagaaaatagttaaaaacagcatatactacacgaacttatatgcaaaggaatatacacataaatatatataaatatagaacaaagattgaaatartgtatacaaaatgttacggtatcttatgaaatttttatttactttcttttttgttttctaaattttctacagtgaatgtatatatatgtataatgaaaattaaaattattaaaaatatttaaagtcaggaaaaaagctggaaacttggaagatatcttgaaaattgcatgatttctgaaataaatatttcaggatgaattatgctttatatctccttcctttctctaaaatgtaaacatttttgtactttctggtgaacctttctagaagataatttgaagacacagctctcctctggtatggatcatgtgattttccaaaaccatgactcaaacatatttggccattcatagcaagtactttataagctcaaacaacttgagcctttaagtaaagtaagaagggtaagtaaaggagaaggtcaaagaaattatatttcttatgtttcaagtattaaggcttttgaagattttgcctag

SEQ ID NO: 748102 - DNA, 595 bp, Homo sapiens
aaatgcctttctaaacagccctcacattatgtctaaatgagaactatcttattcacacttcttcaagtggccaaagaagaaaatctgaaataaggggtgagaagcagaaaatctagaggttctgacctaagtgggtcctgcttctgacttataaggtgccattaagggaactatggggcacgttgttaaatccaaaggctatactgtgagccttggagagcaactaagactccttcccccataatctctgatagtggtggtggtggtgatgatgatgatgatgatatcacctgagcactgattttgtgccaggcaccgtgctaggcacycttcacatggattatctaatttgatctttccaacatccctatgaggtagatagtaatattatccccattttacacatgaggaaactgaggcacagagatagttaagtaccattcctaagttctcagaaatggtaacttgcagaaccaagctataaacctaagtctggctgaagctgaagacctttcatccttatgaatataatatatctagatcttccaacaagattttttttaaattttgaaaacaaaactccctaatggacatt

SEQ ID NO: 748103 - DNA, 597 bp, Homo sapiens
tctcttccatctggctgttcatctgtattctttgcaatatcctttataataaatgggtaaacataaataaagtgtttccctgagttctgtgagctgctctagtaaattaaaggaatcagaggaggggggtcatcagaaccccaatttatagccagttggtcagaagtagaggtgacaacctactacagttgagtatccctaatctgaaaatccaaaatctaaaatgctcccaaatccaaaactttttgagtgccaacatgatgccatagtagaatattmcacaactgagctcacgtgacgggtcacagtcaaaatgtagacatacaacacagtttatttaaaaaattttattggccgggtgcagtggctcacgcctgtaatcccagcactttgggaggctgaggcgggcggattacctgaggtcaggagttcaagaccagctggctaacatggagaaaccccgtttctactgaaaatacaaaaaaatagcagggcgtggtagcgcatgcctgtaatcccagctactcaggaagctgaggcaggagaatcgcttgaacccgggaggtggaggttgcagtgagccgagctcacaccatt

SEQ ID NO: 748104 - DNA, 575 bp, Homo sapiens
atacctatatctttctacacagaagatatagtctctatatatgtccatattatgtcaaatttagcaatgtattaaatttagtaaaaataaattaatcacatcatttagagaaaggattcccatgactgaaaattcagtggttcttctcagggctaagactgggatgaagcgagcaaggtgcttctgctgcaaaatttgataggycctccgtccctccctccctctcgggagctagacctgtactggcatgaccccgagagggagcacatgaggtacttacattttgcatgtgggatgcctcactctggtcagacaagttcatttccttctggggtccagtcaatgctgccatgatcgggcaaggctggttattctcacagatgaggcaaagccaaccatatgagccaccgggagccgtcctgtggcctgaagatacagggctctcctgggcaaggacaggcagcactcgtttttgtcacacttgtgttattaaaacctgtgatagtagcctggttcagttatcctaaatagcactgaacagctcttgccgctggagtgaatccagccttccttat

SEQ ID NO: 748105 - DNA, 575 bp, Homo sapiens
atacctatatctttctacacagaagatatagtctctatatatgtccatattatgtcaaatttagcaatgtattaaatttagtaaaaataaattaatcacatcatttagagaaaggattcccatgactgaaaattcagtggttcttctcagggctaagactgggatgaagcgagcaaggtgcttctgctgcaaaatttgataggtyctccgtccctccctccctctcgggagctagacctgtactggcatgaccccgagagggagcacatgaggtacttacattttgcatgtgggatgcctcactctggtcagacaagttcatttccttctggggtccagtcaatgctgccatgatcgggcaaggctggttattctcacagatgaggcaaagccaaccatatgagccaccgggagccgtcctgtggcctgaagatacagggctctcctgggcaaggacaggcagcactcgtttttgtcacacttgtgttattaaaacctgtgatagtagcctggttcagttatcctaaatagcactgaacagctcttgccgctggagtgaatccagccttccttat

SEQ ID NO: 748106 - DNA, 607 bp, Homo sapiens
tgctgcttatcgatagttggaaatactgttttcctagtcttatgattttaatgaagatcttataaaatacacagtaggaatttagtacaccaatagaagatttttcatgctcatttaaataaccttttgaccttcatgccatgacattcccaatatatactttagacatattttttcctcaaatttaatgttgtatggaattctaaaaagggcacataamctaattcttagaaatttgcttttaaaattatataggggcacacagacatcttagtccctaccctcttcctctgtctccttttccttctttttctctcatctttctccctccctttccttcactgtctctctctgaaagttataataaatttggagaagttcagccttgttgaacgaggaagcagagtgaatttcaagcctttatcattcccagccttagaattgaaagatacgggccttttgacttgggggagtctagagagaaggccagaagcaagtgaccctccttctactgtttgtgtctgagaaagcccagggagtcggaatggtctgctacggtcacatgacagacaaatgcccagtctgagaatgctgaggaaaagcatga

SEQ ID NO: 748107 - DNA, 616 bp, Homo sapiens
tcccacaggtaagaaataaatatgttattcaaggtcagacagagtaacaacctatcttcttaactttctgtttgtaatgaataccattaatacaattctcttttttgtccacaatcaccacttctgggtgtgaaaatcagaagagaaaagcacataggaatagatatcaatatacagatatctccctttccatttgcttgagtaatggaaggccacagtggtaaatrtttcaatttttaccagcaaccctcagaaaaggagacaaactccccagtgactcttggtagctacactacccagctggttcttgctctagacaaaagtgttttaattttgtgcatggcccccttggtagtcaggggaatcctatggaccccttctcagagtatgtaaaacaaatgaataggattgcaaaaggagctaattatcttgatatactcttatcaaaatattttctaaaacattctggtgcatagtaatgcatgtgctttttcatgtaacattaaatagcaagtgtcagtggcaggagtaacaactatcacaattttaaagtagtgattggtataaatgatattttgaaatatctgcaaccattataatgttatatgaacatatc

SEQ ID NO: 748108 - DNA, 512 bp, Homo sapiens
gtctgtactccacagaggagattcacggtgattgtttagttgaactaaggcagcgctggcccatgaactttctatgtaactcttcagagcatcccaggcatttctttgccagtagaggacactcaaagtttctagcaagttgatttccaaagtcataaactttctggacaatgctgtattcattaatcattgaaatgggatccatctttatctaatccctttctcctctcctaccaagtttcttggcagtttaaagcagatctggtaagtactgtacccaccacaaccactggattacatcccccatctggctttttactaagatttgtcatggtcaaatatgtggtattctattgagtgcgttaraaaattaagataaatgacaatagatttactctaacatcttttatactacaaacattatttgtaaaattctgcactagtctctagctaaattttctccagtcttccttatctagtgttaattctaagaaaccatttttcaataaata

SEQ ID NO: 748109 - DNA, 670 bp, Homo sapiens
gtcatggatcccccattttgattcctgttttggtggaaatacaaagtaacctaaggcaggtaaaggtagcactttctccagaactatcctcaaaattgatgttttgtctcattacacacacacacacacacacacacacacacacaaccacgatccagtagatatgtgtaaacatgacccaagaagaatgaaaagaataattacagaacaatgttaactttaaaaaaatcacaagatatataaatttagaaaggaggctttattttttgtaaagagtgacagcctgcaaagtggccatcctgcagctgggaagcacagcctccagcaaagaccagagacaaacattcagagggagtgagaggtaagacaggaatttaagtttattgagtggccgaacacacatattcaatcggttgtaggatgagctatgmatattcatgaagatagtcctgatgcatgcctactgaacaaatatgcatgttacagatgacccatgtttaccttggggtggagacttaacatttaaatgtattacaattaggacctatgcatcaaaaggtcttgtcaggacataaagacactcaagttgtgcagcctctgtaaactcacccgaaccagtcctcgattggtagccttcctaacaagagaaatttactgagaccaggcacct

SEQ ID NO: 748110 - DNA, 623 bp, Homo sapiens
attacatagggtgtgaaatatcctttgagactccttcttgctccctcaggttacctgactttcccgtcagctccccatgcacaggccaagcagatgatacagaagttactgaagagaaaggtaccacagtcagatccacctaattcttatcaagttgtaaagagggcagaatttgcttggcagctcttccactggggaaataaaagcacctgggaagggagagaagtgtggaaggaggacatttgtggagctccagacacctaatggttccctcagcacaacttgcaatggtatgcggagttgcaattcctggccattttttttctcttggtgaatttgggtggtttaagtattgggactggagccagttatccatctggggtttgctgggcagcaggatctgctgacctggcctggcacgagcagcacagtgartgggtgagaagttggcaaggatcactatatatttgctgtagagccaaggtagtgtccattgatctagaccaggctgggtcaatggaaccaggaaaagagaagccacttgtatacttatatacttacaagtattcataacagaaggaatttagggcaaggaattggttacataagtgatgaaggaatca

SEQ ID NO: 748111 - DNA, 597 bp, Homo sapiens
tcacattattttattataagaaaaggagatatgtttaaacatcaatctttttctcattatcacctctgccattgggattaatctcatagtgaatttgccaagcgctctctaatgtttagaaatttcagaaaaaaaagagctgtgttgcttagagtttggtccattctggccagttctaacaaagttaggcaaagggagagtggtacaatggttttctgcaaattcatgatgatgattaaatatctcactttctctggctatttgtgcctgtgcaaacagaactttgcaacagaatgaaggagctgagattttagagctgaaatagattttttaaaaatagatttttgagatgctccagacttcttattgcatagatggataaactgaggcccagcaaaaggaaatggctggaataaatcctgactttgcygcttcctgtgtgtgtaataaatagacaagtcactcacttgtcagttgccatctctgaaatgcaggataataataatgcctattttttgtgtggttttagggaagagtaaatgcaagagagcatgaatgggaagcattgagcccagcactggacacccatgtttgtac

SEQ ID NO: 748112 - DNA, 523 bp, Homo sapiens
ggaaggaatacaggtcatctttattttctttacattttctacattttcagaacttttgcaaatagtgtatataaaccagaaatgaaaataaacgaaataaaacaaaacaaggtatgtatgtgcaaatgtattctaaatgttatgaggtcccaattccactgatgaggattcctagggtaagaaagctcctagggagggagarctagcaagatggccaaataggaacagctgcagtctgcagctctcagtgagatcaatgcagaaggtgggtgaattctgcatttccaactgaggtacccagctcatctcattgggactggttagacagtgggtgcagcccacagaaagcaagacaaagcagggtggggcattgcctcagccaggaagcagaaggggtcagggagctccctcctctagcaaagggaagccatgaaggactgtgcagtgagtaatggtgcattccggcccagatactatgcttttcccattgtcttcacaacccgcagaccaggagattccctca

SEQ ID NO: 748113 - DNA, 628 bp, Homo sapiens
tttgggctaggaggagctaatatgccttgcacatgatgatagcttggagaatgtaaaaatgctgagctgttatcacacctaatgacatgatacctgcaaagacgtagtgtgtgcatggaacagcgtaatggagtcctacagccttaagccaggatttcatgtgtgatacacagtagtcayggctgaaatctttctccagtgtggctgctccctcctcattgaacacaaagcaagttatacaattcagttttagcaaatgtcttgtgagatgcgctagcacaatcttaaagatcatgtgtgggtaaaaagaacaacctccacccataccaagcattttcagtgccaggccctacctgaaacacaaccgtgatctccatttgagccaggaaaacccgaaccatggggagccgcagagcccgccccccacccagtgactctccagtgtgtcagtgccagggtctgaaggtactgaggctttgcaggcatcatctcaagccagcagggtctgaagctactgaggatctgccagcaacatctcaagacggcatggtagctccttcccagcacgccacgctgccctgcacccactgctagcttctgtctatactgcacttggcactgagagcaa

SEQ ID NO: 748114 - DNA, 626 bp, Homo sapiens
tctcctgatgtttttctcttgattagactacagttaggggctttgaggaagaagaccacagagatgaagtacgtgtctcatagcatcatattgggggtacgtgatatccccatgacctatcactgccgatgtcaaactcggtcacttggttaccgtattgtatgccagatttctcctctgcaatgctcctgtcattctctgtccacactctgttctttggaagcaacccattaagtttagttcaccctcaaaggagagattaagctccacttccttgagggagagtattgacatatatgacttagaattcttctgtagagaggaatgatgytatgtcatgactcaagacaaaattggggccctgttagtaaggaaataggggagcatgagattccaaccctcaattgtaaatggggaaactaacatttgcctgacctatgctgataagagaatgtctacatctaatgttggaacaagcaggagcttggaatagtggtggggtttttaccacaggttggcaacttttgacaggcgagtttattcattcaaggcttaaagactagaggctgggatagagggaggtacacagtggtgagtaagggtgtagcgaacatacttcattgtta

SEQ ID NO: 748115 - DNA, 601 bp, Homo sapiens
gctaggatccctctcctctgaccctctgttccagccatctggggcttcttgatgttccccaacaggcctagcaggccctgtctcaggtctttgtgttgccattccccttggccgtgggtcttccccggatgcaccaggacccacggctccccaggtgtcatctcatcataagaaccacccccaccaactgcttgcatggcttaccctsttttctcaatttgtttttctccatagcactactcttgtctgatgcaggtgcactctatagtttacttattttacttatttgtgctgtttgtctttcccctttctggctggaagttcctgaggtaggactgttatctatttttctcttggcagcatctcctgtgctagggggacgatctggatcagtgcctggcccatggaagactcctgacccaggcttgttcactgaatgaaggcattccacatgttctgtgatgcgggcaagtcattcattcatttatgcatttagaatgagctttgagaatatggcagcctacaaaatggacatggtcctgccttcagggagcttctggtccagcctatggcctcttgcctggaaagagatgttaccacg

SEQ ID NO: 748116 - DNA, 601 bp, Homo sapiens
gctaggatccctctcctctgaccctctgttccagccatctggggcttcttgatgttccccaacaggcctagcaggccctgtctcaggtctttgtgttgccattccccttggccgtgggtcttccccggatgcaccaggacccacggctccccaggtgtcatctcatcataagaaccacccccaccaactgcttgcatggcttaccctgttttctcaatttgtttttctccatagcactactcttgtctgatgcaggtgcactctatagtttacttattttasttatttgtgctgtttgtctttcccctttctggctggaagttcctgaggtaggactgttatctatttttctcttggcagcatctcctgtgctagggggacgatctggatcagtgcctggcccatggaagactcctgacccaggcttgttcactgaatgaaggcattccacatgttctgtgatgcgggcaagtcattcattcatttatgcatttagaatgagctttgagaatatggcagcctacaaaatggacatggtcctgccttcagggagcttctggtccagcctatggcctcttgcctggaaagagatgttaccacg

SEQ ID NO: 748117 - DNA, 579 bp, Homo sapiens
aggttgatgcaaacctaattgcggtttttgccattactgcatttacgtttgcaccaaaatgatatcgttatccatttaataaaaaaactgaggcaatgagcaagtttaagggactcgcctgggaagtcttggagctttaaaatggaaccaggagtagggtcatatcatatctctttattattttttttgagacggagtctcgctctgtcgcacaggctggagtgcagtggtgcgatctccgctcactgcaagctccgcctcccgggttcacgccattctcctgcctcagcctcccacgtagctgggaccacaggcgcccgccaccaygcccggctaattttttgtattttgtttagtagagacggggtttcgccgtgttagccaggatggtctcgatctcctgaccttgtgatctgcccgcctcggcctctcaaagtgatgggattacaggcgtgagccaccacgcccagccaggccatatctcttaacctccctactggagtctttccacttcagcctgcttgccattttgcagtgtttgaaagatacccactcttagatagttctcttgatctaaag

SEQ ID NO: 748118 - DNA, 645 bp, Homo sapiens
ctatatgaatggaccacaatttgtttctccatctactgtttgtttgtttgtttgtttgtttgttttgagacaaggtctcactctgtcagccaggctagaatgcagtggtgtgatcttggctgactgccacttctgctttccaggctcaagccatcctcctacctcagcctcctgagtagctgggactacaggggcatgccaccacacctcgttagttttgtttttttttgtgtagagatggggtctcaccatgttgcccaggctggtcttgaactcctgagctcaaaagattcacccacaatggcctcacaaagtactgggattacagctgtgagccactgcacctggcattctatctactgttgatagatgcttggattgttcgaagttcttgtctattacgagtaaagaactttcttgcacatgcctccttggagaacacaagccctcatttctattgggtatagatttggagaagaacttgctgrgtcatgtggtgttttagctttggtaggttctgccagattgcattctcgtgaggccaagatcctgttcctctatttcttactctttggggggctacataagcacatgctttgccccccttctctcccaacacacagtaaagtgcctggcacatagcag

SEQ ID NO: 748119 - DNA, 585 bp, Homo sapiens
tgaacagtattaaaaggtatctttagaaggtgataaggccatgaggtctctgccctcgtgaatggatgaatgcctcttgaaagggcttgagggagtaagtttgccccatttgtcccttttgccatgtgagaacactgcatttttttccctctggagtacacagtctcaaggcaccatcttgaaacagagagagcagccggcaccaagcactgarccctctgccactttaatcttggacttcccaggctccagaacagaaagaaatacatttttattatttagaaattacccagttttgtggattgtgaggccagaagttcaataacagcctggccaagatggtgaaaccttgtctctactaaaaatacaaaaattagccaggcgtggtggcaggcgcctgtaatcccagctactcgggaggctgaggcagagaattgcttgaatccagaaggaagaggttgcagtgagccaagatctgcactccagcctgggcaacagagcaagacaccgcctcaaaaacaaaaaaaattacccagtcctacatattttgttatagcagcacaaatgaattaacacactatctcg

SEQ ID NO: 748120 - DNA, 539 bp, Homo sapiens
aactttgtttatccaaaggcacagaagtcataataaatgaatggatgcgtaaatacgcccatttttatgaagcattaaaaaaaaacaaacaaaaccttttctttcttagtagggtgctataagaacacggtttcctgtttcctacatgtagtgtagggacaagccaacatttacttctctccaaactggtgagctaattaacctcaaacctgagttgtgtagcactcaaggatacgggtctacatatggkgagcaaattatttaatgaaacttacttgtctgcaatttctctacactttaggaggtattttatgtcacttgcctggccagacacagcatgaaatgagtgacatagtaaaataaaaaaaaaaaattgttagacatagttcaacaactaaagaaaaaaaataagagaacttaaactaaaatataaaattgaacttataaacttaatttttatgaaacaggatacaaattaaagtcagaattcagtaagaagattataaaatgcccatatcaggttttgaaggggtgtcacc

SEQ ID NO: 748121 - DNA, 645 bp, Homo sapiens
catggatttatgtgtctgtgttcgctattctgttccactagcctatgtatctgtttttatgccattaccatgctgatttggtaactacagccttgtgatatattttgaagtcatgtagtgtgattcccaacttcgttctttctgctcaggattgctttggctatctgagttcttttgtgattccatataaattttagggttgtgttctctatttttctgaaaaacgtcattggtattttgatagggattacattrgctataaattgctttgggtagtattgttattttaagaatattaattcttccaattcatgcacatgaaatatcttttcattttcttgtgccctcttcaatttctctcatcagtgttttatagttttccttgaatagatatttcacttctttgattaaatcaattcctagatatgttatattctgtgtagctgttacaaatgggattgctttcttgatttctttttcagactattcactgtttgcatatataaatgctactgatttttgtgtgttgaatttgtatcttgaaacactattgaattcatttatcagttctaacagttttttgggtgaagcctttagtttttctaggtataaaatcatgtctgaaaacaagactaattttactac

SEQ ID NO: 748122 - DNA, 645 bp, Homo sapiens
catggatttatgtgtctgtgttcgctattctgttccactagcctatgtatctgtttttatgccattaccatgctgatttggtaactacagccttgtgatatattttgaagtcatgtagtgtgattcccaacttcgttctttctgctcaggattgctttggctatctgagttcttttgtgattccatataaattttagggttgtgttctctatttttctgaaaaacgtcattggtattttgatagggattacattggctataaattgctttgggtagtattgttattttaagaatattaattcttccaattcatgcacatgaaatatcttttcattttcttgtgccctcttcaatttctctcatcagtgttttatagttttccttgaatagatatttcacttctttgattaaatcaattcctagatatgttatattctgtgtagctgttayaaatgggattgctttcttgatttctttttcagactattcactgtttgcatatataaatgctactgatttttgtgtgttgaatttgtatcttgaaacactattgaattcatttatcagttctaacagttttttgggtgaagcctttagtttttctaggtataaaatcatgtctgaaaacaagactaattttactac

SEQ ID NO: 748123 - DNA, 600 bp, Homo sapiens
gttacaaatgggattgctttcttgatttctttttcagactattcactgtttgcatatataaatgctactgatttttgtgtgttgaatttgtatcttgaaacactattgaattcatttatcagttctaacagttttttgggtgaagcctttagtttttctaggtataaaatcatgtctgaaaacaagacwaattttactacttcccttccaattttgatgccctttttaactttctcttgcctaattactggccataacttccagtaagtattatgttgaataaatgtggtgaaagtggacatccttgttttgttctagatcttagaggaaaggctttccattttttacttatttaatacaatgttagctgtgggtttgtcacatatggtctttattattttgaggcatgttccttctatacccaatttgttaatggtttttattataaagggatattgagttttattgaatgttttttcagcatctattgaaaagatcatgtggtttttgttcttggttcagttaatgtgatttatcacatttattgatttgtgaatgttgaacgacccttacatccctgggataaattccacttgatca

SEQ ID NO: 748124 - DNA, 652 bp, Homo sapiens
ctgggcacagtggctcatgcctgtaatcccagcactttgggaggcccgaggcaggaggatcacctgaggtaaggagtttgagaccagcctggccaacatggcgaaaccccctctcttcwaaaatacagaaattagctgggcatggttgtgcatgcctgcaatcccagctactcaggaggctgaggcaggagaatcacttgaacccgggaggtggaggttgcagtgagctgagatagtgccattgcactccagtctgggcaacaagtctctcaaaaaacaattaaaaaaaaaaaaagcgtctacactttaactctatccctccttacattttgactttatgttctctcaatttacatattttaatatagcctatttttttaacaggttgctgtaggcattactacttttgtttttcatagatttgctttttggattttatgctagagctatgattgtattgcacaccacaattttagtgttagagttttctgggtttttccttatacttaattttgcttgttggttttgggccttcacacatattttctttttgcatattagtgtttttttctttcagattaaagaactccctttatcatttattataagctggatttggtggtggtggattctttgagcttttgtttgtctg

SEQ ID NO: 748125 - DNA, 578 bp, Homo sapiens
tggcccatctcagctttcaacaagccttcttcattaaacttaatcatttctagctttttatttaaagtgagagatgtgtgactctactttcacttgaacagttagaggtcatcgtagggttattaattggcctaattttaatattgttatgtctcagagaatagcaaggcccaaagagatagagagagagagggacagaaaaatggttggtcagtagagcagtcagaatacacaccacacttatcaattaagtttgccatcttatatggtcagagctcatgacacccaaaacaactacaatagtaacatcaaagatcaatgatcacagatcactataacagrtataataataatgaaaaagtttgaaatagtgtaagaattactaaatattacactgagacacaacacaagcacccactattgaaagaatggtgccaacggtctcactcaatgcaggattgccacaaaccttcaatttgtaaagaactcagtatctgcaaagtgccatccagcaaggtatacctgtatgttctcagagcacaatgaaattaaactaaatatccgtaacagataccagg

SEQ ID NO: 748126 - DNA, 582 bp, Homo sapiens
ggctttggaagggtagatcaatatgataaataaatcacattgactttattggtatttggctgaatattaatagacttatttggtctgcttcgtgcagactgtcagtatacaccaagcagaattcattgacgataagctctcaggcagtggctagaagcttatttcacctaagggcattgagtcaacactttsccaaagttattgtgagcagataatgcccagggtattatttgaggataaatggcagtaccaatttccaatacgtgaatgaagcttaagtaggacttcttccatttaaattagctcatctttcatttttccatctacgctaatgattcccagcctttttatctggctggtcacactcaacaggcacagctcactatggcaggaaccctcaacggagaacgcgtgggctgagggagggggcaatccctcaatcagagggatccgtgaacactcaactgggatgcctgaggctatttggatttgcgcttcattcctttccctcctcagtgagtcccctgagaagtggcctccccaacactgtgcagggctctgtggcagcgtgggagtagtcta

SEQ ID NO: 748127 - DNA, 705 bp, Homo sapiens
gtatacctagtaatgggatggctgggtcaaatggtatttctagttctagatccttgaggaatcgccagtctgtcttccacaatggttgaactagttgacagtcccaccaacagtgtaaaagtgttcctatttctccacatcctctccagcatctgttgtttcctgactttttaatgatcrccattctaactggcgtgagatggtatctcattgtggttttgatttgcatttctctgatggccagtgatgatgagcattttttcatgggtctgttggctgcataaatgtctccttttgagaagtatctgttcctatcctttgcccactttttgatgggttttttttttcttgtaaatttgtttaagttatttgtagattctggatattagccctttgtcatatgggtagattgcaaaaattttctcccattctgtaggttgcctgttcactctgatggtagtttcttttgctgtgcagaagctctttagcttaattagatcccatttgtcaattttggcttttgttgccattgcttttggtgttttagacttgaagtccttggccatgcctatgtcctgaatggtattgcctaggttttcttatagggtttttgtggtatgaggtctaacacgtaagtctttaatccatcttgaattaatttttgtataaggtacaaggaagggatccagtttcagctttctacat

SEQ ID NO: 748128 - DNA, 601 bp, Homo sapiens
tctctctgccgccatctccttctgcactgccgccatcttactacctgcttcctcactgccgccatcttacttccttttttctctgctgccattttagttcttctgccaccattcggctgccattttaattcccattagttcccatttgttcttttaaccctgcccagctaactccttggcttccatcttacccgcattcttatttccacctgcctatagtgccataccagtccactgcatctacaactcctaacacattcgctgcgggcagygatatccactaatcctggatgaggcagcggagggcccccaaacccctatccaggacttagtaaagctggcgttcaaagtttttaattcctgagaggaggcggctgaggtacaacgacaggcaagcctgaaacaaaaagttcagctccaaacccaagccctggcagctgccctgcaaccggcattccctaagagccgcggcaggagaggtagaggtacaatctcccgggccccgtctggcgtctgcttcaagtgaggcaactcaggacactgggccagccggtgccctagccaacagcaaccgtcctgcccgccttgcaactgtttcaag

SEQ ID NO: 748129 - DNA, 605 bp, Homo sapiens
cactctagcctgggtgacagagcaagacttggtctcaaaaaaaaaaaaaagaatttcgccacgctccgcagacacaggcattccacacccttgtccagactggtcccaggggaaagaatctccaggctaaagagccgtggtcttccagggcctctggccaggtatctcaatgtcttcacccatgtgaattctggacaagggcttcctaccacatccccaagtttgcccttccccccataccctgacctccatttctytactttacctctcccagcccaccatgggaccatgtgatcagccacataggcataaactagcacacagctaccttagggtagggccctctagggtggccaggtggctacctcacaaatcagtctatggctctcacagaaactagaatttgcttgggcaagaggtatcaagagcattagaaatatttatactttttcattcagtaatggtataatctgaatctgggctgagagtctaagaatattgagctgtgtgagaatgcacacagctgtttattacatttttttaagtaatggaaaaattggctagaatttaaatatacaccagtagggtagatgtttaataaacta

SEQ ID NO: 748130 - DNA, 637 bp, Homo sapiens
atcttttctccctggaggataaataggaccccttgcatctagttgtttgtaggtaagaagctggcaagagtcaagacaggtaggaccctataaaggttaggaagaaaaccactgcttcctcacacacagcatgtccccaagccagccagccctgcctcccttctagaacctgcccccgagcttccctggagaagcccttcgccaagtcttcccatcagtgagtttcaatcatcactgaggtcttggttcaaaagtcacaccctcaggaagtcctttctgagctctcctaagtaacgaacctgattcccctccacattgcatctccatcttgcaatttcttcagagcactcaccgtgtcttaaattatctagtttgtttatcttatttattttgaagctcccctctaaaaataagtttagtgagggcagagaacccccagttcatgtccacattcctggtctggcccataatgggcactgaacaaatatttcttgtagagggkgtggattttggcagcagaatgtgccatgcactcaggctctgctgtgcgtcctcaatcctggcctttaatagtgcctctgtttctcctggtctcaacccttgcactctctgagaggagattggccacttcagtttt

SEQ ID NO: 748131 - DNA, 641 bp, Homo sapiens
ccagggttgacaactgataaaagaccctgaatgggagctgtgacctgggttctagttctaattccagcgttatccacaaaaaccacataacttctaatatcacaaccagactactctggattttaatactcccgtggtgtggcactttttccacgtttacccttgtgtcttggtcaaattccwagttgggtaattactctctgcttacctaaattcctcctcctattttagatgtgtaggttattttccacttctaaaacctgccttccagtgttcctggctctaagaactgccatatcccttttcaaaggtagctatgtgtcagtggtcagtgtatatatgctatttgaacacaccgacctgctgtaggaatatttaatgaatcactactcgtaagatgttttaaattttctcacagatttttttctcctactttgtttaaaagtcatactgttattacaatttttgcaaaaaaaaggcagtaaataattcatgttttaagtacagttgttttcaaaattccttttctatgtggtttcaggcatattttaccttctctaatacagaaatttctgaaaatgtagtatgaatccataagttttttatgttaattcacttattttcccattgactcactttat

SEQ ID NO: 748132 - DNA, 454 bp, Homo sapiens
agtaatggccagccttatatatgtgtcattaacgttttaattttggccttaaaataacatcttagaaggtggaagtggctatattcattaggctttctaggtctcataaaaggaatttggcagaaaatgtgtttgacccagcaattaaagtttttttctaygtaaagacaaaacttcctgaactccagctgaaggcagaaggaccctgacacacagcagaaagaacctttaggacaattatgatcagacttaggggttagagatagaaagaaaacagacaaaagtctatgaacacagatagtccaaaaagcaagataaattttcatggaaggacaggattcacatgcaaagaagtgaaaagaaagcataaacataataggatggttgttacatgtaggtgaaatgcagagaagcataaacataataagatggttgttatttgtagggaaaaatg

SEQ ID NO: 748133 - DNA, 638 bp, Homo sapiens
ttaaagttaaaattgtctgtttaaaaattgggataatataggcattgtaacctaggaatattcttttgaactccagagactcatgaaatggatgccagtcttgtatttctacaaagaaaatacatttatgtaacaaattttacatgaaaatggatgatttaatgttattcrtcttctggaaaccaacacataatagcaatacctctcagtaagtctaatcttcataattccatcattctttctaaaagattttaggcacttaatcagtccttgtcttgtctcttgaaaaactttttacctaaacatctttaaaatcttggtttctaaggagaaaaaatatgaagctgcaacttagtgactactaattcatttaatctataaatcaccaagaacagaaaaataatacatatcatttctagagcttgcaacttccataaataaaaatttcattttctggtactgacaacctgagtttctactaggtagtaagccctcatcatgtctcttgctgtttatggctaaagtaaatattaaagcccgcatacttgatagatctgcagtggttctcttttcctctcagcttttgaaatgaaataagagttcaataaaatggtgcactacaagtctgttgttcagat

SEQ ID NO: 748134 - DNA, 480 bp, Homo sapiens
gtgagatgtatcaataagaagggaaaaagaaaacaataaaatgtaatacccagaattattaaccaccatgtgctttctcgatcaaatcctcaaataccacttgctcagtattctggaagtccttccataaaagttaaattggaggaagtcacagtttttgagaactctgcttggaaacagatgcgaatgttggcttatcctttcatgtaatgttttctggcattatttagtgagtaagtgaaggcattgaattgcatctggaattgaagagaaagctggaatacagacttcttaacaggtgttccaatttataataatarctgttaacacacaccttcatttttacccagattgaagatgttggctagtcttcaaaagtttctcttacagaaaattctgtagtggtttaccaataccaaatatatttggcattaattactttgtacaagggtgggaagatataccagctatgactagaaa

SEQ ID NO: 748135 - DNA, 575 bp, Homo sapiens
ttttcctttgaatatataccactgctgggccaaatggtagtttccctctaatatctgatgatcctgagacggctgctctagtttattcatggtgtatttaaaacagattaatagaatctgtttgcatatagttttatgattttatgacatctgggtttcactgtaagtgatttggccagtgcattacaagttcagtttcttaagaccttttccttgggttgtctagaatgcccacagaagacatttccaaatccttgcctgagartgaagtcattctggaactcaagtgaagggagaaggctgagggcttcaaaattcaatgtgtgagcatttaccgaaaccctcctttttcagtactgggcattcattttcagctgactggtctccttcagatccttgaacctctggtgtactctcttagaaaatatatcttctgtcttctgtctggttgtggaaaaggcaatatcctgtctgtatggagcagaggacaagatccaggagtctgacttcttcttaaacttttaatcaatcctgttttcacactacttttacccctttttctagtttatttgtag

SEQ ID NO: 748136 - DNA, 633 bp, Homo sapiens
aagaggttctttaaaaacatttgggacttctgtgtgcctgaccaggattatctactagagggcaggttctactcagctctctggcttggtagcccagagtctggagtttcttggatatgctttttatgattctcttaatattgtcactgaratttggtaataacaagcttacacataaataaataaataggtaggtttggggtttccttgttttatttgggtatagttttccaaaagaatatacctcttgcttcttgttgcagtaggaaaatgataggggctacttgctttggggttgggtagaaagatggaagtcttccttctcaccagacttggagatcatcttgctgcaccctggtctccactttccttaatagctggtgcttctggtttctaagccttgctgaggttctgcagggaggactggctggcttctccacggtagccacccctggagcctcccaggtatgaagttattccaccctgcacaatcctcttgccatgttcatacattgtgtttcagggttagagaagtctcctaaatccatagggtgtggggcttgcatttttatttctggttttcattatttgaggttaacttgtaaaagaagaaagcaatataacatttctttt

SEQ ID NO: 748137 - DNA, 633 bp, Homo sapiens
aagaggttctttaaaaacatttgggacttctgtgtgcctgaccaggattatctactagagggcaggttctactcagctctctggcttggtagcccagagtctggagtttcttggatatgctttttatgattctcttaatattgtcactgaaatttggtaataacaagcttacacrtaaataaataaataggtaggtttggggtttccttgttttatttgggtatagttttccaaaagaatatacctcttgcttcttgttgcagtaggaaaatgataggggctacttgctttggggttgggtagaaagatggaagtcttccttctcaccagacttggagatcatcttgctgcaccctggtctccactttccttaatagctggtgcttctggtttctaagccttgctgaggttctgcagggaggactggctggcttctccacggtagccacccctggagcctcccaggtatgaagttattccaccctgcacaatcctcttgccatgttcatacattgtgtttcagggttagagaagtctcctaaatccatagggtgtggggcttgcatttttatttctggttttcattatttgaggttaacttgtaaaagaagaaagcaatataacatttctttt

SEQ ID NO: 748138 - DNA, 633 bp, Homo sapiens
aagaggttctttaaaaacatttgggacttctgtgtgcctgaccaggattatctactagagggcaggttctactcagctctctggcttggtagcccagagtctggagtttcttggatatgctttttatgattctcttaatattgtcactgaaatttggtaataacaagcttacacataaataaataaataggtaggtttggggtttccttgttttatttgggtatagttttccaaaagaatatacctcttgcttcttgttgcagtaggaaaatgataggggctacttgctttggggttgggkagaaagatggaagtcttccttctcaccagacttggagatcatcttgctgcaccctggtctccactttccttaatagctggtgcttctggtttctaagccttgctgaggttctgcagggaggactggctggcttctccacggtagccacccctggagcctcccaggtatgaagttattccaccctgcacaatcctcttgccatgttcatacattgtgtttcagggttagagaagtctcctaaatccatagggtgtggggcttgcatttttatttctggttttcattatttgaggttaacttgtaaaagaagaaagcaatataacatttctttt

SEQ ID NO: 748139 - DNA, 633 bp, Homo sapiens
aagaggttctttaaaaacatttgggacttctgtgtgcctgaccaggattatctactagagggcaggttctactcagctctctggcttggtagcccagagtctggagtttcttggatatgctttttatgattctcttaatattgtcactgaaatttggtaataacaagcttacacataaataaataaataggtaggtttggggtttccttgttttatttgggtatagttttccaaaagaatatacctcttgcttcttgttgcagtaggaaaatgataggggctacttgctttggggttgggtagaaagatggaagtcttccttctcaccagacttggagatcatcttgctgcaccctggtctccactttscttaatagctggtgcttctggtttctaagccttgctgaggttctgcagggaggactggctggcttctccacggtagccacccctggagcctcccaggtatgaagttattccaccctgcacaatcctcttgccatgttcatacattgtgtttcagggttagagaagtctcctaaatccatagggtgtggggcttgcatttttatttctggttttcattatttgaggttaacttgtaaaagaagaaagcaatataacatttctttt

SEQ ID NO: 748140 - DNA, 517 bp, Homo sapiens
gaacagactttttaaaaaccgagactagaagacaaatgaataatatcctcaaggcttctgaggaaagcagtcaatttggatttcaaacttctatagccaaatgatatcaaactctgaatatctacttctccataaaagcaacaagaatactgacaaaaattgttgaaatcaactattttagagttctgaaaataaaacaaaggctygcagcaatccaataagtgtttatttaaaacacacacacacgtacacacacacatacacacacacacaccccaacgtgaatctgttttgttttaccatggcctagtcccaacccccttcccagttatgtggtagccttgacaacaaatagcccacaatcatggtgaatgcatgtctgacagccactagaggaaagaaaaatgaagttggagctccttcaaagcctgattcccacagaactgtcattctttggcctctctggtagtttccaggaagatcccacttacaatactatgtttatttgacctgactc

SEQ ID NO: 748141 - DNA, 517 bp, Homo sapiens
gaacagactttttaaaaaccgagactagaagacaaatgaataatatcctcaaggcttctgaggaaagcagtcaatttggatttcaaacttctatagccaaatgatatcaaactctgaatatctacttctccataaaagcaacaagaatactgacaaaaattgttgaaatcaactattttagagttctgaaaataaaacaaaggcttgcagcaatccaataagtgtttatttaaaacacacacacacgtacacacacacatacacacacacacaccccaacgtgaatctgttttgytttaccatggcctagtcccaacccccttcccagttatgtggtagccttgacaacaaatagcccacaatcatggtgaatgcatgtctgacagccactagaggaaagaaaaatgaagttggagctccttcaaagcctgattcccacagaactgtcattctttggcctctctggtagtttccaggaagatcccacttacaatactatgtttatttgacctgactc

SEQ ID NO: 748142 - DNA, 584 bp, Homo sapiens
ctcatctctaataaaaatacaaaaaaattagccaggtgtggtggcaggtgcttataatcccagctactcgggaggctgaggcaggagaattgcttgaacccagaaggcggatgttgcagtgagccgagatcatgccattgcactccagcgtgggcaatgagagcaaaactctgtctcaaaaaaaaaaaacttaaggatatgaagtttctaagcagaaatcatgtgtgaatagatggcactgccctctcccccactcacctttcatgaagataygtggagtgttagttgactatgaaatcactttcattttcccaaaaagtagcttaaacagggctttgaagtttttttgtagtttgcaggcttattatctctctggagagtaaatggtaatagaaattttgagcagtaaaaggtaagaaatcttacagtaacaaaatagttttttctttattttctttctttcctttcttttcttttttctttctgaatgaggcagggtcttgctctgtcacccaggctggcatgcagtggcacaatctctgctcactgcaacctatgcctctagggctcaggcgatcctccca

SEQ ID NO: 748143 - DNA, 511 bp, Homo sapiens
acttctatttgtttggatcctttttcttggttagactagctagtggtttattgattgagtttatattttcaaagaaccaatttttcattttgttgattctttgtattgtttttttcagtttctatttcattttgctttgctttgctctttattctttctttccttttactaattttaggtttagtytgttcttgcttttctagttttttgaggtggattttttaggttgtttattcaacatctttctacttttcaggtatagacgttaattgctataaacttccctcttagcattgctttttctgtgtcacaaaggttttggtatgtttttccattttcatttgtttcaagaatttttactttctttcttaatttttacattgacccattggttattcaggtgtatgttgtttaatttccacatatttgttcccaaagttcctgttgttgattcctaattttcactgtggtcttagaagatacttgatatgatttcaatttttaaaacttt

SEQ ID NO: 748144 - DNA, 423 bp, Homo sapiens
aacatcctcaagtttattccacttgattgacagcagtaattttggcagtgattgtgggaaaatctctcggcagtcttgtcgcaaagtccaaataagatccatttcattttcacacagttgagacaagggatccctgtccaagatttctttcaatacaggaagaaacttttttccacctcgactctaaaaaagtaaaatgctcattatagaatttaattgtgcaaacaccacagcraactttcagtaaatttatatatatttatatataataaatgaacctaagtatgtgagatacaaaaatataattccataaaaaaaaaaaaaaggtagatcctttaataatttctaagctaaggatgaagagattcttaaaacagtttctaaaaatctaaaaatgtaaactgtgcaaacactgggtggcag

SEQ ID NO: 748145 - DNA, 526 bp, Homo sapiens
tttcaaattgtcacaaatctcaaaaaaagtttcaatatacgtattaaaaaatatccacgtataagtggccctgcacagttcaaacctattgctgaaggatgggttgtacttaatttttagtcacttctgccattaagacaattatatatgacaactttttcaaaaacttatgattattccagtaaataattttagaaatctaaaagaatgaatcaacatacataaatgtttatgtgtgcatttatttttacctatcargttggcacatattttaaaatttgataataccctgtgctggaaggggcagagagaaaaaggcattctagtatagttttgttgagaaactacattaatatgaactttttggagggcaattttgcaatatttattagaaatcatacacacacacacacacacacacacacacacacacacacacatccttagacctcacaattttatcaatcgtaatctcaacctgagagattcaggaccaacgaagaaagccaagtatactaacccaaca

SEQ ID NO: 748146 - DNA, 516 bp, Homo sapiens
ggtggctgcaaaattattacagtagtacagtacatactacagttaattttataaagttatgatttaatacagcatctttatgtttggttacatttctctggactgagaatggtgccatgtacagtctatgtttgtatgtgtaagttttcatacatgttaatgttttataattgattggtgtataytttatgcaagtaaatgataaaatagaccagtatctacatatttttatgcattcatgacatacctaacgttttcttaattctttcaatatttctaggttgtgtggttcatctgtgagttttttcaaattgttgaaaatctccaaaacttttctgatgtatttattgaaaaaatctgcaagtaagagggtcgctgcagttaaaacctgtgttgttcaagggtcacctgtacacctacataccagactttcccctaaaaaaatagataaaaccagcttcttagacgtttccttggtgttccccccaccactgtcatttctttctttccaaaagt

SEQ ID NO: 748147 - DNA, 461 bp, Homo sapiens
cgcagtggctcacgcctataatcccagcactttgggaggccaaggcgagtggatcacctgaggtcaggagttcgagaccagcctgactaacatggacaaatcctgtctctacaaaaaaaaaaaaaaaaaaaaaaaaaattacaaaattagccaggcatggtggcacatgccagctactcgtgaggctgaggcaggaraattgcttgaacctgggaggcagaggtcacagtgagctgagatcgcaccattgtactccagcctgggcaacaagagtgaagctctgtctcaaaaaaaaaaaaaaaaaaaaaaaaaatttctatgttctcgtgaagtttatattgtagtaacggttgatagcaaactgaaataatacatacattaatagcatgttaaagtgctaggtacttcaatgtactaagtaatacaaaaacaaaaaaaaaggaaagaaggacaatagaaaa

SEQ ID NO: 748148 - DNA, 638 bp, Homo sapiens
ttctcttatatttggtggtggaagtatgaattgtcacaacctattgagaaacaatccaataatatccattaaaattcaagttgtgtgtgtgtgtgtgtgtatgtaatttgttttagcaattccagttctagggatccatcccatggaaataaaataaacacaacaatctataggaatatatgatcagggagattttacagcaatattgtagagatttttagaaaagaaaatgccaatcaataggaaaatggctgaaaacatattaatacctccataccatgtacaattgttcagctattaaaaatgagttatggccaggcatggtggctcatgcctgtaatcccagcactttgggaggttgaggcaggaagataattaaggccaggagttcaagagcagcccaggcaacatagtgagatcccacccctactaagaatttwaaaaactttaaataaatttataaaataaaattttaaaatgagttagatctaaatagatcaaatcagaagaatttttcaatgtattattaagtgagaaagctaagatatggaggaatttccataatatgatttcattttagtaaaaaaaaaagttaaatcacattgtgtctgtgtttatgcttgtacaaaagcatgaag

SEQ ID NO: 748149 - DNA, 563 bp, Homo sapiens
tctgcccttttgtttcactgagccacactaaggcttgagtgactattcctctactgtcatctcacaggtagattgtgtattcagtgaaaggctaatcagagactcaaaagaatgcaaccgattttctgttaactacttatgacacggcagcccgcttcctggcttcaagttgtccgacctttccagagcgaaccagtattcatcttacacatattgactgacgtctcatgtctccataaaatgtataaaaccggccgggtgcggtggtttcacgcctgtaatcccaacactttgggagactgaggagggcggatcacgaggtyaggagatcgagaccatcctggctaacacggtgaacctgtgtctctaccaaaaatacaaaaaattagccgggcgtggtggcgggtgtctgtagtcccagatacttgagaggctgaggcaggacaatggcatgaaccctggagtcataggttacagtgagccaagattgtgccactgcactccagcctgggcgacagagcgagactgtgtctcaaaaaaaaaagtataaaaccaagctgttc

SEQ ID NO: 748150 - DNA, 475 bp, Homo sapiens
aagaagtaattggtttagtctggaaagggggtgacaacttgaagcaaaggcaggaagactcgaagtgtggggggaacttccaggtcacaaataggtgagacacaaatggttgcattcttttgagtttctgatgagcttttcsaaggaaggccatcagatacgcatctatcttagtgaggggagggataacttggaatagaatgggaggcaggtttgccctgagcagtttccaactggagtttcccttagtgattttggaggcccaagatattttcctttcacatttcaccctttttcttttttaaaatcttttggagaaatgattttacaaaaaaacaaacaaacaaacaaaaaacaaaacagactctctggtttcagatttcatctgatttttcattgctaggatggtttactcctagatgggtaggtcccgaaagttcattttagcaggttgtgaagtctcctgtcctgtgaa

SEQ ID NO: 748151 - DNA, 551 bp, Homo sapiens
ttacttataagtgggagttgaacaatgagaacacatagacacagagaggggaacatctcacactggtgcctgttggaggcaaggggagggagagcattgggacaaatacctaatgcatgtggggcttaaaacctagatgackggttaataggtgcaggaaacgaccatggcacacatgtacctatgtaacaaacctgcatgtctgcatatgtatcccagaatttaaagtaaaattaaaaaagaaatcaaaataagattaaacaaaagacaaaagaagaatgaaaaaaaagagagtcagtcccagtcctcaagggatatgaaacctggaggacaaaaatcaaagtcatctttgtgaataattatcttctttttgaaagtcagtttggcaaaatcctcttcggcattgtccatcgtggtctgcattttcggtttcttaatcttatactttggcttccttttcatccttttcctttgcagagccaaacttgcttcctgctgtgatgctgttcaaaactttgttgtttctcagaataacactccagttgggacta

SEQ ID NO: 748152 - DNA, 551 bp, Homo sapiens
ttacttataagtgggagttgaacaatgagaacacatagacacagagaggggaacatctcacactggtgcctgttggaggcaaggggagggagagcattgggacaaatacctaatgcatgtggggcttaaaacctagatgacgggttaataggtgcaggaaacgaccatggcacacatgtacctatgtaacaaacctgcatgtctgcatatgtatcccagaatttaaagtaaaattaaaaaagaaatcaaaataagattaaacaaaagacaaaagaagaatgaaaaaaaagagagtcagtcccagtcctcaagggatatgaaacctggaggacaaaaatcaaagtcatctttgtgaataattatcttctttttgaaagtcagtttggcaaaatcctcttcggcattgtccatygtggtctgcattttcggtttcttaatcttatactttggcttccttttcatccttttcctttgcagagccaaacttgcttcctgctgtgatgctgttcaaaactttgttgtttctcagaataacactccagttgggacta

SEQ ID NO: 748153 - DNA, 615 bp, Homo sapiens
tcatgagtctaaaatgcctgtgtttctagattctacttttgctgatgccaggtattttcctgaatatagagtatacacacacacacacacacacacacacacacacaaacagtagtataggtcatggtatgtaccataccatgcatgcatggtatgtatgcatgtattatatatgtacatgcatacatattatagattatatattatatgtaatattagtatattatataatatgcatatatgtaatatatgtatattatatataacatgtatatataatatgtaatatataatatgcatacatattatacatatataacacataatrtgtatataatatgtaatatataatatgtatacatattataaatatataacacataatactgttatataattgtatttattatatgtatatatgtatacatattatacatatataattacatataatactgttatataattttatacagaatatatgtatatatgctattatagatttataaaatgtatgcatattgttatataatatgtacatatgtaatgtatacatattatacgtatataattacatataatactgtattatatagtatattatatagtatacaa

SEQ ID NO: 748154 - DNA, 628 bp, Homo sapiens
gtattgtagcctttataacaaactggcaaggagacattatcaaagtgaactgttaaaattacccaataaatagacctacaaggtcctcttgccccagcactttgcccatctgctaggtctccttcaggcacctgcctcatcctcttggctgtatcaggggtcctgagcctccttcarctgaaggggacctcctaccaccaattcagcagtagcagttctgaagcctgtcacaatctcagactgggcacggtaatttcaacaaggagcaagtaagaactcccagacctgggtaggaacagggctttgaatccagttaccttccagctgctagtgccctgaatttactgttagagctttctctaaggttaactctctgctcctttgcccatgctgaagcagtagtatacggtagggtgacgatgaccttccttaaaagatttctcagtgctcttggctatttatagttactgttactgccatctgtgaatccagcttctaaaaggtaaactggttcgtaccacaatgtcttcgtggtgttagtaaatatgagaaggaaaaatgcatcctggcatatttgcatgggaagccttaacaagaggccccttttcatctagtccagcagtctttc

SEQ ID NO: 748155 - DNA, 533 bp, Homo sapiens
aataaatgggcatttgcacttcaggtgaaacccatttgtcataactgcttggactttaagcttacaaataaaaagaaccacatatttccctttgcagcttgatttagttaatgtcattttgagaaagaaagaagacattgttatcccgtcccttttttttttttttttttttttttatgaagagactgggactcagagaagtcaagtgattttcccagaaccagaaaacacagaagtagcagagctgagatgactactccggtcttctgattccaaattccaaatwcattcttctaagcgatttcccaaaacgggaaatgggtttatcttctatttatgggaagtgatagtggtattctatttagagaacttatataaaatcttactttaaaataaataatatttcaaaaagtaagcttaatttaaagaaaataatcaagaaagtctggtatatttttacaaatataccaaatgaccttgctctaaaatacatctactttccagcaagccaaagtgaaacaatttgaaataag

SEQ ID NO: 748156 - DNA, 641 bp, Homo sapiens
agatgttatttaaataagtacactatgtttcaaaaatatttttgagtcatttcaggcaaataaacaacctccctttctcaaaaaaaaaaaaaaaacttacttgttataggttaatgcttgaattaaaatgtttgttgtttgacgtatggaatgctgcactcttaattgttaatatacaggctcttccccattaataagtcaaaaggaaaaatcatttagacactttagaaagaccagacactacaaaaagcacctaataaaacagattaggactcaattcttaattctatcattttataaatgttaaaatatatataaaaaatatattacactctatcatagagtatatgttatatattttacatatcatatataacrtatactctacataacataatagggttttaagtttataacttttttttaatatataaacatatatatatcctacaatgctggtaatatgtatatatgctcgtactatatatatatacacacacaaacatatatatatacttgtactacatatatagtacaagcattgcaggatatatatatgtatatattatatctgtaaaagctaagtcagatttcactttgatacatgtaaaccaggaattctatgtttcaaaaaacagtag

SEQ ID NO: 748157 - DNA, 542 bp, Homo sapiens
aaaataaaatcaaaacaacctttattctgcagtgaaaaaaagataacttcacagaaaacagtcaatgtaacatctgcatagtttcaaaaaggaaaagaatgacttgcacttttcaaattaaacattatgatgttgtttaaaagattctcctgattttaagagtttcataatgtgagaaaaaaggaagtaagcctgcaaacatagtaaaaaattattcttttaaaagatattatttttccttactattgggcaaaagccttttaaaactggtaatgcttaatggactttcaggttagtatcaaactggaacacaggaaggagaattcaatgtgttctttagatacatcaaaactatactgaaatgtaaatascattatatattcaactacaggatttaggaaaacaataatttctgtaagattaaaaggaattctcttgggaaccattccattcaacctcctcattttatgaacctgggaacttggcaaagaggttaaagagaccaaaggctacatgaccaacagcttatgaaactattactt

SEQ ID NO: 748158 - DNA, 514 bp, Homo sapiens
gtttcactgtaattggagcaggaggttgaaaagattaattcaccagtacttatagagagcctacctgattgtaagcagcagggttcaatactgaacaagtcatggcaagattccctgctggagaatatgaataactcaaaacccttgcttttgagtagctctcatcccaatggagcagggtgaatgaagacgcatatcttttgacaaataattaaaatactgtgaaattagtatttatgaggrtttatgccatgaatctcagagaaagaaacaaaaccatcagagtagctgagagcaaagactctggaaccagaatgcctgaattttaacaccagctgtgccacttactagcccgctgaacaatggctaagttaattaacttgtctgtgcctcagattcttcacctgtggtatgagatttgtactagtaccttcctcatgtgtttaaataaactaatgcttataaagtccttaaaacagtgtctggaatataggaaatttacataaacaaggtc

SEQ ID NO: 748159 - DNA, 594 bp, Homo sapiens
gcattgtacctgatgattacgatatcaactaattttagctattgtaattatttctcttaatctcactgttttagttgtcaatcacaaagtatgaccagtcaacttttagttgttacattatttcacctttcctttaagcaactaataaacagtggtgtaacattcagggacaagcctgatttgtaacatttgagctttatctgcagtgtaaatattcctgaagtggtaggtttaatgactggctctcataattcccaaatatttaataaatcagctctcacaggatggtgcaagctagctccagatggctctggaactaccatcttatttcctctgccaaggttttcccatatcaaacattcatgaccaataatggccacataatttcctggccctcattaaaataaaatttaaaatatgagtcccttgttcaaaaatyactaagaattttaagatggtgaccgcagagcattaaaccaaattcgggacccctgtgagcctgggacctatgcaacagcacagctcgtacacctgtgaagctgaccttcttcatgactttgctaatgtcatgactaccttcacaccacttcatga

SEQ ID NO: 748160 - DNA, 635 bp, Homo sapiens
tgtcaggtaatctattctactaaaaaaattttcttttaagtaacaaaaggacccttactgtgcttaggctataaccatctaaatgtgtgctactagtctgggtaatattttagttataatcccatatgttagaattcaatgtctgtcacttgtcagatttttttctgtagaatgcccaagaaatctttaagctgtgaacatgtagcatcagaacgtcagtgttgaatgagcctctgtgtgcaaagccctgccttatatgccatgtgtgaggagtgggcagggcaggagaaagagcagacaccaaatagaccatcacaagaaaggtttttttttgcttcaggagtttaccacattgctgggtgaacaggaaatgcacacaaacccatcatctctcaacacctatggtatatatggttgtttactcattcttagcttttcagtaaccccaaagaaggtgttttgaggctgttactatttgttttcyggaatcaaggaaagataaatgaagtttccttaatggaactggtatctatctgcatgactgtattttacacacacacacacacacacacacacacacacacacgcacacacggttttttttggttaaggtggatcccctttggccttggcct

SEQ ID NO: 748161 - DNA, 589 bp, Homo sapiens
tcattcatgctgctgtaaattatagaattccattattttttatggctgaatagtattttattgtgtatatatatatcgatgtgtatacagatacacatagatacacattttctttatccattcattcattgatggacacgtaagttggttccatatgttagttactgtgaatagtgctgcagtaaacatgggagtgcagatacctctttgacttgatctcctttcttttatataatatatatgtattttatataatatatatgtattttatatatatttttcttttacattatacacacacacacacatatatatatatgtatctcagtgggatcgcaggatcatatgacaggtgcattttcagttttttgaggaacttccatactgttttccattgtggctgcactaatttacactcccatcaacagtgtaytaaaaaatagacaaatgggcttatatcaagctaacggggttctgtgcaacaaagaaacaatcaaaagagtaaagagacagcctaaagaatgaaagattgctggccaaggtggcttatgtctgtaatcctggtgctttgggaggctgacgtgggagg

SEQ ID NO: 748162 - DNA, 625 bp, Homo sapiens
acagtctgtttttcttatcagctcactgtttgcaattactagaccttgaatctagaggttcctaaagcagttgtgatactcagagaaggttcatcaagaagactactctttgataatatttatttcattattgatctcctgatatttgctaggcactgtcagaggcccaagcatatctaaatttacaatgttttctgcaatttacccccttcctcccatcaatataaaggaaatgtaatacaatattttagcattgtatgcagctatgccttttatatgaaaaaagatgtatgaaagttgattttaggaaaaattctgggcctctaattctttcctctgatttcatagaaagatttctctactggaaggtaagaaatatgrggtctttcctttctttactttttaatgtccctttaatctcactaggtatcaaatataaacaaggacttggactatatgacctaggatgtcaattccatctatggaattctgtcatatgagcctaattaaattcaagatgaggtcagtatcatcaaaaatccttctttttactaatgactatgcacttgcaatataaaaaaggggtcaggagtgagttgtgtgagctaagaaagcacatgttcat

SEQ ID NO: 748163 - DNA, 606 bp, Homo sapiens
catgcatgcttatagcagcacaacttgaaattacaaagatatggaactaatgttaagtgtccattgaccaacaagtggataaataaaatgtggtatatatacaccatgtaatactactcagccataaaaaggaactaaatagtgtcttttgcagcaacttgggtggagctggaggccattattctaagtgaagtaactcaggaattgagcactaactatcatatgttstcataagtgggagctaagctatgagtatgcaaagatataagagtgatataatggactttagagacttgtgggggaaggttgggagtgggggcgagggatgaaagactacatattgggtacagtgtacactgcttgggtattgggtgcactaaaatctcagaaatcaccactaaggaacttttccatgtaaccaaacaccacctgtatccccaagactattgacatttacaaaacaggtacatattatcaaaattacctcttagggaaagaatcacagaatcttattccctgaaaatatttttatcattttaagttgcatcatattatgtgctactattgccactaaaatatggctataatattttcatttgacatttt

SEQ ID NO: 748164 - DNA, 626 bp, Homo sapiens
tgagctctggaaagccatgagtcattgatgttttaaactaaaaataactaagtactatggttttgctaaatgattatcctgaccaatattaacagaaaacagagtttaagcacatgcccacaaatacacaaactccttactgaggaaattcaactcattaactmattaacactgtatatgcgtaagtgagagagagacacagattgggaaaatgtccatgttattgtactttaactgcatggcaagcacaggccatgaagcaccactgttctgaaaaacacttgaaaagggctgagcccaagagttattcaggtgatttggggagtgttatttgcatctcagagtctatacgatgccattcctccgaacctgacatcctaatctgtaagataaagtggttacacttgatgttctattggtcttcatcctgctttagctgtctgagactcccattgaaattagtaggccagggtatagaaagttttggggtaaaagaacatgcttcagggagaaaaagccaagagaggaggtttattgggtggtaagaagtttatgatacagctcagaacctcactgtcgtctaatatctacaagggtggcactgtaattataaggaattttacagg

SEQ ID NO: 748165 - DNA, 626 bp, Homo sapiens
tgagctctggaaagccatgagtcattgatgttttaaactaaaaataactaagtactatggttttgctaaatgattatcctgaccaatattaacagaaaacagagtttaagcacatgcccacaaatacacaaactccttactgaggaaattcaactcattaactaattaacactgtatatgcgtaagtgagagagagacacagmttgggaaaatgtccatgttattgtactttaactgcatggcaagcacaggccatgaagcaccactgttctgaaaaacacttgaaaagggctgagcccaagagttattcaggtgatttggggagtgttatttgcatctcagagtctatacgatgccattcctccgaacctgacatcctaatctgtaagataaagtggttacacttgatgttctattggtcttcatcctgctttagctgtctgagactcccattgaaattagtaggccagggtatagaaagttttggggtaaaagaacatgcttcagggagaaaaagccaagagaggaggtttattgggtggtaagaagtttatgatacagctcagaacctcactgtcgtctaatatctacaagggtggcactgtaattataaggaattttacagg

SEQ ID NO: 748166 - DNA, 626 bp, Homo sapiens
tgagctctggaaagccatgagtcattgatgttttaaactaaaaataactaagtactatggttttgctaaatgattatcctgaccaatattaacagaaaacagagtttaagcacatgcccacaaatacacaaactccttactgaggaaattcaactcattaactaattaacactgtatatgcgtaagtgagagagagacacagattgggaaaatgtccatgttattgtactttaactgcatggcaagcacaggccatgaagcaccactgttctgaaaaacacttgaaaagggctgagcccaagagttattcaggtgatttggggagtgttatttgcatctcagagtctatacgatgccattcctccgaacctgacatcctamtctgtaagataaagtggttacacttgatgttctattggtcttcatcctgctttagctgtctgagactcccattgaaattagtaggccagggtatagaaagttttggggtaaaagaacatgcttcagggagaaaaagccaagagaggaggtttattgggtggtaagaagtttatgatacagctcagaacctcactgtcgtctaatatctacaagggtggcactgtaattataaggaattttacagg

SEQ ID NO: 748167 - DNA, 537 bp, Homo sapiens
gggtggttgttgaactatggatctcagaaccaagacttgccattgtaggggtttgataccacaagtctctgcatttaagaaaacctggacatctgcatccattaatttccagagtagatgtgagcttatcaggacacatgaaactggagtgtctggccaggattttccttctcttttctgaaataagttgattaagaattacataagtgattaatagaaatgtgaaaagagtgtttcctttgtacaatacttttacaacatttcgatacagcaggaaaatgttgttgataacccagaagatataagcataaagaaaataaaattatctataatyccactccatgcagataatggcctttactattttattgaatctcaactggtttttaaatgtatatatactctttaaaaatggaattagccatgtgttttctatagaaatctgctttttttcccttcagtactgttaatattatttccattttatcaaatatacttctgccatcattttaatgactacaaagtactctgttacat

SEQ ID NO: 748168 - DNA, 608 bp, Homo sapiens
cccagtggtggggaaggccccgccacagtgacccactggactaccatcttccttcccttctgactgtcctttccctcagtctggataactttccctagtccagggtaagggatggtgtcagagggaagggaaaataattctaacgaattacatagttatgcaaatattttatttgtcttaggcctaggcttctggacgggagatgccaagagtttgattctcttgtcatccatgcttgggtagcagtatcccttcctgggggtgatagagacgaaattcccaggtgttcaaattgttgctgaggtgggggtgagtgtgggggagcagggagcaactaccccaaggttgttactgcacrgttgccccactacatgggcatggatgcctcattctaaaattgtttcaccctgaatggtaaaaccaacacaatgctcagcaggctgtgatgctggcactgggatgcctgcacatcgatggtgaagggcccagatgccctctaggacagtaggatggtgctgatgacaggcgtttgaggcaagagccccaagcaaagagtggaacatattctcgcatgaattctggaatcctgctcaaagcaaattttccag

SEQ ID NO: 748169 - DNA, 619 bp, Homo sapiens
aaatgacatcaatgactgctggaaccaatatgttagcagagtaggaacatacctggaagtttacattttgctgggaagtgtcctcaactaaggacctactgttgcaggggtataaatatccccactgtcctgcctcctgactggatcactctaaagactgacattgtcttcagagcctactttcaggcctttccctgacattgcctgtttacttggtctatttcccttcctggcaccatgatttgtgatgtgagtgctagaagaggrttcagaatttgattttaattactcttagtgtcatctcctgaccatggacatcttaagtggtttttgtcagtgtttactttgaaaagagaagtcctgtctctcccagggccactgtcttcagagcctctgggttggtgacaggctgctggggctggggttcccatgggggagatgaggctgagcccagaatgagaatcaaatggccctgcattcaggaaactctcagaatttgtcaccttatatacaatatctgtagtcaaatccaagtgattcatttcctttttctgaagccacagagctatagggatccactctcatgcttcctccctagccgtcttcattttcctagcct

SEQ ID NO: 748170 - DNA, 670 bp, Homo sapiens
taactaacctaaagattaagggggacattatatgtcttgttactgatgttaaccttaatcatttggagatgtctcccagatgtctccactgtaaagctgctatctttccctttgtaattagtaaagtattgggggaagatactttgaggttatgcaaatactgtttctccttaaagttttgcccactagttttagcattcatcggttgatcttgcctgcagtaatgattactgtggtattctaatggtgatattctatttccctcatttcttctaatatttattagaattctagtttttttaaaagccatcttttttcttccatgaattaattacttaatatcagcatggcctcatggacatttattttattcyatgggttataatccaatactgctgttaaatattttgttgctcaagttgtttcagttttggccactgcggtctctttcagtttggctcctgtgccctctgcaacaatgcccctatcctttctccagaacttttattttctggcattacaagatgctaaaggcttttcttacattttccctactccagcttgttttataagcctaatataatcttggttccaacagcagataagaacaacatggaaaaagaaacatagacctatttaacttgtgaatatagacgcaaaaaaattccaa

SEQ ID NO: 748171 - DNA, 670 bp, Homo sapiens
taactaacctaaagattaagggggacattatatgtcttgttactgatgttaaccttaatcatttggagatgtctcccagatgtctccactgtaaagctgctatctttccctttgtaattagtaaagtattgggggaagatactttgaggttatgcaaatactgtttctccttaaagttttgcccactagttttagcattcatcggttgatcttgcctgcagtaatgattactgtggtattctaatggtgatattctatttccctcatttcttctaatatttattagaattctagtttttttaaaagccatcttttttcttccatgaattaattacttaatatcagcatggcctcatggacatttattttattccatgggttataatccaatactgctgttaaatattttgttgctcaagttgtttcagttttggccactgsggtctctttcagtttggctcctgtgccctctgcaacaatgcccctatcctttctccagaacttttattttctggcattacaagatgctaaaggcttttcttacattttccctactccagcttgttttataagcctaatataatcttggttccaacagcagataagaacaacatggaaaaagaaacatagacctatttaacttgtgaatatagacgcaaaaaaattccaa

SEQ ID NO: 748172 - DNA, 670 bp, Homo sapiens
taactaacctaaagattaagggggacattatatgtcttgttactgatgttaaccttaatcatttggagatgtctcccagatgtctccactgtaaagctgctatctttccctttgtaattagtaaagtattgggggaagatactttgaggttatgcaaatactgtttctccttaaagttttgcccactagttttagcattcatcggttgatcttgcctgcagtaatgattactgtggtattctaatggtgatattctatttccctcatttcttctaatatttattagaattctagtttttttaaaagccatcttttttcttccatgaattaattacttaatatcagcatggcctcatggacatttattttattccatgggttataatccaatactgctgttaaatattttgttgctcaagttgtttcagttttggccactgcgrtctctttcagtttggctcctgtgccctctgcaacaatgcccctatcctttctccagaacttttattttctggcattacaagatgctaaaggcttttcttacattttccctactccagcttgttttataagcctaatataatcttggttccaacagcagataagaacaacatggaaaaagaaacatagacctatttaacttgtgaatatagacgcaaaaaaattccaa

SEQ ID NO: 748173 - DNA, 370 bp, Homo sapiens
tggctctcttgttttactggcccacaaacaggacaatgacattagacacttcgggcttgtgcgcttagggtcagacaggctaaactggatccttggaccccatgctgcatgcctggttgctctgggaactcctcttcattaaggcttcccaacttgcagaaaccacaaactggtctggaacracacctagctctaggtagctaggctgctgttgagcagaaatggattctgaaagcagaaaaactcccatgaagaagcatccagcgttgaggtgctgggacttcccacctccacttcccaaaacatatgaaaaaagagcagaagctattcaactgtaggataacagtgtttttaatatttaagtaacaaa

SEQ ID NO: 748174 - DNA, 612 bp, Homo sapiens
acttgacatctttatgagattaagtcattctgtctgtgaatctggagtatctctatttattcagatcttctttcatgtactttaataatatttaatatattttcccacaaagcacatctatttattacaaggctccttacagatttttacatttttgtastgtgaatgggatttttctctattatctttttcaattgattattactgttgtatagaacttcagttgatttttgtatataaattttgtttctagtgagcttgctaaattatcttattcgcaaataaagacaattttgtttcttcttttcaatttctatatgtgtattagaaatgaattgcttgtattcaataaaacagtgaatagaagcaatgatgtgggcattttttccttgttcttgttttaaagggacaagctctaatgtttcattattaagtacattatttgctttaggttttgataaatgcctgtctcaggttaagtaaattattttctctttctaatttgctagaagttatttttaattctgaaaagattgaccttcatcagatctttctctgtagttattgagatgaccacatagtccttattcagtctcgtgctgtggtatatta

SEQ ID NO: 748175 - DNA, 617 bp, Homo sapiens
cctcactgaagggaaacccactcgtctgggctgctcggattcctcagaactgccaggaggaaaggctaagtctgctggtctgcagaggttgtggccacccttcccccataggggctcagtaccagggagatccggttctgtccctgagcctctggctggagttattggagttcctgcagggaagccccacccagtgaggaaggatgggtcagggtcaggcctgaagaggcacccggccacagactgccacagccagtgtattgggttgttggggagaagtcttgggaccaagctgtccaccctccctggctccagcagggaaaaagcacagcctgggctrtagagatgggtgctcctcttcccctgccagggagcttagtgtgttaggcagttgcaagtcccagtgctggctactgccccttccccaaggacctcaaatggcttagacagcaggtagcagcagctgcggtggtggttgccccttccccaaggacctcaaatggcttagacagcaggtagcagcagctgcggtggtggttgccccttcccctgggagtttggtagacttaagcggattccagctgagagggtgttaagagtctacatgttctggggtt

SEQ ID NO: 748176 - DNA, 602 bp, Homo sapiens
taactcacagttaagggatcccttagatggtggtgcaggtataagggacacaggaattcaaagaagtgagatagactggtcattacgggtgaacgatgcacacagtctctaaggataagtactattggaggaagcacaagagagaggactggaatttcagatatcagaagaagatcataattggaggccaaaaagtaagtcagtaagagctagttagaagccagacagacgttacagagtaaaaaataaggttggataataagtgggaccagataataatggatattaaaagatagaagaatcgttagcgggtcatgtgccaaagtttgcttcttagttagttgtttaaaatycagaatggttttttttgttgttgttgcttttgtggggttttgtttttgttttttgtttttgttttcttttgttttgtcttattaagacagtttcacctttgtaacccaggctggggtgcagtggcacaatctcggctcactgcaacctctgcctcctgggttcaagcgattctcatgcctcagccttctgagtagctgggattacaggcatgtgtcaccacacccatagaatggttttttaaaaatata

SEQ ID NO: 748177 - DNA, 613 bp, Homo sapiens
ccattctgtgggttgtctgtttactctgatgattattccttttgctgcacagaagctttttagttcaatgaggtcccctttatttattttgttttttgttgcatttgctttggggttcctagtcataaattatttgcctaggccgatgtccagaaaagtttttcctaggtttccttcaagaatttttatggtttttaggtcttagattaaagaccatgtagggtcttagggagatagggatccagtttcattcttctacatgtggctattcatttatcacagcaccctttactgaatatagtattgtttccccaatttatgtttttgaatgctttgtcaaagaccagttggttttaagtatttggctttatgtctgggttctctattctgttccattgggctatgtatctacttttatatcagtaccrtgctattttggtaactacagctttgtagtataacctgaagtcaagtaatgtgatgcctccagatttgttcttccttaggactgcttttgctgttcagggtcttttttggttctgtatgaatttttggatttttttttaaatctgtgaaaaatgatgttgatattttgataagaattgcattgaat

SEQ ID NO: 748178 - DNA, 635 bp, Homo sapiens
ggaaaagttttcccttggcccctaaacaacctatatattatgttactacgaaatagaatatgcctcttttctcctctttaatctagtgtgacaaatcataacattcaaacaatatctttttcttttaataaaactgctctactacacagtggctcacacctgtaatctcagaatttgggaggccaaggagagaggattgcttgaggccaaggggttccagaccagcctggaaacatactgagaccccatctctacaaaaaaagttaaaaattagctgggtgtgatggcacacacccgtagttctagctaccagggaggctgaagcaggagttctrggctgcagtgagctatgattgtgccgctgcactccaacctgggagacagagcaaggccctgtttcttaaaattaaaaaaaaactgctctactgcacttcaacaaaaggatgagcctagctaccaaagaaccctatagctgtagctagaccttagtacaagcccttacttctttataagctgtgagccattgagcaagtcatttaaaatttctgaattctctcatgcatgatatatgaatataaagccccatctacctcatgcagttcttgtaagattatttatgtgaaaatacccaacaa

SEQ ID NO: 748179 - DNA, 635 bp, Homo sapiens
ggaaaagttttcccttggcccctaaacaacctatatattatgttactacgaaatagaatatgcctcttttctcctctttaatctagtgtgacaaatcataacattcaaacaatatctttttcttttaataaaactgctctactacacagtggctcacacctgtaatctcagaatttgggaggccaaggagagaggattgcttgaggccaaggggttccagaccagcctggaaacatactgagaccccatctctacaaaaaaagttaaaaattagctgggtgtgatggcacacacccgtagttctagctaccagggaggctgaagcaggagttctgggctgcagtgagctatgaytgtgccgctgcactccaacctgggagacagagcaaggccctgtttcttaaaattaaaaaaaaactgctctactgcacttcaacaaaaggatgagcctagctaccaaagaaccctatagctgtagctagaccttagtacaagcccttacttctttataagctgtgagccattgagcaagtcatttaaaatttctgaattctctcatgcatgatatatgaatataaagccccatctacctcatgcagttcttgtaagattatttatgtgaaaatacccaacaa

SEQ ID NO: 748180 - DNA, 547 bp, Homo sapiens
tgaacaatctgaaaaataaatcaagaaagtaatcccattttcaatgctacaaataaattcaaataacaggaatgaacatagaagtgaaagatctctgcaattaaaactgtaaaacactgatgatagaaagtgaagaggacaccaaaaaatggaaacatattccacgttcatggattggaagaatcaatattgttaaaatgttcatactaaccaaagcaatctacagattcaatgcaatccctgttaaaatactaatgacattgttcacagaaatagaaaaaaaatcttaaaatktatatgaaatcacaaaagacccagaatagccaaagctatcatgagcaaaaagaacaaaattggagtaatcacattacttgacttcaaattatactacagaggtattgtaatcaagacagcatggtactggcataaaaacagacatggaacagaatacagaacctagaaacaaatccacacatttacagtgaactcattttcaacaaaggtgccaagaacatacattggagaaaagacagtctctttaataaac

SEQ ID NO: 748181 - DNA, 636 bp, Homo sapiens
gattctaagatgtcccacttctgtggggagtggtcattgctgcactgcttcccacccttcagctcccaagccgtattggcatcttgctatttctgagtacttgctgctgctgcacctggtgtcacagaacccatacatcttagttccawcctctcagggtctacagtcaccactgtgtggtacctcataccccactgtgttttgttggttccaggtcctgcattgctgctgtatcctgctccaggaggccttagccactggagaacctattttcccccagagacatgtcaatactgtgcctggacccttaggatcaaaactacagccacaccccagttccctgggtccaggttgctgggatgtacctcagagcaacagttcttagcttagtgggagaactgcatctactcataccttggaaagtgaagctgcacctcaagtcccaggtgctataatagttagttttacaagaccctgatcccagaaacctgtcttcacagtttctctgatcacctgtgctttgactccaagtaccacgtgcctgtgggccatgtcagacatgacaccaagagagatcccctcagataagactcctactgtagggaagataagaagagaaggatccctaaagccctt

SEQ ID NO: 748182 - DNA, 636 bp, Homo sapiens
gattctaagatgtcccacttctgtggggagtggtcattgctgcactgcttcccacccttcagctcccaagccgtattggcatcttgctatttctgagtacttgctgctgctgcacctggtgtcacagaacccatacatcttagttccaacmtctcagggtctacagtcaccactgtgtggtacctcataccccactgtgttttgttggttccaggtcctgcattgctgctgtatcctgctccaggaggccttagccactggagaacctattttcccccagagacatgtcaatactgtgcctggacccttaggatcaaaactacagccacaccccagttccctgggtccaggttgctgggatgtacctcagagcaacagttcttagcttagtgggagaactgcatctactcataccttggaaagtgaagctgcacctcaagtcccaggtgctataatagttagttttacaagaccctgatcccagaaacctgtcttcacagtttctctgatcacctgtgctttgactccaagtaccacgtgcctgtgggccatgtcagacatgacaccaagagagatcccctcagataagactcctactgtagggaagataagaagagaaggatccctaaagccctt

SEQ ID NO: 748183 - DNA, 636 bp, Homo sapiens
taggtctttcttgtgctgttgtcatgatagtaagtttcgtgagatctgatggttttataaagaggagtttccctgcataaactctttttgccagccaccatgtaagatgtttctttgctcttccttcaccttctgccatgattgtgaggcctccccagtcatgtgaaactgtgagtcaattaaacctctttcctttataacaaatcttattatgatgtgtttttgttttttgttttgttttgttttgttttttgagacagaatctcactctgttccccaggctgcccaagctggagtgcagtggcatgatctcagctcactgcaacatctgcctgccaggtcaagcaattctcctgtctcagcctctgcagcagctgggacttcaggygtgtgtcaccatgcccagctaatttttgcctggctaattttctctgtgtttttagtagagacagggtttcatcatgttgcccaggttggtcttgaactcctgagctcaggtgatccacccgcctcagcctcccaaagtgctaggattacaggcatgagccaccaagctcagccctcggttatgtctttatcagcagcttgaaaacggactaatacatctggctagtacgactagtacaacatactgag

SEQ ID NO: 748184 - DNA, 650 bp, Homo sapiens
ccaaatctggaaatctcaaatgctccaaaatctgaaactttttgagtgccaacttgatgctcaaaagagatgctcattggagcattttggattttgggatgctcatcctggtaaatataatgcaagtattctaaaatctgaaaaaaaagctgaaatccaaaacaatttcagatacaggatactcaacctgtatatatatatgatggaatactatttggccttaaaaaggaacaaaggactgataagtgctacaacatggatgaatgatgaaawcattgtgctaagtgaaagaagccaggtacaaaaggcaacatactgtagggttctgtttatatgaaatatccagagtaggcaaatccatagagacagaagacagactagagattgccagagggtgggaggaggaatgagtaactgcttaatggggatggagtttcctctgggatgataaaaatgtcctgggactagatagtggtaatggctgcacaaagttatgaagacacttaacatcactaatgataaatctgacgttatgcatacgtcaccacagtaaacatacccctgcagtggaataggttctgagaccatttagaggtcacacagaaaattagaagatttaaaaagaaaaattgattcccagacaaggtgcc

SEQ ID NO: 748185 - DNA, 579 bp, Homo sapiens
tgtaaaagcacaaagagagctgttaaggacccacttgaagctcatgtggccagcatccaaaaggtgcttagtttctgttcttaatccctgaacgtgtgtatctgacggtaacactgtggttacagcagtatctacatttgagatgtgataactgccattagtcctgattcctcctttcagtttgtgtgtttagaacacccctttctctaagaatgcaaagtaagaaagtaagatgtaaaaaaaaaaacaaaagaaaaccttaaagtgaaattactcaaaacacacacacacacacacacacacacacacacacacacacacacacacacacacwctatatcaaataccaacatgcatttgggttaagggaaggagactaagtcaaatttagtcaaatcttcctgtttggagctaggcttggtcctgtagtcccagctacttgggaggtttacacaggagaatcacttgaacccaggagtttgaggctgtactgcactatgatcgcacctgtgaacagccactgcactccagcctgggcaacacagcaagagtctgtctctttaaaacaaacaaacaaca

SEQ ID NO: 748186 - DNA, 629 bp, Homo sapiens
ttgctactttggttttaatgtctgccgacaccctcatctcaacttgaacctagtaaatcatcctctaagcaggacaacacagcaccaaggggcccgagtttcagttgaggtctgcagtgagttctaattgaaggaataacaccactgaagccttagaacaggctggtgggaggcaaggctgatgctattactctcaactttctgttgactacactgagattcagacaagtgcttgctcaagattgcaaacatmgccagatgacaaaacagcttgggctctacctaagcctctaccctcttggcaaggcccttccactaaagcagaaggcctttccttcccagacaaggtggctcagagacttccagatgggtcaaaacctcagaaactcagaagcatcctagcaattggtaaaatggaaccagtaaatgcaatgcagtttgacgaatatcaataatgtctttaaaccagagcaataccaataaaggggtgtttgctgccattcttcacaaacaaaatattcattagtttcttattgggcactagtagggagagaaccctttctattaagtagtaataaccacactgtattggtattttgaaatatggtttcattattaaaccatgttat

SEQ ID NO: 748187 - DNA, 633 bp, Homo sapiens
tcctggcctcggtgtactcggcttcccactgtgccagggacttgactggaagggcgggccctgctagcggacttggggctgctgaccacaccgttgctggtgggcctcttgaggatgcggacctgtggagggggtcccgggggaaaattatcatcctgaatcacaatgggcactttgggagatttgaatttcctgctttctgtgtgatcttcagttttttttccagacgtctatttcyccgctgtctgccgtctcctcccagctctcagcaacctcctcatattccatcttactcgccactttccagatcgcttgctttcttatttccacattttctctgacttttgcagtattcaatattattacctgattctgatttttcagacatcactatatggtccttggctttttggtcgttcctctcattcctttgctgtttcaagctctgttcccagcctaagctttttaccaccgaattctgttctgtgacccataacttaaaactaacccaacttttcattccctccagactttttttggtaagcagtatcatcatgctttaggtggacactgagtcatactgctgtggtagtgctggtacacgtagttttgaataccaggttcttgagtgaa

SEQ ID NO: 748188 - DNA, 605 bp, Homo sapiens
tgaaacatttctaataagttttagacataaaaataaattcacttgaaggtttaaatgaacaattccattcaattacggcattcaaataaaaacttttcacactgatagctctcagggattattatttttacacacttaatattacattttgtggygctctggtttatttaccctggtgtgtttgtattttctcactactttttgtcccagaaatgactgttgcaccaaatttcttaaagagaatctctgggctgggcacggtggtgcatgcctgtaatcccagcactttgggaggctgaggcaggcagatcacaaggtcaggagttcgagaccaacctggacaacatggtgaaaccccatctctactataaatacaaaaattagctgggcatggtggcacacccctgtaatcccagctactcgggggctgaggcaggagaatcgcttgaactcaggaagcggaggttgcagtgagctgggatcgcaccattgcactccagcctgggtgacagagcgagactcttgtctcaaaaaaaaaaaaaaaaaaagagagagagagagagaatctctgttgcaatgcaaaactaactgtaaaattatcagaa

SEQ ID NO: 748189 - DNA, 605 bp, Homo sapiens
tgaaacatttctaataagttttagacataaaaataaattcacttgaaggtttaaatgaacaattccattcaattacggcattcaaataaaaacttttcacactgatagctctcagggattattatttttacacacttaatattacattttgtggcgctctggtttatttaccctggtgtgtttgtattttctcactactttttgtcccagaaatgactgttgcaccaaatttcttaaagagaatctctgggctgggcacggtggtgcatgcctgtaatcccagcactttgggaggctgaggcaggcagatcacaaggtcaggagttcgagaccaacctggacaacatggtgaaaccccatctctactataaatacaaaaattagctgggcatrgtggcacacccctgtaatcccagctactcgggggctgaggcaggagaatcgcttgaactcaggaagcggaggttgcagtgagctgggatcgcaccattgcactccagcctgggtgacagagcgagactcttgtctcaaaaaaaaaaaaaaaaaaagagagagagagagagaatctctgttgcaatgcaaaactaactgtaaaattatcagaa

SEQ ID NO: 748190 - DNA, 476 bp, Homo sapiens
tgtccttaaaaatgccagtatctttctagtttttttttttttaggtaagacatttttttctattctatttaatttacttttaaaatttgtttttatcattaatactctaaacattttaaaggaagtttattcctctttgtcccagtgggaagatttttgtatgaaatttcacaaaattagatgaagaactgtgtaattccctaagcagaattcctataggttcttattacacaaattagcttttcaagtgaggtgaggtagcagctgcagcactaggtaggggcttcatgccgctyggcaggtaggggagggctggagaagaggaggaagaaatagtctcttgtcttattcttttagttcctagggtttgtgctagtgaaattcacaggaatcatcaatatatttctgtctgcgtatttcttagcaggtcatataactccttttgatacgggatcctcttgggtaatagtttaatt

SEQ ID NO: 748191 - DNA, 640 bp, Homo sapiens
aagagtaaggtgatctagatcatagttttagttgtgtgcaggttagtcctcattgtgagtgaacctcttaatatcaagtttcacgtttttaaagtagggacaacaatgtttttgcaaaggtcctatgcgatcagcatcaaaacatatgatatatatgtaagcactttgcacttcgtaaatggaaatattggttttaagataaattatttccatgctaaggagacaagtaatttttttaagtcttggtaataatcagacagatgtgacattaatgcccaagtgataatcatytctatagattttatatcattatttgcaatatagcttttgcagattaagaaatgcatgtagtgtcatggattatgattacagtttgctgctcaaattcactgccgggcactataaagcactaaccaagtttataagtttctggtgactaaatggaaacaatcgagaactagaactctttgaagcctttataaaaaacactattgggaaatataaacactctgctgtttccaaaatattttttcaagagaaagccctacatgcttactataagcctatcactactctatagcttcaattcttgtctacagacatcaagagagacttaaatatcatcccttctatcttaaaa

SEQ ID NO: 748192 - DNA, 642 bp, Homo sapiens
ttctccttgtctcacttaatggaaaaattcttctttcagtttgcatgggcccaaactttggaatcatccatgagtcttttctttctctcataaattacaacccacattttttccttcagcaaatcctattgatgccacctgctaacaaattcaggggctgaccacatctcactaactccattgatatcactttgccccaagccaccatcttctacattttgaaatagccaactgactagtctcaggaattccatgcttatctctactgttgtctaagcagcacagccatagtgatgcttctaaaattcaaattggattacttttctctcctgaacctctccaatgacttcccatcttactcatggagaaattcttacaatgacctacacaatctggctcctacacatctcctaatattctcaatttctctcattccactctagcaacacttaccttcttactrtttctagagccttccaggcatgcaatgatttcaacagcttgtaattgctattactgcacctgaatctttcacttcttccaatctggctctttaatgttatcttcctggggaaattctttgtgaacgctgtttttattaactaaatatgaacactcacaaacattttcaaaagcagagag

SEQ ID NO: 748193 - DNA, 642 bp, Homo sapiens
ttctccttgtctcacttaatggaaaaattcttctttcagtttgcatgggcccaaactttggaatcatccatgagtcttttctttctctcataaattacaacccacattttttccttcagcaaatcctattgatgccacctgctaacaaattcaggggctgaccacatctcactaactccattgatatcactttgccccaagccaccatcttctacattttgaaatagccaactgactagtctcaggaattccatgcttatctctactgttgtctaagcagcacagccatagtgatgcttctaaaattcaaattggattacttttctctcctgaacctctccaatgacttcccatcttactcatggagaaattcttacaatgacctacacaatctggctcctacacatctcctaatattctcaatttctctcattccactctagcaacacttaccttcttactatttctagarccttccaggcatgcaatgatttcaacagcttgtaattgctattactgcacctgaatctttcacttcttccaatctggctctttaatgttatcttcctggggaaattctttgtgaacgctgtttttattaactaaatatgaacactcacaaacattttcaaaagcagagag

SEQ ID NO: 748194 - DNA, 371 bp, Homo sapiens
gttgtgcatacactggtcagcttccagcaatattctgtgggatttaaattaataaccagattatgagctgatattgaaaaaaagttgggactcaaatttaacaaaacggaaaattcatcaccggaagtcaagatagacagtgaaaaaagcactgtattttaaatgagaccrccatactttatataatcttaaaaagcagatttgaaactcaaaagtaaaataacacaaaataataattgattattaaaaagctaattacccaatggtaaaacgtttcaaaattcagaaaagtaaaatgtttatctcccctgatagaggaactaaggaaatattttttcactcgttaataaaaaacgatgaaaagaaaattg

SEQ ID NO: 748195 - DNA, 643 bp, Homo sapiens
aacatgtccttttatgtctttatacaactgttctgatattggggttttaaatatcaacataaaccttgccaaattcttgaggcttatgtgaaggcttcagttcagccatttgttgttcgagtatcttcgtcctgtctggcaccttggttttagaaatagacacggcagcctcagaaaatggaatatccataaatcacttatgatgatggagtgtgactttattttcgtgatcatttttgcccaggtgcctgttactgtgttgctaaaacagaagtagacactattccactgtttggcatrgaatcttgacaaagaactatttgcagaggaacaggcttagaatcttagtttgtttcattatcaccaagagtttcaaggtttgaagtgtgcatcctggtagggtaaagtgtttgggaccaagatcaactaccttgctgagagtccagaggaggaactgcttatttctcataatggtcttgaagtagagtctaccatgggctgtctgttgacacgcagcatgcacaataaagaaccttcagttttaattcttggtggcaaagtcacgtcctattcttttgttcttttcaaatccagattgagaagtctggcttatggaagagcctgcccaactcgtgcacttcca

SEQ ID NO: 748196 - DNA, 592 bp, Homo sapiens
ggcaagaagcatgtgaggggcaagacttcgcacagcccctggaagactcatctcctgaggggaactcactcccactacagcctcacaacagtccagatgtttagacttcagagattaaagggcggagagtggaatgctaagcacctagcaagatgaatttggtgataaaaggcctaactactacgctttggcagagttgaagagaccaaccccacatccccctgagccaggaaagtagaaaattacacacagactgaatgatcacttggcatggggttatgtaaaggaaatcaaattaggagtctgtgatagttggggttctccagagaaacagaaccaatagggcgtgygtgtgtgtgtgtgtgtgtgtgtgtttgtgtgtgtaaagggacttatcataaagaacttgctcatgtgattatgaatgctgaaaagtcctaacagctgcagggtgagttggcaagctcagagacccagaggaaatgggatatagttacagtctcagttccaaggcctgtgaatcagaagagctgatggtgtagtcccagttggaaggtcagcaggttcaagactcaggaagagccgatgtttc

SEQ ID NO: 748197 - DNA, 609 bp, Homo sapiens
agtcatatattttgttttgttctgtcacctccacacctgccttatttaattccatgccatcaggaatgtgctagggagaatataattagcactgccaacagactagcaatgaaattgcatctctgtatggaagaagaaagagatgctgctgggtaaggaaatagattttagtttaaaattacacaggaacaattggaaacccaaaggataggaatcgttgaaatacaaaatatgctttggtgatatcatttgacaattaataggtcttttcgggtttttcccttcatcccttcttcccccagcctccctcttccctgcccagcagtctatgagagtcagagagagaaaggcattatgctgtctctttactaccaggattatgttcctgatagaargcaggttgctcactcctattcgaccttcagataacttcaatgacactgccttgagaagggcttccctgagcaatgaagctaggcttgaaagagttccctcagtttgcttccttagcattcagactccctgtctaatactaatgatactttatctatcagtaaattattgtaatcctggtatctagcataattcccagcacatggttgacactca

SEQ ID NO: 748198 - DNA, 589 bp, Homo sapiens
cacacatagaatacagattgtttatgtttatatgtgcattgttataagaaaacaaatgccacatacccacctaacaggatgaaatgattgacaggtaacattgaccttcttccaggaaatcacagattttcaaaacaagcactttttaaaattacaaaaatatgcagcatgaatcagaaaagcaggaggctgtgtttgtttgatcaacatttcattttccatagcttccatcttcgttttattgcatggtgtgctatttccctcaatagraaaggaaggctactgggatgtttgttataatcgtctgcttaaggttctttggcagatcacatgttttacttaattaaataatgtcccaattaattgatttgtttgtagacattcttaatttagtaaaggctgagcagaatgctaaaaataccattatatttctgacagaggcaccactaaagtctgataattgatagctttgctgttttctctgatggcctgaaaggcttttaaagctaaattctgtaatcatgttcatctttggaaattagttttgtgaaaccacacatttagttcttgctgagaaatctcattttag

SEQ ID NO: 748199 - DNA, 614 bp, Homo sapiens
ctccgactcaaaaaaaaaaacaagattctagtgacataataaattctgccttatttccacccaagatcaaaagctctttacacttagttccacaggaatgtgggggcagcaggtgaccttagcggttgacgtgaatctctcaaaggctggccgcctcagaagagatcaagccttagatcttccttcccctgcatgcgactctgccgccaagtctcaggagggcatctgtactcacatttgcaaaaggtcagccgagcgtgatggcttgcacctatagacccagctactctggagactgaggctgggggtcacatgagaccaggagtttgagaccagcctaagccacacagtgcgacctgtctctaaaaaaaaaaaattgttttaaattagcaagccayggtggcatccatgcgcgtgtagtcccagctactcagaagactgaggcgggagtttgcttgagcccaggagttcaagactgtggtgagctaggatcaggcctctgcacaccagcctgggtgtcagagagagaccctatctctaaaaacaaacaaacaaacaacaacaaaaaaaacttgcaaaaagtcaggatgggcatggagagaaggcactggcaa

SEQ ID NO: 748200 - DNA, 614 bp, Homo sapiens
ctccgactcaaaaaaaaaaacaagattctagtgacataataaattctgccttatttccacccaagatcaaaagctctttacacttagttccacaggaatgtgggggcagcaggtgaccttagcggttgacgtgaatctctcaaaggctggccgcctcagaagagatcaagccttagatcttccttcccctgcatgcgactctgccgccaagtctcaggagggcatctgtactcacatttgcaaaaggtcagccgagcgtgatggcttgcacctatagacccagctactctggagactgaggctgggggtcacatgagaccaggagtttgagaccagcctaagccacacagtgcgacctgtctctaaaaaaaaaaaattgttttaaattagcaagccatggtggcatccatgcgcgtgtagtcccagctactcagaagactgaggcgggagtttgcttgagcycaggagttcaagactgtggtgagctaggatcaggcctctgcacaccagcctgggtgtcagagagagaccctatctctaaaaacaaacaaacaaacaacaacaaaaaaaacttgcaaaaagtcaggatgggcatggagagaaggcactggcaa

SEQ ID NO: 748201 - DNA, 457 bp, Homo sapiens
gaggtctgtatattcttgctggctgtcagccaggggtcactccaagctcctagaggccactctcacatttggagagtgtcaatcaaaatatgactgggcagcggctcacacctgttctcccggtactcatagaggcagaggcaggaggatcgcttgagmcaggaattccggacttgcttgggtggcatagggagactgtctctacaaaaggaaaaaaaaaaaaaaaagagcaaaatatggcagctgacttcctcaaggccagaaggaggatgtctattgctgcctcttgtctcctttaagggatcacccgattaggtcaagcccactcaggataatctcctttttattgactcaaagtgaactgatcagggaccttcactacatttgcaaagtccctttttgcctgttcacactgaaaccctgttgtcttcacaggagtatcccacactcaagggga

SEQ ID NO: 748202 - DNA, 571 bp, Homo sapiens
gatggatttaaacagatgagtttcatcatctgacttgcatttctggggtaggggagatacaggggaggaaagatgagctagtgggctagtgcagtagtccactgagagtggatggtggcttgtcagggaggtagtaagggagctgatgagaagttattggattctggatatattggaagatggtggtaacagatttgtggatgtcttacatatggaaggtaaatgaaagagaagagtcaagaacagcatatgcctctgtctgaactccagcagtggatgtggctgaagttgttttccaggagacactcaggwttccagtctgttctaccagttctccaggagccaccaaacattcctaaagcccattggtgacgtccacacttcactggagacccctgctttgatgaataaaaatgtggacacagccaagcttctgttaggaggcaagaacccacctaagcttctgttaggtgaggcaaaatcttccaagaaacaaagatccctggctcagcagtcagtctgtttttgttaaccatgaaagggcagaaagaagcatgacagtggttcctca

SEQ ID NO: 748203 - DNA, 527 bp, Homo sapiens
aaaattacatttttttaagcatttacgtgactaaatgctttacacatccttattctctactataaccttatttgacaggattttttaaaatttctttttattatactttaagttctagggcacatgtgcacaacgtgcaggtttgttacatatgtagacatgagccatgttggtgtgctgcaccaattmacttgtcatttacattagtatatctccaaatgcgatccctcccccctctccccgccccacaacaggccccggtgtgtaggattattttctctattttatagatacgggttattgactagaaaattaagtaactgcccaagatcacataacaggaagatagtattcaaaaccagatctgactccaaggcacctgcaaagcaaatgggaaataaggaaattccaagctaatgctggggtgactcaaattctcatgaataaagtatggattaggaaaatatgacatcaattaaaaggtgcatctgagggtgccccaatattccttagcagagctttaaaaa

SEQ ID NO: 748204 - DNA, 519 bp, Homo sapiens
aaaagcaggcaggaaagagggtctgcaggttgctccaacatagacacataggtaatagagcttattcaggggagggaagagtgagaccccacaggaagtatcaataagattttgaaggttttcaaagagtaaaaagctcaaacctaacaggcagtaagggatgcaagctggaggcagtgctgcgggaggttgggggaagcagatggaagagcaaggacctggggtgaaaaagcaaattcagcctcggtttgtgttcaggcaaagggagggtcagcttttggctgtggtatagaaaatcagtaaggaagtgagaagactggaaaaggcaaaggggctgaaagccaggctgcrgagttgatatttcatacgggagtatcctgcagttattggaagagtctgaggagaatgatctgatcaaagcagcactttaggaaggctaatctgtcacagtgtgtaggagggactggaggagaaacaggcaggaaggcagaggtgggagaactgtcagctaggatgagg

SEQ ID NO: 748205 - DNA, 474 bp, Homo sapiens
aagcttttgcaagggcctgtagacgccacctgattctccttcctcccttttttcttggctgcatctcccatcctgagatggagcagggacccctcttaggggcctgtgcccccctcactaccacaagcatggaaatgaaaaatcttaagttccttcagattgcaggcacttagctggccctgagaagtaaatgagcaatttgatcagcaagaaggtaatagtagcctaaaacaatagccaaggaaattagagtcatgggatgtttggttccctatagaaactaaagattaattcttaacrtatgtccctgagttgttttcaaaacctggacccccaccaaatgtatctgctggcacacagaccttggataagggggaaccggggactgaactccgaccactgctcttcgttctttcttcctgatgggcctggaagaagtcacacctgtgagccagagctaacgttcttttctgc

SEQ ID NO: 748206 - DNA, 548 bp, Homo sapiens
taaaggatatataaacagggaagagcagacgaaccctcctcttgactgtaagaagtattcatctgctaatgctcaagtcaaatgtttcttctgggctgcttcggagagacaagaggttgggcttgatgggccctggggctgacatgggagattctatgtactgatagaaaccattttcatcayagtgctgcctattttaaagagtttgcctgctgtgctctgggcatgatttttgactcagcaaagcttcagaagccatggctgcccccaacccggaccctgttttcctctgaatgaatcttcctttttcaagtgtttctgatacaagagaaccgggtgaatgagagtgggtaatttagaaaaggccaagaagagaaaaatatgcaaatatgcaaatatcaacagcaggaataatatttaactggaaaatagcttattattgggctacatggttttaggaagccatgtgcaatgtacatgcccggcataatttaaattaattccttccattcctagtcattcttacacccatatgtagcctttgggga

SEQ ID NO: 748207 - DNA, 591 bp, Homo sapiens
atgtaatttagtaaactgattacgaaaaacaacactgagattcctcaaaaacttaaaaacagaactgccctaagatccagcaatctcatttatgggtatacatgcaaaggaaataaaaacagcatgtcacagagatatctgccctcccatgtttattgcagcactatttacaaagccaagacattgaaacaacctaagtgttcaacaatatataaatggataaagaacatgtgatgtgtgtatatgtatgtgtgtgcatacacaatgaaataytattcagccataaaaaggagaaaatcctactatttgcacaacatgggtgaacctgtaggatatcatgctaagtgaaataagccataccacatgatctcacttacatgtggaatctaagaaagttgaactcataaaaacagagggtagaatggtgattgtcaagcgctggaaggtggagggaatagggagatgttggtccaaaggtagaaactttcagttacaagatgagtaagttcacatgttctggggatctaatttacaatatagttaaaaatactgtatcatttactcaaagtttgctaagagagcagactttaa

SEQ ID NO: 748208 - DNA, 684 bp, Homo sapiens
tcacacaagtcagaatggttattattaaaaagtcaaaaaacaacagatattggtgagccttcagagaaaagtgtgtaagtgtatagcagcttgtacactgttagtgggaatgtagataaatttagtccctgtggaaagcagtttggagatttatcaaaacacttaaaatagaactaccattcaacctaacaatctcattactgggtatatattcaaaagaaaataaatcactctaccaaaaagatacatgcacttgtatgtttatgtcagtgctattcacaatagcaaaaacatggcatcaatttaggtgtcygttaatggcggactggatgaagtaaatgttgtacatataaataatgtaatactatgcagccatacaaaagaatgaaatagtgtcctttgtggcaacatggatgcaggtggaggccattattctaagtgaattaacacagaaacaggaaaacaagtattgcaccttctcacttataaatgggagctaaacataggtactctggacatgaagatgggaacaatagagactagggactactatgggggtggggagataggggacaatggttcaaaaactagtgggtactatactcactacctgggtaataggattgatcataccccacacctcagcatcatgtaatatacccatataacaaacctacacatgta

SEQ ID NO: 748209 - DNA, 493 bp, Homo sapiens
ttgtataatgataaagggattaattctttttagctgaaggcatcacactacttgacttcaaaccgccataataataggcacattgacaaagggaacagaataaaacagaaataagtccacatatttatggtcaatttttttttgacaaaaatgcgaagaacacaggatgggaaaacacattctcttcaataaaggatgttgggaaaagtgcatatmcacatgcagaagaaagaaattagacccttatctcacaccatatgcaaaaatcaactcaaaatggatcaaacacttaaatgtaagacccaaaactatagaactactacaacaaaaagaagaaaaaagctatatgacatcggtctgggtaatgatgattatttttatttgactccaaaacttcaggcaacaaaaacaaaaatagacaaatggaaatacaacgaactaaaatgcttctgcacagcaaaggaaataattaatgaagtaaacagacaaccta

SEQ ID NO: 748210 - DNA, 653 bp, Homo sapiens
tccgcctcccgggttcacgccattctcctgcctcagcctccccagtagctgggactacaggcgcccgccaccacgcccggctaatttgttgtatttttagtagagatgggggtttcaccgtgttagccagggtggtctcgatctcctgacctggtgatcctcccgcctcggcctcccaaagtgctgggactacaggcatgagccaccacgcccggctgaaatcacttttaaaatatagggaaatgttagataaaagtggagaatgctttaaaactgccartcaaatagaaaaccaaggtttgaagaggataaatcatgagtaaaacacccagcaataaaggcctccattgttaggttgatgttttcttaagggtttaggaaaagatgaattcatttttattctctaaaggaaaaaaataatgggttttacctgattctttttttactttaagcagtagaaggacaaacaaggaaagtcagtgtaatgacaatgaagaaaccgaatgtgtacaggaagtgtacagaaagacttttcaaattccaatgggcaatgggtgaggcaataaatattagatcaacacaaaaatggtattaacagttaacttttgtattatgtttcacagcctacaaatgttttttatgcataccatgtt

SEQ ID NO: 748211 - DNA, 552 bp, Homo sapiens
tttgatttaatctatattttgtctagcattatcccaacattagaagtagttaatgtatccataggcaattgttagatacatatgtaagaaagtgaaaaaccgacagacagacaaaacccacctaagtcaataatattggcaataggatttagaatgctgttatggcacatgagatgctccacatcctacctacatggaatatggggtatgtgtaaagaatattgtttagccctattttttcgtttgtttcttttgaactactccgttttccttaactctccttatctttttctgaatgaccttaaactcaaggtagtcrttgagtgggagggatgatttttagccatctttttcctccaactcaggtagataggatttaccagcttggccttaatttcctcctttctgttaacattgaaaaccatcatactaactgtaaaaatcaaatactgtaataagagtgagggagtgcatgttttaaagtctgtcgctatattagctcataccacatatgtggcaagaagcagatactgtacaaatcagttcaataat

SEQ ID NO: 748212 - DNA, 690 bp, Homo sapiens
ttggaaagaggggtgggggaagtggggacagggaaagacaaaaggggagtagagagagatgagaggaggcaagggagcaaagaaagggggaagggacagaaagagcagagaaagagagacagaatgagacagtgccattcaaataactttaaaaagtttagctyccaagctatattcttggactccaggagaaaaattaattgcaaggaaattgttcaaaattcaagtgtacataacccttttacctacaggaaattaatagttgccttacctatggactaaagccagaagttgaggaataagaatagtttgagattatacacaggcctacaaaaagagctagatgggaagtcaggatatgtgggtttcaggtatgacttcatggctctattactctttctttgtaatgagaaaaaagaattttgggttttggtctaggtgcctcaaaggcctcttctagttttaaaatgtcatgttagagaaaaaatatttttataggagtataaaatttacaaaaataggtaacatatgctatggacaaagagaattcagattatgataaaacagagaaaactgaggtccctaatataccaaatattacagaaaagaaagactctttactccagatggctaattgaatagaagatttctgtgaatgcacatgaaaatggcaagagtagacataaactt

SEQ ID NO: 748213 - DNA, 613 bp, Homo sapiens
aatatattgcactgctggagcagatggaatcagtttcactgggctacagagattggttggctgcctgccaaaagttcagtgctagtggcagtggaagctccagctcagaatagcaggcttgaatctattctctgctcttggagagaaaacaaaagtgtcacataagtttgtgtagaatcaaaatacgttggttaagattgttcatctgcagatgttgacccagcatttgaaaagtaattgaatcttttggtgtaaaatggagacatctttattcacttttgctgaaagacatgagacaaaagccagagcaaagaataaaaaaagaaattatctgaactccatttaaccttccagttgaatgcctatctcaccataagaatacaaatgtgtacttgtagagtgtttaaagcctgtctcctattttatgactgcaaatagatcttagtytaaaataatagatcaaattcataaatgggggaaaaaagataagcttgtatagccgaagtgaaataattatccaaatagttccaaaccagaatctaaaactggggatgtggggcggggagatctatttcctaagttatccatactagctttattattgactgcatca

SEQ ID NO: 748214 - DNA, 644 bp, Homo sapiens
ttaactgatctactttatctagttacccacacctatgacttccataagtgaaatgtctttatcagtgaaaacaaaactagcctggataaatggagtaggattgaagacctaaacaaaaagctattcttgagctgcccaggttgtgtcctgcccacagtggcctccaagatcacctgagtgggaggtgaaatccagcttgctcttcccttcaccaagttgctcaccttgacacgggctgcatcagcctggaggacaggctgcctctcccaagtggttctgccataatggctgaaattttgtaatcattactgggtgaagcagaatgcaatttttcacctttgtagtgggcgtataatttataacaataaaaagagaaaatgatggcagataaaatggagagtatagcagaagctagaggtcatrcagctcttaattgttaaagccaagaccctcagtggagggtctgtcaaaggcacctcagtactaatagccactggcggccttgtgctaaactccccctttacttgttcactaccttcataggtttaaaggggcatcaaaatattgctcctttttcatttgtcttccacaaaaccagtttcatgtagtgaaaagaacatgggtatcaccagcactggtgcttg

SEQ ID NO: 748215 - DNA, 558 bp, Homo sapiens
gaatgtcatctacatattataaaactttaaattgtggataaagagagatcccttgacaatgcctgcccaaacaggtagggcctgtctcagaatctctgtggtaataccatccaagttagctgggtagtctggttgcaaggatcctcgaatgcaaagaaatattggaagtcagggtgtagtggtatgcaggaaaaaagcatcctttaggtccaggactgtgaacaatttagtaycctcaggtacttgagttagcaggatatagggattgggaaccacaagatgaattagaaccacaacgtcattaatgaggtagtgatcctggaacgtctccatttcttattgggtttgtgtaccctcaatatcagggcattacaagggttgttgcagggtttgaagatgccctggaacatcaagttatcattgattgattctagctttttcctggcttctggtttttgggatcttgtctctggttaggaaaaaaggttggatctttacaatggatctggacaggtatggcagttgtggcccagccaattttcccttgagttgcccaaa

SEQ ID NO: 748216 - DNA, 558 bp, Homo sapiens
gaatgtcatctacatattataaaactttaaattgtggataaagagagatcccttgacaatgcctgcccaaacaggtagggcctgtctcagaatctctgtggtaataccatccaagttagctgggtagtctggttgcaaggatcctcgaatgcaaagaaatattggaagtcagggtgtagtggtatgcaggaaaaaagcatcctttaggtccaggactgtgaacaatttagtatcctcaggtacttgagttagcaggatatagggattgggaaccacaagatgaattagaaccacaacgtcattaatgaggtagtgatcctggaacgtctccatttcttattgggtttstgtaccctcaatatcagggcattacaagggttgttgcagggtttgaagatgccctggaacatcaagttatcattgattgattctagctttttcctggcttctggtttttgggatcttgtctctggttaggaaaaaaggttggatctttacaatggatctggacaggtatggcagttgtggcccagccaattttcccttgagttgcccaaa

SEQ ID NO: 748217 - DNA, 609 bp, Homo sapiens
cattgagtagtatacatacaacacttatcaatttacattgataaggcaaaaaagtgatgcaatatttcattttcccctctacctaatacagtcttaaattttgcacatgtgacctgtgttgttttcattacatacaagttgcttagtactaaattaacaaggagggaagtraagaatgtaatcacaataagggattgtaaaataatttatgtagaattgtgaaagataatgataaggtaactggattcatgtatgtgctcacatgcagaatactgcccactgtacaaatgcataactacttgccaatgctaactacatcaggcctaagtacacactgaattatcacttgaattcaaatatgaaggataaataattcagtactaaaaagaaagttgcatctctgcctttcttcaattttcaaagtcaacaagttaaagttttaaaatatttaatgttgttttcttgctgtataatggattcattgttgtatttgtcttacttagatgctcagagctaatgagtctaagatcatggatttgagccctttgggggccaattagctttaatatatttttcaacttcaaactctacttaaatcctacataagaa

SEQ ID NO: 748218 - DNA, 506 bp, Homo sapiens
ccagacaggagaaattggcccaaataaagaggctacaggccccttgcaagtccaaaacacagcagggcagtcactaaattgtaaagctccaaaataatctcatttgacttcatgtcttacatctaggccacactgatgcaaaggacgggcccccaaggccttggacagctccttccatgttgctttgcagggtacattccccatgaatgttttcatgagctagtgttgagtgcctgtgtcttttcaaagtgtacagtgcaagctggcagtggatctaccattctgagtctagaggatggtagccctcttcttacaggtccacaagccagttccccagtgggracaatgtgtagagacacgaaccccacattcccctccacactgctctagtagaggttctccatgaaggctccacccctgcaatggacttctgcctgaacatcgaggcatttccatacatcctctgaaatctaggtggaggctaccaaaccttaattcttgctttc

SEQ ID NO: 748219 - DNA, 620 bp, Homo sapiens
taaaacctaagatcagtgtttgagatatttcgcagaccctgcactggatgaatcagctggcaccacccagttcaataagctgttttatctggtctcgtggcccttacccaagaaatgactcagcgcacgaggacagcttcaactccctatgatttcatcttggacccaatcaaccagcacccttgactaaatggtgcyttaaccaccaaagtatccttaaaaactctgatccctgaattcgtggggagactgatttgaataataacaaaactcacctctctggtacagccagctctgcatgaattaaactctttctctattgcaattcccctgtcttgataaattggctctgtcaaggcagcgggcaaggaaaacccactgggcagttacagacacagcttctttccttccttactacttttcttattactattcttccttttgtcctgtcttcctccattcttgcccacctgctttctatccagtcactattaagtacttggtatagagctttgtgcatcctagatgctcaaaaacctttgtaaaatgaattaatgaatcagaatatcaattttcatatggcttgtaacactttctagttatacaatgttaactaggtt

SEQ ID NO: 748220 - DNA, 613 bp, Homo sapiens
agttaagatggtatcagcttaaaatgacctgttataactatataatttttttgtaagcttcatgataaccacagagcaaaaacttataatagatgcattaaaaataatacagaatcaagatgtgctaataaagataatcatttaaccacaaagatagtaaggatcaaaaaaagaacaacagaaaatgagtaaaaatatatcagtaataaacccttacctatcaacaataactttgaatataaatgaattaaattgtccaattaaaagayagagtgactatataacattttttaaaaaggtgcaaataaatgatgcctgcaagaaatctacttcacctttaaagatgcacaaagatagaaactgaagtgacacaaaaagatattccacacaaactgaaactaaaaaaagagtgtaagtagctatatgtgtttcagataaaatttaagagaggaatgacaacaatatcaaacttaagccattatataataataaaggcatccatacagcaagaaaatatagcaattgtaaacatgtatgcatcctacaccagagcacccaaatatatacagcaaatacacatagacctaaagggagagattggttgcaatataat

SEQ ID NO: 748221 - DNA, 527 bp, Homo sapiens
tatgaagaactcacacaattcaatagcaaaaaagaaatcccatccaaaaatgggcaaagggcatgaatagacatttatcaaaagaagacatgcaaatgaccagtagatataggataaaaacgcttaacaacactcatcatcaaaagaaatgcaaataaaaaccataataagatatcaccttatcccagttagaatagctattatcaaaaatacaaaagataacaaatgttggcaagggtgtggagaaagaagaactcttatacactgttagttagaatataaaatagtacatccattatagaaaaatagtatagaagttcctcaaaaaattaaacatggaactactatatgattcagcaatttcaytactgggtatttatccaaagaaaatgaaatcagtatgctgaagagataactgcattctcatgtttattgcagcactggtcacaacagtcaagagatggaagcaatttaagcatccatcaaccaatgaatggataaagaaaatgtggtatttacacactgga

SEQ ID NO: 748222 - DNA, 576 bp, Homo sapiens
atatgaagaactcacacaattcaatagcaaaaaagaaatcccatccaaaaatgggcaaagggcatgaatagacatttatcaaaagaagacatgcaaatgaccagtagatataggataaaaacgcttaacaacactcatcatcaaaagaaatgcaaataaaaaccataataagatatcaccttatcccagttagaatagctattatcaaaaatacaaaagataacaaatgttggcaagggtgtggagaaagaagaactcttatacactgttagttagaatataaaatagtacatccattatagaaaaatagtatagaagttcctcaaaaaattaaacatggaactactatatgattcagcaatttcattactgggtatttatccaaagaaaatgaaatcagtmtgctgaagagataactgcattctcatgtttattgcagcactggtcacaacagtcaagagatggaagcaatttaagcatccatcaaccaatgaatggataaagaaaatgtggtatttacacactggaatgctattcggctattaaaaccagaaggaaatcctgtcatttgtggca

SEQ ID NO: 748223 - DNA, 592 bp, Homo sapiens
gtttaggtagaggctgaagaggtaagggagaaggtgggagtggtagggtagaggttggtttatcaaagttacagttagagaggaagaataagttctgatgttctatcacataatagggtaactttagctaatagcaatgtattgcatatttcaaggtagctagacaaaaaatcttgaaagttaccaccacggagaaatgatcaaggattgagggatagacattgagggatagatcaaaactacactgatttgatcatcatgcaatgtatacatgtattgaaacaacacactgtaccctatawacatgtaaaattatgtgccaaatataaacaaaaacttttaaaaagaaaatttaaatgatagttatgaaataactgagaatatctttaagttgcccctgagctcctgagagaaatgacaatgtctaattcttattaatttacatacaacccttctttggttccaaaatgaacaggcagtggtatttatttttatgtataacacagcactgagtgtagaaaattaaacataaaataaatgttttaattaaaatgaactgagagttcaattttatttattaaataggcaaatc

SEQ ID NO: 748224 - DNA, 542 bp, Homo sapiens
ggaatttaaataaaacctcaaatcataccagttaaaaatggaaagcatattgtctacttggctcaatttccactgttactttccatgagcatataaatatattctaatgaaaacactttctttacttttaaaaattcaaagaccaaggggtctttttcagactgttcaactacatctgattaaaaaatcagctaatgagaatttttcattatcagcttatcaacttatcagctaatgagaatatgtaaaacctttacatttcatatacagcattattaattttacaccaactatggaacaaaatttcagataaacttgtgtacagttctattaaaaaataatttaccacttaggatttttctagttctgtaagctctaatgkgctgaaagatcttaaaaccattatcagctttcactaatcctaggacaccgctccattttatttggatgtataggtgctacacagaatgaataaattaataaataatgaggcagactattgcataaagtatcccaaacgacatagaatgtaattttctttc

SEQ ID NO: 748225 - DNA, 659 bp, Homo sapiens
  misc_feature 77: n = A,T,C or G
agagcagcagacattctttatcaatacgtgtatgtgtgtatatacctgtgtgtgtgtgtgtgtgtgtgtgtttattntactagataatgcccatttgctttctaaaaagactgcaattcctcatgtgtttgttggatgacataggtttttaacttcaggtactgtgataggtctacagtgrtatctcattttttaactataattcacattcgtctttccagcaagtaaatttgaacatcttttcagatgtttgctggccagttgggtttgcttctctatcaattgttacttcatattctttgcccactttttaagtgaatagtttttgccttcttaccagtttgtaaaagttttgtgacagttattaatttctaaattgcaaatatctttttcaaatctataattttctctttattgtgtttgcagtactttttcctgtaaaaacagtagttttacatattaaaatatctaccttttctcttactgcttttggtatatgccatcttggttaaaaaattctacacccctcacccaagagattgtgcacataatctctcacatttttatatgtaactttattatactgataaagtttaaatctttaatctaccaggatattattcatgttagaggaagtgataaaactgtgggtatgagta

SEQ ID NO: 748226 - DNA, 625 bp, Homo sapiens
  misc_feature 607, 608, 609, 610, 611, 612, 613, 614, 615, 616, 617, 618,619, 620, 621, 622, 623, 624, 625: n = A,T,C or G
cacctctatacagtcctataacagaccggcctttattagtcaaatcacccaagcagtttctcagggtcttagtattcagtgaactaatggtctttgaaaaacacacctcatcaagctcagcccccaacttaaaaaggactggacaatacttttaccacctgcccttctcagaattcaggcctgtcctyggaatgctacagggtacagcccatttaagctcctgtataggcgctcctttttattaggcccctgtctcattccagacaccagaccaacttcgactgcgcctcaaaaaacttgtcatccctactatcttctgtctagtcatactcctatccaccgttctcaactactcataaatgccctgctcttatttacactgccagtttacactgtttctccaagccatcacagctgatatctcctggtgctatccccaaaccacccttcttaaagtaaataaataaatttcctcttaaagtaaataaataatctttgctggcaaggctatgctgaacctccttaggcactctctaattagatgtcctgggtcctcccaattcttagtcctttaatacctgtttttctccttctcttattctgtttnnnnnnnnnnnnnnnnnnn

SEQ ID NO: 748227 - DNA, 625 bp, Homo sapiens
  misc_feature 607, 608, 609, 610, 611, 612, 613, 614, 615, 616, 617, 618,619, 620, 621, 622, 623, 624, 625: n = A,T,C or G
cacctctatacagtcctataacagaccggcctttattagtcaaatcacccaagcagtttctcagggtcttagtattcagtgaactaatggtctttgaaaaacacacctcatcaagctcagcccccaacttaaaaaggactggacaatacttttaccacctgcccttctcagaattcaggcctgtcctcggaatgctacagggtacagcccatttaagctcctgtataggcgctcctttttattaggcccctgtctcattccagacaccagaccaacttcgactgcgcctcaaaaaacttgtcatccctactatcttctgtctagtcatactcctatccaccgttctcaactactcataaatgccctgctcttatttacactgccagtttacactgtttctccaagccatcacagctgatatctcctggtgctatccccaaaccaccmttcttaaagtaaataaataaatttcctcttaaagtaaataaataatctttgctggcaaggctatgctgaacctccttaggcactctctaattagatgtcctgggtcctcccaattcttagtcctttaatacctgtttttctccttctcttattctgtttnnnnnnnnnnnnnnnnnnn

SEQ ID NO: 748228 - DNA, 578 bp, Homo sapiens
ccttgtgctatgtagagtctaatgttagataatatctaatttttaatgctaagaagtggcatttgatgttgttactagtatctggtagaaagcaagggacaggaggtcagaaacagtttcctgggaagtgctcttaaactgtttcctatgcagcagggaaggtgaacaaagagaaaccctgtagccaccatttccttatccttcatgagaataaagaaaaaggaaaagatttaacataacctgctcagcaggaaactcaactttacagtttcagaacagcataattyggatattttatattagtctatcgtatccaagcatttcaaaaataaaacaggaacagctttaatgcaatctgtgtttactaatatgagctaataaaatctcataatattattttgtattgcactaatggatattgcattataggatattagttaaatcacccattatttcagtatttggtgtattactcatagaagaagcatacacaccatagtatcagagatctgaggggaaaaatagggtgcagaagaaaagatggccttttaaaaataggttgatgttaagggaaggaa

SEQ ID NO: 748229 - DNA, 538 bp, Homo sapiens
gagaaagaaagatgatgagagagagtttggaacaatacgtggtgttataatttaagggagatttgtcttccaaacaaaaatttcccaggaagattacagaattctggggcaaaatggaattctggcaaaatggaaggtggtgagatgtttctttggtcttttcaaatcttgctttttgcatactgtgtctagagaagtggtctacaaataaaagcaggaacattttgaattggtctacattagatactagcattgaaactcctttgttggaytgtatcctaaaaaaagactgacattaaaaaagattatttgaaagaataatttcatcaatattctttgaaaattggctagttttatattaattaattagttatttctttagtcaaatatttactgcatgcctactatgtgttaggcattgtgctaggtgctggaaagacaatggtgagtattgctgtgtgctccctgcttccagttctcattctaattatataccataaaggaggaagaaaaggaaagtcttcctattttggagatt

SEQ ID NO: 748230 - DNA, 606 bp, Homo sapiens
tcacttgagcccagtttgagatcatctttggcaatatagtgagactgtctctacaaaaaataaaaataaaaagttagacaagtgacgtggtggatgcctgtagccccagctgcttgggaggctgaggcaggaggatcgcttgagtccagggctagactgcagtgagctatgatcatgccactgcactctagcctaggcgagagagtgagaccctgtctctaaaaaaaaaaaaaaaaaaaaaaaagattaattatgttaaaatgttttcttgttatattccatgtaaagtattttttggcattatccttcttatgagttcagaggaamtatggaagaatcttctagagttaatttaatacctgtttatttctccatataaagtctcactggagggttgtgaagattaatgagatgtttataaaatgtctgagacctctggaagaaaggtgatatgtaaatagagtattagtagtagtagctctatgataaactaatgattaaaatatcttccttagttatcagaagtaataagttaaaatccattgagaggtttctcttcattagaaacttttcacgtatttttttcttcatggtgtcaaatagaga

SEQ ID NO: 748231 - DNA, 606 bp, Homo sapiens
tcacttgagcccagtttgagatcatctttggcaatatagtgagactgtctctacaaaaaataaaaataaaaagttagacaagtgacgtggtggatgcctgtagccccagctgcttgggaggctgaggcaggaggatcgcttgagtccagggctagactgcagtgagctatgatcatgccactgcactctagcctaggcgagagagtgagaccctgtctctaaaaaaaaaaaaaaaaaaaaaaaagattaattatgttaaaatgttttcttgttatattccatgtaaagtattttttggcattatccttcttatgagttcagaggaactatggaagaatcttctagagttaatttaatacctgtttatttctccatataaagtctcactggagggttgtgaagattaatgagatgtttataaaatgtctgagacctctggaagaaaggtgatatgtaaatagastattagtagtagtagctctatgataaactaatgattaaaatatcttccttagttatcagaagtaataagttaaaatccattgagaggtttctcttcattagaaacttttcacgtatttttttcttcatggtgtcaaatagaga

SEQ ID NO: 748232 - DNA, 570 bp, Homo sapiens
agctctaaggtcactctgtttataacatgatgccttaagaatgaaagctcagacaatatctggctttatttagctaagtcaggtggtaaaatacgaagaataacatgaaagaaaaattaggaattctgcatcttgctcagtgacttttctcctctttgtttttcatttagttgatttaaatacataattaccaaataagtttttgaaaagtcagtttattcaattaaatttgtggtacaaatccaaattaagattcttatttaattatattaggtcttatattarggcttaagaaatctaaagaggatgctatagacatatcatctatacattaaaagaaaaattaaaataacttcaaaaactagaataaaaaaattaggccgggcgtggtggctcatgcctctgtaatcccagcactttcggaggccaaggtgggtgaatcacttgaggtcaggagtttgagaccggcctggctaacatggtaaaaccccatctctaccaaaaatataaaaaattagctgggtgtggtggcatgtgcctgtaatcccagccacttgggaggctgaggca

SEQ ID NO: 748233 - DNA, 517 bp, Homo sapiens
gaacaatgtactccatgtgttctgagagtgttaaatccaattacatttaaaaatgacttattattgtatcacttcagttgactcaagttcaatttttagtacttgatagacaaatggtaaaaataataagtaaatacataatgcagccactttagataaggccctgaggttcaaatcaacatctgaacattatcaagcatctgattgagctattcacttttatggaacttctgcaaacagaagacagcacttctctaaaactttctagtgatgactgactgtggttctttcattttacctagacagataactaactaataatgcagttttttgttctaaatatcccttgacaattattccmattttctgtttgcctttaacattgaagatttggatgccgagtaccaagtacgtatattgtatcctttttaataatataattccaattactacaaatgtaattgtgaagtcagagctatatagtattttgatagcagcacttgtttttctaactgaa

SEQ ID NO: 748234 - DNA, 633 bp, Homo sapiens
cccagaggagttgaaatactttttagaaattgagagtataatcttgatctgctcactgcagagggcagcgttgccccaagatttgcaatttctctgataccatcaatatgaaacagactttataataataaaaccattataaggaaaaaatgtaagtttcattgcttctctgaagcatgccagacatgctagctgaatagtcaggtaagatatctcatgaacaagtttcatgtaaratttctctcttaaatagcttttcttttcttgttctttctctcagattccaggagaaatctgctgcatagaaatgtattattttacctttctttaaatcctaaatgtttatttgacgttatggtatccatgtgctaacagtttgaatttaatttaaattatcttccatctataaaatcaagcttttttgtttaatgatttggcctcaggtagtttgagttacattatcccaagattcaaaatttaaatgtccgtgtggttaggcacatgacattatgacattcggatcttgtttgtaatttcctttgcatagacatacctcattttggtctccttttcatgatctaaatcgaatttccttaagtagctattatccaaagtcagactatgaactaccaa

SEQ ID NO: 748235 - DNA, 534 bp, Homo sapiens
ggcatacaggctgatttcaaggaactcacacaaaagtggcagagacagttatgaggagcccagaactacaaagagtacagacagggttataatggaggtaagtagaggaaatgtgattgcaaaaggggctctcccgagacaatattagtggatctaaggtttacctgaagattcttgatctcaaccttaacaagcaagagtaagccaagtgaaagagaaggataaagatgttcgggggatatgcaatggcmccatggcaaaaaaaaaaaaaaaaaaaaaaaaaagaaagatcatgatatgggtcttttgatacggctggcagtccagtgtatatggggaaataaaaagggatgagtcctaggtattttattctctttgtaccaattgtgaatgggagtttgctcatgatctggctctctgtctattattggtgtataagaatgcttgtgatttttgcacattgattttgtatcctgagactttgccaaagttgcttatcagcttaatgagatttggggctgagccaatgggttt

SEQ ID NO: 748236 - DNA, 649 bp, Homo sapiens
tgtatagttatatatgcagtatgattccatttacataaatttcaaaaactgagacacttgtttgcaaatgatcactttagcatgtgaagaagagatggctagtcagagccattccttcattagcccttgttttgttggtaggcaggctactaccccttaaagcagcaccagggactggtttcatggaagacaatttttccacagatgggagacagatagtttccggatgaaactgtcccacctcagatcatcaggcattagttagtctcataaggagtgcacaacctagatcccttacatgtgcagttcaccatagggttctcatttctatgagaatctaatgcccctgctgatctaacaggaggcggagctcargtggtaatgctggctggcccctgctcacttcctgcagtgctgcccagttcctaacagcccgcacactggtatctggccatggcccacaggttggggagccctgccttcaaggcaggaagttggcccctcacttcctatcctattttatgggctttcttccactacctgtattgaaccacatggttcattgtctatttgcctgtggcagagtgaaaactgaggtcaaacctgtagtacaaaacctatcaccaattcagtgggtagaaagtaaaaa

SEQ ID NO: 748237 - DNA, 592 bp, Homo sapiens
gtgcagaggaaagggcaaaagggggaaccttgagagtaagtatccagcgtaaatgcccattgaatagaaatgtattcaaagacactggctctgtgatacaaagagccttaaaattaattgagtggaccagatggttttgcccatttgaagcaaatggggtggattacaaagtaaatcttatttgttgtgttaagaggatcattaatagcaaaataataaaatcaagtataatacttttagaggaaaatgacctttttcagaaaaggggtcacacagatgcaagtttcttattgatgtcttgatgttagctagcggtttctgagtgattaagtcattgaatattgtcaaagggaagctaagttaataaggtttataatgggatattttmccaaaaaaaaaaaaaaaaaaaaaaacagaagtattagtgaaattattttaaacctgtatgaggtgataactgcaagtctaggcctcctgttcttcagactggccagctatcaagtgggggttcccacaacccctttcttggattcaacaaatttctagaacggctcacaaaatttagggaaatattttcttatatttactgatt

SEQ ID NO: 748238 - DNA, 667 bp, Homo sapiens
cacaacatcaaactaaagtcctgatctacatcaggtccgaatgtggccactcttgatctgtagatctaggaagtaaaaagacaagttctaccatggtgtcaaaagggacaaggtcactgcagtaaacactgccacacgaaaaggggaagaatggcaggcatattttaatcactggtctctggacattttgaaattatattgggcagttattgtcaggtcttcttctgtaaaggaaagaaatttcctctgataagactctggttctactccatgtaaatgggtcagtgcctttccgggaaaggtggattttttttttttctctcatggtagccatcagaatctcccacaaggcaaacttagtcatgcaagcacatttattttctgctactatgccatttgtcaaagcaagtctcatggccaagtcaaaagtcaaaaagaagagtacattactgtacatccaccttgaaggcttaacaagcatrtggttccataatactacaacaaaagagtgaagcctcagggtcaataacttaatcttccgaaagaaccctgttttataatataacgccataaaagtttgacctgtcattattccacattaaggctgtcatttgggaataaattagatcccaaatcagggtcaactgaatataaacataaatatttt

SEQ ID NO: 748239 - DNA, 535 bp, Homo sapiens
cggtggctcacgcctgtaatcccagcactttgagaggccaagccgggcagatcacaatgtcaggagattgagaccatcctggctaacacggtgaaaccccgtctctactaaaaatacaaaaaattagctgggcgtggtggtgggtgcctgtagtcccagctacttgggaggctgagacaggagaatggcgtgaacccaggaggcrgagcttgcagtgagctgagatcgcaccaatgcactccagcctgggcgacagagcgagactctgtctcaaaataaataaataaataaaatgaaataaaataaaatgaaaacacattttgcaaatccctaacttagagctggcagtcttttcctggctattaagcaaaaatatcacaatccccttcaccattgttaacttcatgctttgttaacatctatttatccagtttctgtggtctttgatttggcactgcctcctgcctgcttttttggctagttcactgctaattaacgcctctctcacagagtaggcaggagaaatcaaaggccc

SEQ ID NO: 748240 - DNA, 472 bp, Homo sapiens
cattcgtaacaaaacaagaaatacaacaattacagtcctcgtttctgtagctggtcacatggtggttgctggtattcatggttgcctctttccactacccattctgtattccctttgcactcatctcgcaagctgatcgtggtttacctggtggggtgacccaraccttcattcttcaggggtgtgggccattcatagtcctgtatggattgttgtcatttttatcgactgtaatcacagggcagggtacagagatgtcctaagggatctccttaagccagacatactcctccttacctccattgtgtagcagttccagttcctcttgggcaggatcaattaccccagccaacactgtaactcccttccttgcctattgattcagaggtgtgaggagcccaaagtggctgggtggctgtcttaacttccagttcagtggaatgattgtaatttttcatcctctaaataatga

SEQ ID NO: 748241 - DNA, 537 bp, Homo sapiens
gaacactgacgccactaaatgctggggtggatgtggagcaacaagaactctcattccttgctagtggggatgcaaatgggacacacattttggaaggcagtttgggagtttcttacaaaactaaaattttttttgtaagaaaaaaattcattcggtcaccatagagatgtcaaaaattgccaatgctggccgggtgcggtggctcacacctgtaatcccagcactttgggaggccaaggtgggcagatcacttgaggccaggagttcaagaccagcctggccaacagggtgaaaccctgtctctactaaaaaaaaaaatacaaaaattaggccaggcgtggatggctcatgcctgtaatcccaggactttgggaggccgaggcagstggatcacctgaggtcaggagttcaagatcagcctggccaacatggtgaaaccccgtctctactaaaaatacaaaaaaaatagctggacgcagtggcacgcacccgtagtcccagctactcgggaggctgaggctggagaatcgcttgaac

SEQ ID NO: 748242 - DNA, 622 bp, Homo sapiens
gaggaacgtattggaaatgtaagaactgttcgagcttttgggaaagaaatgactgaaatcgagaaatatgccagcaaagtggaccatgtaatgcagttagcaaggaaagaggcattcgcccgggctggtttctttggagcagtaagtagatcactttggaaaaagtaaaattggcaaatgttagaatggtgagagttttattctgtggtgctcagcataagtagaaaataattttaatttttaaaattttagtcttaatttcaaggccaagaatgactttctttaaaatatttttgtgaaaaaggaagaaacaagtaaatgtccttagagaaaagtcagtgcatggtgtgatygggcactgattctttgtgcggtgcaggccagcggcatcagctttgcctgagcactggtctgcctcaccaagactcagctccaccccaggtctgctgggtaggaaactggggccagcaatctgtttaacaggccttccaggtcattctgatgccagcaaagtctaaggattaaccaaaatcacctcagtgtgtttcaagaaacaagtacaaaaaatcaatcacaatgcactcaaataggacactgaaatagaaaatcaccatgagggcaa

SEQ ID NO: 748243 - DNA, 472 bp, Homo sapiens
aagcttgtcactgagggaagaatactcacaggtatccatcctgacagtaggagtcgcgctttgtgtgctaagtgaggcggtgactcgaaaaatacatttgtttccacccacgccatctcccactgacaaatgctgttcctctcagggccaaaattctagaattatattycaacaaatagatttactaaaaaaaaaaaaaaaaaaaaaaaaaagaaaaagaattaagagaaaattaaaagttaaaaaaaaactgccagagttatagcacctgcctaaaattggttatctagttgttcccctaccccaaaaacagtactttctaaagcaatctagtgttgctgtctcaaaccagggcacatgtctaaatgggcccatagttaaacacatctggtcatagggctggtagacttgctggaactatataaaacatctattcttttataactccaaatgctcagctggttaagaatac

SEQ ID NO: 748244 - DNA, 472 bp, Homo sapiens
aagcttgtcactgagggaagaatactcacaggtatccatcctgacagtaggagtcgcgctttgtgtgctaagtgaggcggtgactcgaaaaatacatttgtttccacccacgccatctcccactgacaaatgctgttcctctcagggccaaaattctagaattatatttcaacaaatagatttactaaaaaaaaaaaaaaaaaaaaaaaaaagaaaaagaawtaagagaaaattaaaagttaaaaaaaaactgccagagttatagcacctgcctaaaattggttatctagttgttcccctaccccaaaaacagtactttctaaagcaatctagtgttgctgtctcaaaccagggcacatgtctaaatgggcccatagttaaacacatctggtcatagggctggtagacttgctggaactatataaaacatctattcttttataactccaaatgctcagctggttaagaatac

SEQ ID NO: 748245 - DNA, 605 bp, Homo sapiens
aataagcaagctggccggcacggtggctcacacttgtaatcccagcactttggaaggccgaggcaggaaggtcacctgaggtcaggagtttgagactagcctggccaacatggtgagaccccatttcttctaaaactatgaaaattagctaggcgcrgtggtgcatgtccgtaatcgcagctactcgggaggctgaggggagagaatcacttgagccctgtgcctgggaggcagaggttgcagtgagctgacatcgcatcactgcattccagcctgggaaacagagcaagcagagcgagactcagtctcaaaaaaaaaaaaaaaaaaaaagcaatgggctggaaaatatttccaaacatatatctggcaaaacaagtatcctgaatacagaaataaattgtaaataccagtaataagaagataaacaatctaattaaaaataggaaaagagtatgaacataaggattgccaaaagaacaaaaacaagtgctgaacattattagttatcagagaaatgtaaattaaactacagtgagatactactacatacccaccagaatggctaaagttaaaaagcttgaccacttcaaatgttagtgacaatg

SEQ ID NO: 748246 - DNA, 633 bp, Homo sapiens
aaaaagagaaaaatgcctgtaaccacaccaaatcaaatgcttactacatacagggtttctctaaagctcaaattccattaaagagcctgcttacactacagatgggaaaaatttaaatctggggacacctaccctttgagacggaatccactctgtcttgagtgaggtggattctgatgcacgagtgtcagtaaaaccagagatgaatcaaagagtccaagttaccaatgacagggaccacctttccctgggaagctgagagactatcaacattcctggatctcatgttataagagaagaattcacacatttgaggtgaacatcctttttctggcaaataggaagaccagttacctgcctttttaaagatgaacaagaaaaaaataaaaggtaaaggaggaaagcaaaagaagacaaattggcatgtttccgatacgaacattttgtctcctagtcaaccctccaagccccactaaaagaaaagaatayagcataaacagtgagagagggtgggctgggcagaagagggaaagaaagagggggagatcatttcttttaatttaatttttaaaatgacaactaaattcacaaataaattataaatcacatggatgaaataaatgaccaaaatgt

SEQ ID NO: 748247 - DNA, 514 bp, Homo sapiens
gtacagaactcttacaactcaatagcagaaaaaataaacctgattaaaaaataggaaaaggtcctgatggatacctttccgaagaagacataaaagcaatcaacaggtatatgaaaagacactctcaacatcattaatcattggaaaaatgcaaatgaagaccaccatgagatatcacctcacacgttagtatggctattattaaaaacacaagagaggccaggcatggtggctcatgcctgtaatcccagcactttgagaggccgaggcaggcagatcacaaggtcaggagtttgagaccaccctggccaacaaagtgaaactccrtaactactaaaaaagaatacaaaaaattagctgggcatagtggtgggcacctgtaatcccagctacttgagaggctgaggcaggagaatcgcttgaaccttggaggcagaggttgcagtgagccaagattgcgccactgcgctccagcttgggagacgacagcaagactctgtatcaaaaaaaaaaa

SEQ ID NO: 748248 - DNA, 617 bp, Homo sapiens
aactactgcttgagcttcatcccacacattttgatatattttcactattattccgttcaaaatattttctaatttccattttaattaactctttgattaacatcttaattaactctttaattaacttaattaacctatgagtatgactcataggtgaggtagaagtgtgttgcttaatttccaagcatttggatattttctagttatctttttattattgatttctagtttaattccactgaggtgaaaaaaaattctcctttgaaagttgttgagacttctttgctccagtrtatggtctattttggtaaatgttccatatgctctttaaaaagaatgtatattcaataatttggaagtgtagaattctaggtatattcactcagtcaagttggtaagaatttatttcttgagagaagaaaacgaagtatttcccgaagtttaagtgataagagaaccacatttactgagtgcttactcctggaatttttgacattgaactcctcagcagcaaatcatggatatttgtttcacttccatctgactgctgaacatctctatctagatgtgtaattagcatctcaaatgagcacaccccaaaaagaattcttgatttt

SEQ ID NO: 748249 - DNA, 465 bp, Homo sapiens
aaagcacccggaaacctgcactccccttgaccagaatcactctttcaacttcatgccaggtctcttggccaccttcaaactcagctcaaactgtactgycttagaaaaccctttctacatctgaccaatggtcctggcattctgccttctcccagcacttggcaaataacttggcctttcttacgcaggttgagtatccctaatctgaaaatccaaaatctgaagtgctccaaaacttgaaactttaagagggtcaacatgatgctcaaaggaaatgattgttgcagcatttcggagtttggattttcggattagagatactcacccggcaagtagaatgcaaacattcccctccaccgcaaaaaaaaaaaaaaaatccaaagtccaaaacatttctggttccaagcattttggataggagctacccaacctgtagtcaactgtacttgttgggatgtttacaat

SEQ ID NO: 748250 - DNA, 602 bp, Homo sapiens
agggagtggagagagaaggcacgcacagcatgagtggaggctggtctactgtgctgccacatttgggcctgggagctcaaaggagtccaacaaatctaaatttaaatttggcctcctaggttgctgtgaagatatatttgtcaagggagaaagacagaacatgttttatttaacagtttgttagcttgctacattaatttcacatattcacacaaagggtrtgtgagcttccatttgtactcttgccctatgcaccacaatgttagaatcaggccttgcaagagacgagactggagtggatgcacgcttcaaatcagaatgcacctcatatggcaaggcacgagcactggatttgtcctataggcgctgtggggtaagattcacagaaggagcatgatcaggtgattcagacagattaccctccaactgtgcacaaggagggtaaactggggtcagacccaaaggagtgtgtaagagaagaagaagggtctttgctaaaatgactcttcaaggaagtcttccatggacaaccctatttaaacctgtgactgtcacccggcactctttataccccttctctttatttttctccttaacactta

SEQ ID NO: 748251 - DNA, 419 bp, Homo sapiens
tgaataaattaatgaactaatagataatatggtgcatttatgtgacactgtattatttgtgaagcaccttcataatgaggttctccttttgaagccgtatgaatctctgtaaggctctagaaattggtcaaccagagcctggctgtagataccccacaatagccatgacagttgccacgtgggaaagcacagggtcatggcaatgcataggaagagccccttatcccagtgcrgatggagcagggtggggagggaatgtatctgtaagagaagacttcttggaagaagaggcttgtgaggcttgtgaatgtaaaaatgtgagtaaaaattacccaggcaaagatggggttggcgtgggcaagcacaaaggcatagaggcatgagagggcaaactgaatataaaattgaaactaataaat

SEQ ID NO: 748252 - DNA, 587 bp, Homo sapiens
acacttcagagttactctgcaatgaggtaaaggagctaggctctgacatacctgtaccagacaggcacttgctagccctggtgtgggagtataactgcccaggtttctcttggagaagcgtaggcatcagctaaagcaagtattcagagatggttacaggcatcagctgatagctccaaaactcttggaactggagaaaaggcatagtggttagtaaagggaccctgggtggacaccagtgacatctcctatggcagcttagacttacacagaacagtctgtgtatggcaccatcctaagtgatttatgtctattaggctttaagacaaccctgtaattattattcacattttacattgtgggaactgaggcacagaggggttccacagtaagtaaatgatggggccagtattcaggcctaggaagctggttctagttttcatacscttagctgctgcctccccttccttgtttgcaccaggcactgtagtaggcactgaacattcaacagtgaaatgaataaaaacttcctgcccttactgaggttactttccagtgagggaagatggacagtaaataagtaaaac

SEQ ID NO: 748253 - DNA, 648 bp, Homo sapiens
gtttcttccatgactttccactctcgatcaaatccctaatacataattggcaaattgctggaggctcagtgtaggacaagtctgagcattaataaccacagagggacccagtcatagggatgtccccaactttggtgagttttacctccacgagctcaaccgggttctcactgtaaacaaaggagtaaaagcttctcattctccttttagggggagagaaattcaccactttgaaatacactagagcactctgtttctttctaacaagatctgtcctcaggagaaaccattttatcagagccttacctgcttggattttatgmgagcctaagccatctgggtgaagggaaatacccaactgcagccctctctgaactgccacttggaggggaagaaatatgcaactccaggccctccagccatcctgtcctcctaagagggggcaaaaaactgagaagtacttgtgaagttcacagtccagggacatgggctcattaaaggactagtcctaccaccatgttaataaaaggctatttgtagaagttccttttacccagtacatcatgcccaactttcaacaacaacaacaacaacaacaacaacaaaaagtcaaggtaaactaaaaggcaaaaagtaaaataaaataaa

SEQ ID NO: 748254 - DNA, 641 bp, Homo sapiens
aaattcttgatcccagcctctacaattctgttcttcttctacttttcttctatttcaggaacagataccactgttcttccaatcgtgaggccaaatatctacagtgatgttgtttaatatgctgaccactaaacacacatggctcttgagcccttgaaatgtgtgtggttcacccgaattaagatgtgttgtaagtgtaaaacacaaaccaggtttcaaagggttagcacaaaaaaaatttaaaagaatgtagcatagcttattaatatttttattaattacatattgaaataatattttgagtatgatgaataaagtacatcrttaaaattaatttctcttgttccttttacttttttaaactggctactagaaaacaaattacatatgtgccttacatctttttctattggactgtgttgatctagagctgatattaatttttctcatttcctcagataccaccccaattcccagccattggcagaccctgtttcatcattctccaatacctactgtgagcctgcctgtctccccaacagttttcacagtccaggaacctatgatctctgccctggccactgcaagagcctgctacctgatctctgtgcttctcctccagcctctgtctagtaaaatct

SEQ ID NO: 748255 - DNA, 638 bp, Homo sapiens
gaatatattgggttactgtactccccccacctttcaaacataaaagtttcacttttatataaacaataaaaatctacttaaaaaataatgtaccctgttattccaaaatagtgaaatttgacccaaatataaatctttagttatatcctctgacattagaacttcacttgtctgtggttcttgtcttttattttgccttctaattggtattcacttgatttataaatcccattgacattattcttcttataaaggcattttgtctatctaaattaaatcttattcacttgattttmttttacatcttaaactctcaagatccatctgcagcttttccgtttgtaactttccagtcttgagtgtgtaatctcctcatttgcaatcatctctagggtttactcaagttatttttttctctcttctcttcaagttaacatattagaaggatattgaccctaggattagttaccttttgaaatctccctttaatttttgggttattcttgactattataatcagtattcattattttcaaccttgaagcatcagtgatatgcttcatggctatagaaagtgaaaaccttcttgcttatttgtatttcagaaagaaggtgattaattctgcctaagttcgaca

SEQ ID NO: 748256 - DNA, 575 bp, Homo sapiens
tttctgttcctgcattagtttgctagggataatagcctccagctccatccatgtttttgcaaaagacatgatcttgttcttttttatggctgcatagtattccatggtgtatatgtaccacattttctttatccagtctatcattaatgggcatttaggttgattccatgcctttgctattgtaaatagttctgcaatgagcatttgcttgcatgtgtctttctggcagaacgatttctatttctctgggtattatacccagtaatgggatggctgggtcaaacggtagttctgcttttagctctttaaggatttgccrtactgctttccacaatgattgaactaatttatattcccactaacagtgtataattgttccttttctccacaaccttgccagcatctgttgtttcttgactttttaatagtagccattctgactggtgtgagatggtatctcattgtggttttgatttgcatttctctaataaacaatgatattgagcttttttacatatgcttgttggcttcatgtatgtcttcttttgaatcatgtctgttcatgtcctttgccc

SEQ ID NO: 748257 - DNA, 508 bp, Homo sapiens
aggctagagtgcagtggcacgatctcagctcactgcaacctccgcctccggggttcaagtgattatcctgccccaacctcctgagtagctgggattacaggaacgtgccaccacgcccagctaattttttctatttttagtagggacagggtttcatcatgttggccaggctggtctcaaactcctgacctcaggtgatccatccacctcggcctcccaaagcgcagggattagaggcatgagcaactkctcccggcctttttacccctttcttgaaagcacactctcttaatagagctttagaactagcctcaatgtatagtggggcaattctttcctaaggtaattttgtattttttgcttttccatctaaattttagaatcacattgtcaaagcgcatggggaaaaaaaaacatctgttgggatttttactgggattgcactggagttatagatcaatttggagaagggaaaatatatttatatcattgaatatccttttctatg

SEQ ID NO: 748258 - DNA, 566 bp, Homo sapiens
aaaattgaataatctaataattatttccatttactgaatttatgaaagaagctgaaagaaaatgcagtttgtcgctaaataacaactaaaatctgagattctttttactatttttgccttttaacaatgccttctgagaatttaattttaattatattattccatttaattcaacccaatccattctaacaaaaaaatattcaaattttgtttaagcacagtgcccagagttcgagcagggcctggatgatgtatcataagggtacatcctagaaacaaaacattttagtaacatgaaacattaaaagtgaaaaatgtgrctgccttaagtgatgcatacatgtggtttaaaataagattccttttaatcttgatgagttttgaacataaacacttaacaccgtaaaggacatagggggtcagtagaaactttggcctaagccttagacttgttggcaatgctacagtttatttaaaatcggaaagcattccccactagtgaaaaaaggaaaacaaaacaaaaattatactcaatatgattacccagcactagaacagtaaactta

SEQ ID NO: 748259 - DNA, 630 bp, Homo sapiens
agtgtcataggatattccactttaaaattaatgctatattgtacagtcagcaatccatagcatgatagccacttttgtgtaagtcggaaagttatactgcaagaaaagggcaacagctccacaagtggtctggaatggaaatcaggaatttctcttgacacattaaactaagcagtctccttcactgaccccaaatttatcaaggactcgttttatggtgagtcaaggcaaagaaasgaaacagatgaggtagatcaaggacacgaattggggcctggagaatctgtaactcatgccaacctcaacccttggtgacaaattgtctttgaactgtcaagccttctctcacaatgggttaatcgtcatctaaaatgaaaatccctctctttgactttgaaaatatttgttagaggaaaaaaagtggaataaacacacacacacacacacacacacaaatagcaaagaaaattttttcattccaaacaagaagctacttttggtagaaaatgtgtcatttttaggagcagtaaaacattaaagatgaatatccttactatttgaatcctaaagttacatttaggccttttctattttattgggcacagtagaaagttcaggtcaaatggtaac

SEQ ID NO: 748260 - DNA, 584 bp, Homo sapiens
actggtgaaaattttgtgggttttttgtgtgttttttcctctgttttatgaaatattacaataaataaccttgcatatgaatcccctctcaattgtgtgaatgtatttataagacatatgcctagaagtgtgattgctcagcaatcttagtatgtaatatctaaaattttagatattaaaagaaaacggctaatttctctttaaagttacactaatttatgttgccaccaagggcatatgagtgtaaacatttcaccacatccttaccagcaccagacagtatcaaccgtttcaatctttcccaatgtgataagtaaaatggctttctmttgctttaatttgcatttattttatgatgagttaggtttaaccttttctaatattattaatccttcctgtaaatttttctctgaattttatcctcaggacatttggcattgttcacgatctcatttacttttcatactcatcctataatatgatatgggtatattattatgcacattttacaaaaagaaaccttggtcgcatgatactaagtataacgccctatattatctaactgataaatggcacaggcaaag

SEQ ID NO: 748261 - DNA, 646 bp, Homo sapiens
aacagcaagacacatcttctaaatctaggagaagttttagccatatcaaaattaaaacaaaatacatgmaaaatatttttcacctcttaaaattctacctctacatgagttaccacgtttcatacctgatgacatttatgaagtatgaagttatggatacctggtaacaaaaacactttactttggaagaaggaaatgtgatgtgggggaaagacagatttagaatttcgttagatctcagtattaattttggctctgcctctcattgactgttacctttacataagacatgaacttcatgaatgtatttaaaccctctgaactttagtgggaatattacctccctcaccagattgttctgataattaaaccagataaagtgtgtgaagtgcttagcaatgaataatctgcatttgatatttgattacctcttgcatttttttgccccatcaattaccatttatttcgtattcttcctaacagatttttttaaagtacatggggagtagatttacacaacctttattcccaggtaagaattagctacctatagttcttagaaataaatatattttgtgacttaacagtacatggatatcattttttgctcttagtatgtaaccatcttggacaaaatcctatccct

SEQ ID NO: 748262 - DNA, 615 bp, Homo sapiens
attatcataaatttaataaggtggtgattcaaagtacagttaccgttccagatgtgatttcttttttctattttttttttttaattttgagacagagtctcactctgttgcccaggctggagtgcactagcacaatctcagctcactgaaacctctgcctcctcagttcaagcaattctcatgcctcagcctcccaagtagctgggattacaggtgtgtgccaccatacccggctaattttgtatttttagtagagacagggtttctccacgttggccaggctgatcttgaactcctgacctcaagtgatctgcctgcctcagcttctcaaagggctgagattacaggcatgagccactgtgcctggcccggaagtgatttctttactggccacaactaagctttsatctggcaaaagaactttttttttgattagcaaaaacttccaaaagtagtttgtattcacgtgcaaagacagtagtatattcttttaagacctctcaaactctgtgttttaatagaggatgcaaagaccttgatatttcaccattccttgaggtatctatttttttgcttattaaattgatggcatcgtgtttatttgacctttaaata

SEQ ID NO: 748263 - DNA, 615 bp, Homo sapiens
attatcataaatttaataaggtggtgattcaaagtacagttaccgttccagatgtgatttcttttttctattttttttttttaattttgagacagagtctcactctgttgcccaggctggagtgcactagcacaatctcagctcactgaaacctctgcctcctcagttcaagcaattctcatgcctcagcctcccaagtagctgggattacaggtgtgtgccaccatacccggctaattttgtatttttagtagagacagggtttctccacgttggccaggctgatcttgaactcctgacctcaagtgatctgcctgcctcagcttctcaaagggctgagattacaggcatgagccactgtgcctggcccggaagtgatttctttactggccacaactaagctttgatctggcaaaagaactttttttttgattagcaaaaacttccaaaagtagtttgtattcacgtgcmaagacagtagtatattcttttaagacctctcaaactctgtgttttaatagaggatgcaaagaccttgatatttcaccattccttgaggtatctatttttttgcttattaaattgatggcatcgtgtttatttgacctttaaata

SEQ ID NO: 748264 - DNA, 456 bp, Homo sapiens
tgtctctctctgccttttagtctctcttcctatttctctccctactcttcctctcaggctcctctgtctctctccccatctctcttcctctctctctatctcactcccttctccccatctctttctgtctccttcttctccacttctgtctccctcctcctctccctctctgcagctgttcaggcaggactcctaggccacctttcagggtacctgcagggcagcaggaccttggcccccatctcccagcaccctcaaggtcaggggtgtgcrcctttccatgctctcctgggtgggcaccccacactccaggaagcagaagctgcaggtcactgctgactcgagtggcacaccgacggggtgcttccacttgtaattgtgacttccatcttgtgatctgctgaggtcaaagcagaggacacatgctcaggccggaccctgcaccagggtgggggt

SEQ ID NO: 748265 - DNA, 604 bp, Homo sapiens
attaattaggagacagtgatagacttagctgactaaatttcatggaatgtaagcattcttttttggagtattacatactgaattatccaaaatcccagaataaactacatttctattacaggaaacaccaataaatgtgttcccatttattttattttttaactttagacattttgttattggtgagaatatttatctctgcttgatttcatgattatgcttttgttacacacacagaaaaactttaccagtttttaaataggattctactcttgctatgtaaagtatttgtcactttargcattgctttctattttctggaattagattttgccatgtttctattatactacctttattgtatttattcctataaaaactcaagcatatgttctatatccatgtcaaaataagtctaaatcttttttttttttttttttttttgagacaaagtctcgctctgtccctcaagctggagtgcagtggcgcgatctcggctcactgaaagctctgcctcccgggttcacgccattctcctgcctcagcctcccgagtagcggggactacaggcgcccgccacaacacccggctaataagtctaaat

SEQ ID NO: 748266 - DNA, 625 bp, Homo sapiens
gacgtggcgcaacctgagctggggtttcaggagccgcccgctgctcctgggcctcaggctgttgactggcaacccgtcttgaccctctatccctgcatcgggtttagggctctgggtgactcagcggttttacaagtcattcaaaccccccagggcacctacgtgcaaggggtcccagtgttcctcaccgacattgcgtattgaccactatctgccacccacgttgttcccagcctcccttccttccacctggacgttccccccagccccacttctgctccactcctcccccgactggacctgaagcctgagcttcccctgaacttggagtacgcaacttacaacatgcaagctgccaaacaccctttctgtacaaggcgattggaatggaactgtcatgtacagtgaaagtacacgtcacgtttttcagccaagaagaagccaacccagacaacctggaagaagtgggmtgcaacaaggatcactaagcatggaaattaggaaactgtattcttaagtccagagaagtacgattctggaaaaaggattgatgacctagaattaaaattccagaagacactcatatagacatgtgggacatgcgaaaactcagaaggagctagaa

SEQ ID NO: 748267 - DNA, 612 bp, Homo sapiens
ccatgcttcaatacgaagtcgcctgttcctagtttggagacgcacggactccacagaggctctggtcctgaccacacctgtgttgcctgcctggaccttatagtcacttcagcaggacccctggcgcatggcacgccaggtgtttgtraaagcgagccacaaacgatgctcttaatgtacacgtttgttggtgtagacttgtgtgactatggggaaagatgcgatatgaatggagaacagagactggagccatttttctaccttcctttctgcttttagtaaacacattttgtattggcgatttgtgaaagtttagtgaaagaactgttctataaaataagtctgaagagaaaggtttatttagaaggattgagtacacaagagaaaaatctttgatgtaaaaagttatctgtattttatttggacgtttacaaaggagtgaaaaccagccaacaacagcctacctaataaaatacaaaatacaaaagttcataatacaacatttatcaaactctgaaaagatgggaactaactcaacttaaacatctaagagacacctacagccaacatcttggttaatggtgaaacattcaaaatattcccattaaagcc

SEQ ID NO: 748268 - DNA, 573 bp, Homo sapiens
caaaataaataaataaataaatgaacgaataaataaaccaggaggaattaccaagggctcttggtgcctgcctgcagtctgagctacttggcaacctgatgttggaggatcacccgagctgaggaggcgcaggctgcgctgagctgtgattgcaccactgcactccagcctggatgacggaatgagaccctgtcttactccacgtaccaatgtttagtgaagcattctggtggtagaaatatcctggaagtagcgtatcagcagaccaccacctgcataatgtaaaagctgtgcatctttccagacagayatacagcaggaagatagtggcacatgtgcgtaggatgactgcaagggggctttctggcttatggatgacagaccccaatggcaagccaagaagcagctcccactgcacagtgctcattgtgctccatgccatgcttcaatacgaagtcgcctgttcctagtttggagacgcacggactccacagaggctctggtcctgaccacacctgtgttgcctgcctggaccttatagtcacttcagcaggacccctggcgcatggcacg

SEQ ID NO: 748269 - DNA, 573 bp, Homo sapiens
caaaataaataaataaataaatgaacgaataaataaaccaggaggaattaccaagggctcttggtgcctgcctgcagtctgagctacttggcaacctgatgttggaggatcacccgagctgaggaggcgcaggctgcgctgagctgtgattgcaccactgcactccagcctggatgacggaatgagaccctgtcttactccacgtaccaatgtttagtgaagcattctggtggtagaaatatcctggaagtagcgtatcagcagaccaccacctgcataatgtaaaagctgtgcatctttccagacagacatacagcargaagatagtggcacatgtgcgtaggatgactgcaagggggctttctggcttatggatgacagaccccaatggcaagccaagaagcagctcccactgcacagtgctcattgtgctccatgccatgcttcaatacgaagtcgcctgttcctagtttggagacgcacggactccacagaggctctggtcctgaccacacctgtgttgcctgcctggaccttatagtcacttcagcaggacccctggcgcatggcacg

SEQ ID NO: 748270 - DNA, 655 bp, Homo sapiens
cagaggctctggtcctgaccacacctgtgttgcctgcctggaccttatagtcacttcagcaggacccctggcgcatggcacgccaggtgtttgtraaagcgagccacaaacgatgctcttaatgtacacgtttgttggtgtagacttgtgtgactatggggaaagatgcgatatgaatggagaacagagactggagccatttttctaccttcctttctgcttttagtaaacacattttgtattggcgatttgtgaaagtttagtgaaagaactgttctataaaataagtctgaagagaaaggtttatttagaaggattgagtacacaagagaaaaatctttgatgtaaaaagttatctgtattttatttggacgtttacaaaggagtgaaaaccagccaacaacagcctacctaataaaatacaaaatacaaaagttcataatacaacatttatcaaactctgaaaagatgggaactaactcaacttaaacatctaagagacacctacagccaacatcttggttaatggtgaaacattcaaaatattcccattaaagccaggaggaagccaaggacactgccgtcaaattactgattcctggtttagcggttccagtgagtcatgcactctccttgcttccgttaaccgcccccc

SEQ ID NO: 748271 - DNA, 597 bp, Homo sapiens
taacaaagcatttttacataaaaataacaaaaaccttttcttaaaggtttacttaacatacatacattatattaattctttttttgttctttttttttgagatggagtcttattctgtcacccaggctggagtgcagtcgcacgatctcggttcactgcaacttcyacctcccaagttcaagcgattctcctgcctcagcctcctgagtagctgggactacaggcatgcaccaccacacccagctaatttttgtatttttagtagagatggggtttcgccatgttgaccaggctggtctcgaactcctgaccttgagcgatccacccaccttggcatcccaaagagctgggattacaagcatgagccaccacatccggccaacatacattaattcttacctcaacctggagaggaaacaagctactgttattctcattttacagataacaggcttggagagggtaaacggtgggcacccatcacactgctctctgttcagctgccaagtccttaccctcaaaccacagctccctactggattgctggatcctaacaataactttgtgagcacactagggcaggcgctgttttataca

SEQ ID NO: 748272 - DNA, 606 bp, Homo sapiens
gtgggtggatcacctgaggtcaggagttcgagaccagcctcgccaacatgatgaaactttgtctctactaaaaatacaaaaaattagtcgggcgtggtggttgatgcctgtaatcccagctactcaggaggctcaggcaggagaattgcttgatccctggaggctgaggttgcagtgagccgagatcgcgccactgcactccagcctggatgacagagcgagactccatckcaaataaagtaattttttaaaaaagaaatatataagatagccaaaaaccaattgaaaattaaaattaatttttaaacaatttttattatatcacaactatagtcaacagtgataacaaatatatattgtgcccttaggatcttcaagttaatatgccaagtatttgaaataccatgaaagatcagacatggttctttccatcagggaatctatattgacttacacacatcccttggatatgctgtttttaattaagcaatgacttcatattcaattacataaagtttaagtacttatgttatactaggcactgacccagggattagggacaaaaagatatatctatcacatattgaggataatgttaaatattaa

SEQ ID NO: 748273 - DNA, 651 bp, Homo sapiens
ttatgtaaattaaggggctatgcatgttattcctaaaaatagtagataattataggcatttcttccccatacaataattataggcttcctgtcatcttttctattctgtataaggtcacagtagtattatacaaaatttacagtatgttacaagttaaaaacacaataattagcaactgtgcatcttcagcaccagtgatgaatgttcacagtaaaagttttaaaaaaaatgcattatttgtttyatgtggacagtacacacttaaatttaatcatcaactcctgctacccaataggcaatattctctcactattataatgctatttgccaagttcatagtacaccctagggctgaattcatccttaacgaagagacaggaagccaaatctctcaccgtcatctcaaccaggtgcaccatattattttaaatttaataattctgttgaacatattgaatgataatgagcaagcttagagaaagtaccaaggattattttgaccattatgatcaacatctgattcaggggaaaaaaaaatcttctcactaaataatgtagggagttcacaggattgcttactatgagtgttattttttttcctcctgcttgtttatatcattcattcaaagggaaaaatgttagggatatta

SEQ ID NO: 748274 - DNA, 651 bp, Homo sapiens
ttatgtaaattaaggggctatgcatgttattcctaaaaatagtagataattataggcatttcttccccatacaataattataggcttcctgtcatcttttctattctgtataaggtcacagtagtattatacaaaatttacagtatgttacaagttaaaaacacaataattagcaactgtgcatcttcagcaccagtgatgaatgttcacagtaaaagttttaaaaaaaatgcattatttgtttcatgtggacagtacacacttaaatttaatcatcaactcctgctacccaataggcaatattctctcactattataatgctatttgccaagttcatagtayaccctagggctgaattcatccttaacgaagagacaggaagccaaatctctcaccgtcatctcaaccaggtgcaccatattattttaaatttaataattctgttgaacatattgaatgataatgagcaagcttagagaaagtaccaaggattattttgaccattatgatcaacatctgattcaggggaaaaaaaaatcttctcactaaataatgtagggagttcacaggattgcttactatgagtgttattttttttcctcctgcttgtttatatcattcattcaaagggaaaaatgttagggatatta

SEQ ID NO: 748275 - DNA, 572 bp, Homo sapiens
aagaaattttaaagtatatacttcaaataagtcagtgtccatttgtgccattaaaattggatggctttgtcagaccagctacttgggaggctgaggcctgggaggttgagaccacagtgagctgttatcacaccactgcagtctagcctgggagacagagcaaaaccatatctcaaaaaaaaataaaataaaaaaaggatgccttcatataagttgakccctgagtctctggggcccttgtgcctgtccatagtaaggtaatgaggatcctaaaaggctactccccagtgtacatgatagacaacttgaaaggcagtataatgcaatggaaaaaaagattagctttgcaaccgtaaagaaccaagttcaaataaaattgtctccacttaaccagccgtactatcttcatgaagtcacataatctctctggggctcagctacttctacacctgtgaaatgggagaaatatctcactcgaatgttgtgaaaattaaacaagattccaaatataaactacttggcatacaatagatacctcataaatgttcattctctttctcccttcagagact

SEQ ID NO: 748276 - DNA, 604 bp, Homo sapiens
ccaagttacctgacttatttcttaggacaccagcagattttgctgtcaacacctttgtgaggacttcaggtaataaatggttcccaacatttgtgtcttccagtgatgcagagagtagaaaattgtgcaagaagatgaaagttgacctgagcccgaaggacaaaaaggttgaattattccattaccagtaagtacacatgggcatttccaatttccaagtaagtgccaaatgctttcattggtattttcagcgaacagcaatttttagttagattaattttatttcaraatggttttcttcctgtgtttacaattatttcttttaaaaaaaaatcctgaactccgttcaaaagctgaatcttattaagatgctgcaggaaaccaaaggtatgtatcttcacaaccattcttaaagttaacacatttttctcctcatttgacagggatggtgcatttcatactgaatataaccgagctgtgacatttaaggtaaatttacctcccttgttctcagcaatggtggagtctaaatggacgcccaaagtctggcaggttttctctctgagaaaagaaagggcagattgcacaaatagctcttctaaat

SEQ ID NO: 748277 - DNA, 673 bp, Homo sapiens
ctgtgtctccttatcatcttctctttgtacatgtctatctctgtgtctagatttcccctttttataaaggacactgggtcatgttggattagggcccaccctaatgacctcatcttaactggatcatctatttccagagactccatttccaaataaggtcacattcatgtgctagggattaggatttcaacattatctggtgggaaggggacacaattcaacccacaataggyggggatggggcagtgctggccagaccagcagcagctgttccatccacttatgattcccaggactgcacataccggtcaggccagcttggattggttgctcagccctggccctatcaacagtggcttgggaagtgggattgaagttgcactgcacaaaatattgctggggatagtggcatgtctccgagaaagggctgggatgttcgcctgctggacaatcatctcaggtgctgtcctctccaatgtgcaaagtgcccatcactcagtgggaggttcctggagatgagcaagaagatgtttatgcagcagtgatggagaaagtcccctactgaagaacaaacgacggagcaggtgccacagaataagtgctccagtggaggcacaaagcactatgggaccacgagagcgggtggagaagtttcacattggtagggaggggc

SEQ ID NO: 748278 - DNA, 655 bp, Homo sapiens
gagaagctcaagctgtgaatcctgaagtgttgtaacctgacagcaaattgcagttctttggagggagccgtgggaggcaggggcagtccccagccaaagtagcctcttgaagccccgacctgcagacattgatcattataagtcattcacrtctcagcaaacagtgggacacttgtttaggagaaatactaaaagagggattcctttttgagcacagggttatttattctcaaagaaaatgctttggatgccatttccaaattaaatttgttaagaactagtcagaaaattaaacttcaagtaaacacacagtcctttggttttcttatctgtaaaatggtgatgaccccggacatacttatttccggagataaggatgaggtggcactttgtaacctgggaagcactacaaaaaaaattactagcatccatagtgtgtcatatgtctatcatcccagtgaccgtgataggtaaagatcaacaagcaggtatagttaccaccaagaaggggaaagcacgctgcagacacctgcagatggctgagttcaagtcaatttaagttttttgaatgtccagtaagtgcacggcactgcaacaagtactgaggacacaaaagtgaatgagaagcagtcactacccacctggaaatctcata

SEQ ID NO: 748279 - DNA, 614 bp, Homo sapiens
aaattcagaacacaaacagtagctatgatctggatgccaggagctatagctggtgcccattagaaaggacctggctgtttagaagggttgagggctaagaggttctgcatgccattggcatgaggccaggtagagcctagaaaagaagatttaggtcagtggctctcaaccatggctgcctattcgaagctcaaaaaaataccagtgcccaggctccccccgcagaaatcctatcttaattaaggtctaggatagggctggtcaagtctgtattttttaaagctctgcaggtggtttttacggaagccagtgaattatgtgttgagctggaccaagccayggttacctgtatacagaggtagacttgaggctgttcaccccacttcacagccctcttctctctggacagggcccagcaggaaagtgaggaaagtctcactctggaacctggagagctgttgaaagggagcatgtgccccaaggcacctggtctatgtagaaacattaccctcagccttggggacattcatgtaagtgctctttagaccttgcctgtttggagcttttaccacaaggacactgctctacacttagactcctgatgggacctaggg

SEQ ID NO: 748280 - DNA, 559 bp, Homo sapiens
cctctgggaaggcagcccgagtagcgttcaacctgcccagcccccatgaggaatgttcttgcacaggcaaagatccttcagctagagatgcagggagcccctggtttctgtctcctggaaggggtgcaaacagcctcgccaagggaggattagttccctctctggtccacccttgggttytttacttgccattcccacacgctgtcctgtgtccacaccccagggaagggaagccccgaaaaggctctctcctgttgccctggctccaccttccctacctcctttcttgcttttttcttgtgaattcaacatatcattttgtgtggcactatggtttgtaaactgccctttaccccttcacaacagtgcagtgggcactgccatctcctctttaggtgtggaagccgaggctcagcgtgcctgaccggacccaggtcacagacttttccgtggcaaggcagagactcgaacacctgtgttctgctctctttctcatgtctttcttcacctcccctctcctcagcctccttcagtttcctctcctctcctctagctcctc

SEQ ID NO: 748281 - DNA, 612 bp, Homo sapiens
ttcaggtggcagagcaaaagaggttgagtcccaccttcaccctttttcctcaatgttaaacttctgttcccaagtcttcctccgttagcaagctgcttttacataattgaatatctctggcttcatggtctgcattgaatagtaaatctataatgacagacggctttgctagttacagagaatgcgagggtgctggcacgcgccccagagatgaggagctttttaaagctgaggtgtaatgtggcaaggactgttctccctgattatctcccagcgtgctgggactcttatctctttagtctgatggagatgctgggtggcgatcagcctcattaagtgagctgagtgaagagaggagtttgtgtgtgctatgttarcagattgggaggaccacacacttcctgcacacagcctctggctggaaacagacctgggctaattgccacatttaggatcttcatgctcttggccccaggaaccttgggagactccaggatctgctggacttgcagaaagcagagggttagtctaaacccctgctgggaccctccttgccctgggattctgggagataggggcatttcctggttgcttcggtaggccctgccttgg

SEQ ID NO: 748282 - DNA, 615 bp, Homo sapiens
caggttctgggtcatcctcattgataacatctctggtccgtttcctctttggtctcaagctctctcttcgaggtagcttatcttccacctcctcttcctcttcacctaaacatagcacttgattcaatgagtaatgtcagaaagtgcttcctcccactaccaagcttattcttagtttttaataactattattacacatctgacagcacagtctagcaattctccacatcgtgatgggatgcatcatggaatacatatttcatagcccatcatttaaataaatgtatctagatttccatttccattgtggttcaccgactcaaataggtgaatgtggattcccaaattttaataagtttttgaagaagttctggtcttcatttacttgagtaactaaatagcttggtggttaatatcataycatgacctctaagaccattcaaataagtccaagtttagagattaccattccattacataattgttgagtgattaaccacttcatatttattactacttctatcttagaacaaagaagaggaacgttaaagaggtgctacaaactagaataattttggagaaattcattcaacccttgaggttcctctcaattta

SEQ ID NO: 748283 - DNA, 598 bp, Homo sapiens
agaaaagagaattcagaaatagactcacacatatataggcaaatgattcacaacaaaggtacaaagacaatttaatggagaaattagtcttttcaataaatagtgctggaacaatcagttttccacatattaaaaaaaaatcttcaatctgcatcttataccatatacaaaaattaactcaaaatggaccatagacccaaatgtaaaacctaaaactataaaacttctagaagaaaacacataaggctatgggttaggcagatttttttttagatataacaccaaatgtccaatccayaaaataaaaaaaaacataaagtgaactttataaaattaagagcatctgctcttcaaaagactgctaggagaatgaaaagacaatcacagactgggagaaaatatttgcaaatcatacatttgttaaaggatttgtatccagaatatatatagcactctccaaagttactaataagaaaacaaacagtccaataaaaaatgtatcaattattaaacagatatttgaccaaggaagataatgatagcaaataaacaaaagtaaagacacaacataactagacactagggaaatgcaaattaa

SEQ ID NO: 748284 - DNA, 570 bp, Homo sapiens
ggtctttacaatttagtatgtttttgcagcggctggtactagttgttcctttccatgtttagtgcttccttcatgagctcttgtaaggcaggcctggtggtgacaaaatctctcagcatttccttgtctgtaaaggattttatttctccttcacttatgaagcttagtttggctggatatgaaattctgggttgaaaattattttctttaagaatgttgaatattggcactgtcttctggcttgtagggtttctgcagagagatctactgttagtctgatgggcttccctttgtgggtaacccaacctttctctctggctgcccttaatattttttctttcatttcaaccttggtaaatytgatgattacatgtattggggttgctcttcttgagcagtatctttgtggtgttctctgtatttcctgaatttgaatgttggcttgccttgctagcttggggaagttctcctggataatatcctgaagaatgttttccaacttggttccattctccccatcactttcaggtacaccaatcaaacatagatttggtcttttcacatgatccc

SEQ ID NO: 748285 - DNA, 618 bp, Homo sapiens
tatgctacaattataattctacttcattccttttcccacgttttatcacttagtgttgctatttttagtgtggtgatttatccttcatttattgttttaaacctttttaaggctcttttataactttaagtattctaattttacttcttggagctctaaaggttgtttgttgtattttttggttctttaccwtggaagagtttttatttattctgttagtttgtttatttatttatttattgagatggaatctcgctctgtcacccaggttggagtgtagtggtgccatcttggctcagtgtaacctccgcctcccaggttcaagcaattcttctgcctcagcctccagagtagctgggactacaggtgtgtgccaccacatctggctaactttttgtatttgtagtagagatggggtttcaccgtgttggccaggatggtctcactctcctgacctcgtgatccacctgcctcagcctcccaaagtgctggtgttacaggtgtgagccactgtgcccagccctctgttagttttttttaattgtggactcaacttcaaccataatttgtttttcctctgtgtgattctcaagaaaagttagctataagttttagttt

SEQ ID NO: 748286 - DNA, 619 bp, Homo sapiens
gtacacttatgtttattgtggcactgttcacaatagcaaagacttggaaccaacccaaatgtccataaatgatagactggataaagaaaatgtggcacatacacaccatggaatactatgcagccaaaaaatcatgaatttctgtcctttgtagggacatggatgaagctggaaaccatcattcttagcaaactaacacaggaacagaaaaccaaacascacatgttctcactcataagtgggagttgagcaatgagaacacatggacacagggaggggaacattacacacccgggcctgttgaggggtgggggctaggggagggatagcattaggagaaatacataatgtaaatgatggattgatgggtgcagcaaaccaccatggcacatgtatacctatgtaacaaacctgcctgttctgcacatgtatcccagaacgtaatgtataataataaaaaaaattaccgcccagatcaaagtcataaacctttcccactaagttttcttctacttctattagatcaagttttttagattccacagatgaatgagattgcatttttttctagtagtttcatagtttcaggtcttagatttattcctttaatatgttttga

SEQ ID NO: 748287 - DNA, 619 bp, Homo sapiens
gtacacttatgtttattgtggcactgttcacaatagcaaagacttggaaccaacccaaatgtccataaatgatagactggataaagaaaatgtggcacatacacaccatggaatactatgcagccaaaaaatcatgaatttctgtcctttgtagggacatggatgaagctggaaaccatcattcttagcaaactaacacaggaacagaaaaccaaacagcacatgttctcactcataagtgggagttgagcaatgagaacacatggacacagggaggggaacattacacacccgggcctgttgaggggtgggggctaggggagggatagcattaggagaaatacataatgtaaatgatggrttgatgggtgcagcaaaccaccatggcacatgtatacctatgtaacaaacctgcctgttctgcacatgtatcccagaacgtaatgtataataataaaaaaaattaccgcccagatcaaagtcataaacctttcccactaagttttcttctacttctattagatcaagttttttagattccacagatgaatgagattgcatttttttctagtagtttcatagtttcaggtcttagatttattcctttaatatgttttga

SEQ ID NO: 748288 - DNA, 619 bp, Homo sapiens
gtacacttatgtttattgtggcactgttcacaatagcaaagacttggaaccaacccaaatgtccataaatgatagactggataaagaaaatgtggcacatacacaccatggaatactatgcagccaaaaaatcatgaatttctgtcctttgtagggacatggatgaagctggaaaccatcattcttagcaaactaacacaggaacagaaaaccaaacagcacatgttctcactcataagtgggagttgagcaatgagaacacatggacacagggaggggaacattacacacccgggcctgttgaggggtgggggctaggggagggatagcattaggagaaatacataatgtaaatgatggattgatgggtgcagcaaaccaccatggcacatgtatacctatgtaacaaacctgcctgttctgcacatgtatcccagaacgtaatgtataataataaaaaaaattaycgcccagatcaaagtcataaacctttcccactaagttttcttctacttctattagatcaagttttttagattccacagatgaatgagattgcatttttttctagtagtttcatagtttcaggtcttagatttattcctttaatatgttttga

SEQ ID NO: 748289 - DNA, 585 bp, Homo sapiens
tgcacatgtatcccagaacgtaatgtataataataaaaaaaattaccgcccagatcaaagtcataaacctttcccactaagttttcttctacttctattagatcaagttttttagattccacagatgaatgagattgcatttttttctagtagtttcatagtttcaggtcttagatttattcctttaatatgttttgagttgatttttgtatatgctgacagataacagtctacttycattattttgcatgtgaatatccatttatcaacactatttatagaatagtctgccctttccccattttgtgttcttggtgcctgcatcaaaaatcagttagctgtaaatttgtggatttatttcttagctctctattatgtttcattggtgtatgtctttgtttatatgccaggaccatattgttctggttactataattgtgtagtgtattttaaagtcaaatcatgtaatgcatccagctttgttcttatggttcaggattgctttgactgcttggggtcttttgtggttccatacaaattttattatttttttttctatttccgagaagaatgtcattggtattt

SEQ ID NO: 748290 - DNA, 515 bp, Homo sapiens
tattttgatggaaattatttgaaggcattggaatacaaatctgtgtgaagtgagttaaatctccgcaaggccaagatacactgtgtttaattacaccttcatggaaactcaattatatccttcttgctgatagaaaactgaattccttaaaaattaaatgaattaaaatttgtgtatgacaggactattatacccataacagttccactgcaagtacatgagactgtcatggcaataactgaaaaactaaaggagatgtctatgtagacakctgctcatttactgcctgaggctcagaatcaatcataactccaggtgaactgaatccctcagagcaccaagggaaacctgagaagcattccaggagacctccgtttgactggcttttcggatatatataacacaggctgaagtgtgctgtcaaaactcatcatttaagtattgtaaactccattaaaatattcctttaaaagagaaagagctgcagacttgatacaggaaggatctcttccatg

SEQ ID NO: 748291 - DNA, 626 bp, Homo sapiens
ggattacatggcgtaaaacagccccatcttcacttttgcaagttggattcctatcttagaaatacaaattgggaaaccaatttagagtattatgtgttgagagctataccctatcaccaggatacacaattggccctgccttgctatccttagctgcccctaacacagctcccagagtcaaggaaggagtgtaacgcagtatcatttgataacttggccactacttaaaacaataaccaatgatgctcagtttcagcctttattatagatggtacctctacatgtttaggaaataatgctcagccarttatgaactattgccttctttccttcctcagctttctagaaggcgtacacaacagtgaaatgagaaccacttagtttcctaggaaatggcccagtgaaatttttgcacatcaaaacttgaatgacccaagccactgatttcaggttttcatttttgtttttgactgagaaagctattataatagtcttaagaggggcagtatctctcatgaagcttcatttcctcaagatttttaattataaaaaatactatatgggagattaatattttaatataaatttctttatacctatatccacatatagaaaaaaatacaaaa

SEQ ID NO: 748292 - DNA, 626 bp, Homo sapiens
ggattacatggcgtaaaacagccccatcttcacttttgcaagttggattcctatcttagaaatacaaattgggaaaccaatttagagtattatgtgttgagagctataccctatcaccaggatacacaattggccctgccttgctatccttagctgcccctaacacagctcccagagtcaaggaaggagtgtaacgcagtatcatttgataacttggccactacttaaaacaataaccaatgatgctcagtttcagcctttattatagatggtacctctacatgtttaggaaataatgctcagccaattatgaactattgccttctttccttcctcagctttctagaaggcgtacacaacagtgaaatgagaaccacttagtttcctaggaaatggcccagtgaaatttttgcacatcaaaacttgaatgacccaagccactgatttcaggttttcatttttgtttttgactgagaaarctattataatagtcttaagaggggcagtatctctcatgaagcttcatttcctcaagatttttaattataaaaaatactatatgggagattaatattttaatataaatttctttatacctatatccacatatagaaaaaaatacaaaa

SEQ ID NO: 748293 - DNA, 647 bp, Homo sapiens
gcctcacttaaaaaaaacccagggatccttggagaatggatggttctgaagcttcacaaggtaagtacaaaaaaagcctagaactttgtttttttgtttgtttgtttgcttttttgagacggagtctcgctctgtcgcccgggctggagtgcagtggcgcgatctcggctcactgcaggctccgcctcccgggttcacgccattctcctgcctcagcctcccacacagctgggactacaggggcccrccacctcgcctggctaattttttgtattttttagtagagatgcggtttcaccatgttagccaggatggtctcaatctcctgacctcgtgatccacctgcctcggcctcccaaagtgctgggattacaggcgtgagccaccgcgcccagccagaactttgtttttttttaaattgagatggagtatcactctgttgcccaggctggagtgcagtggtgtgatctctgctcactgcaacctctgccacccgggttcaagtgattctcctgcctcagcctcctgagtagctggtattacaggagacttccaccacgcccagctaatttttggatttttttttttttttttttagtagagatggggtttcaccatcttggccaggctggtcttgaactcctgac

SEQ ID NO: 748294 - DNA, 611 bp, Homo sapiens
attctggaaacgacaaattagagagcaagctaaaaagataaaagaccttctgaagattatttacatttcaaatttttgacatggaccattctgttcattgatgagataaagaatctggccagcttggaagattaatttccttcaaagagttcacttacacttattttacaaaagtaaggcattgaaacttgtgctaaagaatgattttgtccatttaaatggatctgtgcagaaaatttaatacctttcatacacttggtaaatcttatctttaatagaaatttttattgcatatactaaaaatagttgaaacatggactcataaataaagtttaacatttytggtatgaaagagaatgagaaagttcacattagaagttgagcatgcaaataattcatgagttcattcaacaaattatgattaagcaatggctatatgctagggattatattgcaccataagtatacattggagaataaaatggggattaaaaaaacttatttttgcttgagtacagttggaaatataaataataaataaacatgtatataataatgactcttgaaaagtgtatgaaaaactactgacacaataccataaaggaagagca

SEQ ID NO: 748295 - DNA, 529 bp, Homo sapiens
taatatccaaaatttgtacagaactcttacaactcaatagcagaaaaaataaacctgattaaaaaataggaaaaggtcctgatggatacctttccgaagaagacataaaagcaatcaacaggtatatgaaaagacactctcaacatcattaatcattggaaaaatgcaaatgaagaccaccatgagatatcacctcacacgttagtatggctattattaaaaacacaagagaggccaggcatggtggctcatgcctgtaatcccagcactttgagaggccgaggcaggcagatcacaaggtcaggagtttgagaccaccctggccaacaaagtgaaactccrtaactactaaaaaagaatacaaaaaattagctgggcatagtggtgggcacctgtaatcccagctacttgagaggctgaggcaggagaatcgcttgaaccttggaggcagaggttgcagtgagccaagattgcgccactgcgctccagcttgggagacgacagcaagactctgtatcaaaaaaaaaaa

SEQ ID NO: 748296 - DNA, 615 bp, Homo sapiens
aactactgcttgagcttcatcccacacattttgatatattttcactattattccgttcaaaatattttctaatttccattttaattaactctttgattaacatcttaattaactctttaattaacttaattaacctatgagtatgactcataggtgaggtagaagtgtgttgcttaatttccaagcatttggatattttctagttatctttttattattgatttctagtttaattccactgaggtgaaaaaaaattctcctttgaaagttgttgagacttctttgctccagtrtatggtctattttggtaaatgttccatatgctctttaaaaagaatgtatattcaataatttggaagtgtagaattctaggtatattcactcagtcaagttggtaagaatttatttcttgagagaagaaaacgaagtatttcccgaagtttaagtgataagagaaccacatttactgagtgcttactcctggaatttttgacattgaactcctcagcagcaaatcatggatatttgtttcacttccatctgactgctgaacatctctatctagatgtgtaattagcatctcaaatgagcacaccccaaaaagaattcttgatt

SEQ ID NO: 748297 - DNA, 552 bp, Homo sapiens
tgtagactccacctctgggggcagggcatagccaaacaaaaggcagcagaaacctctgcacacttaaatgtccctgtcttatagctttgaagaaagtagtggttctcccagcacgcagctggagatctgagaatggacagactgcctcctcaagtgggtccctgacccccaagtagcctaactgggagacacctccaagtaggggccgactgacagctcatacagctgggtgcccctctgagacaaaacttccagagaaatgatcaggcagcaacatttgctgttcaccaatatccgctgttctgcagcctccgctgctgatatccaggcaaacagggtctggagtggacytccagcaaactccaacagacctgcagctgagggtcctgactgttagaaggaaaactaacaaacagaaaggacatccacaccaaaaccacatctgtatgtcaccatcaacaaagaccaaaggtagatgaaaccacaaagatgggtaaaaaacagagcagaaaaactggaaactctaaaaatcagagcacctctcctcctcca

SEQ ID NO: 748298 - DNA, 585 bp, Homo sapiens
ttggcgtgatattgaatgtggcaccactcctggaggcagcaaggggggaagataaactacaggagatctgaggcgctgaagagatctgaggatcagagctccttgggtctccctgaggccatgggaggggaaatgctacaagaaaatagaaccaacaggctgtgccagctggttcacagcagtcaggcagaggagagmtacccataccccaatccccataagcaggaaatcacatctctatggatagggacagcccccattcttactctgctgactgttctttcccataggtaaaagtcagtgtaaatgcctattactaaatactcagtgccaggctgtgtactaaacactttgactgtcataaattcttcacgctgatcttgttaggtagtatatcagttacggtggcatttggctgtatgtggcttaacttaataaggtttttttttttttttttttttgcttttctcatataacaaggaatagaggaatgggcagttcattatgcctgcagctgctcaaggagcgatgtttcccaatcctacctgctcctttaccctttgtatgtgtcttcattcctcaacg

SEQ ID NO: 748299 - DNA, 595 bp, Homo sapiens
caacatcattgccaaatgcttcatctactttttccaggtgaaagtgtatctgtgcctgaatgacttgttcccagaagttgacctgcaacatggaaactacaagggcatccttgcccagcaagtctcaacacagaataccagccctctggtcctgcttcaaaaaggataaccttgaatttgtcacagctagtagttagtgcttatcaaaggctcaactgagggaagtgatatttatgaaagmctatctaagagacttacttttaatctctacctatactagagtctatccttaaatcaacttctgagcactggaagacttgcctcattttctcagtcttctcctcccccaagaattatctttgctaatttacacatgaatctatgaactcagcttctatccaggaaggtatgttgtaaacaccataaagagcagtttgtaggatctcattctatgaccctatacaaagttcttcagaagaaagtttctaaatttttcatttaagtccctcaataattactatacttccccttttctgacagtgaatattacatgaccagctgtatttcccttttacctggaacttaaactcatacc

SEQ ID NO: 748300 - DNA, 590 bp, Homo sapiens
gatgctataaaatcatatatgggtaaatgattcattcaaagtgtaagatagctcaatagaatttaatataacaaagtaggaaaagtttattgaggtagcttcaaattctgtaatgcaactaatctttaagaaactaccggctgggggcagtggctcacgcctgtaatcccagcactttgggaggccaaggtgggaggatcacgaggtcagaagtttgtgaccggcctggtcaatgtggtgaaaccctatctctactaaaaatataaaagttagctgggcgtggtggcatgctcctgtagtcctagctactcaggaggctgaggcaggagaatcgcttgaacccgggaggcggaagttgcagtgagctaagatcgtgccactgcactctagcctgggcgacggagcgagactctgtctcaaaaaaaaaaaaaaaaaaaaaaraagaagaagaagaggaaagaaactaccactttggcagggctcagtggttcatgtctgttatcctagcattttgggaggctgagatgggaggatcacttgagcacaggagctcaagactagtctcattaacatactgagaccctgcctct

SEQ ID NO: 748301 - DNA, 607 bp, Homo sapiens
ctaagagtaaagacattttattagcttacactccagaaagtcaattctttaattaaatcaagactataacgtcacgttgaaacatactaacatcctcaggtgaaggtattgcaaaatactttacaaaagattcaccaactataatccactcatacagttagataagaattttataggcactggatattttttagcctcaaactcctcagttactcatgaaatcagcacattggaagtcttcattcaatcataagaatagatgattgattcattccagaaatatttactgaatgccctgcatgaggytctgtgaaggaggcaatgataaatcaagtgcaggcctcatttttccagggggatttgtgtctaataggagaaactggacatccccataaataactagaccacaggtcaaaagtgcggagcatcacaagagaagtgtgggtgacaaatcaggggcaagcagacgtggtaaactttagagaggaaagaaatggactggctatgaactagacatacaggatggacaggaaatgcaaaccagacagaggaaacagtataatcaaaggcatagtttaggcaatttcaagcagctcagattcgttgg

SEQ ID NO: 748302 - DNA, 590 bp, Homo sapiens
gatgctataaaatcatatatgggtaaatgattcattcaaagtgtaagatagctcaatagaatttaatataacaaagtaggaaaagtttattgaggtagcttcaaattctgtaatgcaactaatctttaagaaactaccggctgggggcagtggctcacgcctgtaatcccagcactttgggaggccaaggtgggaggatcacgaggtcagaagtttgtgaccggcctggtcaatgtggtgaaaccctatctctactaaaaatataaaagttagctgggcgtggtggcatgctcctgtagtcctagctactcaggaggctgaggcaggagaatcgcttgaacccgggaggyggaagttgcagtgagctaagatcgtgccactgcactctagcctgggcgacggagcgagactctgtctcaaaaaaaaaaaaaaaaaaaaaaaaagaagaagaagaggaaagaaactaccactttggcagggctcagtggttcatgtctgttatcctagcattttgggaggctgagatgggaggatcacttgagcacaggagctcaagactagtctcattaacatactgagaccctgcctct

SEQ ID NO: 748303 - DNA, 590 bp, Homo sapiens
gatgctataaaatcatatatgggtaaatgattcattcaaagtgtaagatagctcaatagaatttaatataacaaagtaggaaaagtttattgaggtagcttcaaattctgtaatgcaactaatctttaagaaactaccggctgggggcagtggctcacgcctgtaatcccagcactttgggaggccaaggtgggaggatcacgaggtcagaagtttgtgaccggcctggtcaatgtggtgaaaccctatctctactaaaaatataaaagttagctgggcgtggtggcatgctcctgtagtcctagctactcaggaggctgaggcaggagaatcgcttgaacccgggaggcggargttgcagtgagctaagatcgtgccactgcactctagcctgggcgacggagcgagactctgtctcaaaaaaaaaaaaaaaaaaaaaaaaagaagaagaagaggaaagaaactaccactttggcagggctcagtggttcatgtctgttatcctagcattttgggaggctgagatgggaggatcacttgagcacaggagctcaagactagtctcattaacatactgagaccctgcctct

SEQ ID NO: 748304 - DNA, 614 bp, Homo sapiens
aaaatctttataaattacaaaacaaaactagtataagtacatatatgtggttctgtctaaatatctttgtgaaatgatcttaagtttaggatgtcatttttataactaaagacatttaaaactaatgttgattttaaaatgggcttttcctttattcaaggataattgataggtaaagtaaccraatttggtaaccagctctggtgatatatggaattagttgaacatttattttatttataaaatatggtaaatatactaaatttatgttcacttgtagtatgtatgtatatgtattatatttccaaatttccaaattttaaacaagacttaaatcttctacttttttaaagacggaattggaaaatattgaagtgacacaaggcatgtcagctgagacagcagtaactttcctcagccggctgatggctatggttgatgtacttgtgtttgcaagctctctaaattttagtgagattgaagctgagaaaaacatgtcttctggaggtttaatgcgacagtgcctaagattaggtaagtctgttaaaacaatagtgcatgtcaaataattatctacagagcagctttataaagcactatggtacataaaatat

SEQ ID NO: 748305 - DNA, 633 bp, Homo sapiens
aaatgagcggcctaaaataatggaattatggagggacagctgcgatgttggaagcccgtgccttcctgagtagaaaatgctgatcaatcagactttcgtctaactagacaatactagaatattcagataattgattcttcattgcctgttggaaatgtrgcctgagaggaagacttcaggggttgcagtgaagctagaatattaggcattcgtccctggttcagaatggtttaggcttcctccattgtgagcttcactagaagctctacagtcaaaccccaactgactctttaatgctgatgaccatgctagtgttgaaacgatctcctcttccggcctgcagaatgtcctgctgctccctgttttacttgggatttaggtgttctctatggactaagctaagaactagccagctattgggctactttttagatttttttaaaaaagatatatcttttggctaacatgataacaagacccataaatgaaacaaaattgaatgttttattcacatgagctcaagggaagtacccgagtcacagaaccacagattggggagtggctttagaggttctgaagttcatgctttactagttgtgtgcataacctctacagtaacctctcatgctccag

SEQ ID NO: 748306 - DNA, 606 bp, Homo sapiens
ttttagctgggaattaatgggagaccttcacctctccctggcagcagcggcggagccaacaatggtcacctcagcctcccaggagctctgaatcctgcttgggtctgggcccagacttgggcaggcaaatagtggggcttctgctccctgggtgagctctggcctgccccaggccctgctggcctggcccacygtagcccggggccaaggtgggggcagtgggtcctgggtagcagttctttgcagcctctggcttcagccagaaattaatttgctgggctgagcatgtttaccttttcccagcaaaggcgagacagtaaacagcggaccggcggctgaaattgaattgataactgcatcaacgtgccagataacgcctaaaataatacgccgataaggaaattcgatttgatttgctgctgcgcatcagattggccccatctgtagctgcctgtaatcattttcaattgcgttgggaaaccttatttgtccttaaatatttctgtcatttttcattgctggtgacagatccttgggcaggtggcaggggtgtgctgcctctatgggcgcagggtggcggcccgaggaggaggaggaggggtggtg

SEQ ID NO: 748307 - DNA, 627 bp, Homo sapiens
aaattcacatgctcgtgagtacaaatcctatttttaaagatttttagggtggagattaccataggcacaacctccagtactagtaagtttcttcaaacggttagtgataggctacaagacaaagtatgtagcatgtatttgtaatccatttcattccaaaaagtattttagatttatacagtcttacccttctcaaaacacctgctccttttgtgtgarcaatagcctcaagtacatttcagctgttcctacttttctgggactgggaaagaagtttggatcattcttctggaagctctttttcatttcctgacatgctggaaacctgctaaagagaacgttcactgactccatataaagtcagagaaataagagctagtaaggatctttgaaacctccaggtcaaactccttcattttatggagataaaatgaggctcaaggcagtgcaatagtgttgaggctgcaggtcaagtaggagctcacaaaccctggttcttgaatgaggtgaagcccttcactgagtttctaacaatcctaagtactgtgttactgcagtatcaagatgcctggagctccaccactcaggccacaacaggttgagcggaaaaatctttgaccagtggtt

SEQ ID NO: 748308 - DNA, 622 bp, Homo sapiens
cgctaagaacatccttagtcatcattagataatcagagggaaaatgtaaagacatgaaaagtggggcgaacctcttgttaactcagatgggtacagtcggccctccatatcatgggttccacttccgtggattcacccaaccttggattgaagatattttgggagaaaaattgcatgtgtaccmaacggggactttattttcttatattaaacaatataacaactatttacatagcatttgcattgcattaggtattataagtagcctagagatgacttaaagtatatgggagggcctacgtagactatatataaatactgcaccattttatatcagggactcgaccatctgccgattttggtatccaccagaggtcctggaaccagccccctgtggatactgagggattactgtatattctacctcagctaaaaaactggtaactaagcatgaactaacttcattttctctcttcctggaagggttattttggaaaaggtattctttcaagaagccgtccaagcttcacaatttcagatcctaaactggttgctaaatggaaaggtaaagttgttgtatcattcagttcttttgacaaattaatcattttcctttgttttt

SEQ ID NO: 748309 - DNA, 606 bp, Homo sapiens
ctgtgaaaagtggcaaaggttaaaagtcccattttcagcatatttacatgtagtaacaacttgataacacagcgctgagaatgccaggctcagaggagccaagctgggctcccgtccagtcagcctctagctcaccaggaaaccctgagcaggtcactttgcctcattttctttatctgtcaaatgagaactcagatgatctcaaaacagccttktctgctgtagtgtttcaggatgattcttgtctctggatgtcgctgtcatgatgggagaggaattagtaaattcccaggtcagtttacactgcagagtgatcttgatctgcatgaatcagtaaggatgggctggataaacaagttggaaccacagttatgagtaccatgacattaactgaaacaaatgagaagggattgaaaaatcggcggttaagtgtcttttaaggtcatttccaacaaaactacaaaggacctatgaaaggcttttcaggcacgtactcttgttgcctagctgaacacatttctccaataaagctttcatttgagagttactcttcatagtacatcccctgcccccctgcctgcctggcacattataggtattcatgaa

SEQ ID NO: 748310 - DNA, 608 bp, Homo sapiens
ccttactgaatgcttttgtaaagcgattggttatcccaatagaatatacatcactttacacctattttttgtgtgaacattctgttatgtaagcattcgaacattgtttttctccaaaaagtgctttccacgaattgtttcatcctcgtgacattcttagaatgcagaagctgttgtatttagtaaactgtaatcattaagaacttgtatttgattcaggcagatctgagttgtggatccagttcaatatccttttttagattttgagaaagtcacttatcccatttttacagatgaagcagcaggctgagagtcataagcacaagtaaatacttaccctcgaggtggraggagcttgtgaggattaaatgagataactcatgtaaaatgttcagtatagtcccaagcccacagtaagccctcgataatggtaacttgctcagatggaaaaccgaattgctaagctaaaggtgcagcagtcaggggagctaacccctagttaagtggctcctcttttaatttagattctcatctagtatatggcatggataatccaaatgcagcaaaacagtcaattataggaaagaatgctgatttcattttatttt

SEQ ID NO: 748311 - DNA, 511 bp, Homo sapiens
atccagttcaatatccttttttagattttgagaaagtcacttatcccatttttacagatgaagcagcaggctgagagtcataagcacaagtaaatacttaccctcgaggtgggaggagcttgtgaggattaaatgagataactcatgtaaaatgttcagtatagtcccaagcccacagtaagccctcgataatggtaacttgctcagatggaaaaccgaattgctaagctaaagktgcagcagtcaggggagctaacccctagttaagtggctcctcttttaatttagattctcatctagtatatggcatggataatccaaatgcagcaaaacagtcaattataggaaagaatgctgatttcattttattttttattttgtttagaacaagttaaagatagaagaaaaactttaaacaaaataaatgtaacggagcaaagaatgattcatgggaattgggctttgctctgaaacatgggcagtgagtatttacaggcagaaaaaggctgaa

SEQ ID NO: 748312 - DNA, 528 bp, Homo sapiens
gggggatcagtagctttcccggggtcatataactagagagaggtgaagccaggacttgtcaatggtgaggcttcgatgatgagcttgaatttaagatatgtcagatttgaagccaatggagcatatcaaattagcaaagtgcagtggaaacctggaactcaacctcaggattaggccaaaggtatacatttaagaggcatctctgtagagcagagtcgaagctgtaacaatgtaggagtggtctacagcaactgtgtctgttaaagagctgataactgaagtgtaattcccaaagaccaaggtgatatggcagcgggtaaagggcatacgcagtgcagacaaacatgagtttaaatcctggcttcatayttacttgctgtgttggtcatgggcatttaacctcttaaatatcgtgagatacttaatctctttgactctttgcaataaccctgtgagggagatactacctccattttacagatgaaaactgagggttagagaatgtaggagttgacccaaggtcagggt

SEQ ID NO: 748313 - DNA, 622 bp, Homo sapiens
gcttcatttctgtttcaatgaatgagacagaattttccaaaatttcaaccagggcccttcttaattttgtgcttttattcccaaccacccttcactatgtattatgaatttttacctcatttgactggcacaaacatggaaacaagaagataaagacacaaagcgtgtcttcttctrtctttgccacttgactttcatattaaacagccagattgagaggatacaacactgtggggtttcaggaaaagaaaggaagctttcccttttctgcactaagctattcttttcccccactaacttttgtcttttttttttttttcatttgaatcctgggatatcaaaaaggtgaaggtgcttactgaaatacaagtctgccacaacacaaaaagcagagtgaaactgctgagctagggtggaattctggaaatgagatgcttcccaaatttcacattcaatagccataaaagtttatagctggaggatatacagtataagaatctactttagctcactctctattgataactgggctaaagccaaaaaagattaaaatgattgatccaaagcccctaaagtgccattacctagcattttgtggcaccaaaagagacagtacaattcc

SEQ ID NO: 748314 - DNA, 622 bp, Homo sapiens
gcttcatttctgtttcaatgaatgagacagaattttccaaaatttcaaccagggcccttcttaattttgtgcttttattcccaaccacccttcactatgtattatgaatttttacctcatttgactggcacaaacatggaaacaagaagataaagacacaaagcgtgtcttcttctatctttgccacttgactttcatattaaacagccagattgagaggatacaacactgtggggtttcaggaaaagaaaggaagctttcccttttctgcactaagctattcttttcccccactaacttttgtcttttttttttttttcatttgaatcctgrgatatcaaaaaggtgaaggtgcttactgaaatacaagtctgccacaacacaaaaagcagagtgaaactgctgagctagggtggaattctggaaatgagatgcttcccaaatttcacattcaatagccataaaagtttatagctggaggatatacagtataagaatctactttagctcactctctattgataactgggctaaagccaaaaaagattaaaatgattgatccaaagcccctaaagtgccattacctagcattttgtggcaccaaaagagacagtacaattcc

SEQ ID NO: 748315 - DNA, 626 bp, Homo sapiens
tcagtgaagggggtcttgggaacccctgatacgattgcattaaacaattttttattgtttaagttgatgtgttacacgtgactacaatcagaaggtaatttcacagaatacctttccctaatctgcttattttttattttttgacatttgccttggagattcctgtacttctatatccactrgactaaaggcattaaaaatgcatgaaacaatgtcagaaagtaattttaaaaagcaacaatcctattttaactcaattaaaaatagaaaatcttaatgactgacaatatattctacagtataaaagtttctggaacaaaaaattataagatcacagtcaattttctcccactaggtaggatttaattcatttttataataattgtgcagcaggccaggtgcagtagcacacatctgttgttccacctactcaggaggctgaggcagaacaattgcttgaggctaggaactaaagctgcagtgtgctataatcacacccgttcaaaaaaaaagtccaggccgggcgcggcggctcacgcctgtaatcccagcactctgggaggccgaggcgggtggatcacgaggtcaggagatcgagaccatcctggctaacacggtgaaacctc

SEQ ID NO: 748316 - DNA, 685 bp, Homo sapiens
aattacctaaaactagaaatgtaaagcagtaaccatttaacttacttagtgttgtaggttagactttgggaagggcttactatgaagtttttgctttgggtctctcctagattgcagtcagatacctgctgaggttataaccatctaaaggctgattrggctggatgcccaagatggctcattcacatggcagtagttgatgctggctcccggctgggagctcagctgaggctatcaacaggagaccctgcacatacccggtataacatggggatctcagggagtcagacctcttagggggtatctggcttcccccaggggaagaatcctaagaaaatcaggtagacctacatggcctttactgaccaagtttggaaaatcacatacattccttctgctgtacctcattggttaaaacagaattaagggtaggggacatagaccttgcctctttctggggagggtgtcaaagaatttttggagtgtgtttcaaaaccatcaaatgggaaaccactttaaactttgcagagagaaggaaaactcatctttgagttattacgttggcaaaaagatggttgagagcaggaagggcaagagaagaaaggacaaatagagatagagaagccagagagtttgtgttacttatagttgaaatgattaggatcttcaatcaagattatgggaa

SEQ ID NO: 748317 - DNA, 599 bp, Homo sapiens
tgaataactcagaagactatatgcattgtatcttggcttatttaaaacaaataaacaacaacaaaaaaactctacacattcaaagaactgcgaattatttcagtagaacgttgtgtcctaggtcaccatgctttctttctctattattgtcaagatcaatttgccaaaaagcctcttacaataaacacagatataaatttcaaggttagtaagctaaactactactgggaataatgatacattaatttactgatgaagttaaaattggtatagagagaagtagaaagacagagctcttaagaaaaatgtattttacatggagaaaaagcaaatattcacctgaggaatatataaaaccataactgaattatgtttcaaccatataatgtgcagtaataatcacctttacactaaagcaggaaaataaatatgactggaaaatgaggaatataaataamctatttaagacttttaagacaatacaaatactgatgcataatattacaaataatagaagaacaacctgcttatcaactataaggtgtaatttaattttaaatgttctagggcagggctataaaacaaaatgaagtacagca

SEQ ID NO: 748318 - DNA, 640 bp, Homo sapiens
tagtcccagctactcatgaggctgaagcagaagaatcgcttgaacttgggagaaggaggttgtattgagctgagattgtgccactgcactccagcctgggcgacagagcaagactccatctcaaaaaaaaaaaaaaaaaaaaaaaagatggactttggtcatatccaagtttaaatcatgaccttatcactsattagctatgtgaggttatcatgttactttacattttggggtctcagtttctttatcatgaaaagaggaaatagaaataagtcatccaatggtctattagaaggattaataaaatatacatatacatatatacacacatacaggcaccccttgtaaatggaggggttattcatgcatcatttctcaatcacacagattatattatttggtctggcttaacataagtaacatacacagcctcttgtctacagtaatttctagaatcacgccaagttaaatccaacaccaccaccctaacatgttccaatgcttaaatctcattaaacaagaaacatcaactttattccacagagataaaaatgttaatgcaaaacaacctgaaaggtaacctaaagatttaaatttgtggcacaagaatacaagataaaaatgagttcacaaaaaaagt

SEQ ID NO: 748319 - DNA, 626 bp, Homo sapiens
aatgtgataataacaaatagggaaaaaaagcaataataaaatttaaacagaataatgtgataatatttgggaaaacaaagctttagacagggaaattcagaaaatgtctgcttaaagcagagcccttggagctgacacctgaatggtgagaaagagccagccacgtaaagacctgtaggaagagcattccaagcagaagaaactgctaatggaaagttccttggttaagaacaatctttagtattcaggtgacaatttttttttcgtttgtttttttttttcttttttgagatggagtctggctctgtcgcycaggctggagtgcagtggcacgatctcctctcacgacaatctccgcctcccgggttcatgccattctcctgcctcagcttcccgagtagctgggactacaggcgcccaccatcacacctggctaattttttgtattttttagtagagacggggtttcaccgtgttagccaggatggtcttgatctcctgatccgcccgcctcagcctcccaaagtgctgggattacaggcgtgagccaccgcacccggctgacaaattttttttaatggtaaagaggacacatgatgatgtcaaataaggagatggtggccaaa

SEQ ID NO: 748320 - DNA, 649 bp, Homo sapiens
gaaattaagattttatttattaaaatgaaaagagttcagatttgatcactaaattatccaagtctccagacaaaaacctcaatctctgagaacgctcaaggcaacttcctggacagagttaatggttctgtcctccttgacacccaatcaatattctgsgtcctatctatattctggctgaggacacatgcccctcctactcacctgctccaccaccaaagcccacatcctgaggagaccttggagcctgaagtagcccaataccttttgtggcaccgtaaataacaaactggaagtttcgtccttgtgaagtctgttggctctttacagttagtgaagtggtttcctggctatatcttgggctatgtgtaatctgtctgactcagagcacaactgagaaaacagaatgcaataaactccaaaatatttgttccaaaccctttacggttcatttctcttaacttctctgttgctaggtaaaaataaatgtgtgtctatttgtgtgtttgggagagtggtgggaatcaggcaattatctgcatttacaaaaattaactcactgaatgcttattatgttccctgcctgtgctaggagatttggggacatacaaaggtacaaactataaacgctgctctgaagcaagtttca

SEQ ID NO: 748321 - DNA, 624 bp, Homo sapiens
gagaaattttgaaatcaactatgtaatttacaactattaaaattattggaatgttcttgagataaaaacagaatgaattcaggacaattaaaaagccatctgccattaactagttgtttaatcttgagcaaattatttacagcattccatttccatttctttaacacgaagagcatgagaaacaatgctataaagttccactttcctacaataatatttctcagcttgtacttactaggtatgggaaaaccaagaatcaaaataatatctaagccttacttgcttggtacagggcactatcctaagcatgatacacatactaattcctttaactttcaaacaaacctatgtagtaggtactattattatccttatttagacctgaagacacagaggaacagatatgctgagtagattatcaaatgtcacataaatagtgagtggaggcrgacacggtggctcacgcctgtaatcccagccctttgggaggctgagacgggcaggagttcgagaccagcctgaccaatatggagaaaccctgtctctactaaaaatacaaaattagctgggcatggtggcgcatgcctgtaatcccagctactcaggaggctgaggcaggagaag

SEQ ID NO: 748322 - DNA, 500 bp, Homo sapiens
tccaacagtttcttttaaacctttatacatttggagggagttttgctttactgagctatacttatgggaaataattaatagaaaaaggtgttggcattatatacaactgggagatgccaattagcaaaaccctccttcaaaatgacaccagttaattccagcatgagccctcagagtgaaatagcctccctcttacacaatgctagtgcctcattgtctttaggaatgtctccaatcatcctatatataacctcctgggataagtgcttttggccctgcctttctattgcctctgcactgaagagatgatattcattaagttaaatcaattgartaagagtgtgctttcctttactttggtgactcttctatagtggaaagcttacctctacaaggtgatctctgacacagaatgatcaactagacagtaatacacagataaaaggtcattattagcactgccaataaaaagtatggaacatattgaaaaatacatgtgt

SEQ ID NO: 748323 - DNA, 599 bp, Homo sapiens
cccaacctttttgacaccagggaccagttttctgggaaataatttttccacagacaagaggtggggaggaatagtttcaggatggaactgttccacctcagataatcaggcattcgattctcataaggagcatgcagcctagatccctcatatgtgcagttcacaatagggttcttgctcctatgaaaatctaatgctgctgctkatctgacaggaggcatgaactcagatggtaatgcttgctcacctgccacttgcctcctgttgtgtagctcagttcctaatgggccacagtacccagtctgtggcttgtgggttagggacccctgctatagaagactatgatagaacggtattataggccatgtagaccattatagagcattaaaacacaacagaacatgcatttacttcaaatgcacatggaacattcaccaaaatagaccatattctggaccataaaacaaatattaaccaatttaaaatagttaaaatcttacacattatgttctctgaccttaacagaattaaactaaaaagtagaaaatcccccaaatgcaaaaacacacttctaaataacccgtggatcaaagaggaag

SEQ ID NO: 748324 - DNA, 610 bp, Homo sapiens
ttacaaacaatccaattatactctttagttatttttaatgtacagtaaattattactgactatagttgctctgttttactatcaaatactagttcttattcattctttctattttttgtacccattaaccatccccacttccccctaacccacactacccttcccagactctagtaactatccttctactttccatcttcatgagttcaactattttaatttttagctcccacaaataaataaaaacacgtgaatcatgtccttgtttgcctggcttatttcacttaacataatgaagtccagttccatccctgttgtagtaaatgacaagatctcattcttttttgtggctgaatagtacttcactgtgtatatgtaccactttttctttatccattcatctgggttttttgtttkcttgtttgttttaaacttttaagttcaggggtacatgtgcagatttgttacataggtaaacttgtgtcatggggatttgttgtgcagattatttcatcacccaggtattaagcctagtacccattagttatttttcctgatcctctcccttcttccaccctcctccctccaataggacccagtgtgtgttgtt

SEQ ID NO: 748325 - DNA, 719 bp, Homo sapiens
tcttaagtcccaggatccagggccaggaccctttctcttgcccccactgcactacccctcacgtgcatgcacacacacacacacaaccacacacattgtgcagtgagcctcagtcacctaacatcactctattgctttgagaacattcgcagagcaggaagtcaagctwgttaacttagccagggtgagcttgaggcttgttccacaggcgtctgtcccaggctggctggtaatacctcattcacggagactctacaccacctcagcacttttttgtgacaagaaaccaaagcttccaggcttcccaaagcatcaacaggcctgctctttatggggccctttagcctgtgatcagccccgaagtgcagaggtcttttgtgggtaacagggcccaacgtaccttagtcaccttcagtatcagatgtcctcccaggaagggccagcacctcccatccaatcttactctcacctcacatcatgcatgggaggccttagtatgagacttcacatctctgggactttccaccgcaggaggccaatccaaagccaagggtttccttctttcatgttatttcatgacataaaagaaatcacccacccagcgagctagagtctgaaaaatctgcatattcccctacattagcatccctttgatctgtaaggatgcagagggaggcataccgcactagactgtggcagcagcttcatcctttccagtt

SEQ ID NO: 748326 - DNA, 558 bp, Homo sapiens
atttctcaaagtacaatcctctggccagtggcatcagtacaacctgtgggcagattctttcgcttgctccaccccaggttagctgaagctggattcgcagtggaaaggcctaggaatctgcattttaaacacactccatccccgcccytaggcaatctgtacacctgacaatggtctagaagtatagctggctcatacagttctgagaccataaccaccacaatattgaggagacatcaatctggatagcctcagaggctcttttcctctccactttgaagcttagcaaggagctagagcagcaggtctgtgctaaccaagaaaagactctctgttcctggtcacagagccccagaggtgccacttcctcaaccagggagctccactgatccacagaggtcccttgcccttcagtccccaacacaggcaatgaacatcgtgctactggagctctttccatggtgtatagtcctgcaaggtccagcccagacaggcctctcattttattccttcagcaaacatatatcgaaggagctctgtgccaggcatcgtgctagg

SEQ ID NO: 748327 - DNA, 632 bp, Homo sapiens
gtccacttgttactgagaaggaagctggtactcaaaagacaaaatgactgaatgtcatagagcaggattctcaatttgtatgcacagtgaagtcacctagggagcttcaacgatactgggtcccaccccagagattgtagcctgggctttggcattcttttttttttttttgagacggagtctcactctgtcgcccaggatggagtgcagtggcgcgatctcggctcactgcaagctccgcctcccgggttcacgccattctcctgcctcagcctcccgcgtaggtgggactacaggcgcccgccaccacgtccagctaattttttctatttttagtagagacggggtttcaccgtgttagccaggatgrtctcgatctcctgacctcatgatccacccgcctcagcctcccaaagtgctgggattacaggcgtgagccaccgcgcccggccggctttggcattcttaaaagatcctccagggattctgtcgtggaaagggtttaggaaccaccatccgaaagtagttggtggagatgttaattgccccagttcttccttctctctgggtagacactctgcctagacacatccacaaggccacaccacttctgtagattttgaacaagcttc

SEQ ID NO: 748328 - DNA, 614 bp, Homo sapiens
tgaaaacaggacacaagacaccaaaataactggaatgcagcaaaagtaatgttaagaggaaagtttatagtgccaactgcctacctcaaaaagttagatctcaaattaacaatctaacatcgcacctagagcaactagaaaaacaagaacraaccaaccccaaagctagtagaagaaaagaaataactaaaatcagaatagaaccgaatgaaattgagactccaaaatccaaacaaagtgtcaatgaaaccaaaagttagttttttgaaaggataaacaggattaatagaacgctagctagattaacaaagaagagatatccaaataagcacaatcagacagaacaaaagtgacattataactaatcccacagaaatacaaaagattctcagagactaatatgaacacctgtatgccacaaatctagaagaaatggataaattcatggaaatacacaatgttccaagattgaatcagaaataaattgaaaccctgaacagatcaatatcaagttccaaaactgaatgagtaataaaaaacctacaagctaaaataagcctggatcagagagagtcatagccaaattccaccagagctacaaaaaagagctggta

SEQ ID NO: 748329 - DNA, 607 bp, Homo sapiens
cttttccattatcatttccaacaaattttcataactgagataatttattttactctttgtccacctaaaagtgatttccattttcgttcaagaatccaagccattttaaagataaccaaaggcacacactcagataatgctgaaaawtttttaaaaattttattggacatttacttcttatttcaggtgtctgagttcattgattcttttttggctattcaaaggaaagttcttatcaaattcactgtgcatttcctgcaaatttctcttaatattactcactttattatttttaaatgttttatacaataatagcttttgcattttgctctgccatagcaaactgagactgccctgaaatctaaaatttgctccaatcttttttttactgttccagtcacaatattagcttctgcatctccactagattccatgacagtagtatgtcttcatttttaatttaaatttttatctatacttaactagaaaaccaacttaatgatattacaattaaatgcaataatgttaaaaagtttaacaaaacttattactaattacagtttacactgtaactcatgttgcctgcatgaaatattcaaataaacac

SEQ ID NO: 748330 - DNA, 622 bp, Homo sapiens
tgtttaaaagaatgaaccctggagccaaattgagcaccttcaaatcccagctctaccattctagctctgtggccttgttaatgcttcgtttgtctcatctgtaaaatgggaataagaatagaatgtgcataaagggctgataaaataatatgggtaaagcatttagaacagcgcttggcacayagtaaacactatgtacaccatataaacatcaatcagcctctgcatatttttcacaatttttaatataaggaaaattaaatttgcaggattttccttaaataatttcctatctctgggcaaaggagagatttacctgctataaatggcccatcagaggtgttttaaatgcttgttgaataaatgagtgcatgaataaacaaataatggattggaatgggatgatgatttgatgtccacacaagctcagaattccagcactgtcttccaatcttgagtccttcctgtgaacctaactttgttttatctggtttttttcctcctggctgttaacccctgagctttccaagaatcattagagtggaacttcaatgaatgcttttcataaatgaaaagattccaagcctacagtcagcaaagctcccagcacatgcaaaagcaa

SEQ ID NO: 748331 - DNA, 607 bp, Homo sapiens
aaaattaagtataaagggcttatgtccaggtatgtgttggtgcaggtcagagacagattgatcagaagtgcagagaatcagtgatataaaacactcaaagaaaggagaaaattgaagcaagagatcattagtagaattataaaccccttgagagttttcatacatacaatgaaaggaaatgattttwcaaagctagaagttttgggaacatgcaaagagatgacttcttggttacattaatataatcagatatatatggatatgatagttctattatgtgcttttggggccttcattgtctaaccttatgttattaaattctagaaaactgttgcaggtataattacttatattttaatgttatctattttctttatgtgaaatctaatgtactttattagttctacttaaaagtccattggtgtttttggagtaactctaaatgtttcactaaacagaatacatttatgcatgtggaataaatggggtaagctggaactagtttgatgttttccttatagtctcataacatatcatttcgccattatgtactgcaaaaaaattgctgatattgatggcataatagaagtagttcctttcagaatac

SEQ ID NO: 748332 - DNA, 630 bp, Homo sapiens
ggagcagggggtaaaactccacaggtagaagcacttctcttggtgaactctgtaatgatttgaaaggggcaagaagcccccctggccagaacttgggggagggcgcgaatcggatatgcagacttcacaggtggggaaaagctaacacccttttctgtggcagctgggaggcggatagtctcagacaacttttcaagcccctctggccctccacctggaaacagactcggggctgtcagtgggggcatggtgggagtgagaccggcccttcagtttgcatggragctgggtgaggcctgtgactgctggctttcccctacttacctgacaacctgcatgactcagcagagacagccataatcctcctagatacacaactccagtgacctgggaatctcacccccatcctccacagcagccgcagcaagacccgcccaagaagagtctgagctcagacacacctagccctgctctcacctgatggtccttccatatcccccatggtatataacctggtatataatcctccctggtatataagacaaagggcaaataatcttgggagttctagggtcccacccaccattggtccctctccacactatgcagctgatgctttctgtaaagcac

SEQ ID NO: 748333 - DNA, 619 bp, Homo sapiens
ttcagagggtttgagtaactaatccaaaatcacataatatgaatgatgctaaagggcagttagagttaaaattagatcctttggaagccaaggtctgcaatctttttaaatcacctcaccatctcccatttatcttctggttaaatttggasagacattataaaaaggggaaacacatttataagttttctcattgccatcattaacagtggtgtaataatgacaaaataattaaaatttaattagttcttcctttgctgtcactccattgtgagcttatattctaatcttgcatcccctcaagcctaaatgaatctttgaaatgagggttgatttaaatcgatagtggaactttggctatagttactatttctttttttttttttttaattgaaatggagtctcattctgttgcccaggctggagtgcagtggtgcgatctcagctcactgcaacctccgttcgcaccaccccctgcaggttccaagtgattttcctgcctcagcctcccaagtagctgggattacaggcatgtgccaccatgtctggctaatttttgtatttttagaaagcatggggtttcgctacgttagccaggctggtcctgaattcctgtggc

SEQ ID NO: 748334 - DNA, 649 bp, Homo sapiens
catatcacctaggaaataccattctggacgtaagaccagcaaagacttcttgacaaagatgccaaaagtaattgcaacaaagattgacaaatgaaacctaattaaactgtagagcttctgaacattaaaaaaacatacacacaaattaaaaaaataacctatcaacagagtaaacaaataacctacagaatgggaggaaattgtttcaaattatatatccaacaaaggtctaatattcagtatctataaggaacttaaacaaatttacaagcacaaaacaaacaaccctattaaaaagtgggaaaagggcatgaacagaaacttttcaaaagaaaacatccatgtggccaagaaacatatgaaaaaatgttcaacatcactaatccttatagaaatgcaaatcaaaaacacaaggagataccatctcacaccagtcagaatgtctattattaaaaagtcaaaaaataacacatgctggtgaggttgtagagaaaaggggatgcttatgtacsgacggtgggaatgtaaagtagtttagccattgtggaaagcagtttggcaatttcttaaagaacttaaaacagaattaccatttgacccagcaatgctataattgagtatatacccaaagaaatagaaatcattttac

SEQ ID NO: 748335 - DNA, 626 bp, Homo sapiens
ttttttattttttgataggatgatgcagcatcatcaaaaagttttttctctgtaattaatttaatgcaatcccaattttaaaactagtcttttttttttttctgaagctagacaagttaatgccaaagtttatgtagaaatataaacatagactgagagtggacgaagggaggacacagatgctgggccgaagggggtggaagctggaaaccctgcatgagtctaccatgcactgagactccttcctatctcccagtgactcctggggaactagggagttgagtaggcaatgagcaactcactctcaccacggatctctggaatcctgccarcgggagactccataacccccacagacacttgagctgacagggaaagctgcttagaaaaatagtagggacagaactctagatagttgggagcccaaatagtttggcatgggagcatctgtagtggagcatgcccaggacacccatcccctgtggctcgctttactcctccagaagactttagttctagaaaaactgttgaacctgaagagtcaggatggttttgtccatgagatgaggctggtccaacctgggcatcccttgcctgctgacttctcctgaggccccagcctggcc

SEQ ID NO: 748336 - DNA, 626 bp, Homo sapiens
ttttttattttttgataggatgatgcagcatcatcaaaaagttttttctctgtaattaatttaatgcaatcccaattttaaaactagtcttttttttttttctgaagctagacaagttaatgccaaagtttatgtagaaatataaacatagactgagagtggacgaagggaggacacagatgctgggccgaagggggtggaagctggaaaccctgcatgagtctaccatgcactgagactccttcctatctcccagtgactcctggggaactagggagttgagtaggcaatgagcaactcactctcaccacggatctctggaatcctgccagcgggagactccataacccccacagacacttgagctgacagggaaagctgcttagaaaaatagtagggacagaactctagatagttgggagcccaaatagtttggcatgggagcatctgtagtggagcatgcccaggacacccatcccctgtggctcgcyttactcctccagaagactttagttctagaaaaactgttgaacctgaagagtcaggatggttttgtccatgagatgaggctggtccaacctgggcatcccttgcctgctgacttctcctgaggccccagcctggcc

SEQ ID NO: 748337 - DNA, 611 bp, Homo sapiens
atagcaccaagggaatgatgttaaaccattcatgaaggatccacccccatgccccaatcacctcccaccacgccccacctccaacactggggattacaatttgacatgagatttgggtggaacacagatccaaaccgtatcattctgcccctggcccctcccaaatctcatgtccttctcacatttcaaaatacaatcatgccctcccaacagtccttcaaagtcttaactcattccagcattaactcaaaagtccacagtctcatccgagacaaagcaagtcccttccacctacragcctgtaaaataaaaaacaagttagtcactcctaatataggcattgggtaaatactcctgttccataagggagaaattggccaaaataaagggaccacaggccccatgtaagtccaaaacccagcagggcagtcattaaatcttaaagccccaaaataatctcctttgactccatgtgtcacatccaagacacactggtggaagggttcccccaaagccttgtgcagctccacccctgtggctttgcagagttcatccctttcagctgctctcaagggctggcattgagtgcctgaagcttttccaggctcagg

SEQ ID NO: 748338 - DNA, 609 bp, Homo sapiens
caatcagcttgtgccctcctgtaaaaaggcttccatgaattctcttgtcacaggaaatattgatcaaatcacatttttgatgccacgaagctgagggcagacctgggacagatggtgtctcccactgagggagcggaggcccctgggaggtcagtttctcctgctgctgaacaccatcttccaatcacaacagcaaggaattgggaatgtgtcattttagctgtaaaggaatgtacatgcaaaatgtcctgattaatgatkattaaaggaaagaccatttctcttttccccaaacccaacctctttgtcacttcagacccctaagggagcctgtgcaacatcggtgaaggttgctattgacacagggtaccgacatattgatggggcctacatctaccaaaatgaacacgaagttggggaggccatcagggagaagatagcagaaggaaaggtgcggagggaagatatcttctactgtggaaaggtgagatcttgccttcagcctccactggggacagtgagaaggtttcagttgttcattttattattcatcttccgtgtgtgtgtgtgtgtaattgcactcatgagtaggcagtacttaataacagt

SEQ ID NO: 748339 - DNA, 627 bp, Homo sapiens
gaagagttgaacaccattcccttggtgataagtgagttcttagttcatgcaagttctggttgtttaaaagagtctaggatctctcttctttctctctctctctctcactcactcttggcatgtgacatgctggctccctatcaccttctatcatcattgtaagtgtcctgaggcctcaccggaagtagatgccagcaccatgcttcctttaaagcccgcagagccatgagccaatcaaacctcttttctttataaattacccagcctcaggtatttctttatagcaatgcaaatacaggctaatgcaccaccccatgccgtagtacagtagctaagtctctcccatttgactaatgctgcgtgggttcaatacccagccagggaattgccatttattgrtcctttttccttccatggacagtttccgatttctcgtcctgtgttttcctttctctgagctatctctagggtgattctggatcgtgtaaaaattgtttgccacctctttggagataactcgtgcacccatgattaagtcataattttgattgagacccttagaaagatacctttggtaaagaaactcaaaagccaaaaatatcggctgttgtcctgggtaaaatctgg

SEQ ID NO: 748340 - DNA, 501 bp, Homo sapiens
tgttaggtaatactcctctttattcttgagaaattttcttattctgaagtcttttatctgaaattaatatagttactctacttttcttttggatagtgttagcatggtatatctttctctttttactcttaatctatgtctttatttttaaagtgagtttgttgcacacaacataaaattggatcttgttttttgatccactctgtctgtcttttcattggtatatttagaccattcacatttaaagtgattattgaaatagttggattaatatctaccatatttataactgytttatacttgttgcactttgtctttttctttgtcttccctcttttactacctgcttggttttaatggaatattttatatgattccattttctgtcctctcttagcataatattacacttttacattttttccactggttgccctagaatttacactgtacatttacaactaatctaagtccactgttaatactatgccacttcacagg

SEQ ID NO: 748341 - DNA, 621 bp, Homo sapiens
aggttttttaacacccccccaaaatctcactagctcaccagcaatggatccaaatgaagaagaaatccctgatttacgtggaaaagaattcagaaggttagttattaagctaatcaaggaggtaccagaaaaggcaaagcccaatttaaggaagtgaaaaaaaatgatacaagaaatgaggggagaaagtttcaattaaatagatagcataaataacaaacaatcaaaacttcaggaaaaaaatggatgcgcttatagaaatgcaaaatgctctggaaagtctcagcaatagattccaacaagyaaaagaaagaacttcagagctcgaagacgaggttttcaaattaacccaaaccaacaaagacaaagaaaaaagaataagaaaatacaaggaaagcctgcaagaaatctgggattatgttaaacaaccaaactaagaattatcagccttcttgaggaagaagagaaatctaagtttggaaaacatattttggggaataatcaaggaaaacttcctggccttgctagagacctagacatccaaatacaagtgcaaagaacacctgggaaatacattgcaaaaaatcattgcccaggcacattgtcatcaggttatctaaa

SEQ ID NO: 748342 - DNA, 542 bp, Homo sapiens
tctgcaatgatcctgtttgcaattaaggtcacattctgagatacttgggagttaggatttcaacacatgaatttttgggaaacgaggcataattcaatccatcgcaacacccaaatataaattgactatttttagaatttttcagtcttattagaatggtagaaacacagaaatcttccaacgtcctcattctatgccaaaatagaacacttcaagtaaataagaaaggcattttggataacctttargctttcaggctatgtaccaaaaagacaccattaagagacaagacatgccccacggtaagataagaagataggaagcttctctactgcaaactcctaggacttaccacattgctttcaaaaaacttcttagagtctctaagtattttcttgtgtaatgttatagatctgagcacataatatttagaataagtaatatatttaatgtcttcaaaataatgaaaataaatattttaaatgttctaaagttttctttggggtcttgagatttagccaatgaccaaataaaaatattaa

SEQ ID NO: 748343 - DNA, 476 bp, Homo sapiens
ctgggtatgcaatcatacacattgttgagatctgggtctgattacacctatggcactatgcagtgtatttcagtgtaaacagagtaagtctgagtttgatttagagaaaaacaaaaaatacgctaaaaaaataaaaactacatgtgagggggaaatacytctcttttggcccctttgctcctgatcggtgagcatttttgcatttttcaaagacatcaaagggttgctacaaggcttaccttgctcacaggactttggatgtatcttctagtgctgctgagaagatgtgtcatgacaaggcacatccaccgtggtgtggtgtgtcaaacttgaatcactggacttgagaaaagaaggcagagtttgtgttctgtgctgaagatagcccatgtatttctctcagggaggaaaaagttttcaaggttaaaaaaattgagaaaatgggtaaagaaaaaaataggcttttaaaaaatata

SEQ ID NO: 748344 - DNA, 476 bp, Homo sapiens
ctgggtatgcaatcatacacattgttgagatctgggtctgattacacctatggcactatgcagtgtatttcagtgtaaacagagtaagtctgagtttgatttagagaaaaacaaaaaatacgctaaaaaaataaaaactacatgtgagggggaaatacttctcytttggcccctttgctcctgatcggtgagcatttttgcatttttcaaagacatcaaagggttgctacaaggcttaccttgctcacaggactttggatgtatcttctagtgctgctgagaagatgtgtcatgacaaggcacatccaccgtggtgtggtgtgtcaaacttgaatcactggacttgagaaaagaaggcagagtttgtgttctgtgctgaagatagcccatgtatttctctcagggaggaaaaagttttcaaggttaaaaaaattgagaaaatgggtaaagaaaaaaataggcttttaaaaaatata

SEQ ID NO: 748345 - DNA, 536 bp, Homo sapiens
ttctaggtcttgctactgcagcaatctaaatatatcctaagcttcctatcactaatttcaccaccataaactccgaccataatggcttaatattaataattggcagcaaaatttgtaatattattctcaaggcacatttattttgcatttgataartaaaagtatcattttaaaaaaaaaacccaccatatccttacaaaatacctttaagtagagaacctttaagtagagaagccgaaatcaacgaaaggtgtcctcttattaaatttctcatattcagtgacaggtagcaagcatctccatcactattttagaatgaggaaacagcctcagggacttgaactaagtgagtcagttgtgaggctaaaatagaaaccaaacttcaagatgaccttgaatgaaatccagccagaaaagaaggcgtacattggtagtgacacttgtttagcctaatgtgactccagaaaaaaagtcagaatagcctcattaaaaaaaatagcattactgcaaatcctaaatattattatacatttgtc

SEQ ID NO: 748346 - DNA, 620 bp, Homo sapiens
agtaaccccgaggactgctgggagccaccagacgcatagaaagagccaagaggtgcatagaaagagccaccaggcacagggaaagagccaaggagagatttttctccagagtcctcaggagggagcatggcaggctgacaccttggttgcaggcttctggtctccagaattgagagataataattttctgttattytgagtcacccagttttttttttttttttttttttggtaatttgctatggcagccccaagaaactcatgcagtgcaatctgtgaggcagcaatggataacaaatacaattaggtgaccaaattactcttttacaacattcattgacttctcaatgactacatatgtggaaaaaaaaaaaaaacacttgtttcttcaggacacttattatttttccttttttttggcaactttgcaaaatttcctctggaactaccttcttcctcaggacaagaggaatcagatatgctaagatataatacgtcccaagttatgtaaagcacagagcttcatacacagaacctgtggtgctacagctctatgtcctaaaacacagcaattctgatacgtttgattttgccgatctccatcatagaaggggaaggaa

SEQ ID NO: 748347 - DNA, 631 bp, Homo sapiens
ctcccaccagtactggatttctgaggttgaaaagaatctgtgtataagtggaccctctaatgtcaaacccagttgttcaagggtcagcggtaatccgatatgctacatggcttcacttaaactacatgaagctatataagtttacttagaaaagacaagacggtcagttagctgtgtctcggatgctgtgtctcggatatcatgggcactggtgatgcactcttggggggttttctattctcttctctatgctcatatgtttataagaatatgtcacagcccccgagacagagaggaacatcaaaccagaaaacagtcaccccctactccgccccccaccacccctgagcctctggagggacartagctcctgctcctcccagccctgtctcagaggcatggggctgtctggggctcagcagctacaggcgcattcaggaggaagaggacgtcttaccctggcccccctcagctgggtcctggccctgccacgggtccaaggttctctccccacacccactctcattgccgacgtccaggcagctggccaggtctgggagctgtaatgagctgttgtacgcaaggtccatgtagctgtagaaaccaggaatcaggaaagtgatattctaga

SEQ ID NO: 748348 - DNA, 502 bp, Homo sapiens
gacaaggtctgactgttgctcaggctggagtgcagtggcgcagtcatagctcgctgcagtctcaaactcctgggctcaggcaatcctcctgccttagcctcctgagtagatggggctgcaagggcacgccactatgcccaactgatttttacaaattttatttttagtagggacagggtctcgctgtgttgtccaggctggtcttgaactcctgaactcaagcaaccttcctgcctcagccttccaaagaactgggattataggcacgcctggctttgartgtaatttagacacagaagtgttgatcttatgctgtttgtgcttccgagtggacctggtggttgcctaagtggattctggggaccatgttcagacacgcagtgagagtgtgtgttagctgtgcagactgacttaatccttagatctttttgcaggagttgagggcaagggctgtgtgctttgcctgtttcagaaggtggactctggcagctgtgtgaagtct

SEQ ID NO: 748349 - DNA, 617 bp, Homo sapiens
ttattattatttgtaaaaatgaagtctcactatgctgcccagggtggtctcaaactcctaagctcaagcgatcctctgcctcagcctcccaaagtgctgggattacagttgtgagcgaccacactcagttctgatattcttatattaatccaacaatgatattaaaaaaaaaaaacaaaaaacctctctagttttctatgtggagaatcatgtggtatgcaaattaktgttttgtttcttttcagttcttatgtatcttctttgtttctgatgcacaactatccctataatacctactaccatatgaatctatatagatgtacctacagatgaactcatacactgatagcaaacattattactttattcctaattttcaagggaagatttttaatacgtcaccaagaagaacaatgtttataataggtttttagtggattgcctttaatagaataaggaagtttcttgctattcttggtctgctatgagttttgtctattgtcatgagtgatgattgaatgctaatacttcttctcctgaatctattgaagcaatcataagattttttcctttaatctactattgtgctaattaacataaatcattttagtatttca

SEQ ID NO: 748350 - DNA, 627 bp, Homo sapiens
ctatatccccaatgtgatggtattgggaggttggacttttgggaacttactaggtcatgatggtggaaccatcccctaatctcattcatcctccaccatgaatgagattagtgcctctataataagaggcaaacargagatcatctctctctgccatgttaagatataacaaaaaaacagctgtctgcaaactaggaagagtgcactcaccagataccagatctaccagtgctctgatcttagacttcccagccttcaaattgcatagtattttgtttagtctatggtattttgttgtagcagcctgagctgattaagacaattttcttcatagatcattttcttgggaatggtggtaagatgctcataaatgcttaaaactacacataacaatcacacagctagaagagatcccagaaaatctttcaaagaaaattcagaaccaaagttctggctctcactttatctccagccttaaatgagctggagagtcagttatgtaactaaatgtctcatgcctcagattcctcatgcattcattgggaagaatgcctgtgcaatgtgtctttagggttaccatagagatgaatgaggtaatgtatagaagaagcacaatcccaaataata

SEQ ID NO: 748351 - DNA, 537 bp, Homo sapiens
cagcatgggagaaagacagtaaacaataaacagaataagtaaattaggtggtactttaaaaatataataagtactatgaaaaaaccaatcaggcagagagaagaaggttgagaaagaggaacccagatgggagggagcagataacatctgggcaaagaccaggggagacaagagtggggaagttatgcattcagatgatgttggggaaagacacttagtgcgaagggcctaaggctgtcagctggactggagcaaagtaggtgatgtgttcatgaagataatagagtgtgtgtgtgcgtgtgtgcgcacacgcatgtgtgtgwgagagagatcatgtagggccaacgattttagatttatgtatatatatattttttcaaaagttaattatgaaggaggaaggaccataaaatatttaaagttcaaatttctctagttcctactttcttaggggattagttttagggagaactttttttttttttttttttttttgagatggagtctagccctgttgcccaggctggagtgcaatgg

SEQ ID NO: 748352 - DNA, 590 bp, Homo sapiens
ataagggtatgcttactctgtttctgggaagtaggagaaaaagactctgcttcccattgctttcataaggggtaaacaatggcctcctttagrcacaaattgatgaccctcttcagcctccactttctgtgctgaatgtaccagagtttacagccagccaagaagtaagaggtggacatgctccttgatgagtggtttcaggcaacagcctgcagcaccaagtcttctgaaaaacctcccaggtctgaaaacgactatgagaagagtgaaaaaaaaaaagtgtgttggggctgcttctagccagatcctattcagagttccacagctgaacttccctttggactgtgtttagagttcctaaacaaaatagatgggagatgtatcccactgaggagcaaaacagacaaagccattacccctctaagtaagcacagccctgagccaggaacaaaaattggcccagtgtgtgggaacgtgggcctgccaggcctatctagaatccactcccaggcagtggcagtaaggaacatgctgggaaatgttatgctacccctccccaaccaagctttctactcaaaggttaaggaacc

SEQ ID NO: 748353 - DNA, 546 bp, Homo sapiens
aagacctgagaaatcttgccataaaaagcatatttaacattctttaatgcaccattttccaaattcatttgatcacatggaaagcctgttaacgtctcactggatactagtattccatgcacctgaatttgggaaacacagcattatagaaatattgagaaggcagaaacaacaaaacgtagtatttgattgcctgagaaagaagagaattcaaagatgatgttaagttttagccactctgactaagaaaacacgctataccgtaattatcakgtttatgagaacagatttttgggtgggaattagtgtaggcttgggttagttaagtgtcaggtgtcagggtatcaacatttgaagatattcatataataaacataaatatctgcaaaaattatttcaaaaacagtaatggaaattcaggtaaactacttgcaattatttcataaactgttgctaccaaccaaaatgaatgcctagcagagcgctccagcacatggcacagctagaccatgccatgccccatgatgtgtcacacatcggggataa

SEQ ID NO: 748354 - DNA, 638 bp, Homo sapiens
gagagcacaaggcgtgtggctcttggcatgtgtgccggttggggtcctctggtaagcagacgctgagatggcgttaggagtgcaagaagtttgttggggatttaaacctgtgtaaggacgactggcggggagagcctcagacggcratgcagatctgaccaagtctctgccagcccagcagggagatcccggtggagactgccgatttgaagagtcccgcaatgggatgacgtggccgggcacttgcacccgtgcagtgctcaggcattggctgggggctgcctgggaagatccggatattgaatgtgaaagacaggaggtgctggaggctgctaactgtgctccctacagctggtctgcaagttcattcattgttttcttcctttctttctctttcttttttctttttcgttcttttttttctttttctttctttctttatttttttttttcttctgagacaggttctcgctctgtcacccaggctggagtgcagtggtgcaatcatggctcactgcagcctcaaactcctgggctcaagcgatcctcccaccccagtgtctggagtagctgggactacaggtgcatgccaccatgcccagctaattaaagacaattttttttgtagaaacggggtc

SEQ ID NO: 748355 - DNA, 674 bp, Homo sapiens
attcaaatataactggatcacagaaaaatcacaagagaaatgagaaaattataaaatacttcgagacaatgaaaacaggccaggcacggtggctcatgcctgtaattccagcactttgggaggccaaggcaggtgggtcacgaggggtcaggagatcgaaaccatcctggctaacacggygaaaccccgtctctactaaaaaatacaaaaaattagccgggcgtggtggcaggcgccggtagaaccagctactcgggaggctgaggcaggagaatggcgtgaacccgggaggtggagcttgcagtgagccgagatcatgccactgcactccagcctgggcgacagagcaagactccatctcaaagaaaaaaaaaaaagaaagaaaagaaaacaaaaacgtaatatactaaaatgcctaggattcattgaaaacagtggttagaaggaaatataaagctataaattcttataaaggaagaaagatctcaaatcaattacctcactccacacattaaggaactagaaaaagaagagcaaactaaacccaaagcaagcagaggaaagaaataataaagattagagtagagactggccaggcaccatggctcacacctataatcccagcactttgggaggcccagacaggaggatcccttgagcccaggagtttgaga

SEQ ID NO: 748356 - DNA, 674 bp, Homo sapiens
attcaaatataactggatcacagaaaaatcacaagagaaatgagaaaattataaaatacttcgagacaatgaaaacaggccaggcacggtggctcatgcctgtaattccagcactttgggaggccaaggcaggtgggtcacgaggggtcaggagatcgaaaccatcctggctaacacggcgaaaccccgtctctactaaaaaatacaaaaaattagccgggcgtggtggcaggcgccggtagaaccagctactcgggaggctgaggcaggagaatggcgtgaacccgggaggtggagcttgcagtgagccgagatcatgccactgcactccagcctgggcgacagagcaagactccatctcaaagaaaaaaaaaaaagaaagaaaagaaaacaaaaaygtaatatactaaaatgcctaggattcattgaaaacagtggttagaaggaaatataaagctataaattcttataaaggaagaaagatctcaaatcaattacctcactccacacattaaggaactagaaaaagaagagcaaactaaacccaaagcaagcagaggaaagaaataataaagattagagtagagactggccaggcaccatggctcacacctataatcccagcactttgggaggcccagacaggaggatcccttgagcccaggagtttgaga

SEQ ID NO: 748357 - DNA, 674 bp, Homo sapiens
attcaaatataactggatcacagaaaaatcacaagagaaatgagaaaattataaaatacttcgagacaatgaaaacaggccaggcacggtggctcatgcctgtaattccagcactttgggaggccaaggcaggtgggtcacgaggggtcaggagatcgaaaccatcctggctaacacggcgaaaccccgtctctactaaaaaatacaaaaaattagccgggcgtggtggcaggcgccggtagaaccagctactcgggaggctgaggcaggagaatggcgtgaacccgggaggtggagcttgcagtgagccgagatcatgccactgcactccagcctgggcgacagagcaagactccatctcaaagaaaaaaaaaaaagaaagaaaagaaaacaaaaacgtaatatactaaaatgcctaggattcattgaaaacagtggttagaaggaaatataaagctataaattcttayaaaggaagaaagatctcaaatcaattacctcactccacacattaaggaactagaaaaagaagagcaaactaaacccaaagcaagcagaggaaagaaataataaagattagagtagagactggccaggcaccatggctcacacctataatcccagcactttgggaggcccagacaggaggatcccttgagcccaggagtttgaga

SEQ ID NO: 748358 - DNA, 611 bp, Homo sapiens
tgaactcaacaggaggaggcaggaagatgggatgggaaaagccagttagcagtgttctatttcttgctgttggtggtaggttcaaaggtgacgcatacataaatgaaaagatagaccatggatacagccatgataagcatatgccatgaaccatacagacatatccaggttgtgtggatctcaatcccgcagcttagacaatttaggggagatgagaccttctaagaaaaaaatatacaaattacaaatttgttcaaatttacaagactgtggactggcaaattgtttcttttttttttattttttgccacaggatctcactttctcacccagcctgagtgcagcggcctgatcatggctcactgcagcctcaacctgccaggctcaagtgrtccttccacctcagtctcccgagtagctgggactacaggaatgtgccaccacgcctggctaatttttgtattttttgtaaatacaaaatcagatatcaaagtgatcattattaagaatgagaaattacacatttctaaaatatgacaacataatcatcacaaaatccagaagaataacagtttttattattagtagcaatagacagtcttacacacctc

SEQ ID NO: 748359 - DNA, 611 bp, Homo sapiens
tgaactcaacaggaggaggcaggaagatgggatgggaaaagccagttagcagtgttctatttcttgctgttggtggtaggttcaaaggtgacgcatacataaatgaaaagatagaccatggatacagccatgataagcatatgccatgaaccatacagacatatccaggttgtgtggatctcaatcccgcagcttagacaatttaggggagatgagaccttctaagaaaaaaatatacaaattacaaatttgttcaaatttacaagactgtggactggcaaattgtttcttttttttttattttttgccacaggatctcactttctcacccagcctgagtgcagcggcctgatcatggctcactgcagcctcaacctgccaggctcaagtgatcctyccacctcagtctcccgagtagctgggactacaggaatgtgccaccacgcctggctaatttttgtattttttgtaaatacaaaatcagatatcaaagtgatcattattaagaatgagaaattacacatttctaaaatatgacaacataatcatcacaaaatccagaagaataacagtttttattattagtagcaatagacagtcttacacacctc

SEQ ID NO: 748360 - DNA, 620 bp, Homo sapiens
catctttctttttttttagatggaatcttgctcttgttgcccaggctggagtaccatggctcaatcttggctcactgcaacctctgcctcccggtttcaagcgattctcctgcctcagcctcccgcgtagctgggattatagccatgcctggctaatttttttttcgatttctactagagatggggtttcccccatgtttgccaggctggtctcgagctcctgacgtcaggtgatccaccagcctcagcctcccaaagtgctggggttacaggtgtgagccactgcgcccggcctcactgcatcttattgcaccaaaataatgaacatcactcgtctgctgctgtctcttttcttcctctttgcccttgtgagattattccttttctactagcaaggaagctccatgagggcaggatgtatgtctgttttgctcactgaagtatcccaagttcctggcataaagtaggtgctcagtaaatatyattgaacaccaaaaaatgcatagtatggttgagcaactggccagcgggtttggaattagctcaatttatcagcttctggagcatttttggaaatcccagtagctccagaaataacgttactaaagccccaggaaagg

SEQ ID NO: 748361 - DNA, 501 bp, Homo sapiens
tcatatggtaaacccaccaggaattgtcaaactgttttgcacagttcctgcaccattttcattttccattcccagcagcaatgtatgagaatcccaatttctccatattcttgccaatacttgttattatctattttcatcattattctagtggatgtgaagggatatctcattgtgattttggttggcatttccctaatgactatcaatgttgaacattttctctgtgcttattagttatttgtatatctcctttggagaaatgctattcaaatcattaacccatgcaagaaagtaggttatatgtctctattattacagttgarttgtgatctttttttaagtactctggatgcaaatcccttatcaaatttataatttgaaaaattttctcccattctgtggattgtgttttactttcttgatgttcttggaatctcaagggtttcaatcttgttagattccaacttaacaatctgttttatcatttgtgcttttggt

SEQ ID NO: 748362 - DNA, 481 bp, Homo sapiens
acctgcagccccgggatctttagaaaacacagttcagatcacttcactccctactcttgggatgaagtctgaatccttagtggagcacaattctaatttcatgagaaagataaaaatcaaaactacgaataaatcaacacaatcctgtgacttgtgctaagtattataagtaaataggtgatgggaaggaggaatgaggggccacttaccttgtgtggctatgaaaggccttctgcaggggtgacatgtacactgagacctacaaagtaagtggaagaagccagctgggagggagggagaaaaaagtggatctgatcacagagaaaaacaggargtgaagagaaagagagaagcaggggtgagggagttcacacagcccctgaccagtggaaatcacagccgggctcagaattcctaagcccaggccttggatgctatgagattcagctgctcttcctgccctgggttccatgagatgccc

SEQ ID NO: 748363 - DNA, 606 bp, Homo sapiens
aagctttttcatttaaagtgaacttgaagactggacttaaatcaaaataatgaagagaaaggaccaaaatggggccaaatcagctgggacaatgtgagctctgaccatgcagagaaaaaaggagagcaattcatatgctgaagccaccgcagactccagtagtggatgccagggcaacgcccaggacctcctcacagtcaccagcccagggtacacccaggaccagcccctccgcagctgaggccagaggttccagagggcacatactgtgtcagtctaaagccccaactctcctgtactgccacatcctgtgtatttttaccgaatgaagccaagcatagctttgaaaatatacattattttatgcaattaaaagttactgaggggcaggtgggcctccyggaaagctgtggctattcccctcttcctccacacacaccaggaatctcaggggaggcagagaaaaaaaggagaaagggaaaaaattattgggatcaattaaattgtagggtttcttgcttctgttacccaatggatagtgatttgaaggagatccgatcaattactagagaaaaaaacaaaattatatatttctctgaatagtta

SEQ ID NO: 748364 - DNA, 619 bp, Homo sapiens
ggatccccagaaatacattttagtagcttccaagtaaattcttttgtaaatggagtttctctccattcataagttttagagcaaaaatgaagccttagtgggtctagatatctggctaacattaactccctgtgtgaccttaaactggtcgtccccaragctttatgcttttatacaattaacttgaattacagcctctccttcttgcccataagaatgataataccacctgcattactcaacttttacgcttatgtgagacacctagccacctatcagaaggtattcaaatgcaaagcattaagtttttacactttaatgtgaagtggaagaaagtcttgattcaaatgcacaatctctacctttctactgattccacatttgctgtcttttactagtgcagttaagtcccaaattagaaacataagtcgccccaacatgtgacaaatgtcctttgttgccagagaaaggacagtggggctgtgtcctcagccttagcaaccagaagattctgcaagaccaggacattctcctgccagagcctgctttagtgtccagtcctgttctccaaagagatggaaaaaaccaagtggaaaagtttcagtttattcaatataag

SEQ ID NO: 748365 - DNA, 623 bp, Homo sapiens
catatacatgaatgactttataatcttactacaaatgcaatagccccctaaattacatttccactaaatttacatcatctcactgatcatactttatcatcttcctgaaacaatgtttgatattgatgatggtggatgaaaacttttcctcttctctgttcaaaattaatagtataaaatacaaactaagatggtgattgaaatgcaatattacattgactcagggctctagttttagccccattgaaaaatgtgctgaggtgttagaaccactccagatttacccagtgatgggctgagaaagtgaaaaatatctccctgcttgtgatcaaggaaagtgggttaatcctttccctagtttatttaaagaattgtacattattggcatgacaaaacaattatcaggttaaatgcaagagaagcaatagtcataagaagtgatgattagtgagcaataacatatattagcctrtgccagcatacaagtacagatacatgaaaattagaatttcaacatcaaataatgctctctgaatacagcattaaaaaataagtggatggccaaaacttttctcaacatcttaagtgattgcccacctattattaaaagtcactttatattt

SEQ ID NO: 748366 - DNA, 578 bp, Homo sapiens
aattataataatgaagattttctactttgacaaaatgaactttcaaaaatttgactttgatttaataaattccattaaaaattcaaaacatttattagtatttattcttactgattttcattctgaattctctgawaatattgatgtaaaactagtcatttgtggaaggtttctgataataaagtcaatacataattattgcttcactttgcatgtatgtgccaaatacttgcaaaaatgagcaatattaatatggaagtataattgtgagatttagataaaagtatttctaactacatatagaatagataaccattatatttctgtgacagggttcacagaaatagaaatgtactttctataattgtaccttgtgaaagcatcacttttgggcacattttctttaaatacattttttacttttgaagtaaatgatggcatttcttaattagtctggtgttatttggttttcatcttgtcagaattattggtacaacccctaacatgaataactttctcaaagattttgtttctagttacaaattcatgaaaaatgtccaaagtaaattaaagtcagt

SEQ ID NO: 748367 - DNA, 454 bp, Homo sapiens
ttgattctattccaattatctcctccaatccctccttctacagaaattctggattatctgtattactcctcactgttattaacccagcatttcttgaataagaggatacaagaaaaggaaaaaggaaggaccttattatttacagactaaatagacaagtaaaaaatagtattatagggaaaacattaactcgagtcacactgttactgtctaaaacaactccttggatattatttaaacacattttacaactttaatttggtcaagtatatcactaaatgccatgatgtatcagttacataaaaacawttaatgaccaacaaagggaaaattttccaaattagtttatactaaaatcaaggttatgataatttttaaaaggtattaaaaaccgctctgtgctagtaggggagtctgataccttttatatttcataaaattattttccagagtt

SEQ ID NO: 748368 - DNA, 604 bp, Homo sapiens
aaattttatggattttttatatctgtttttggttgttaatactttgttcttaatatatgagatatttgtgttaatattattattgacttcctttcatgctagttgcaaaacttaaaaaattattggcttattagttttaattctctaggcaaaaagatgtttcaaaaacaaaaagtcaaaacataargattagatacataataaaatattaatttatagtacatacacacatatatgtttgtgtgtatgtactataaattaatatacatatatgtgtgtgtgtatacatatatatatgtgaacacttttcctttgagactcagtcctgcattttcacccaggctgaagtgcagtggcatgatcagagctcattgcaagctcaacctcctaggctcaagcaatcctcccacctcagtctctcaagtagctggaacaacaagcacatgccaccatgctcagttaatttttaatttttttttttttttttgtagaaatggcatcctgctatgttgtccagactggtctcaaactcctggactcaagtcatctgtctaccttggcctcccaaagtcttgggattataggcatgagccacagcaccctg

SEQ ID NO: 748369 - DNA, 586 bp, Homo sapiens
cggccttatttttacaaatcaagtgagattaaatgcactggctgttagtaagttcatttttctcttcattataaagcctatcttttgaaagctgcagctataaagaaaaaaagaaagaaaaagaaagagaaataaatgagagcatttgtaaaatataccagacacatcagttaattatttcaggcatgtaagactgataaagcagattttatatgttcatcagttttttgttttgttttgttttgttttttgtcttagaaagaaagtgttgattataagttcaaagtcagtttctaaaaagaatatttcaagtataactgcaattccagaaaastattacattgagctttaggaaattgactgttgaagtacatgaactgctcagagtccagtagtatagcaagtcaatttattattgtgtatcagtcaggattcaaccagagaaatagaactagtagaataaagattcaaagatgcattgcaaggtattggcttatgctattgtataggctggtaaagcaagtctgaaatccagcaagtacctcatcagaaaggcacgcaggaactgtcagatacaagctaaagc

SEQ ID NO: 748370 - DNA, 586 bp, Homo sapiens
cggccttatttttacaaatcaagtgagattaaatgcactggctgttagtaagttcatttttctcttcattataaagcctatcttttgaaagctgcagctataaagaaaaaaagaaagaaaaagaaagagaaataaatgagagcatttgtaaaatataccagacacatcagttaattatttcaggcatgtaagactgataaagcagattttatatgttcatcagttttttgttttgttttgttttgttttttgtcttagaaagaaagtgttgattataagttcaaagtcagtttctaaaaagaatatttcaagtataactgcaattccagaaaactattacattgagctttaggaaattgactgttgaagtacatgaactgctcagagtccagtagtatagcaagycaatttattattgtgtatcagtcaggattcaaccagagaaatagaactagtagaataaagattcaaagatgcattgcaaggtattggcttatgctattgtataggctggtaaagcaagtctgaaatccagcaagtacctcatcagaaaggcacgcaggaactgtcagatacaagctaaagc

SEQ ID NO: 748371 - DNA, 617 bp, Homo sapiens
ttctcatttttttctcccctcttcaatcattaggcattgaatgttctataatatcttatcatcaatagattacacataatacttttctatagctaatttcctatcttctatatgttttcaaacatatttggcatattcgtaaattttcctatcctccacattggaaaatataccaggagcacaatgctacattactcgctttcaagctctcaatataaaatcaaagatgtatgaagtaaactaaaaatcactacacaatatatatgcaattactgtatgttagacaatatggtcagagcaaacatatatgcacgggagctctgaagaattggkagactagttcttctatagctacaaatattcaaattttttattgggaagaagtgacaagttttactatgtagttcaaaagagcaaaatacattctgggagatagaagagtgtgaataaagataaagtttagggcgctttgctgtggctcacgcatgcagttctagcactttgggaggcagaggcaggcagatttcttgagcttatgacagttcgagaccagcctgggaacacagtgaaatcctgtctctacaaaaaaatacaaaaattagcccagcatggtgatg

SEQ ID NO: 748372 - DNA, 519 bp, Homo sapiens
atcgcagtgttcaattttcacaactgatatgattgatgtgtcataacatcatattgtaccccataaatatatacaactattatttgtcaattaaaagtaaaataaaattttaaaaggtgcttggtagagtttaccagtgaacccatctgggcctggtratatgtattttggaaggttattaatcattgatttaatttctttaatatatgtacccattcagattgcttatttcttcttatgtgaatcttggcagatagtgtctttctaggtattggtcagtttcatcaaggctataaaattcttgggcatagagtactttatattgtacctcgattatccttttcatgtctatgggatgtgtattgatgtacctcttttcatttgtttgtttttttgttttaccatattgcctgggctggccttgaactcctgggctcaagtgatcctcctgcctccacctccctaagtgttggaatgacaggcataagccactgtgcctggcctcatttctgagaccta

SEQ ID NO: 748373 - DNA, 622 bp, Homo sapiens
ttcacatttattatctccagttgaatttgaatggaagaaaaccactttggaatcatatacaatgccactgcttcgttacgtttctggaaaattataggcagcatattttatgattaaacactcaggatctagagtcagaaactatttaatttcatttctgcttcttagataaactttgggaaaaataaatccttcaagactcagttcttttattggtkaaaaaaaagagagatgatgatactaattacatgttctgggttactgtaagttaaaattgaggcaaggcttataaagtgttcagcatagtttctaacaggggctacaatacattttagtattactgttaaaaacagaatatcctcttaggctagttcataaaaaaacaagcaaacagcatagatatttatgaaaccatctgggtatatttatgtatagagttgactgcatttgttccaaaacattagcatgtttttgatttctaaatcttcttagtcaactaaatcaaaacttgggttttaatgtgaatgaatatcattatcctaatattctaaacatattctagtattttatgaggtagcataatgaaagaatgggataaatagatcagttcacttttgttgca

SEQ ID NO: 748374 - DNA, 579 bp, Homo sapiens
actgtaagttaaaattgaggcaaggcttataaagtgttcagcatagtttctaacaggggctacaatacattttagtattactgttaaaaacagaatatcctcttaggctagttcataaaaaaacaagcaaacagcatagatatttatgaaaccatctgggtatatttatgtatagagttgactgcatttgttccaaaacattagcatgtttttgatttctaaatcttcttagtcaactaaatcaaaacttgggttttaatgtgaatgaatatcattatcctaatattctaaacatattctagtattttatgaggtagcataatgaaagaatgggataaatagatcagttcacttttgttgcatatacaccatcccaaaaattagtggctccaaaaaaaaaaaagctctcmtcagtttagtggaaaatggaaaatctcaaatatttttgtaaactgaattttataatatttacactttcttaattatagagacgaatacatcataacaaagacactagagattaatattcaatattcattctacattataattatttttaaattaaaacgctttcctttc

SEQ ID NO: 748375 - DNA, 632 bp, Homo sapiens
agtgaaacaagccaggcacagaaggaaaactattacatgattttacttatatataaaatctaaaacaacaaaaagaaattcaaatgtacaaagaaaaagaccaaaccagtgattaccaggcgtggggcagtggggaaaagacatggggaagtataggtctgaggatacaaagtagcagatatgaaggaccaataagtctagaggtataatgtacattatgattatgtgtaataagttgtacttcatatgagattccggctaaattagtagattttagctactcttgccacacaaattttaaacgtgagtaattggccgggcacagtggctcatacctgtaatcccagcactgtgggargccaaggcgagtggatcacttgaggttaagagttggagaccagcctggctaagaccagaaatcccatctctacaaaaatacaaaaattagccagatgtgatggcgggtgcctgtgattccagctacttgggagtctgaggcaggagaatctcttgaacctagaaggcagtggttacagtgagcagtgattgtgccactgcactccagcctgggcgacagagcaagattttgtctcaaaaaaaaaaattaattaattaattagttaattaaaaat

SEQ ID NO: 748376 - DNA, 645 bp, Homo sapiens
tgtgtacacctaccatgtacccagaagtgttaaaaatttttaaatgtacagagaattaaaataatgaagaatgcacaagacagcataaaaatcctgagggacatactgagaagttttatcatgtttgtaattggagtctcagaaagagaagaaagaatggtatagaagcaatatgtggaaagatatggcttcaatttccaaattattggaaagttataaaaaaaagttgtagaataactgtgaacctcaagmagaataatacatacaatgaaaatttgacccaatacatcagagtataaagctaaggattttaaaaagtataaagaattttaaaaagataaacatcttaggcagagaaaaagataaaataaaaagagaaacaggccgggcgcgtggctcacgcctgtaatcccagcattttgggaggccaaaacgggcagatcatgaggtcaagagatagagaccatcctggccaacacggtgaaacccatctctactaaaattacaaaaaattatctgggcgtggtggcgcgcgcctgtagtcccagctactcggaaggctgaggcaggagaatggcttgaacccaggaggcagaggttgcagtgagccgagattgcgccactgcactccagcctgggcaatag

SEQ ID NO: 748377 - DNA, 587 bp, Homo sapiens
acttttcaagcttctgcctaaaaggcagagaggaaaactcactctgtcctcaaaaatcaaggaaagtagtttagtaggcagagtacttgtcatttgacccaaaaaacctcatatttttaccagagtcaagatagaaaaagatcaattcagtcttttaaagaagcaatgactcagaagaccaatcacatcaggacaggacctgctgttcaaactgcttagattttacaaggtgctattaggtatacttaaagttgattggcctataaattggcaacaaaaaatcccttgtggtatttcaacaaaagaagatatttctgtgagttttacatggctctctcttggagagagtggtgaggaaattgcgcttcagttytgtttcttcattctcttttctactagtagttttagctctgtgagtttccttcttcaactagaaaaagacaattggatttatcattactagctctaatttttaaaaagacctataaagcaaggtcctcttttcattgtgaccactgtttaattgatcttttctatatacaactgaagtttttttttgctgaagtgtatatgacatgtttcttcca

SEQ ID NO: 748378 - DNA, 636 bp, Homo sapiens
tgggactacaggcgcttgccaccatgcctggctgatttttttttgtatttttaatagagacagggtttcaccctgtgaaacaccctgtgaaacaccctgtgttggccaggctggtcttgaactcctggcctcaagtgatccaccccctgggcctcccaaagtgctgggattacaggtgtsagccaccacacctggcctcacatccccatttcttgtcttgcactgggagataaactcctcagccctaagtctttttcatatgcttgttgttggcctcatgtatgtcttcttttgaaaagtgtctgtttatgtcttgagcccactttttaatggggatgtttgttttttttcttgtaaatttgtttaagttcttgaaaaatgctggatattagactttcattacatgtgtagtttgcaattttctttccattctgtaggttgtctgttcactctgttaatagattcttttgctgtgcagaagttcttaagtttaattagatcccatttgtcaatttctgcttttgctgcaattgattttggagtctttgtcatgaaatctttgcccattcctaggtccagaatggtattgcctaggttgtcctccagggtttttatagttttgggttttacgtttaa

SEQ ID NO: 748379 - DNA, 596 bp, Homo sapiens
  misc_feature 561: n = A,T,C or G
caaagccatcttgtcctagaactttctgtggctcacagttttgagttcagctgaatattgtaggggcactccctctgaaaatcacaagagttctctttatatgtagttctcttttctcaagaactcttctctaaaatgctgcccccaaaatcccagctgcctgggcttctctgattcttggaaccctcagttcccattcaaagaatcaccaggttctgcctgagttcgtcttccttgttctgtggctttgaacttctctccacccagtaagacagtaaatcacagggctcgcatgtttstttcctatctctcatggatcactgtctcttcttgactgataccaatatcccaactgttgtctcatatatgttggctgggtttttagttgttttaaaaatgagggtttctttggtccatgttttttaatcttggctagaaatagaagtataaaatatgctattaagttaaaaaagcagcatccaaactatgtatatagtatatatatacaatatacatatatctatatggagaaaaaagcttaaaagttcagcaccaaaatgntttgtgatatttgttttcaagtatcaactttgcat

SEQ ID NO: 748380 - DNA, 513 bp, Homo sapiens
tgtgtaggacaaattggaccaattggtgagaagggatcccgaggagaccctgggaccccaggagtgcctggaaaggacgggcaggcaggacagcctgggcagccaggtacagtgtggagctccggtccccagtgtggcaagggctcaggatgaggcctgtgttccccagctctttctgtagatgtcaacctgtcagactgctttctttatggttctaggacctaaaggtgatccaggtataagtggaaccccaggtgctccaggacttccgggaccaaaaggatctgttggtggaatgggcttgccaggtaaactggatttagaagaggattctttagcatgtgtgcgtgtgatactggtagggcatgtctgcwgaatgagatcctcttcagctgagacggacagaatccaggcacgtgtgtctttcacatgaattcacatccccagctctgaatggtctcctgctcagggatggatgacatttggctgacagaatggccattgctaagaaaa

SEQ ID NO: 748381 - DNA, 573 bp, Homo sapiens
agtcagaacactgtgctgttttaatgtgtttctggtgcagtcccaaggctgagctgaatcagcctggcttgggaggcatcctgtccttgggagggtcctctggaggtcacttcagcggcagtggatgctgacagccttggaccttggacakctgagccaagagggcagaccaaaaagacaagtttcccgcaggaggcccatgtggacattcagccttaagttcattaaagcatgcattatttgtcttagttactcaactcactaagtgcatttcttatactaaagattattagtagcttcaaactgttgcattccagaaggagtagctcttggatttcaccagcattttttctgaagcatttattgtgcttgtggaaatacgtatgcattgttgaaagattggaaaacactcaaatgcccaaagaagaaaagttgcctgtaaccccagcccctccaggagagccactgttagagctttgccttcctattttccccttctacaagacagacagttaaataactcgtgttggatctattttttaaacaatattttaggggcaggtctcgctatgt

SEQ ID NO: 748382 - DNA, 580 bp, Homo sapiens
tttgaggggtacaaatgcagttttgttacgtggacatactgtgcagtgctgaagtcagggcttttagggtacccgtcacccaaataatatacattgtaggccgaggagggtagatcacttgaggtcaggagttcgagaccagcctggccaacatggtgaaaccctgtcgctactaaaaatataaaaaatagctgggcaggtggtgtgtagtagtcccagctactcgggaggctgaggcaggagaatctttggaggctgggagatggaggttgsagtgagccaagattgtaccactgcactccagcctgggcaaaagagcgagactctgtctcaaataataataataattatatatatatatatatatatatatatatatatatatatatatatatatatatttcattgtgctactactcattaagtaatttaccatccctcatccccctcccacctttccacccttttgagtctccaatgactataatttcacactctataaccatgaagacacttttgaaaaaagagagcaaggtgagggcatctgtgctgcccagtatcaaagtccattaaaacaact

SEQ ID NO: 748383 - DNA, 588 bp, Homo sapiens
tctcttcaaacaaacaaacaaacgggaactaacaattctataaactgcaaattggagattcaaattgctatgacaactttatgagaaacctcagcttttttctataaggggacatgatcaagagtgatcccaacagtttctgaatagacaaaaactggtactaacttcaatgtcatcaacaggagaattgatgaatgaattgtgagaacagtgcacaataatgctaatcaagaataaaaactaatggatgtggatgaattttacaaataatatttttaacagaaaacatcattcagaaagatatacatagtatgttaccaaaaatgctttaaatagtccattaataacrtataaattgtggtcaaaagaatagataccaacttcaggttagtggatagatggggagacaggcagagagggagagggataggtgaagggacacagaaggaatttcaatttaattttttaatttttaactttttaaagacttgaaggacctgtaaaataaatttgctaatctgggattgtgatcacaggattttcaactgtgtgtgtgtatgtatttgtgtttgtgtgtgtgtgtgtatg

SEQ ID NO: 748384 - DNA, 634 bp, Homo sapiens
tctaaaaattaactcctggttttccccagtcatgttacaagacgtagctttttgaatggctgccaaagaatggggtttagacaatctctttactttagggctttgaaaatagacaacaaatagagaagggggagaaaaatgttagaggattaaaaattcaacagccctcagaagcttggctgttcttttctttatgctagcctccaagtctactttttgaatattgagatgattgggacagaacaggataataaatatgtaagaaaaaaatcatctaatctcaataatcttcttttctccccctattgttggctgacagaaaaacaaacacaagggtaaagaaaatgctagtttctcatctgcagtggatgcgtatgtctgaggggtgagctttctctaccaagtgcccgktgattcaggttgtaatgagaagagcaaagcaccaggtctcctgcctttctctaatccttctgaatcagtcccaccttgctgctccttctgtgcttgttggaagcgtctcatgggttttgttgttgcagttgttgtctcaataccacagacgtcttttagtctttccttccatcctctatcctccaatgctgcaagctgctaagggattttcatggcacaggtg

SEQ ID NO: 748385 - DNA, 603 bp, Homo sapiens
tgactgcttttccccaactcaattgtgccgttcccttcctctcatgccccatggcacacccacattctctcctggatgggaagctccttgagaaacagagacagcaaatcctaaagcttgtgtgctatcacgcacatgcagactcttgggaaacatcttcatgaatgaccagtttgctccctcccacttactacwaatagtattcttagtcttcttccagatgccctgtggtctgtgctggagctgtatgggccccttactagaccactctgtctcccaccccccgtactaggtgtgttgaccatgtacagtaatttattgcccaagttgggttcttttgagagtactatgaataattactccaggactgggacgtatgggcatcctaatactaggaagagcagattaatcagaatacaccatattgtagttactactttggcaacttccgtcgcgggctccccaggcagactacgtgcattgtggactaggctagagctagctagagctggtgtcacctgtggtcgaaatgaagctgcttctggctgcatttcccctgtaagaaccccgcctaaagcacttgacaaatggcagattccacac

SEQ ID NO: 748386 - DNA, 629 bp, Homo sapiens
caggtaagaggccttctcttccagaagcccatgccggcagaacacaggataacagaacccaacaggatcccctgatatcccttacctcggagctgggactcttggcctctgttcgtggaatccccagttccaagagtgctgctggtactgctcacttccttgcccacaaccctggggcctttgaaggacaggtcctgggccagccttgccttggctccggacacctgcctcaggcttgccttggctcctgacacctgccccaggcytccttctttcactcttctccaaggcagccactcagtatggtatttaaggctcaaatcatcaaactgcccttgtgaaagccaaagtcctcaacataccgggccaaatagggacattcttttatggggacatcctagagctggggtagggcagcaggtttagcctcccacatgcaactactttgaaatcaccgttaagagtcattcctgatgggatatgacccacgtgaagctcatggaggcaggggccaagcagcagctttcaaggagaggccgtgacccatgctaaagctggtatggagagctgggggccaaatgcctctccacgactcacacctaaatcttttcccttttttttgagacagg

SEQ ID NO: 748387 - DNA, 629 bp, Homo sapiens
caggtaagaggccttctcttccagaagcccatgccggcagaacacaggataacagaacccaacaggatcccctgatatcccttacctcggagctgggactcttggcctctgttcgtggaatccccagttccaagagtgctgctggtactgctcacttccttgcccacaaccctggggcctttgaaggacaggtcctgggccagccttgccttggctccggacacctgcctcaggcttgccttggctcctgacacctgccccaggcctccttctttcactcttctccaaggcagccactcagtatggtatttaaggctcaaatcatcaaactgcccttgtgaaagccaaagtcctcaacatacygggccaaatagggacattcttttatggggacatcctagagctggggtagggcagcaggtttagcctcccacatgcaactactttgaaatcaccgttaagagtcattcctgatgggatatgacccacgtgaagctcatggaggcaggggccaagcagcagctttcaaggagaggccgtgacccatgctaaagctggtatggagagctgggggccaaatgcctctccacgactcacacctaaatcttttcccttttttttgagacagg

SEQ ID NO: 748388 - DNA, 613 bp, Homo sapiens
ggcgtcagtaaatttgaactcagctgacggtagtttcccaagtttattgtaagtggttttaagttaagtctcatccaaacaagttatcacacagcacttaaccaagccctgggatttactgtcttgatgactacayggctttgcacagtctgagatgcttcagtgtgcaaggcagcagctgggggggaggagggggtcttcacagggacagctggcaagagacttcctgaggcacatcagctacgttggtcaatttagggcacggtctggttctgcagctttgaaaggtggattctttctattagcacactttacaagagggattgtaaaggattaactcagtcaccagaaacgaaacaccacttcagaaattcagagacctctgatcaacagaacagacatttgggctttaactgctaaagcagctacctacttggggaaaccatggcattctgctgcctggacagcaggaattaagagagatttcagagttactggcacgaggacaaagcctctcagctcgcttcaccttggcaaccttaaacagtccctccttggtctctatgatagcagtatgttcctttggatggaatacttggtttggaaataatgt

SEQ ID NO: 748389 - DNA, 613 bp, Homo sapiens
ggcgtcagtaaatttgaactcagctgacggtagtttcccaagtttattgtaagtggttttaagttaagtctcatccaaacaagttatcacacagcacttaaccaagccctgggatttactgtcttgatgactacatggctttgcacagtctgagatgcttcagtgtgcaaggcagcagctgggggggaggagggggtcttcacagggacagctggcaagagacttcctgaggcacatcagytacgttggtcaatttagggcacggtctggttctgcagctttgaaaggtggattctttctattagcacactttacaagagggattgtaaaggattaactcagtcaccagaaacgaaacaccacttcagaaattcagagacctctgatcaacagaacagacatttgggctttaactgctaaagcagctacctacttggggaaaccatggcattctgctgcctggacagcaggaattaagagagatttcagagttactggcacgaggacaaagcctctcagctcgcttcaccttggcaaccttaaacagtccctccttggtctctatgatagcagtatgttcctttggatggaatacttggtttggaaataatgt

SEQ ID NO: 748390 - DNA, 641 bp, Homo sapiens
aaggtctctttgtcaactcttgtaggaagtgcctcagagcatttattctgtattcagctgctagataaagggtttgtgggcacattgctggaccgattgtactagaacagaaggtcagtaaaggttcttttcattcatctgatgtgatttattattaggcaggtatttgttatccttctcaagggaaaaaaatatccaaatatggtacttgtttccattttttatctctatgtcttcctccaattccagagaagaaaattagacaccatcttcaacttcattttytgggaagagtatagagtttgaggctctgggaagcattttcagctagttcttcacagaacatatatgggatttatgaagctagtatgatgtataaaatacaataaaagttttccaataaaaatggaaaacttcaactattcctggaatgggaattattagtctatggcttagtataatcccattcatattatgacactagataattagaagagaagctcatgaactttaaattggatggatcaaaataaacctgtaggtaaaactgattaagtagagacaaagtgaagcatgcctattaactgcacttcttaaatttttaaaaaaattatttttttgatacataaagttgatagaat

SEQ ID NO: 748391 - DNA, 671 bp, Homo sapiens
tcccccgataatatgatatttggttttccattcctgagttacttcagttagaataatggcctccagctccacccaagttgctgcaaaagacattattttgttcctttttatagctgagtagtattccatagtgtatatatacattttgttcttaaaaatatttcatttatttatttacttattttttaacttttaagttcaggtgtacatgtgcaggatgtgcaggtttgttacattgttagttatayagattatttcatcacccaggtattaaacttagcatccattagttatttttcctgatcctctctctccttccatcctccaccctccagtagaccccagtgtgccttgttccccctctatgagtccatgtgttctcatcatttagctcccacttataagtaagaatgtgcagtatttgtttttctgtttctgcattagtttgctaatgataatggcctccagctctatccatgttcctgcaaaggacatgatcttattcttttttatggttgcatagtattccatggtgtatatgtatcacattttctttatatgtatcacttttttttacccagtctatcatttttgagcatttacgttgattccatgtcttggctattgtgaatagtgcagcaatgaacatgtgcatgaacaagtgaatagtg

SEQ ID NO: 748392 - DNA, 629 bp, Homo sapiens
ggagactttgttcatgtcttttgagtcttttttctttatctttgactgattgggttaatttgaaagccttttctttgggctctgaaattctttcttctacatgtkctagtctattgttgaaactgtccattgcattttgtatttccttaagtgtgtctttcatttccagaagttctgattggtttttccttatgatatctatctctccggaaaattttttattcatttcctagattaaaaaaatttctttatgttggttttaaccttcctctgttatctccttgagtaacttaataatcaaccttctgaattctttatctagcatttcagagatttccctttagtttggattcattaatgtggaactcgtgtgatcttttgggggtgttatagaaccctgttttgtcatattgccagaattacttttctggttccttctcatttgggtagactgtttcttcagattgttcttgaatttatttttgatttaactctgtttttcaatgagttcctatttttccttttaaggatcagactttaatgtttatagtttattatagcctaatttgattctttgtactgttaggggtaaagactctgtatgagttcctaagttgtagactttgtgc

SEQ ID NO: 748393 - DNA, 629 bp, Homo sapiens
ggagactttgttcatgtcttttgagtcttttttctttatctttgactgattgggttaatttgaaagccttttctttgggctctgaaattctttcttctacatgtgctagtctattgttgaaactrtccattgcattttgtatttccttaagtgtgtctttcatttccagaagttctgattggtttttccttatgatatctatctctccggaaaattttttattcatttcctagattaaaaaaatttctttatgttggttttaaccttcctctgttatctccttgagtaacttaataatcaaccttctgaattctttatctagcatttcagagatttccctttagtttggattcattaatgtggaactcgtgtgatcttttgggggtgttatagaaccctgttttgtcatattgccagaattacttttctggttccttctcatttgggtagactgtttcttcagattgttcttgaatttatttttgatttaactctgtttttcaatgagttcctatttttccttttaaggatcagactttaatgtttatagtttattatagcctaatttgattctttgtactgttaggggtaaagactctgtatgagttcctaagttgtagactttgtgc

SEQ ID NO: 748394 - DNA, 640 bp, Homo sapiens
tgtctttcatttccagaagttctgattggtttttccttatgatatctatctctccggaaaattttttattcatttcctagattaaaaaaatttctttatgttggttttaaccttcctctgttatctccttgagtaacttaataatcaaccttctgaattctttatctagcatttcagagatttccctttagtttggattcattaatgtggaactcgtgtgatcttttgggggtgttatagaaccctgttttgtcatattgccagaattactttyctggttccttctcatttgggtagactgtttcttcagattgttcttgaatttatttttgatttaactctgtttttcaatgagttcctatttttccttttaaggatcagactttaatgtttatagtttattatagcctaatttgattctttgtactgttaggggtaaagactctgtatgagttcctaagttgtagactttgtgcactggctttcctagatgctggttgtagtaattatgtgtttggtgtgtgggcaaattcactgtcttctattgggttggaatggcagggatatcttgaagcttatctcattctcttgaggtgcaaactttatttatttatttaattttcccctagtattttattta

SEQ ID NO: 748395 - DNA, 578 bp, Homo sapiens
tctaaaaaaccctctactggcttaacgaaatgtctctgcaggatgggtttgtctttatctgtttaacagcacagtgtcatatatctgtgatgcactgaagaaatcaagtcccatgcctgcaccttcccgttggtagcgctccaaaaacccctgcctgccagcacagagacaccccgaaagagtctgctgggtttggccatcattttggatgataactcttaaatcrgattggagacaaaggttgtttctttcttccttttcaaaatgacttgggggaaaaaaaaagatgagctacaactattgcaaagactaactttaaatcagattttgacattagggccagtgccccccgcccccactctgccaatacccactcctcaaaaacgaacatagaaccctgcgtaactgttcccctttcttacatgtgagccctcaactcgtggagcactgcctccccaaaccacacaccccagttccactgagcagctcaccctttactcagctctcccaacacccactcctcaaaaatgaatgtagaacctggctaactgttcccctttcttacatgtgaggcctca

SEQ ID NO: 748396 - DNA, 578 bp, Homo sapiens
tctaaaaaaccctctactggcttaacgaaatgtctctgcaggatgggtttgtctttatctgtttaacagcacagtgtcatatatctgtgatgcactgaagaaatcaagtcccatgcctgcaccttcccgttggtagcgctccaaaaacccctgcctgccagcacagagacaccccgaaagagtctgctgggtttggccatcattttggatgataactcttaaatcagattggagacaaaggttgtttctttcttccttttcaaaatgacttgggggaaaaaaaaagatgagctacaactattgcaaagactaactttaaatcagattttgacattagsgccagtgccccccgcccccactctgccaatacccactcctcaaaaacgaacatagaaccctgcgtaactgttcccctttcttacatgtgagccctcaactcgtggagcactgcctccccaaaccacacaccccagttccactgagcagctcaccctttactcagctctcccaacacccactcctcaaaaatgaatgtagaacctggctaactgttcccctttcttacatgtgaggcctca

SEQ ID NO: 748397 - DNA, 543 bp, Homo sapiens
aaaaaaaagatgagctacaactattgcaaagactaactttaaatcagattttgacattagggccastgccccccgcccccactctgccaatacccactcctcaaaaacgaacatagaaccctgcgtaactgttcccctttcttacatgtgagccctcaactcgtggagcactgcctccccaaaccacacaccccagttccactgagcagctcaccctttactcagctctcccaacacccactcctcaaaaatgaatgtagaacctggctaactgttcccctttcttacatgtgaggcctcatctgctggagcactggcccccacaaccacacaccccaaccccactgagcagctcacacttccctcagcacactctaagctcacagctttcacacttggtgcatgctgttccctctgcatggaatgcccttccaccctgcagcagatgccattggtgccccacccaatatccccttatccacttggcaagtcccttctcatccatcaagatccatgatggcaaataattttccccctgttgtt

SEQ ID NO: 748398 - DNA, 650 bp, Homo sapiens
tgtgtgtatttttgtgtgtatgcatgtattgtggatgtctgtgtgtttgtatgtgtatgtgaatgtttgtgtgcatgtccatggatatttatggttgctgaaggttggtaaaccgttgccgagaaatggctcaaaaaaccatcactatggtasgataggagttaatgagaactaatgagggtgcggaaacttggaaaaaccatggggatataaatctcggtgcattttctggaaaaagtgagcaacataatattcagatatatggtgagataagcatagcttagcagagaagacactaggcagaatcatgaatgtagagagatccatccatgccttgatcttcttctatgaggtcctacttattataagcacttaatagcattgataaaatataacctcgtcccacaagggccataaaaattaaagagcaccctgatcggccttatggcattctccactatggaggagtaaagggattgagccagaaaagagactggaagcctggacaagcccactaatgtggtgatcagggaaatgagaagatgaaagccacaggacttcagaattgattggatgtggggaagagaaaaagagaagggaaagatgatcccctccttctctaggatcccaagtatttggttctggtgact

SEQ ID NO: 748399 - DNA, 380 bp, Homo sapiens
ctagtcccattctcataataactcatgaattccttaatccatgaatggatcctcatgatgcactagatcataagggctcttctctcatgatctagcgatctcttaaaggtcccatctcctaatactgccacatggggaattaagtttcaacctaagttttggatggaacaaactttcaaaccatagcactctgtataacragaccaccttcactagccaggccttttcttgtccctccctcccataacctgtcttgcacaatccaagcccctattccttctgcgacttctggatggtataaaacttcagtcatctggcctttcctgagttttcatatttcatattgttcttatgtacacatgtgcaagtaataatttcta

SEQ ID NO: 748400 - DNA, 557 bp, Homo sapiens
gagtctgacaccatcttctacctgctttccatctgccacacatttattggaatatctcatcctctgttgttgccaagcccattctcattgttcctgtgggttagtaacattccaaagaatatcccctctcccagcttttttttttttttttttttttttccattttagggggtttgagatttagaggagataaaaacatatggtcaattcaccttttaacccacaacacccagccaatttttgtattttaggaaaaacggggtttcaccatgttggccagaatggtctcaatctgttgacctcatratccccccccctcggcctcccaaagtgctgggattacaggcgtgagccaccgcgctcggcctacttccaaattttaaggccgtttagctttaagtgaagcagtattttcctagtgtcaaataaaaaaccaccacaggttggtggcatactggggaggctagcacccttcaaacacaaaagctagtgagctcaaaatgggatcctaccctagtctagtttctcttcactaaagcaattgtgtggttagggca

SEQ ID NO: 748401 - DNA, 604 bp, Homo sapiens
acaaaattggcactcatttacctaccacccaacttaagcactataataataccaaaatctttgcatccacctatgagtttcttccctgtgcctttccattccctcttgatcctcaccaggctaacactctcttgatctcataatatattctgttccattctgagctcaagtttccagcagccttgaaaagtaaatggaacctgccagcctttaacagtttatatactytccctaacctgagataaggagcatgtttaaaaaaagaaatgaagctgatcctgccctcagaaagtttgaaaagaggcatgatgacagcagtgcccatgtgtaggcaggacagccccagggctgagctgaggagcacagcatctgttccagttccttgtgtgcctgcacaaatgccataccccagcaaatgctttccgaataactttgccccttacccttctagatgaagctagtactgtctaatggaaaccgattgtaagcatcaaacataattttaagttttctgggagccacattttcaaaaagtgaaaagaataaagtgaaataaatctattttatttaatcaaaaatatccacaatattatttcaacatata

SEQ ID NO: 748402 - DNA, 604 bp, Homo sapiens
acaaaattggcactcatttacctaccacccaacttaagcactataataataccaaaatctttgcatccacctatgagtttcttccctgtgcctttccattccctcttgatcctcaccaggctaacactctcttgatctcataatatattctgttccattctgagctcaagtttccagcagccttgaaaagtaaatggaacctgccagcctttaacagtttatatactctccctaacctgagataaggagcatgtttaaaaaaagaaatgaagctgatcctgccctcagaaagtttgaaaagaggcatgatgacagcagtgcccatgtgtaggcaggacagccccagggctgagctgaggagcasagcatctgttccagttccttgtgtgcctgcacaaatgccataccccagcaaatgctttccgaataactttgccccttacccttctagatgaagctagtactgtctaatggaaaccgattgtaagcatcaaacataattttaagttttctgggagccacattttcaaaaagtgaaaagaataaagtgaaataaatctattttatttaatcaaaaatatccacaatattatttcaacatata

SEQ ID NO: 748403 - DNA, 529 bp, Homo sapiens
acttgaaacccttagaatgttaaaacatgtgagagctayatctatataaaactaaaaatgtgactaaagttatcaatacatcaattttgatgacggtttgagttttttcttgataatactttcttatcccaatgtttggaaatgtgtaattcaaggatcaattgtttctagacctaaaggttttgtgcagtgcataaaagttctgctatcatgaatttgatgtatgtagacatagtccatgataagctttggctctgtgtccccactcaaacctcatcttgtggctcccacaattcccatgtgttgtgggagggacccggtaggagatgagtgaatcatggtggagggtctttcccatgctgttctcatgatagtgaatgggtgtcacgaaatctgatgggtttaaaaaatgggagtttctctgcacaagccctctctttgcctgctgcaatccacgtaagatatgacttgctcctccttgccttcagccatgattgtgaggcttcccagccacatggaactatgagtt

SEQ ID NO: 748404 - DNA, 529 bp, Homo sapiens
acttgaaacccttagaatgttaaaacatgtgagagctacatctatataaaactaaaaatgtgactaaagttatcaatacatcaattttgatgacggtttgagttttttcttgataatactttcttatcccaatgtttggaaatgtgtaattcaaggatcaattgtttctagacctaaaggttttstgcagtgcataaaagttctgctatcatgaatttgatgtatgtagacatagtccatgataagctttggctctgtgtccccactcaaacctcatcttgtggctcccacaattcccatgtgttgtgggagggacccggtaggagatgagtgaatcatggtggagggtctttcccatgctgttctcatgatagtgaatgggtgtcacgaaatctgatgggtttaaaaaatgggagtttctctgcacaagccctctctttgcctgctgcaatccacgtaagatatgacttgctcctccttgccttcagccatgattgtgaggcttcccagccacatggaactatgagtt

SEQ ID NO: 748405 - DNA, 529 bp, Homo sapiens
acttgaaacccttagaatgttaaaacatgtgagagctacatctatataaaactaaaaatgtgactaaagttatcaatacatcaattttgatgacggtttgagttttttcttgataatactttcttatcccaatgtttggaaatgtgtaattcaaggatcaattgtttctagacctaaaggttttgtgcagtgcataaaagttctgctatcatgaatttgatgtatgtagacatagtccatgatawgctttggctctgtgtccccactcaaacctcatcttgtggctcccacaattcccatgtgttgtgggagggacccggtaggagatgagtgaatcatggtggagggtctttcccatgctgttctcatgatagtgaatgggtgtcacgaaatctgatgggtttaaaaaatgggagtttctctgcacaagccctctctttgcctgctgcaatccacgtaagatatgacttgctcctccttgccttcagccatgattgtgaggcttcccagccacatggaactatgagtt

SEQ ID NO: 748406 - DNA, 540 bp, Homo sapiens
cacagctgatcagattgtgcccacccatattaaggttgggtctgcctttcccagcccactgattcaaatgttaatctcctttggcaacaccttcacagacacacccrggatcagtacttcgcatccttcaatccaatcaagttgacactcagtattaaccatcacatgcctttttcaagtattttctttcagtctgtgacttgtcttctcattcttttttcagctttaataaggttcaataatgtggtattttaatatctgtatagactgtgaaatgattaaatcaaactaacatacttatctactcagacacttattttttttgatgagaacatttaagatctactctctcagcaatttttaagtatacagtacattattattaactatagttactttgctgtaggactgtttgtagaaatgtaaattagtacagccattatggaaaacagtagagaggttcctcaaaaattaaaaaatataactaatgtgtgatccagcaatttcacttctgggtatatatcttaagaaaatgaaatc

SEQ ID NO: 748407 - DNA, 540 bp, Homo sapiens
cacagctgatcagattgtgcccacccatattaaggttgggtctgcctttcccagcccactgattcaaatgttaatctcctttggcaacaccttcacagacacacccaggatcagtacttcgcatccttcaatccaatcaagttgacactcagtattaaccatcacatgcctttttcaagtattttctttcagtctgtgacttgtcttctcattcttttttcagctttaataaggttcaataatgtggtattttaatatctgtatagactgtgaaatgattaaatcaaactaacatacttrtctactcagacacttattttttttgatgagaacatttaagatctactctctcagcaatttttaagtatacagtacattattattaactatagttactttgctgtaggactgtttgtagaaatgtaaattagtacagccattatggaaaacagtagagaggttcctcaaaaattaaaaaatataactaatgtgtgatccagcaatttcacttctgggtatatatcttaagaaaatgaaatc

SEQ ID NO: 748408 - DNA, 639 bp, Homo sapiens
cacctgaatactctttttttccttgaccaagtttttggtccatttattgtttgatcatcatgtagctattaatttatagtgctttgcatattctggtcataagcccattttcagataactgtcttgcaaatatcttgtctcactctgttaattacctattcagtctcttcaggtggttttggtgaataaaaatctctaagttttcatatttcctaagttattactgtttttctttaccattagctccctgtagtattaggaatctttagaaatctttgcatactcaaaggtcagcaaaataattttctgtgttttcttttcaaaatttwacttcttatgtcactgttttaaatgaatttcaagattttttaaaaaatttgtattgttctggtattttactctaaactgttattgtttagattgcaatccatgtggaattgatttttgtatatggcatgaggtaaaggtcaagatattttttttcatatagaaatctaatctagcattattaatttaaagacattgattctcactgcccatagtatctcctttgtcacaaattagttaattctaattccaaactcttttttattccattgccttagttatctattcttgtgtcattactatctgcattat

SEQ ID NO: 748409 - DNA, 646 bp, Homo sapiens; identical to SEQ ID NO: 746288

SEQ ID NO: 748410 - DNA, 656 bp, Homo sapiens
gtgagcacctgctcctctggggagcactcacctggctgtagatctggtccatgctaggtctgtcctctggagcctcgtcccagcacttcttcatcagccaacgcactcaggcggcccgtgatcaggggtcaccagcggccggcacagaggagggggagatgccaccctcctgatgatttcggcaaccaacaccatggggcgggcctggggtcctgggaarggtcatgaaaggagcctggcctcggatcctgagagcgtgggcagagtaggcttatggcggtgccaggttctgggcctgaggatattcctcagctcctgtttccagggtatggctggccagtggatgtggcattattgttctcctgggtctaccctgggtgtggccaaggaaagggtctcaaactgggggccaggagagccgcgagctggttttgaattctggatctgccaccacaatactatgggatggtggagaagacaatgacctctctgagccttagtctcccgatctgtgaaatgagcatataaactgccttcttttttcttttttttttctgttctttttttttttttaatgtcgcgatcccagctcaccacaacctctgcctcccaggttcaagcgattctcctgcctcagcctccaggcatgcaccacc

SEQ ID NO: 748411 - DNA, 624 bp, Homo sapiens
gaaaaagaaaacaaacaaactttttatcagagggatgtgagccccctttaattatcaggcccaatgaggcactgaaatgtggcaccatatgacagcagttacatttcaccacccccttgagctaaatacttagctctcgaagccacttgctacatgggctctagactcactgatgccaagtagccataaaatgccatacactggacaccataactcataccctatagttcaacagttatagccaatcactaatcaatgttatttctataaaccagtgagaatccctgtcaagcaactttattttgctgttttttgttctgttttgttttgttgttttttgagtaagagtcttgttctgtcacccaggctggagatctcagctcactacaacctttgcctcccaggatctagtgattctcctgcctcagcctccygagtagcttgattaccagtgcacactaccatgcctgcccggctaattttgcatttttagtagagacagagttttgccatgtcggtcagactggtctcaaacttctgacctcaagtgatctgcccgcctggcctcccaaagtgctgggattacaggcatgagccgcactagcccttgtcaagcaactttgt

SEQ ID NO: 748412 - DNA, 543 bp, Homo sapiens
ttttgagttctgagcacaggctgcctggaaccacaatagctgctgctaatggaacactgtgggtgtgagatctgcctttccaagtgagtggcagcaaggtggggcttactgccacctgctaaccccactccccttgcagatccttttgtgcagcagaggcagctgtgctcctccatggaacatcacaccagtagccagataattgccctccaattccgattacgcccattgctttcacccccaggtggggagccagagcatagattgccyggcccagcccccgcctggctttgcccctacaccctccctggtagcttaacacaacggacagggacttttgggaactccatcgccctgcccactgccagagtacttaccttgggtaacgtaaggcaagcacaaatctcaccactaccaccgcagctggctctcatttgcaagtttcacctcttggcgggaggccagcggacacagtccattacggcatctgcagcacaataactgggcccaagaaggagaaaacttttgtgcaaccgcagctgt

SEQ ID NO: 748413 - DNA, 606 bp, Homo sapiens
ctacagaaagcagacaggatatttcttgaaaatccatttgatttttctttaggtttgtccatttatttctttgctgcatgccatcttggaagacaaaatcccatcattgtgtactacccttctaaggaaggacaaagtagtgggcaggaaagaaatgtgaactttttttttttttttgagacggagtctcactctgtcgcccaggctggagtgcagtggtgggatctcgggtcactgcaacctccgcctccagggtcaagcgattctcctgctccagcctcccaagtagctgggactacaggcgcacgccaccacrcctggctaatttttgtatttttagtggagatggggtttcgccatgttggccaggatggtctcgatttcttgacctcatgatctgcctgcctcggcctcctaaagtgctgggattgcaggcgtgagctgccgcgcctggccagtaatgtgaactttttaaacaagttaactatttactttggagaaaaatattttaaacattaaagacatttttaaaaatatatatttaaaaaactgctaccactcttttggggggggggttgtctaaacgcttcataaatatttatttat

SEQ ID NO: 748414 - DNA, 587 bp, Homo sapiens
ccttttgtactgtcttcaatgaaaattacggatccagttctcaggaccctcatccgaatcacaccaccaccacgtgactgggtttacaatttgtttttatgtttagtaggcttattcccttgtttaaaatacgattacagtgtactatactcctacactaaagaaaaaacatgcctagctaccaaaagaaaataaaccataaccgtattttgaagtattttacttctagagccttaatgccatcggaaaaaaaaactgcacaaaatacaactcttggaagatttaacatcgaaagctcaatttcaatacacacacatctaccatcactgggttgttttaactgtttcccaaaagtaaaacttaaaaacaaattctaacatatatacgccaaactacgcaaaacaattgctacatcacccacccccaccccsaaagttcaaaaagcaacaattatagttcactgggcccagacgacctacttgaaacatgcccatttcacattcctatttgataaatcacccacttttctgctcacaaaatcatccccgaagtccttattaacgtttaaacatgaaaaaaaaaaaacc

SEQ ID NO: 748415 - DNA, 607 bp, Homo sapiens
acacactttttctgatggtccaaagtgactggtataaagactctgcagagtttacttcatgctattcataatgcagaaacaaaaccagcgaccttcaatagcactttggcctttctgagtatgtgcccagcatcattggaaagctgcgrtcagaatgctattttattttatttttattttattttactttctggtctacaaagaatttgacaaccattttattttattttattattttttgagacagagtctcactgtgttgcccaggctggagagcaatggcacgatcttgactcactgcaacctccgcctctctccacctcctgggttcaagcgattctcctgccttagcctcctgagtagcaggattacaggcgcccaccaccacacccagctaatttttgtatttttagtagagatggggttttaccatgttggccaggctggtgtcaaactcctggcctccagtgatccatctgcatcggcctcccaaagtgctgggattataggcgtgaggcaccatgcttggcctcattttaaactggagatctctggtctttgtgaagcttgcatgggcagaattgtcatctcatacgatatgagattg

SEQ ID NO: 748416 - DNA, 585 bp, Homo sapiens
caccacacttggcctaaatatatttatttttggtacaactatggtccctagttcaagcaaacatctttgtcggacactcaacaaaacagtgatttgttctagcactgtaggaaaaaactggtagtgctatgcttgtgaactggtgtgyctgtcaactatgctttacaggttattaatgggattttctttctttctttttttttttgagacaaagtctcgctctgtcgcccaggctggagtgcaatgtcgtggtattggctcactgcaacctctgcctcatggtttcaagtgattctcttgcctcagcctcctgagttgctgggactacaggcgcctgccaccacacctggctgatttttgtatttttagtagaaacagagtttcgccatattggccaggctggtgtcgaactcctgacctcaaaagatctgcctgccttggcctcccaaagtattgggattacaggtgtgagccaccacacccggcctatttgtgggattttcaaggataatcttggaaaacttaatttttgccttatgcgctatggtagcctgcctccaaaatggtttccaatgatccccatct

SEQ ID NO: 748417 - DNA, 526 bp, Homo sapiens
gtaccagccatggaccttcacccccagctctcaggtgacctcttccagggcgttcaccttggccaggtaggaggccagataggtggttattgagggtctgcatggtgatcttctcgttgcctaccagcagcccattggacctggccagggcattagcacagctgccactgtaacccccatcgtccccatcatagcccacagaaaaggatgaggacaagaaaccarcagaggatactgacatgctgtggcccatggatcctggtggatgctgggcatgcagaaggtgtcccctgcctcaaaatgcatggagctgccacccaagccccaggaggatgaggctggtctgtgactggtgacagctgtaggaaggcatggcaaggcagcagacgtgagcgaccctggtctgaggagttttgatggacaggaggagcctgacgtctactcctaacccgtgtgacgctcttctcccctggctgtgttccctggccccacagcctggcccagaaaatgggagaaagccagggta

SEQ ID NO: 748418 - DNA, 595 bp, Homo sapiens
ttatccagtgagaatatctttcaaaaatgaagatgaattaatgattcccacactcaatagctgaaagaattcatcaccaatagctgcatactccaagaaatgttagaggaagacctccaggcagcagtaaaataataccatatgggaatctgaatctacacaacagaatgaaaagcactgtggtaactacatgggtaaatatatgcttttctcttataatttaaatattttcaaaagatgttaagatttaaagtaaaaataacatgggaggycaaaacgggtggatcatctgaggtcaggagttcgagaacagcctggccaacgtggtgaaaccccgtctctactaaaaatacaaaaattaacctggcgtggtgtgcgtgcctgtaatcccagctactcaagaggctgagacgggagaattgcttgaacccaggaggcagaggaggttgcggtgagccgagattgcaccactccactccagcctgggtgacagagcaagaccctgtctcaaaataataataataataataaaataataaaataaaaatagcaacaatatattatgagatgtataacaaagtataccagtaaaagg

SEQ ID NO: 748419 - DNA, 636 bp, Homo sapiens
atgtcactgctattattattgcattactgttttgatattgctgttgttatttataacacttcctcaatttaatttctgttctccattctatatcataaacctcattcaggtggggcttcaatctgtcttattatttctcttttcctatcacctagcrgtacttgacacataattggtatccagtaatattgggtgcttacttgaataattgaatgaatgaatgaataaatgagaaaaataaatggaatgaatgagtgcatagtgtgacccatatttgtattagatcctcaatggaaaaataatttattgcttttgtaaagtgcctgagaattggcaaagagcttattgactgccttccctatcagactgtaagcccaacaaggtgaggtttttgtctatcttgtttatctctgtgtctcagtatccagaacaatgtctgacacatagtagaagctcaataaacacttgttcaataaacattcacacagcatctccacaaggccaggcacaatcaatttccactgtactggtagagaatgtggggctcaaaaaggtagaatgaaagcttgcatactataatggaaaaaaccataatatttggaaccagaatacctggcttcaagtcccatttatacc

SEQ ID NO: 748420 - DNA, 600 bp, Homo sapiens
agcacttactcttactgggcactaaacctggggaaatcctcaaaacacctccacattgcagaggaggaaacggaggttcagccgggttggtggaggacctgtctgaccctgacccccagtcatgagctcacacaaaacttctgcagcactgccctttcttaggatgctgccatcctgggtacctgctacagcccagctccattccacaccttctgctcacttgatcccgtttaattctcagagatctgtragggagatgccactaccccatttaacagagagagaaactgaggctaaacttgtcccaaagtttactatcactaagcagtagtcaggattaaaaccagatctgtctggggctaaaacctgtgaggtttccatgacagtcttacaggatctcggatttattatgtaatgggtgcttatctttttacgatttgggtgagttctgggtgtgagacatctgactagagacatgtcagtagaaatcattgtcgctgttgctgttgttaatctcctttattcccctggacttagctgaggcttccagaccatccggtgttctgggagctgttcccaagacggatcattctttgcaaa

SEQ ID NO: 748421 - DNA, 600 bp, Homo sapiens
agcacttactcttactgggcactaaacctggggaaatcctcaaaacacctccacattgcagaggaggaaacggaggttcagccgggttggtggaggacctgtctgaccctgacccccagtcatgagctcacacaaaacttctgcagcactgccctttcttaggatgctgccatcctgggtacctgctacagcccagctccattccacaccttctgctcacttgatcccgtttaattctcagagatctgtgagggagatgccactaccccatttaacagagagagaaactgaggctaaacttgtcccaaagtttactatcactaagcagtagtcaggattaaaaccagatctgtctgggrctaaaacctgtgaggtttccatgacagtcttacaggatctcggatttattatgtaatgggtgcttatctttttacgatttgggtgagttctgggtgtgagacatctgactagagacatgtcagtagaaatcattgtcgctgttgctgttgttaatctcctttattcccctggacttagctgaggcttccagaccatccggtgttctgggagctgttcccaagacggatcattctttgcaaa

SEQ ID NO: 748422 - DNA, 600 bp, Homo sapiens
agcacttactcttactgggcactaaacctggggaaatcctcaaaacacctccacattgcagaggaggaaacggaggttcagccgggttggtggaggacctgtctgaccctgacccccagtcatgagctcacacaaaacttctgcagcactgccctttcttaggatgctgccatcctgggtacctgctacagcccagctccattccacaccttctgctcacttgatcccgtttaattctcagagatctgtgagggagatgccactaccccatttaacagagagagaaactgaggctaaacttgtcccaaagtttactatcactaagcagtagtcaggattaaaaccagatctgtctggggytaaaacctgtgaggtttccatgacagtcttacaggatctcggatttattatgtaatgggtgcttatctttttacgatttgggtgagttctgggtgtgagacatctgactagagacatgtcagtagaaatcattgtcgctgttgctgttgttaatctcctttattcccctggacttagctgaggcttccagaccatccggtgttctgggagctgttcccaagacggatcattctttgcaaa

SEQ ID NO: 748423 - DNA, 608 bp, Homo sapiens
aggacctggaaagtacttgccactttatttcagtctgaggaagcttgaggggactgtcaccctaaatgcttgcagaagagagagggaaatcactctttgtttcctgaaaatgatggatgggcattctgggctgcagaaacactgtgcaggctggcctggccccagcacatgaggtcggagagtatgatggtagtcagatggcagcagcccgtgagtwgggcatgggcagtgctgcatgaattagctgactgctttccatttcaactttaacgttgtttaaattttacgttgatgcaaacattatagggcaaaacatgaaagctccttcaccattcccaccactccctcccagagtgtaagttttctgtgctatttctatacattaacatgtaacttgtgggctctggggagaggacagtaacagacactgggatggaattgtattaaaattatttttctggtgttcttatttcttagcaattcatcttagaaaccttttgtatgtacctcattctggtatggccttaccagaaatgatttaaccgttcctctgttgacagatgaacaagtcatttctcattttgtgtagtaaaaaatgttacattgag

SEQ ID NO: 748424 - DNA, 608 bp, Homo sapiens
aggacctggaaagtacttgccactttatttcagtctgaggaagcttgaggggactgtcaccctaaatgcttgcagaagagagagggaaatcactctttgtttcctgaaaatgatggatgggcattctgggctgcagaaacactgtgcaggctggcctggccccagcacatgaggtcggagagtatgatggtagtcagatggcagcagcccgtgagtagggcatgggcagtgctgcatgaattagctgactgctttccatttcaactttaacgttgtttaaattttacgttgatgcaaacattatagggcaaaacatgaaagctccttcaccattcccaccactccctcccagagtgtaagttttctgtgcyatttctatacattaacatgtaacttgtgggctctggggagaggacagtaacagacactgggatggaattgtattaaaattatttttctggtgttcttatttcttagcaattcatcttagaaaccttttgtatgtacctcattctggtatggccttaccagaaatgatttaaccgttcctctgttgacagatgaacaagtcatttctcattttgtgtagtaaaaaatgttacattgag

SEQ ID NO: 748425 - DNA, 573 bp, Homo sapiens
catcatattaataaatgaagaaagagaaaaaataatcatctcatggattcagaaaaagcatctgacagcattcaatattgcttcctgataaaaattctcaacaaaccaggcatacaaaggagcttctttaaacctgtgaaaagccatctatggaaaactgaaagctaatatcatactttatggtgaaagactaaaagctgtttccctatgatcaggataaagataatgatatttattctcaccacttccataaaacactttcatggagtcctgcctggtgtaataaggcaagaaaaagaaatgaaagttgttcacattggaaaggaagaagtaaaactgtatccatacccaacataattgtttatgtcaaaaatctgatgaagcctgcaaaaatctactgaagtamaaaatgagttattattgttggggaaaatgaaagctctaaataaatgaggagttatactgtgttcattggtcagaagacttattattgttaggatgtcaattctccccaaattgatctatgcaatcccgatcacaatcccagtaggcatttttctgttaatagaaatt

SEQ ID NO: 748426 - DNA, 615 bp, Homo sapiens
tcagtcactggccatgggctgctccctgaaggggcgtcattctcccatacttcaggcctggcatgtagggaacaaagtggccactcgaaatctgagtgaccccccaccccagcaaggaaacacaggtaccgacagttagaagtaaggccaatgtgcactgaggtgggaagaacagggggacatgggccagccccacagcatctactacggactcaaaggaacacctcatgaagatctttcttttttaaaagtcgtcagtcccacttatggagcacctgttgtatacaagctccatgccaggtttaaaagttcaaaatgaaacataagagcttctgtcctaatagagctggctgtcgtgggtagattgccagagcagccctgtataggcatcatctctacaaacattgacatcgaaatttctaagttgtgtctcctcagcccarcagttgtggctcctcatcactaggacccagactcaactctgtcattactcctccctgtcccctgcctcgagttctctgctctgggatttttgaactgcttgtaggtcctggaaaaaaaagtccttctctctttccctcttccctctaaacctttgcatattccagttcctct

SEQ ID NO: 748427 - DNA, 591 bp, Homo sapiens
cctcttaatttggacttagcacactaagtttgacatggtttagtcaatgtttggtattttatcacaatgcagtagacttgcacggtgggctatacagtttcaagtactcagtattattcttggtggataactgccagacatagtctagatacttaccagcactaccaggaaattggaatagtcgcaataaaattttatattgcaactttcctaaacttctccaggttatatatatatatatatatatatatatatatatatacacacacatatatmtatttatgcacacacacacatatacatgtatatataataggaatatataatatattgtagaaaaaatatattttacttgtatatgtaacttgtattcatatatgttaaataacagtgaaaagtcattatcttttacttgtatatatattttacttgtatttatattttaaatcacagtgaaatatcattatgaataagtcttaatagattatttttcagcaaaagtcactaaaaataaatcaggtcatataaatttgacaatagaacatctgcttggggcatattgataattgaatacatttaaatttaaataaa

SEQ ID NO: 748428 - DNA, 604 bp, Homo sapiens
tcaaccctgatgatcaatggggtgacagatgtcacagccagatcgccttcacatcctgcctttattaatacattctcttaatggtgttagtaaaggaacgttttttaattttaaagaaactacatttatcaatattttattttgtagataatgcttttggcatcatatctaagaaatatttgcctatccctgggtcctaaaaatgtcctatgttttcttctagaagtcttacaattgtaagttttatcttcaagtttataacacactttgagttaatgtttgtatatggtatgagttatggatttaagtcaggttattttaacttaaggatttccaatggttycagtaacatttactgaaagactatctttttttcactaaattgtctttgtaattttattgaaaagaagttgtcaatttcttggttctttttctggattttgtattttgttccaatagtcaagtttttattcattatctcaatgccaaactgtcttgtttattgtacttttataataattcctaaaatcagtcagtgttcatcttccaatttaactcctctttttcaaactctcttttggtaattgtaggttctttgaatttt

SEQ ID NO: 748429 - DNA, 604 bp, Homo sapiens
tcaaccctgatgatcaatggggtgacagatgtcacagccagatcgccttcacatcctgcctttattaatacattctcttaatggtgttagtaaaggaacgttttttaattttaaagaaactacatttatcaatattttattttgtagataatgcttttggcatcatatctaagaaatatttgcctatccctgggtcctaaaaatgtcctatgttttcttctagaagtcttacaattgtaagttttatcttcaagtttataacacactttgagttaatgtttgtatatggtatgagttatggatttaagtcaggttattttaacttaaggatttccaatggtttcagtaacatttactgaaagactatctttttttcactaaattgtctttgtaattttrttgaaaagaagttgtcaatttcttggttctttttctggattttgtattttgttccaatagtcaagtttttattcattatctcaatgccaaactgtcttgtttattgtacttttataataattcctaaaatcagtcagtgttcatcttccaatttaactcctctttttcaaactctcttttggtaattgtaggttctttgaatttt

SEQ ID NO: 748430 - DNA, 581 bp, Homo sapiens
aatggtgatttaagctttatttttaataggctcctaatgttttcctttcaatgtatctcacttttagaaaacaatgaatttttgtacaacaaatatccacagttaactctgagataggaatacttccatcaaaacctcattacttctttctgtgctggtaagtatttacatttcaggtgagccatataatttagagccatagaattttgacttcaaagttcacttaaaaggagagtggaaaatatcagggccaggcatgggsgttcacacctgtaatcccagcactttgggaggccaaggcaggaggatcacttaagcccaggagttttgagaccagactgggcaacatagtaagatacttgtctctacaaaaactgaaaataaaaattagttggtgtggtggtgtgtgcctctagtcccagctgctggagaaactgaggttggaggatcacttgagcctgggaggtcaaggctagagtgagctgtgatcactgcactccaacctgggtcacagagtaaaacttggtctctgaaaagaaggaaaaaaagggaaaaaaagaaaggaaaagaagatataaatt

SEQ ID NO: 748431 - DNA, 591 bp, Homo sapiens
taaccaagataataaacacagggagaggaaccaatttcagaaagaagttaatgaatgcagtttggaatatgttcagtttaggatgactctgaaatatccaagtgaaaaaatttagtcactagttaatatgcgcttgcagttcaaaacaaggaatgagatggaaatataagaactttttttcattagatgtaaaactcttgctaaagacatattcattactcttctaatgaatatactcagataatgtactcagtgatacattccttttcaaaattaatattaggaaaaatgtctctcaaataatcaggacacatacttcaatcagaaaaagaatattatgtacgtcatcatgtttacttttttgtcctgcctgccaggaagctcagtttatatttcatgctcagttgcagtaactacaccaagccttasaacataacacattggctttctcgctattgttctagttttatcttcttatttgcagtgtaacatcccattgcatgtcccgtatattgaaagctgcctctacttctctctggtaataaaaagtatgtatgttttcacttgatattattaagttaaggttgagcc

SEQ ID NO: 748432 - DNA, 634 bp, Homo sapiens
gttcagttggcatcatcctgacttcggcccagtggtggggggttaactgtaactacccctaagcgggaggattctgcagctggatctctacagcagtttgccatggttactacaggactgaacaaagggggacgaacgcagaaatgaaaacttaaaacaaaagtaactattttaaaggaaggagccattggaagaagaagagggctcccagctcctagtgatcaagagcagccacttgagcctctacagccctttgtatttattggacagaaagagcagggagcaggaggcaaccgttggtcagctgcttaattgatcacagggtcacattattgctaacaggcttcagatgtgcctaattacaagmaacactgcacttggggcatgactgccctcagcattccttctgggcggcagacgcagcttgtcagtttgccaatattctgcatttatgagaacagtttaatgtttactcatataacctccagtggtatacagagttgatcacgaccctcactcttttggcctgcaacagatctctctgtctggtttgttttaacatttctcagcatgcacataattggataaatgagcactgttcacagaagtgcctggtgggaaaaggtagaaacaa

SEQ ID NO: 748433 - DNA, 576 bp, Homo sapiens
aaactgaccacataattggaagtaaaacactcctcaaatgcaaaataatggaaatcattttgcatcttggaaaccagtgagaacaaagacacaacataccagaatctctcagacacatttaaagcagtgtgtagagggaaatttatagcactaaatgcccacaagaaaaagcaggaaacatctaaaatagacacattaacatcaaaagtaaaagaactagagaagcaacagcaaacaaattcaaaacctagcagaagacatgaaataactaagatcagagcataactgaaggagacagagacatgaaaacccyttcaaaacatcagtgaatccaggagctgttttttttgtttgaaaaaatcaacaaaatagatagactgtgagccatactaataaagaagaaaagagagaagaatcaaatagaaacaataaaatatgatataggggatatcaccactgatcccactgaaatacaaactaccatcagagaataccataaacaccgcaacacaaataaactagaaaatgtagaagaaatggataatttcctggacacatacaccctcccaagtctaa

SEQ ID NO: 748434 - DNA, 595 bp, Homo sapiens
ttaaatcatattggatgtcatcataagttacacctttctttgtcagagaatatggttttaaacacagaggtcatttgaacttctgaagtcaaagttgaattccaaataagttagagttttagcaaagaaattgagaaagtcctgtttaacttggctgcccttttctagygacatttcttaagttctgagacaatcttattttcaaccaaaagagtcatttcattccagtaaaagttttcgtctcaacctacacttaacattgaacaactccaagacaatcagttcatctttctccttgtgtcccatcaaggattaccaaataaaaacctaggtctggcacagtggtgcacatctgaagtcccagctacttgggaggtgaggtgaaggctcccttttgcccaagagtttaagtccagtctagacaacataccaagattctgcctctaaaatagggggaaaattactaaatagctttgggaaaacaatacaaaaatgtttgttttactacagttcttttctttattctcatcctcaatgtattcccatattagagatagtcattttttttgctgcactccttgaaaatatgatttta

SEQ ID NO: 748435 - DNA, 609 bp, Homo sapiens
agctccttgacatttggctgggcaatggttttttggatatgtccccagaagcataggccacaaaagcaaaaatagacaaatgggattgtatcaagcttaaaaagcctcttcacaacaaaggaaacagtcaaccaggtaaagagacaacctatgaaattggaaagaagatttgcaraaccatacatctgataagggattcatatccaaaatataaacggaactcaaataactcaagtgaaaaaacaaacgaataaatgggcaaaggacatgaatagaaatttctaaaatgaagacatataaatagctaacaggtatatgaaaaaaatgctcaaaatcactatcatccaagaattgcaaattgaagccacaatgagagagatcacctcacacctgttagaatggctattatcaaaaagacaaaacatagcaagtgttggcaaggatatgcagtaaaaggaacacttttatacccatggtgggtaggtaaatttggatagccattatggaaaatggcatggatattcctcaaaaaattaaaaatacaactcccatatgatctagcaatcccacttctgggatttatatcaaaagaaatatatatcaaaagaa

SEQ ID NO: 748436 - DNA, 571 bp, Homo sapiens
aaaactattttaatgcaactatttccctaatgataaatatttgctccaccaatatcatacttttgtggcactactctgttttcatgcctattatttttcacaatgaaaaactcttttgtggccgggcacggtggctcacgcctgtaattctagcactttgggaggccgaggtgagcgtatcacaaggtcatgagattgagaccatcctggccatcacggtgaaaccccgtctctactaaaaatacaaaaattagctgggcatggtggtaagtgcctgtagtcccagctattcgggaggctgaggcaggagactcgcttgaacctggraggcggaggttgcagtgagccgagatcgtgccactgcactccagcctgggcgacagagcaagactctgtctcaaaaaaaaaaaaaaaaaaaaaaagaaaaactgttttgtggttttgtgaataatcaaggtgtactcttttaaatggcacctgcctcaaaacatgtaacaaaaatggagttaactcaattgccgtgacaactatatgattggatatgattagttttgcacaaacacaggcaatg

SEQ ID NO: 748437 - DNA, 591 bp, Homo sapiens
  misc_feature 1, 2, 3, 4, 5, 6, 7, 8, 9, 10, 11, 12, 13, 14, 15, 16, 17,18, 19, 20, 21, 22, 23, 24: n = A,T,C or G
nnnnnnnnnnnnnnnnnnnnnnnntgctatccctccccccttccctcaccccacaacagtccccggtgtgtgatgttttttgattgtttctcaaatgtttaaaatagagtagtgaaccaaaaaattacttcttccacaaagacgttgggaatactagaacttcctgatataagaacatgttaaaaaccyttcttgagttctatttttaataagttttcacatttctggaaataatcttttatcttttaaaaaatttttctagtatgcactgaacaaagtcttttaacctgtgacttttgtgaattgtattgtaaaaattaataatttgcttaatcagccaaagtaaaatctggatggcctcttgatttccctttcttcttgatcaagttttttgttacactttttgatacattatatcagttttgctttgttatttctgttgtgagtaacttaataatgacaatacacgtagatttaactatggtcaattttctataaataagttcataagaatttgggtctagattattacagtaatatcaacaattttatatgctagaatttatttcatttttccacttaatgtcccaa

SEQ ID NO: 748438 - DNA, 447 bp, Homo sapiens
aagctgtgtgactttgaaatggttgtttatggtattttgaatatgctgcttgctttaaacatgtcctgtgataaaatgcgtaaataatccagtgatattttatgtttaatttctcaaatatagcagattgcataagatttgtatttgaatttwcttttctataaagaaaaaatgcaatttgatataaagatcactttcttgtttgcactgttaacagtcaccagacatcttttcaaagctgttattctcatagaacagttatgccttatttttagtatacagctctaagactgagaagccccttcttaatctgctaatgaaaacactatgtctcataagcttcctttgctcaagataggacactgcaccatgttgtcaatgagttgatgacttcaatattaagatttacttcacgactggatccatttaattaaataattcacagag

SEQ ID NO: 748439 - DNA, 619 bp, Homo sapiens
agaagacagctgagggtttgaggagaccaaagcagcaaaagtcataggacagagtatgggaaagaaaagagataaatagaaaattcagaaatctgcagcgggtgcttcacacatattcagtaatagactaataagtaccatgtgtgaggaaactaaccctagctaggaagagaaacatcagaaaggattagaggaaagagtgttatatggctatggtggatatggaataattcattcctcaaccagctactcagaaaattataatttgtagtgcatctaataaagtacttttagctctgtctaaatactgctcttgtttcaataaaggtgtttttagatctagaaaggctggaggcttcatcatcagcagacctctctgtaagtaatgttaaagtaagactttcaggcagggggcaaatgaatcaagatgaaaatatggatctaaaaaaattaaaaggataaaaagaaaaaagatayggtaactgcatgggcagtgtctcttttccaattaatttttaaaataaactaaacaaaaataacaatgtgatgtgaccttataacacatttaagtaaaatatataacaatagcataaagtttgagagaagagaatttgatgtg

SEQ ID NO: 748440 - DNA, 640 bp, Homo sapiens
ttaaatacatcttgcttcttgacacagatcctaatttattacatgtagagtattgaaggtttaacgttgtttaacgagatggagttttatttctgttacaagactgttggtatgttttacatatatgaatgcatcttttatattatattcttcctcttctaaattctaattaaagtatatagaattttaaatccaataaataaaaaatataaatacaattagtttctcaacactaattatattagtagctttgtaataaatacagctctcttactatttctcaaaagtgattttgatttttaaaaatgtttaaaatatgycattttataattatgatcattatgttatttaatattgtagatagcatatatggagtgagaatctgataaaatattagagtatctgaattttgaaacataataattatttttccatacaatagaaaaaatattttcacatagatagcaaccaaattgccaagagttattcaatttctaagcagttcccaatcatagtattgattacccagtaacttctcatatacctctctgttttactgtattgaagagtgtagtactgaaactttgcaaagatttttatcatgttatcacatcccatcaactttttctcattcatgact

SEQ ID NO: 748441 - DNA, 599 bp, Homo sapiens
attcaatgatggttttaaattgatggtcctgttaaatgcaactgaaaagaacataaatagtgaatagattttgctctgtacagccttgtaaaaatagcttttgacacagatttacttgaaattgtgctaatattatattgtatattaaaaatgaccaaaagaaacctatcagaaccatttataaatgtctcaaattattatcattattatcacaaaacaatatgcagaactaagaatttcagagttcataagacaacttattgttcctggagttaggatacacttcctcaagtatctgcggcattaaagaaaaggtgaagtgtgtgactattgaagaatgcaaattaattcatagtagctttgcagatctctaggggtggcaatttaatctaatgggaatttaatagctcatattaaacacattactaatctgatgctttgcttacagtaatttagaamcagtgaaataataaatcacttatttaaaaaaaatcttctggaatttgaatcttttcttaactaagaaacagcaggtaggaagaatccttgttgttttcaagtgaattcccatcaagttttgtattcatgttgaaacatta

SEQ ID NO: 748442 - DNA, 352 bp, Homo sapiens
tttttcagcctgcatagaactatatagatagagactgacttctaactcctcctgagagtgaccttaatggtcaaatcatcaatgattatgttcatgaaaagttagatacctctttctagaaataaatgaccaaataaataagctgaattaattcaatcacattcaattataggtggcagagtgtagaaccagaacaattagaccagcaagctgacraccttcttacatatcaagcccttaagtttatctgcctcatgctcttcaactatttttctacttataggctgtggaaagatgaaggatgaaatataagagtagcaatgtgagattgctgaattattaaattttggtg

SEQ ID NO: 748443 - DNA, 619 bp, Homo sapiens
ttacatcacaaacagtaaaccttaatgtatgcaaattgtaaaagatcatttaggaggttaaggatcccagggtggaaattagaatgtgacaaaagaataaactatattacaaatgcatggaacaaccacactgaaggagataggacaaaaggtgctgatctaacctttggaaatgaatagaagctataagactgaaaacaaaaagacttgaccttaagcactgtactgtagttggtaaaattgcttcccatgaaggtacaggtcaataattctgaaagcactatatatatatactggaattgaacaattaggtaaatggatggcagatggtaggacacagatttctcactgttggtgtaggattttgcagatgagcatggaaggaggataaaacaattcatgtggtactgaattatagttgaaaatgtcaatatgagttcatgwctagcttaatatacattcaaatgttaaatacaggaatatttatagacatgtatatattcattggttagcatacacatatctattccctgctctgtcagttgagaaggcctagaagtgatgtcatttcgatagcaacaagcataccaaaaactccagctttggttttcataccatt

SEQ ID NO: 748444 - DNA, 581 bp, Homo sapiens
attcatacatgggatattgtacatcagtgagaatgaatgaactacaaccacatgaattgacatggctgaatcccatcattgtaatgttgagtgaaagaagataggcacaaagggctacatgctttgtgattccatttatataaattccagaagcaagaaaatcacatccatgctgttaaaagtcaagatagtggtcaccttggaggggtactattgataggaggaggggaggatcccaaagagcatggtttctgggatactagtaatgttatgcttcttgatctgggtgcaggttacatgcatatgttcagataatttaaattcaacacattggacatttatgatttgtgctctgwcatacatagaaaatgtggcttatgtcaagacttccaaaacagtggccatgtgggatgtctgagtgaagtgtagttcctagatctgtggcaataggacacccactccatgccaaatagaatacagaattctcccaatgatggcatgacatctcattaactgcatgaagccaaagaagattttgtaatcaattccggttctaggatttccttaaacctgcccatggt

SEQ ID NO: 748445 - DNA, 603 bp, Homo sapiens
cttctgaggctttgcatggaaaatccattttcttgcctatttctaatagtcacctgtatcctttggttactgactccttcctccatcctcaaattgcatcattccagttatggcctccatcatcacattgacttcccctctgacttctcctgcattcttctaaggtacacccctttggaaaagcatccattagcttgcacttgtcaaaagtgaacacctgatccatgargtgcttgttactctctgcacattttgtggtgggtcagctcagactcagtgactaacaagttggaaagtgttcaacaagtctcacttatcaaatgaaaatagtatattcaaggactcagccaagttggccccaagagcttcttggatttagattaaaaaattggcagctgtccctttgggagaaactttacatcttatttcaccactttggaaaatatttgaaagtgcctactaaagcagcacatgtatatgtcctatgatccggcaatattacttataggtatgtagtaatagaagtgcatgcatgcatgtatcaaaaacatgtacaccaaagagcacatgtcagagtattcatagtacagttattcataataa

SEQ ID NO: 748446 - DNA, 459 bp, Homo sapiens
tacattctgcttcttggcattcatggggtcaaggatgtgttccctccctcccacattagaaagaagaaggacagttgttaaggattctcctgaaatttggggacaaccctctgggatccagggatacacactctgacaccattttacgtaaacccagacatgcttctgctctttttaattagacagataaaattagcaaggagattaaggtaaaaggagaaatttaaaataattaaatgttaggtggaatttacaaaagtgaattgaacaatgaggtacaayaaggaatgtaaagagaaacacagacacatttgaaacattcctcggatgccacacggcttaagccagtccataggtaaagcaagaattctcccttgtcacttcttgaattgcagattccagtgatgtgaaagaacattctccagaaacactttccttctccttttcttgagatgttat

SEQ ID NO: 748447 - DNA, 638 bp, Homo sapiens
tgtcatctaccaagagtaactgctcttctcctttacaggtaaccaggcacacagccaggccttgtacgcttgggtggggtgggggatggggaaggcattgggagggagtgggttgctaaggtggatgatggaaagctattctttcttgtcattcattgagctggtcttgggatgtaatgccccttttgactatctaagaaatctgtgagcataccatacaaggggaagaaattttggaaattcctaggatatattttgagatccaaagtgtgaagcactcagtttgaagtaaaacagtatttagttcctatgagggaaaaaaacctactgggaaaaatcatgacaactaaggaaatcactattactattactactgaaatggttaaaaaccaaacaaacaaaacataaaacaawattaaattaaataatgacttttctactcaggaaaaaaaaggcaatgaatgttattgaaaaactaaacaaaacccttcctacctctgctatatatcaatggtcaagggcagccccacaccctcaggatcaaaagacttctatgggacaagtctttcttgaagggaacaggctcttatctcaacacattgtcaacaagctcccagttagcaatgtccaacttcatt

SEQ ID NO: 748448 - DNA, 636 bp, Homo sapiens
tctgaatatgcctgatggtccattgttggctagaaactgagatataaatagagtaatttggatactaaaccacagcatccatcaacgtctttctggagcccagacaatgaatgacgccaagatctgtttctggactgagccctgtattttgcattcgactaccctcagggctactcctctcttatacacaaaagaatactgattcactttaaataaaacaactgcctaattcaacagctgccaaatgataggccaatattaaaatgctttagctgtatttttctattgggaatcaacattggaacccttttatatggtacaagtctatatcatttcagcagttaataaaggcacataaattacttacaaagtacaacaacctgatccacatcaatatttatctatagaagctagtggggtttttttttgttgttgttgttgtttgttttttttyccagattgttgagatcctccttacccacctccaggctgtggaatgcctgatccccatgtgagctggtccactcttcctccatgagaggtgggagcaggaggagtgggagaggaggcaagctatgggcaaaataagattttagtcagattcaaaaactgactgcgattgtttctgataaattg

SEQ ID NO: 748449 - DNA, 567 bp, Homo sapiens
acttctctagaaaggaacccctaataatcaagtctgtcagaagaaagagtctctggaaccttcatcttttgatcaattgggaacgaagtgggcatttcgagaaaaaaacaaacacctttaggcacaattaatgtgtttctttaacatactagagtccctctcaactctactctcagttttaatactataaaaccrtattttttttaaatactgaaaaatcatcttcgtttaaaaaaatccagtagtcacaaagttgtccactgtactccacagaaagacttatgaatggcatatggcatgtttaggagatttggctcatatgaggctggaagcacagtggatttatgtgcatcaaaaccctcaaattgactgaggaattatccagttaaaacaaacaagcaaacttactaactgcagtcacttgaaacttagcaagcttagctcaatactgcttaagccacttttgagaactggagagcaagttaaaaatgtttaattactaaactgctgctgtatagcctcattttaaaataacttctgcgttaaataagcattcattcctaaatc

SEQ ID NO: 748450 - DNA, 530 bp, Homo sapiens
aagggcattttggatccatgtcttcatttcttgttgttgctgtaacagatgaccaaaagctcggtggcttaaaacagtacatatttatgatctcacagttctttaggtgagaagtctggtgggcactgctgcttcctctgctctgggtctcacaaggccaagatcaaggtgttgcccaggctgtgttcatttccagwggttgtggggatgtatccatttccaaactccttctggttactggctgaacttgttccttgtgattgtaggactggggtcttggtttccctgctgcttgtcagccagcgaactctcttggccccttacactgtctaccttccacgtcacattgtccctttacttttagaccagagacgacatatttggtccttctcacgttcaaatctctgcatctaccctttctgctgaatctcttctgcctccaacacagaaagttttctgctttaaagggctaacatgattggattaggcccactggttaattgaggaaatctcctaacttcaggtctgtt

SEQ ID NO: 748451 - DNA, 620 bp, Homo sapiens
agaagtttttcatatttttaatgatcttgttccaaagctaagactaccttcattaatttaaccatgttaaatgtttgttcaatattacttgcttccttttcttagaatgagttcttattttaatgaattctccttcaaagagcaaaaatacacctcatcacttaatcctttcccaaagcatatgcccagctttttggtaggattaagcagcacagtataagaggaacttcttaaaacgtactgatatagaaataaaataagattcaccaaatctttatcataaccatatatcccaccaaaaaaccattttccaatgataattatttctatagatttcgatttccaacttcatttttactagtatacattttgttaaaatatttttaaagtacaaatatttgactgaagatattgtcactgcaaaagctgctacrtctcatgatagctacaggaacagacacatgctaattaagatactaaagaagtgaaaaagcatcctgatcatttaacatcagtttcaagcaatatggaaagagtagaataagaaacaagagatgttgaagatgttattttcctgaccaagaaaggtcagacatagtgcatcagaatgctgcatctta

SEQ ID NO: 748452 - DNA, 590 bp, Homo sapiens
aattccaaacttgtaccttctaatactaatgctgcattgcttctccaagtagactttaggtctctgaattacaaataataataattaggtgctcaacatatatttggggagtttatttatttcttgagtcctaccatgagttggattttgttctaggkgctagtactatacttgaaaagaggaaatggaacgttccaaagtaaattcaatattgaagaatactttttaaaaaatcttcctaccctgtctctactaaaaatacaaaaacttagctgcgtgtggtggcaggcgcttgtagtcccagccactcgagaggctgaggcaggagaatggcgtgaacccgggaggtggagtttgcagtgagccgagatcgcgccactgactgcactccagcctgggtgacagagtgagactccgtctcaaaaaaaaaaaaaattcttcctctgttacacaatttccatcgtatcaagaatgttaagtaggttttgtcttctacactttttcagatagaaagcttatgccaactactatacttgagattgacattcttatatgaagagattgatgttggctctactctagctaagaac

SEQ ID NO: 748453 - DNA, 586 bp, Homo sapiens
ggatgtcctttctgtttgttagttttccttctaacagacaggaccttcagctgcaggtctgttggagtacctggccgtgtgaggtgtcagcctgcctctgctagggggtgcctcccagttacctcccagggggtgacctcccagggggtcaggggtcagggacccacttgaggaggcagtctgcccgttctcagatctccagctgtgtgctgggagaaccactgctctcttcmaagctgtcagacagggacacttaagtctgcggaggttactgctgtctttttgtgtgtctgtaccctgcccccagaggtggagcctacagaggcaggcaggcttccttgagctgtggtgggctccacccagttggagcttcctggctgctttgtttacctaagcaagcctgggcaatggcgggcgcccctcccccagcctcgctgccgccttgcagtttgatctcagactgctgtgctagcaatcagcgagactccgtgggcgtgggaccctccgagccaggtgtgggacacaatctcctggtgcgccgtttttcaagcccgtcggaaaagcgcagtattctggtgggagtgac

SEQ ID NO: 748454 - DNA, 529 bp, Homo sapiens
ggagcagcttcaggtctcactttagatttactctgaatctaaatattatatttttattaaaaaaattaagaacagatgacaagcttcaactacatctaaattctttagatttactttaaaagaatcaacattttgacacaataccaaagtgaactaaattcgctttttttttttttttttgagacagagtcttgctctgttgcccaggctggagcgcagtggtgcaatctcggctcactgcaacttccacctctccagttcaagcgattatcttgcctyggcctccaaagtagctgggattacaggcacatgccatcatgcccggctaatttttgtatttttagtagagacagggtttcacaatgttgggtcagctggtctcgaactcctgacctcaagtgatctgtctgcctcggccttccaaaggctgagattatagacatgggccaccatgcccagcctaaatttgctttaatttggagaagtactggtctagaaaacacaaattccaaggagactcaggttctta

SEQ ID NO: 748455 - DNA, 630 bp, Homo sapiens
ggctgaggtggaagcatcacttcaatccagcagttagtggctgcagtgagcaatgatggcaccactgcactacagcttgggcgaaacctcgtctcaaaaataattaataaataaataaattcactaaactttttaaaatagaagaaaactcttgagaccttgggctaggcaaagaatttttaggcttgatattaaaaacaaaatctacaaaaggaaaaagtgataaaactggacttcattagaataaataaacacttttttttttttttttttttttttttacttaaaaagaccctgtaaagaggttgaaaaaatgaattacagactgggagaaataatttgcataccatatatctgacaaagaacttacatctagcatatgtaaaaaattctcaaaactcaatggtaataarataccaattagaaaataggcatatgtgacctctctgtattataacttaaacctcatgtgactacaattatttcaaatgaaataaacaaaacagtaatgcctgtttttggcatataaaataatcagagaacatagaattgtccgaagttaaattattgggccatttacttaatttaaatatttttaaatgcgtgtacccattttgcttgaaggtgtgt

SEQ ID NO: 748456 - DNA, 550 bp, Homo sapiens
tatggtggaaactgaaatatcttcacctaaaaacaacacagaagcagtctgtgtaacttctttctgatgtgtgcattcatctcacaaagttgaacatttctttggattcagcagttttgaaaaacactttttgtagtatctgcaagtggatatttggagcgctttggggcctatggtggaaagggaaatatcttcacctaaaaactacacagaagcattctgagaaacttctttgkgatgtgtgcattcatctcacagagttgaacatttcttttgattgagcagtttggaaacactctttttgtagaatctgtaaggggacatgcggagctctttgaggcctgaggtggaaaaggatatatcttcacaaaaaaactaggtggaagcattctgacaaacctatttgcgatatgtgcattcatctcacagagttgaaccttacttttgattaagcagttctgaaaaacccttttggtactatctgcaaatggacattttgtgtggcttgagacctacagtggaaaaggaaatatgttcacataaaaattag

SEQ ID NO: 748457 - DNA, 550 bp, Homo sapiens
tatggtggaaactgaaatatcttcacctaaaaacaacacagaagcagtctgtgtaacttctttctgatgtgtgcattcatctcacaaagttgaacatttctttggattcagcagttttgaaaaacactttttgtagtatctgcaagtggatatttggagcgctttggggcctatggtggaaagggaaatatcttcacctaaaaactacacagaagcattctgagaaacttctttgtgatgtgtgcattcatctcacagagttgaacmtttcttttgattgagcagtttggaaacactctttttgtagaatctgtaaggggacatgcggagctctttgaggcctgaggtggaaaaggatatatcttcacaaaaaaactaggtggaagcattctgacaaacctatttgcgatatgtgcattcatctcacagagttgaaccttacttttgattaagcagttctgaaaaacccttttggtactatctgcaaatggacattttgtgtggcttgagacctacagtggaaaaggaaatatgttcacataaaaattag

SEQ ID NO: 748458 - DNA, 550 bp, Homo sapiens
tatggtggaaactgaaatatcttcacctaaaaacaacacagaagcagtctgtgtaacttctttctgatgtgtgcattcatctcacaaagttgaacatttctttggattcagcagttttgaaaaacactttttgtagtatctgcaagtggatatttggagcgctttggggcctatggtggaaagggaaatatcttcacctaaaaactacacagaagcattctgagaaacttctttgtgatgtgtgcattcatctcacagagttgaacatttcttttsattgagcagtttggaaacactctttttgtagaatctgtaaggggacatgcggagctctttgaggcctgaggtggaaaaggatatatcttcacaaaaaaactaggtggaagcattctgacaaacctatttgcgatatgtgcattcatctcacagagttgaaccttacttttgattaagcagttctgaaaaacccttttggtactatctgcaaatggacattttgtgtggcttgagacctacagtggaaaaggaaatatgttcacataaaaattag

SEQ ID NO: 748459 - DNA, 550 bp, Homo sapiens
tatggtggaaactgaaatatcttcacctaaaaacaacacagaagcagtctgtgtaacttctttctgatgtgtgcattcatctcacaaagttgaacatttctttggattcagcagttttgaaaaacactttttgtagtatctgcaagtggatatttggagcgctttggggcctatggtggaaagggaaatatcttcacctaaaaactacacagaagcattctgagaaacttctttgtgatgtgtgcattcatctcacagagttgaacatttcttttgattgagcagtttkgaaacactctttttgtagaatctgtaaggggacatgcggagctctttgaggcctgaggtggaaaaggatatatcttcacaaaaaaactaggtggaagcattctgacaaacctatttgcgatatgtgcattcatctcacagagttgaaccttacttttgattaagcagttctgaaaaacccttttggtactatctgcaaatggacattttgtgtggcttgagacctacagtggaaaaggaaatatgttcacataaaaattag

SEQ ID NO: 748460 - DNA, 556 bp, Homo sapiens
ccagtggacatttggagcactttgaggcttatggtgtaaaaggaaatatcttcacttaagaactagacagaacattctgagaaacttctttgtggtgtgtgcattcatctcacatagttgaacatttcttttcaatgagcagttttgaaacactctttttgtagaatctacaagtggacacttggtgtgctttgaggtctatggtggaaaaggaaatatctgctcataaaacatggacagaaacattctgagaaacttcttcatgatgtgtatattcatctcaaagatttgaacctttcttttgattgaacagtttggaaacactctttttgcagtatctgcaagtggacatttggagggctctgaggcctctggtggaaaaggaaatatcttcacttaagaastgcaaagaatcattctgagaaaatactttgtgatgtgtgcattcatctgacagagttgaaccttactgttgattgagcaggtttgaaacatcctttttgtactaggtacaagtggacatttggagtgcgttgatgcctatggtgtaaaagta

SEQ ID NO: 748461 - DNA, 672 bp, Homo sapiens
acctttcttttgattcagcagctttgaaacactctttttgtagcatctagaattggacatttggagcgcttagagtcctatggtggaaaaggaaatatattcacgtaaaaactagacagaatcattcagagaaaattctttgtgatgtgtgcattcatctcacagagttaaaccgttattttgatggagcagtttggaaaaactttttttgtacgatctggatgtttacatttggagcgttttgaggcctatggtgtaaaaggaaatatcttcaaataaaaactagacagaarcattctgagaaacttctttgtgatgggtgcattcatctcacagagttgaacatttcttttgattcagcagctttgaaacactctttttgtagaatatgcaagaggacatttggagtgctttgaggccaatggtggaaaaggaaatatcttcacataaaaactagacagaagcattctgagaaacttctttgtgacgtgtgcattcatctcagagtgttgaacctttcttttgattgagcagctttgaaacactctttttttagaatctgcatgtgcagatttggagcgctttgaggccaatggtggaaaaggaaatatcttcacataaaaatgattcagaaatattctgagaaacttcttcctgatgtgtgcattcatg

SEQ ID NO: 748462 - DNA, 544 bp, Homo sapiens
aactggatcccttccttacaccttacacaaaaatcaattcaagatggattaaagacttaaacttttgacttaaaagcataaaaaccctagaagaaaaccgagtcattaccattcagaacataggcatgggcaaggacttcatgtctaaaacaccaaaagcaatggcaacaaaagccaacattgacaaataggatctaattaaactaaagggcttctgcacagcaaaagaaactatcatcagagtgaacaggcaaccaacaaaatgggagaaaastttcacaagctactcatctgacaaagggctaatatccagaatctacaatgaactcaaacaaatttacaagaaaagaacaaacaaccccatcaaaaagtgggtgaaggacatgaacagacattgagcagttttgaaaagctctttttgtaatatctgcaagtggacatttggagcgctttttggcctatggtggaaaaggaagtatcttcatttaagaactagatggaagcattctgtgaaactgctttgtgatgtgtgcattcctctcac

SEQ ID NO: 748463 - DNA, 614 bp, Homo sapiens
ttgtgttttcagagctgctgcactctagttggtttcctccactcattttattactagctccaggctggagactgaatctatctgtaacacctcaatttctcttttgaatttttctgctttcattgattttgttagtactatcttccatgacactaagtctcttttctactatgtcaagtctggaatttaacctgtctattgagttttttattcactttattattcatcttcaagatttgtaattatttctatttcgtctctccttatttcttatattctggccagttctaattttatactttatatatttttaaatcactaggcatcttgatcatactcctgcagttttaaagtgtgtgtcagactttccttggctggtgtaagttcctgtaccaattgctcatttttagcctgcctttcttagtrtggtgtttccttgggtaatttggaacctggcctttctagcttatttcaaggtgaggatattgtgtctctgcatttctgcctttctctgccatcttgttgtcactgtcctctgtctagcagtgttttgtagcctctgctcccatcccgggtcccaggcttctgctctgcagtgatgcagagcatgtcac

SEQ ID NO: 748464 - DNA, 557 bp, Homo sapiens
tagggaaatggaaagcaagtcaccaactgtctgggagaagaagcttcctgacaaagggaatacagagtgcaaaatccctgaggtgggactacacccagcatgtttaagcaaggtgaggctggtgtggccaaaggaaacagaaaagggaagatactacaaaatgaaggcagagaagaagcagaggctgaaatcatcttgggccacaaaggctggattttattctgagagagctagaataactttgaaagttttgagtgaaggacagacatgattttacttatgtattaacaaaaggtttactcaggcyactgtgctgagaatatattgtagaaaaagtgttgagtattacatgtccagcacaggtggcagacggatggtgaattcattctgttcctaaaggtagagaggtattgtcttcctaggcatcagtacagtcggagcagggctttagaggaaatgtggatcttttctagggaaagggtggagggaagacattgcaggtaggggagaaagctgagctaagaggaagtgagcagtggtatactgtaaagtgaaaa

SEQ ID NO: 748465 - DNA, 587 bp, Homo sapiens
actctacacgagacccatgttccccggagaggattggggctctctgagttccaggcttacctcaggccaggccagcgcagggcaggacactccaagggtagtcaccacagtggcaggaccactcataggggcgggacagagccaagggacacagccaagactgtgttttcaaggcagcaggaggaggggacggaggcccggagrtttgttttgagggactgtgagccccagggctgagacacgggtgtttcaacccaaggagggtgatagatgagagatgtgggcacccagggctggcatggaaatacgtggagaccactcaaccgagagtaagcagaggctgggtatcacgagcttgctgtggcaacagccaggccctgctacttacatgaggcagaggctcaaaggcaggcagtgagggaaacgctttgtagcagagaaaggcggggctcactagcactggggccttctaagtcattggttggggtagcagatttggctttctctggttgaccctgagttggaggtcgggtagaaattggggtgaaaatgacaatccttgatgaggaggtcctggccgcttgggg

SEQ ID NO: 748466 - DNA, 575 bp, Homo sapiens
cggcttccccagcaattcccgaccccggagcgagcccggctgggcgaggggcgaggggcagggggcagggggcaggggagacttagcgcggggcgcagataccatgtccgcgggaaagcccccttgctagggcgcaagactcctctgaactcgctgccccacccgatgcgcaggctttctctagaggggttggggctggggtgcccgctcaggagaccgggaaacagaggctgctacccgaggcaggccctcgtccagcgaatgggcgaggtgtgcagaagcgcaaagccaggccttgaaagggggagtttgtgcctccttccccccttcgtgggctcccgttttaggaggaatgttactgtttaaagagaccccactgaactatttcgtgctcaktgtcacctctccttcgctctcctcgcgtaagttctcaccgaaaggtaataaaacaaccgctgccgacaccgcttggcgctgggccgggcggggaaagcgccccgagtcccactagtccggaccacccggccagccccgaccttctcccaccttccgtgaaagcaatgacacagcagaaa

SEQ ID NO: 748467 - DNA, 635 bp, Homo sapiens
gaccctaaaacatgtataggatgtagctgaaaagtccgtagatgaattaaaatgaaatactaaaaaaattaaattatccaaaaggaaggaggaaacggggatccagtcaaccaaagtggagggaacaaatggaaaataagtaataaaatggaagtgctaaaccaaccatattcgtacttacagtaaatgttaatagtctaaacatgctaatcaaaagccagcgattgttggcatggataaaaaataatagcatactatatgctgactacaagagacatgctttaggccgggcacagtggctcacacctgtaatcccagcacttcgggaggccgaggctggtggatcaackgaggtcaggagttcaagaccagcctgaccaaaatggtaaaaccccatctctactaaaaatacaaaaattagctcggcgtggtggcaggtgcctgtaattccagctacttgggaggctgaaacaggagaatgagaatcacttgaaccccggaggcagaggttgcagtgagcgctgggcaacaggtaagactctgtctcaaaaaaaaaaaaaaaaaaaaggaaaagaaaagaaagtaaaagacatgctttaaatatgaagacaaaggtaggttgaaagaaatggacc

SEQ ID NO: 748468 - DNA, 635 bp, Homo sapiens
gaccctaaaacatgtataggatgtagctgaaaagtccgtagatgaattaaaatgaaatactaaaaaaattaaattatccaaaaggaaggaggaaacggggatccagtcaaccaaagtggagggaacaaatggaaaataagtaataaaatggaagtgctaaaccaaccatattcgtacttacagtaaatgttaatagtctaaacatgctaatcaaaagccagcgattgttggcatggataaaaaataatagcatactatatgctgactacaagagacatgctttaggccgggcacagtggctcacacctgtaatcccagcacttcgggaggccgaggctggtggatcaacggaggtcaggagttcaagaccagcctgaccaaaatggtaaaaccccatctctactaaaaatacaaaaattagctcsgcgtggtggcaggtgcctgtaattccagctacttgggaggctgaaacaggagaatgagaatcacttgaaccccggaggcagaggttgcagtgagcgctgggcaacaggtaagactctgtctcaaaaaaaaaaaaaaaaaaaaggaaaagaaaagaaagtaaaagacatgctttaaatatgaagacaaaggtaggttgaaagaaatggacc

SEQ ID NO: 748469 - DNA, 610 bp, Homo sapiens
aaatatgaagacaaaggtaggttgaaagaaatggaccagaaaagacataccattggcaaatgacatggataaaaggctggagtggcaaatgtagtatcagagtgttactagagacatttcattatcataatcataaagtgacaattcgtcaagaagatttagcaattaactatgtgcatgtgcttaatacacagccttagatacataaagcaaaatgaaaagaaccaggaaatactgacaacttcacaattataactaagaattttttaatatatctctttctgcaattgatagaacaaattgacaaaaaatcagtaaagacagggacgayctgaacaacacaaccaaccacttttatctcattgctatttatagaacactacattcagcaactgcagaatacacattttttttccaatgcacgtaatacatttgctaacacagacaagctggtggacataaaacaagcctcattaaaagcactgaagtcctgcaaagtatattttctgaacacaatggaatttatttagaaattagtaacaagatatctagaaaaaccctttaaatatctgacaattaaagaacacacttctaaatagttcataggcca

SEQ ID NO: 748470 - DNA, 643 bp, Homo sapiens
aaatatgaagacaaaggtaggttgaaagaaatggaccagaaaagacataccattggcaaatgacatggataaaaggctggagtggcaaatgtagtatcagagtgttactagagacatttcattatcataatcataaagtgacaattcgtcaagaagatttagcaattaactatgtgcatgtgcttaatacacagccttagatacataaagcaaaatgaaaagaaccaggaaatactgacaacttcacaattataactaagaattttttaatatatctctttctgcaattgatagaacaaattgacaaaaaatcagtaaagacagggacgatctgaasaacacaaccaaccacttttatctcattgctatttatagaacactacattcagcaactgcagaatacacattttttttccaatgcacgtaatacatttgctaacacagacaagctggtggacataaaacaagcctcattaaaagcactgaagtcctgcaaagtatattttctgaacacaatggaatttatttagaaattagtaacaagatatctagaaaaaccctttaaatatctgacaattaaagaacacacttctaaatagttcataggccaaaaatgaaatcaaggggaaactagcaaatattt

SEQ ID NO: 748471 - DNA, 622 bp, Homo sapiens
tcctgagaaccgagctatagtgattgttttctctcttctggatttagccacccagcaagtctaccaggctctgggttggtactgggggttgtctgcacagagtcctgtgatgtgaaccacctgtgggtttcatcagctgtggataccagcacagtattggggtgtcgcctgggttctacaggagccatctacttccttcagggggtctgtgagtcctctcagcagggattttaagtttttctctttgaaatgtgtatgttcatttcacttggcctacaagagtatatcctaatgtaatatgcagcgaatattaacgcgttttttttttcgagatggagtttcattcttattgcacaggctggagtgcaatggtgtgattttgcctcaccgcaacctccccctccmgagttcaagtgattctcgtgtctcagccgcccgagtagataggattacaggcatgtgccaccatgcctggctaattttgtatttttagtagagatggggtttcttcatgtttgtcaggctggtctcgaactcccaacctcagatgatttgcccacctcagccgcccaaagtgctgggattacaggtgtgagccactgtgcccagcctaaaacttttt

SEQ ID NO: 748472 - DNA, 623 bp, Homo sapiens
agataggtaaacccctgtaacacatgcagggttgtaaaagtcatgataagaaatttgggaactcattgagtagttttcaggaaagaaaaagaggataactgaagggcctaagacacagtaataagtacggaaagacctgttgggtgttggcattcatctccatgaaagatgagagsacatgttggacacatggagacagaaccaagaggaggattgggatcattcaggaagttgattgaccaggtttgcttggaattggatgtgaacctgaaaacaaagggggaatttgtgtgcaatggctaggtttaactgaatgaatggtgccctgtgtactgaggaagggtctgggtgctggccgtacatttcaaagagttttttttcagaaatgctgagtttgagatggcagtgatatcacatcagttggatataaaagtttgaagcttggaagaaagtctgggctagagattaactttagagttcatggcataaagatgataattaaattcctaggaaaaatgagaaagcttaggatcacaaaatatttagggttcaaaaggggaggagaatctcaccaagaagacagacgaggagtaactatccaggtgaaaggaaacccagaatag

SEQ ID NO: 748473 - DNA, 609 bp, Homo sapiens
tggatttccttcttaataacctagagaaagaatactacattaaacccaaagtagagaaaagaaacactaccactaaaagtggaatcattgaaatagaaaatataaaagggagaaaattaataaaagcaaattatggttccttgaaaaatcaattaaaactgataaacctctaactggatggataaaacaatgagagggaacactcaaatttgtaagaataggaatcaagaagcaacatcaccagagtccctatagacattaaaaagaataagagatttttatggaaaatctaatgtttctaaattcaataacttagattaatggacaaattatttaaaagatattagttaccaaaagtgactgcagaagaaacagaaaatccagatagcttcatatctatttagaaaattaaaatattaattaaaaacttttccacataaaaaacctccagggccaaatkgctttactggtaaattttataaagcattttgtgagagcagcacaccttaataacaaaaattgacaaagatgttaccaaagaaaaaaaaaagccatatctacatcccttaggaatttggtaaccaaaatccccatgaaaatgttagcaaa

SEQ ID NO: 748474 - DNA, 614 bp, Homo sapiens
atgataatgagttactttgaggtgaaaaggaaagagtgatgatgtagagagattgcattgtttggatctctgtgaagaatttttgatggttcccctatttttgattgggataaatgtatatttgtaattgggataaatgtatattttgtaatggaataacattcacaatgtctaagattttataatatttaaatttggtgtaacttccaaaagagacataaagaatttgttcaaggagaattttgtcttgtaaaaaaakaagtatactaaagaaaggtactttgaattaaggtaaaaacagtgaaaataacctgaaatatttgcacatttcaagaatatcctccattttgcagaattttctctgaacttatcatatacctcatcaactattgttatttcctaaattaaacattatggcttttagggaagtcagttaaaggtgtcaacaactccagatttaaagatgatttttagacaattttatgccaaaaaaactaataagatcatattgaaaaatcccatttaaaaaaacacagtaacagtattagagacaaatatggttaagaaactgattaaagtatatgaagtaccaagaatgattttacaaattatta

SEQ ID NO: 748475 - DNA, 614 bp, Homo sapiens
atgataatgagttactttgaggtgaaaaggaaagagtgatgatgtagagagattgcattgtttggatctctgtgaagaatttttgatggttcccctatttttgattgggataaatgtatatttgtaattgggataaatgtatattttgtaatggaataacattcacaatgtctaagattttataatatttaaatttggtgtaacttccaaaagagacataaagaatttgttcaaggagaattttgtcttgtaaaaaaataagtatactaaagaaaggtactttgaattaaggtaaaaacagtgaaaataacctgaaatatttgcacatttcaagaatatcctccattttgcagaattttctctgaacttaycatatacctcatcaactattgttatttcctaaattaaacattatggcttttagggaagtcagttaaaggtgtcaacaactccagatttaaagatgatttttagacaattttatgccaaaaaaactaataagatcatattgaaaaatcccatttaaaaaaacacagtaacagtattagagacaaatatggttaagaaactgattaaagtatatgaagtaccaagaatgattttacaaattatta

SEQ ID NO: 748476 - DNA, 622 bp, Homo sapiens
gtagaataaagatagtggagagatttgaacaacgtctgagaaatagaatcaacaggccatggaaattgagtggatacgtgaatgacaaaaagagaagaatgaataatgattcccagatctatgccttgtataagaagttgaatgttggtaatatactctgagagagggttttccaaagggaagaagcaagttgtacttttaattttgcccacattaattgaggaacctgtgaagatatttacttggagaacacagttgcttatgagttctgcgttctggagaaatttaaatattagtttccaacattttatccattacgttttcaatgttgtgaaatatctctgagagttcctttaatgtgttttttttgccastgtcacttcctctgacacatcatcagcctttcatcacaatcacttttcctcatttatgtctataagttcaccttcactgatttcctcagtctgcatatctagaatgtctcaaatggcggcagtgtcattgttgccacaatcagcatgttcccacaggcagcttttttttcatttgctccatttatgtttaatgcaagtttcacttctagtattatcactcttctttagtgcactttcattcttttggc

SEQ ID NO: 748477 - DNA, 675 bp, Homo sapiens
ccatcctacaacttaatgtcatattaatatttcttttcttttcttttcttttttgagacggagttttcgctcttattgcccaggctgcagtgcaatggcatgctctcggctcaccgcaacctctgcctcccaggttcaagtgattctcctgcctcagcccccaaatagctggaattacaggcatgcgccaccatgcccggctaattttgtacttttagtagagatggggtttctccatgttggtcaggctggtctcgaactcatattaatatttcttttttgtttgagacggagttttgctcttgttgcccaggctggagtgcaatggcgygatctcggctcaccgcaacctccacctcccgggttcaagcgattctcctgtgtcagcctcccgagtagctgggactacaggtgcccaccactggctaattttttgtatttttagtagagacggggtttcatcgtgttagccaggatggtcttgatctcctgacctcgtgatccacccacctccgcctcccaaagtgctgggattacaggtgtgagcgaccgtgcctggcctgtcaactttaaaataaaaaaaagaagttactaaacggcaggactggttctatctgatagccctttaaaaatctgaagacagtgtgtttccccttaaagtaatcttttctggta

SEQ ID NO: 748478 - DNA, 675 bp, Homo sapiens
ccatcctacaacttaatgtcatattaatatttcttttcttttcttttcttttttgagacggagttttcgctcttattgcccaggctgcagtgcaatggcatgctctcggctcaccgcaacctctgcctcccaggttcaagtgattctcctgcctcagcccccaaatagctggaattacaggcatgcgccaccatgcccggctaattttgtacttttagtagagatggggtttctccatgttggtcaggctggtctcgaactcatattaatatttcttttttgtttgagacggagttttgctcttgttgcccaggctggagtgcaatggcgcgatctcggctcaccgcaacctccacctcccgggttcaagcgattctcctgtgtcagcctcccgagtagctgggactacaggtgcccaccactggctaattttttgtatttttagtagagacggggtttcatcgtgttagccaggatggtcttgatctcctgayctcgtgatccacccacctccgcctcccaaagtgctgggattacaggtgtgagcgaccgtgcctggcctgtcaactttaaaataaaaaaaagaagttactaaacggcaggactggttctatctgatagccctttaaaaatctgaagacagtgtgtttccccttaaagtaatcttttctggta

SEQ ID NO: 748479 - DNA, 555 bp, Homo sapiens
tgcctgtaatcccagctgctcaggaggctgagttacgagaattgccccgggaggcggaggttgcagtgacctgagatcgtgccatcgcactccagcctgagcaacggagcaagagttggtctcaaaataaataaataaataaaaataaacagtacttgtctatttcctcagatagactgagttttcccagagatggaattacaatctgtgcattcccagattgtaacatagttttaagtaaacatccactgaaagtctgcatggaagaacacagaagccagagcaagttcagggctcctagaaagacgatgctggagctagccctagagaatggctgagaattggatgaactcagaagaagcagcaaagtagttgcwggtggcaggcatggcaggagaagggatcaggtggctggaagagtggagggtatagaactgaaacagagagtctgttggaggtggacagaggaaggcgggattagatgagaaatgacggacccagtttctaagaaagaccaagaaagataagcaaagggatttaggtgggatgcccttc

SEQ ID NO: 748480 - DNA, 586 bp, Homo sapiens
gcacaccaggtgaagaaggatggtgctctctgggagctggaatacaaacaaggggattcctatgattgcactcagcttactgccttgagagattttttttttttttttttgagacggagtcttgcccaggctgtagtgcagtggtgtaattttggctcactgcaacctccacctcctaggttcaagtgattctctcgcctcagcctctcgagtagctgggactacaggcatgcaccaccatgcctggctaatttttatatttttagtggagacagggtttctctrtgttggccaggctggtctcaaactcctgacctcaggtgatatgtccatcttggcctcctaaagtgctgaaattacaggtgtgagccactgcgcccggccttccttgagagatttctaagttgcagcgcagagaaaggacactcagacagagactgctggactccctggtttgaggagctagaactgagagtctgaggaaatcaaaacatctagaagtctcaggacagaatactgtagggtaaagacttcccagagagatcctaagagatctatagaatgtcccccttgaggacccagcaga

SEQ ID NO: 748481 - DNA, 570 bp, Homo sapiens
aagaaggatggtgctctctgggagctggaatacaaacaaggggattcctatgattgcactcagcttactgccttgagagattttttttttttttttttgagacggagtcttgcccaggctgtagtgcagtggtgtaattttggctcactgcaacctccacctcctaggttcaagtgattctctcgcctcagcctctcgagtagctgggactacaggcatgcaccaccatgcctggctaatttttatatttttagtggagacagggtttctctatgttggccaggctggtctcaaactcctgacctcaggtgatatgtccatcttggcctcctaaagtgctgaaattacaggtgtgagccactgcgcccggccttccttgagagatttctaagttgcagygcagagaaaggacactcagacagagactgctggactccctggtttgaggagctagaactgagagtctgaggaaatcaaaacatctagaagtctcaggacagaatactgtagggtaaagacttcccagagagatcctaagagatctatagaatgtcccccttgaggacccag

SEQ ID NO: 748482 - DNA, 651 bp, Homo sapiens
gcctgaaacaatacaacaaaaaacccagacaaaatatataaaacaacaggttttaagacagcacaccaggtgaagaaggatggtgctctctgggagctggaatacaaacaaggggattcctatgattgcactcagcttactgccttgagagattttttttttttttttttgagacggagtcttgcccaggctgtagtgcagtggtgtaattttggctcactgcaacctccacctcctaggttcaagtgattctctcgcctcagcctctcgagtagctgggactacaggcatgcaccaccatgcctggctaatttttatatttttagtggagacagggtttctctatgttggccaggctggtctcaaactcctgacctcaggtgatatgtccatcttggcctcctaaagtgctgaaattacaggtgtgagccactgcgcccggccttccttgagagatttctaagttgcagcgcagagaaaggacactcagacagagactgctrgactccctggtttgaggagctagaactgagagtctgaggaaatcaaaacatctagaagtctcaggacagaatactgtagggtaaagacttcccagagagatcctaagagatctatagaatgtcccccttgaggacccagcagaacact

SEQ ID NO: 748483 - DNA, 593 bp, Homo sapiens
tttttaaaattctttgcatattgtcaaaagacaaactcataatgaatttagttaaagatctcagttggctttattgtgattgtagaattgggcaacagttcattccataaaatagaataagtattccaatgagttgagcaaaggggattgtctttataaacagaaagggctgaataaatcagaaacaaagaacaaaaagcagaytggtcattttaaagttactttccttgtggccaggtgcagtggcttgtgcctgtaatcctagcactttgggaggtgaagtcgggtggaacacctgagatcaggagtttgagaccagcctggccaacatggcaaaaccccatctcttctaaaaatacaaaattagccgggtgtggtggcagcacctataatccctgttattcgggaggctgaggcaggagaatcggttgaacctaaggggcagaggttgcagtgagccgaggtcatgccatttcgctccagcctgggcaaaagggcgaaactccatctcaaaaaaaaaaaaaattaaataaaataaagttactttccttgtaaggtggtgatatagtttgaatatacatccccgccacatc

SEQ ID NO: 748484 - DNA, 593 bp, Homo sapiens
tttttaaaattctttgcatattgtcaaaagacaaactcataatgaatttagttaaagatctcagttggctttattgtgattgtagaattgggcaacagttcattccataaaatagaataagtattccaatgagttgagcaaaggggattgtctttataaacagaaagggctgaataaatcagaaacaaagaacaaaaagcagattggtcattttaaagttactttccttgtggccaggtgcagtggctygtgcctgtaatcctagcactttgggaggtgaagtcgggtggaacacctgagatcaggagtttgagaccagcctggccaacatggcaaaaccccatctcttctaaaaatacaaaattagccgggtgtggtggcagcacctataatccctgttattcgggaggctgaggcaggagaatcggttgaacctaaggggcagaggttgcagtgagccgaggtcatgccatttcgctccagcctgggcaaaagggcgaaactccatctcaaaaaaaaaaaaaattaaataaaataaagttactttccttgtaaggtggtgatatagtttgaatatacatccccgccacatc

SEQ ID NO: 748485 - DNA, 593 bp, Homo sapiens
tttttaaaattctttgcatattgtcaaaagacaaactcataatgaatttagttaaagatctcagttggctttattgtgattgtagaattgggcaacagttcattccataaaatagaataagtattccaatgagttgagcaaaggggattgtctttataaacagaaagggctgaataaatcagaaacaaagaacaaaaagcagattggtcattttaaagttactttccttgtggccaggtgcagtggcttgtgcctgtaatcctagcactttgggaggtgaagtygggtggaacacctgagatcaggagtttgagaccagcctggccaacatggcaaaaccccatctcttctaaaaatacaaaattagccgggtgtggtggcagcacctataatccctgttattcgggaggctgaggcaggagaatcggttgaacctaaggggcagaggttgcagtgagccgaggtcatgccatttcgctccagcctgggcaaaagggcgaaactccatctcaaaaaaaaaaaaaattaaataaaataaagttactttccttgtaaggtggtgatatagtttgaatatacatccccgccacatc

SEQ ID NO: 748486 - DNA, 593 bp, Homo sapiens
tttttaaaattctttgcatattgtcaaaagacaaactcataatgaatttagttaaagatctcagttggctttattgtgattgtagaattgggcaacagttcattccataaaatagaataagtattccaatgagttgagcaaaggggattgtctttataaacagaaagggctgaataaatcagaaacaaagaacaaaaagcagattggtcattttaaagttactttccttgtggccaggtgcagtggcttgtgcctgtaatcctagcactttgggaggtgaagtcgggtggaacacctgagatcaggagtttgagaccagcctggccaacatggcaaaaccccatctcttctaaaaatacaaaattagccgggtgtggtggcagcacctataatccctgttattcgggaggctgaggcaggagaatyggttgaacctaaggggcagaggttgcagtgagccgaggtcatgccatttcgctccagcctgggcaaaagggcgaaactccatctcaaaaaaaaaaaaaattaaataaaataaagttactttccttgtaaggtggtgatatagtttgaatatacatccccgccacatc

SEQ ID NO: 748487 - DNA, 559 bp, Homo sapiens
actttcttgtacaaattaatgaagttgattctaaaattcaaatggaatgccgtagacctaaaatcgccaaaacaggccaggcgtggtggctcacgcctgtaatcccagcactttgggaggccgaggcaggtggatcacttgaggtcaggagttgaagaccagcctggccaacatggtgaaactctgtttctactaaaagtataaaaaattagctgggcatggtggcgggcacctgtaattccagcyacttgggaggctgaggcaggagaatcacttgaacccaggaggtggaggttgcagtgagccgagatcatgccattgcactccagcctgggcgacaagaacaaaactctgtctcaaaaaaataaataattaaaaataaataaaaaataaaatcaccaaaacaactttgaaaaataagaaagttaaaggacttataccaccttgttttaagacataatatatagctactgtagtcaaaatagtttggtgttggtgtaaagatagacaatttgatccatgaattagaataaagaacccagaaatagaccccatatat

SEQ ID NO: 748488 - DNA, 610 bp, Homo sapiens
aatgaattgacatgttaatgctgacaggaaaagagcacaagagagcttgctaaatgactgctcagtcaggcactaggaattcctgagtggctaagtccggagcaaaacccacagcaagcacaacaacaacaagaaaactttattgtcaaatgctcccaaacaaacaaacactaacagggttgtcatgttagtaatccacctacccataaatcatatggattttaatcatacctgccaccttagctgcttacccccagagaaattgttttctttttgctccctccttcattcactttcaattatctggaagctgtttcgcgtgtttatttatttatctaaagttcacatacagtatgcamgcacaaattttctccaggggtctgggaccaggcagatcatacacaaggatgcagtggcgtgaagcagctaacagctcagataaatgtactctgtctcaaaaacctgctttggaccacgataacaaggaaaggggaggacagaaagtaatttgtgtgtgtacaatgattgattatggtttaatatgtaggcatttcaccttaagaccactctaggtagacttaaagaatgatagaacaggaagtccatctgg

SEQ ID NO: 748489 - DNA, 602 bp, Homo sapiens
tgcctttttatttctttgaggcagaaactataaaatactgaattattaccttacagcaaaactgctattttaagaattttaaactaatattggctgctgtcagatcagtttctagatttattgaattaagaagtagatataaactgaggwgaaggcaaggtcatgtcaatatttatcttgtgaatcaataaatgttgatactaacaaaaagtaaagctcagcgaatgtatatggttgataggaagaggtaaaatctgatcaaaacgtttgtaattttcaaatttccctagcaaatttaatgtatcagtttcaaatattttttgataatatttaccctaagggtataaaggaaaatatttttaaataatattcctaagaacataggctatgtaatatacatatacattgtccctgtcttcaaaagacaaatgtttttcaatcgcattgcattattccttattaagattctttcctcattttagcttttatttatctgcctcggaagggagagaaacaaattagagaatatttggtgctgaattggaatcttgctcaattttcaatccaatgtcactggaaatgtagttcctgagaacgaacta

SEQ ID NO: 748490 - DNA, 567 bp, Homo sapiens
ctaatgctcagagaggtcccagtcttcttcaaatgtatagtgttggtgaagtttcagtcctaaaataaggacagactctctacagttccattgcactaggggccattgctgattgttctgtcaaatagcgcctcataaacatcccctagactcttgagccttcaaagccttaacacttgattcctaaatatgaaaatatttccatagcgttggcatcataggcactcaagcaatgcagaacagagccactgctcagagcacagggacagttagaggagatggagaggaggctgtaaggcaaacagactggtggataattttaggacataattccctggtgggagaaataaagctctcattcatcccagagttcrcaaggatttaatccagatataaggtgaattcacttccatcaaaaaatgtattcccttattatgacattttctacttaggtagaaggatcagagagtatgaaaaagagggagtttcacagtagaaagacttttttttcttttcactggagcaagaccccaaacaggaaatgatatgatttatacctcatctaat

SEQ ID NO: 748491 - DNA, 644 bp, Homo sapiens
ttgtcaccactccagtcttaaaaggctatttgggtctgatcccatttgtagtgtttgggttagtcagtaaatatcacaaatcatgctgaacgcagggaatgggatcttttcccatttgcttcatcgtaggtgggcatttatgttttgtcttcaaggaactgatagcacacagattgtaaatcactgtatgaccaatgacaagattccatcytaggcatgcagaagcatcaaaagattgttctagattgtgtcacaagttaatcacatggagtacacagaactcagaatacatgtttacacataatactcaaatgtactttgtggcaatatatgacactatgtgaggagaaaaatgttctcaattcatgagaaatgctagtcatactatctagcagttataaatataacagtgacgtggagccatttataacactttttggatcatacaggactctgaggatggctagggagattgtactctctttgtgatgacaattgcttctctttccttaaacaaaagattcagagaaactgtactctcaaagagcaattggagctggtccggatttggtaattagcattttgatagaaaaatttattagactacaaatttcttggggaacttcaaaatgctcatagttgct

SEQ ID NO: 748492 - DNA, 621 bp, Homo sapiens
attttacaatcaatttgtacggttaatgcaatcatcacagtggccctgaggggatgtacatcctcagcttatgaagataacaggattaagagattaaagtaagacaggcataagaaattataaaagtattaattttgggaactaataaatgtccatgaaatcttcacaatttatgttcctctgccrcagctccagctggtccctccgtttggggtccctgactttctgcaatatcttctcccatctgcacagtgctcctgctccaataaccaaaaagcactagaacaggatctatgccttctcactcagatttgattatcaccttgcttcttcacatttatcataatccaaattaatcccattcatgtatctacacccatccttaaccagtgactagactgccaaggcaaaaggatttggaggtggtctggacacagcatttgccatatttgccaattagcctgaagaattttagtagctgtaggcttattcagctaacatacatggattatactcaccccaatagaataaataagtaaataaaattttatgagtgcatgaactatcaccttactttattattctgaaaattctaattatctaaatcacatctgaatattt

SEQ ID NO: 748493 - DNA, 602 bp, Homo sapiens
acggcccacataaggataggtctgtgcaacccagaaccttgggggtttagttttaagagttaccaaggcaaaggctgataacctacaccaacattcacttcctccccttcctccttaggaacgagccctgcatttctgtggaacacacattccagggagccccacacattccgtgtgcctcgcccaccctgcagctagctgtggccaagtgaccaaggactaggccatgagatataatgcaagatactgacaagcactcaaagtttactcatgaggaagcatggagcccatctttccccactttctgcctgctgactggaatggagaaatgacagctggagcttaagcaaccatttaggaccaggaggcaacacctgaagcggagccrcaggaccacaggagccctgggtcccgtagagcctcgatcagctgcagaccacccaattcaggacttttcaggagacagagaaataaactgcaatctttttaaagccactgttatttatctgggctttaaataattgcatacagttaaacgtaatattaactgatacagtaacattccttgcctttttaaacatgtttccagggcggggcatggt

SEQ ID NO: 748494 - DNA, 612 bp, Homo sapiens
tgttgttacatgccctaaatgagccattttctccctcctcagtattttttcagcagctagacttcctttcttttcttttttttttaattttttacttcatagtgctacaaatagcttttttttaacctaccaattactaagaaaaagtcacttttgctgactcctgtttytataagctcaaatcccaaggaaaattagcaaaggtcttctctacagttttcctttgtaccaacaaaaaaaagtcctttctcaaaaagatctcccaaaaggagagtcctatgatcagatcacaaatatattgaaaatgcaccagaacaggctgctgcgtgaaaacatagatttgtcaatatggacatcaacttaaagtcagagcctagggaaataatcagtaaatttggaagtatatagtaatttgcaacttggaagcccttacacactttcttacacactaatcttattttatagatgatgaacatgagataattctaaactaaaataaaaatggataacatcagaggatggtctagaagttttcatctttatattaattgtaatgagttaagtcatggtatgtaaataaataactgcaaaagcttagtggcttaagacaaa

SEQ ID NO: 748495 - DNA, 613 bp, Homo sapiens
tggatgtggtgaaaagggaagcgttcactgtgggtaggaatgtaaattaggacaatctttatggaaaagagtatggagatttcttaaagaattaaaagtagaactactattcaatccaggaatcccactactgggtatctaccccaaaggaaaaaagtcatgtaaaaaagacacctgaaaatgtatgcttattacagcacaattcrcaattgcaaagttatgggaccaatctaagtgcccatcgactaatgaatggataaagaaaatatggtatatacacaccatggaatactactcaaccataaaaagaataaaataatgtcttttgcagcaacttgaatgaagctggaggcctttattctaaatgaagtaactcagaaatggaaaaccaaatactgtatgtcctcacttgcaagcaggagctcaactatgttttttaaaaatttttattttattttatttttgagatggagtctcgctctgtcgtacaggctggagtgcagtggcgcgatctcggctcagtgcaacttccacttcctgggttcaagcaattctcctgtctcagcctcggggttcaagcaattctcctgtctcagcctccagagtacctggg

SEQ ID NO: 748496 - DNA, 590 bp, Homo sapiens
acaaagggacttgatgagctcgacataatacatcaattcagaaatgccaatggggcatttcagaagatttcatgtgaggtgacagagaggttccccaatgctgaaaaacaatgcaactcctctgccttgagatttctgagcttgtttgcaataactgcctttgcccactcatgccatctcattcagggaaggctctgatgtctttccacaattgctctgctctgatgtggacttgaaaacactcctccacatggatgcactaaatcacccagcattaaatgagacatctaaggattctgccactcaccaaatctgtcaggttttctcagctcttttaggactccattgttgkgcaaagccactacaatcctattaccagctggcatatgatcagatgataactaaagtgaacacaaacacttaaacggcacaaggaactgctgaggtctcactcttgggtaacgcagcccaagagattttctgacacccgatccacaagccgaacaatcacattgcaaaatgctttcaatgtccaggaacaaccattcaatcggccatcatgtgcctgtcatctggtcctgagtgcttct

SEQ ID NO: 748497 - DNA, 498 bp, Homo sapiens
gtgtgatctgatttgaagggtttatttctggtaaatcagcattctgtcaggttaactcttgtcctcagaagcctgtacctaccacagtcctccaaagaggtggtgaggcctgaaaatgcttaccagttcagaaaggcaaggctgagcttctgttgtgtgcgtcagcttccatacaagttgcatatttgcaaactcactagagtcaccttatgaatcactaacctcatttatgctcagctagctcagggaaccacaattctgcttgtattccaaataataattttacycaggggagaaggctgtttggattgactgtggcaatagtttcaaaactggtgtttgtcagcatggagcttggtgttttatatactattccaaaatctaatggaataataaaggtcatagagatactatgaaaacacagctaacttttttttttcctgcttcagtgtagaaatgtgagttctcctatttattttgttgtagttgctgaatgca

SEQ ID NO: 748498 - DNA, 606 bp, Homo sapiens
agaaaagggggaaccggtattacccacacactgtgaattcacgtataagtagtgctagagtaatgttgagatcctgacaaatgacattattgcttggtggctggaacatgggaagaggtgttggctcaccattcatctcttgggcagtatttccagggtcaaggcacggaggataagctaatcaatgaaatcagggtaaatgagctttcacagggacactgaaaagaatgagaagccccatgtgaatggtgagttcaatcttgtctctttgtctctctccctggagaattttagagctgggaaaagttcgggaacagctggacaacagaaattctgattccctcagcctcatcagaaatcgggcactttatagagacattgtcagtgtggttattaacagaacaaagcaaagcatacacaatgtgagacrgatagacctgaattagaatcttagccttagctattaatagcaatgtgtctaggcaaatcacttaacctaagtttcttcatcttaaataaggataatacctcactggactgtgacgaggattatagaatgagcagaaaacactgagcatatgcctgaacgccagtcaagtgctcaag

SEQ ID NO: 748499 - DNA, 542 bp, Homo sapiens
tttgggtactgtaggaagccagtggagcattctagtcagaggaattacattttctgattgtcattttaaagctgccttagtcctctcaggctgctataccaaaaatatcacagactagggggcttataaacaacagaaatgtatttcttacagttttggaggctgggaaatcgaatatcaaggtgccagcaaatgcagtgtctggtgagagcctacttcctggctgatggacagcacccactccgtgtgtcctcacgtggtggaaggagctagctagctttctggagtctctttctatatgggcattaatcccattcaagagggctctgcccattaatccttgcagaatgccctcgtggcctcccaaaggacccacttcctgataccatcacmttagagggtggggtttcaacataagcattttgcagggatacaaacattcagaccacagcaaaagcccatattcatagagtgcctactgaaaacaaagcaatatggcaagtaaagcatagagcccaaggctttcctatagtctttactga

SEQ ID NO: 748500 - DNA, 542 bp, Homo sapiens
tttgggtactgtaggaagccagtggagcattctagtcagaggaattacattttctgattgtcattttaaagctgccttagtcctctcaggctgctataccaaaaatatcacagactagggggcttataaacaacagaaatgtatttcttacagttttggaggctgggaaatcgaatatcaaggtgccagcaaatgcagtgtctggtgagagcctacttcctggctgatggacagcacccactccgtgtgtcctcacgtggtggaaggagctagctagctttctggagtctctttctatatgggcattaatcccattcaagagggctctgcccattaatccttgcagaatgccctcgtggcctcccaaaggacccacttcctgataccatcaccttagagrgtggggtttcaacataagcattttgcagggatacaaacattcagaccacagcaaaagcccatattcatagagtgcctactgaaaacaaagcaatatggcaagtaaagcatagagcccaaggctttcctatagtctttactga

SEQ ID NO: 748501 - DNA, 647 bp, Homo sapiens
gtgcaagaaactcaatatgttcatggtccattcatggaggagggaattggtcgcttggtatactgcttgtacttaagagtttgaaataattcttttctttaatatagagtagtaaaacatctgagcactgcttttatttgtacgctttatatttcatagaagtattatgctcatatattatagatacatgtatatggattatagttggctatgtggtaatcagaaacacaggtacacagaaaatcaaatactttggttgcttttagcttttgctatggttcgagtatgatgcttggagtttatatgttgaaartttggtccccccatgtgtcagtgctgagaggtggggccttaaaaagtggttagatttttaagaggcattaatgctgctcctatgggcctgggctaattgtcacaggagtgagcgagttctcaccctagtgggactgcattagttgtctccaaagcaggctgttgtaaagtgaggccacctcttgtgttctgcccccttttctcacatgccaacttcccttttggcttctctgccatgatacgacacagtatgaaagccctcagcaaatgctgctgccatgcccttgaacttctcagtcttctgaactgtgagttaaataaacgtctatttttta

SEQ ID NO: 748502 - DNA, 647 bp, Homo sapiens
gtgcaagaaactcaatatgttcatggtccattcatggaggagggaattggtcgcttggtatactgcttgtacttaagagtttgaaataattcttttctttaatatagagtagtaaaacatctgagcactgcttttatttgtacgctttatatttcatagaagtattatgctcatatattatagatacatgtatatggattatagttggctatgtggtaatcagaaacacaggtacacagaaaatcaaatactttggttgcttttagcttttgctatggttcgagtatgatgcttggagtttatatgttgaaaatttggtccccccatgtgtcagtgctgagaggtggggccttaaaaagtggttagatttttaagaggcattaatgctgctcctatgggcctgggctaattgtcacaggagtgagcgagttctcaccctagtgggactgcatyagttgtctccaaagcaggctgttgtaaagtgaggccacctcttgtgttctgcccccttttctcacatgccaacttcccttttggcttctctgccatgatacgacacagtatgaaagccctcagcaaatgctgctgccatgcccttgaacttctcagtcttctgaactgtgagttaaataaacgtctatttttta

SEQ ID NO: 748503 - DNA, 491 bp, Homo sapiens
tatgggatgttttatgggtcaggaggccaccgagggaacttgtgggcacacctgtttcagaaccagacatctgcctggtggcagattaaagtgcagcgcaccagcatggcacatgtatacatatgtaactaacctgcacaatgtgcacatgtaccctaaaacttaaagtataattttaaaaaaaataaaataaataaataaataaataaaataaaaagttgggaatttaaagagtctccagtaagagatggagagtctgagattttgtcctttttgccctgctgtggaatggagatgcctyttccatcctaggatggttgctagtccatgtgacccttgtctgaattagaaatgggtagattctgcaaaatgctttacttttgtcacaagattttcaccaataaatggacagtgatcacagtatgaatggcattccctaactcacctgctcacactatagtagtgttcatcagaatatcagaatcttatgg

SEQ ID NO: 748504 - DNA, 567 bp, Homo sapiens
attttttgggaaaaaataatgctatgtagatacaattactaacataggggaaattttctagcaaggagcttggtatggaataaatgctcattgcacaccaggccccttttcctccatcgctgctccccacactgtcaccctgcgtttgtctcccttgtgttctattcagccaccttctgtttcctccttggattccgagagtttgtttgttggttcacgtttctcttgttttcctgtrtgtagtctgtttttgaacctcgggcaaactctggcctcatcattcagtcatgtgtcactgagtcctgggctcatggttcctacagctagcccaggaagcagaagacctgaacataggatattgttcaatttgggtaggagttgtccagtggcagtgacacaagcattagttgacagttttgaccttagatctcaggatggacttgaactttaggaacctcgataagaaagcatctggccaaacccaaggaaacactcttaatgttccttgcttccctaagcttagatgtcagtttacaaagtgagacatgcttgctcattaaagaattg

SEQ ID NO: 748505 - DNA, 575 bp, Homo sapiens
atgttgagctgatcttggctttttgagtgtttcattggtattgagatgggttcctgattcatttgagggccctttataacaaatttaagggcagtttgagactcaacgtatttcaagtgattgaaccccatggcaagggtttcaggtcaccgtggcttctacttagaaatcttgcattctttcatggtttatrgggatttaacacttttatgttgggaaatgctctatagtcttcttgttacttgagattttttttttcttccttgagaagtgttagcacaatgccagccgagggtgtgtatatggaaggaatttgaccctttccctgtgagttagaaaaatgctcagtcagggggatttgatagatagtcttaattgcatacaaacccactcttgtaagttaattgttaaaatcatttttttcctagaaatgtagttaaatttctttaattggaatcccagtaaattgatatctgtgatcattagacagacactagatatgcttttgtgtttcagaaaagcaaaggaactgctaagttaattaataatgtaaataaagttagaaagcaagtgct

SEQ ID NO: 748506 - DNA, 601 bp, Homo sapiens
aaacaacctacctccacagggcgattgtgtgattcaagtgagaccatgcctgtgaatggacttagtgaaaaatccaaactgcagaatgtaggaggtgctcagaacataattttttcttttctcctggacacaacttagttaaatgagaagggcactttcttgtgggtgatctgaatacaatttcaactgtcctcatttcgagatacacatcgcaggcagctgttgtactacacaccttatcttgaaggaataatgcatgacaccactgtgcataatcaaaacttgagctccaatttgctttcagattcagtgacaaccatactgcgaagtccygtagggttgtgatgcaagatctttaagtttggtggtaaaaaggataaattactgtaatgagaagttttcctcatttcaaatctctaaggacatcactgagctttgaaaaaggagactcaaaaggaaaaatataggtagagagctggcaaggcacgaagacaagaagctctgtttcacaatactgctttgggctagtctagcacacaagcaccagctaggctataggaatttagataatgtttacccatcgtagactttgaatagaaac

SEQ ID NO: 748507 - DNA, 560 bp, Homo sapiens
tttcctgattgttcctttcccttaggaaaattaacacatagtctctctctggtctctcatagtctctcatttctctttaattttctgttcctgctactccacgcctggtcctattcctatttttcagtgaaaattattcacagagaaggaatccaatgggtccatcttatcctatgtgggaaagagctttttgctggccagcacatggagtgactgtctttgggtcaggtgcacattgcagtctgggttgggtacagtagacctggtggtctacaaggtgaaccactacctcaraaagaggtcatgggcatgactgagggtgactgctcacagtactgtcacagagttagagacactagcatgctttctcatatttctttgaaaagaaaagcaaaaacctgggactaacacagactcttcactttctttttatctttgggcagatccattcctaaatttttccagacaccatcttgaaagtcccccaggataatagaatgagtaagaaacagactacagaatgcagtgggtgaggaaaaacttttgattaagccaaaagc

SEQ ID NO: 748508 - DNA, 534 bp, Homo sapiens
taatgcaatcctggacagtgcttgtgagatggaatctgtataccgtgagcagccactgacagtcctcatcattcttgcaacactttccttagatttttgactttctagtctgaacttctgggatggaattttgtttttttgagaggggattgggataattggagggggtggatgataagaagaaagacagaatggtgtcagtacctaaaggaggaatggtagatgataaacatgaagatgactttggcagagtctatacaggctataggaaggctctaggagagtctagtccctgtcttgggcttcacccwgaggcacttctccaagccaggcctcctttctgatgaccaaggagaggagctttatttcaccaaagcatcaaaaggtcatgtgattcatgcattgctctaagacatgcattgctctaagacatacagtgctcagacaagaagagggaaattactgacagtaattctgtgcattgacgaaaataacaccacgggcaagctctttactttggtggcatcacatcag

SEQ ID NO: 748509 - DNA, 618 bp, Homo sapiens
acctgaggtcaagagttccagactagcctgactaacatagtgaaaccccctctctactaaaagtacaaaaattagccaggagtggtggctcgcgcctgtagtcccagctattcgggaggctgaggcaggagaatcgcttgaacctgggaggcaaaggttgcagtgagccgagatcacgccactgcactccagcctgggcactgagcgagactctgtctcaaaaaaaaaaaaaaaaaaaaaaaaaaagaaaagaaagaaatasaaaagaagtagggtaaaggaaactcctattgtttgacagcctcctgtgtgcatttaagcaccatagaaaccttaggagagatttcttattttcattttcaagcatgacagttgtgaaactgtggccctcagagtattttatttcatattgctattttttttatgtccaagatcacacaattggtagttaacggaactaagtttagaatagagttatttgtatctgacttcaaacaggcaacaatacccttagctccatgtcctgctggagattttcttagttcaggaacatttcttttctctttaagataaccttcactatttacaatttttgagcaccataatttccttaaaaag

SEQ ID NO: 748510 - DNA, 618 bp, Homo sapiens
acctgaggtcaagagttccagactagcctgactaacatagtgaaaccccctctctactaaaagtacaaaaattagccaggagtggtggctcgcgcctgtagtcccagctattcgggaggctgaggcaggagaatcgcttgaacctgggaggcaaaggttgcagtgagccgagatcacgccactgcactccagcctgggcactgagcgagactctgtctcaaaaaaaaaaaaaaaaaaaaaaaaaaagaaaagaaagaaatagaaaagaagtagggtaaaggaaactcctattgtttgacagcctcctgtgtgcatttaagcaccatagaaaccttaggagagatttcttattttcattttcaagcatgacagttgtgaaactgtggccctcaragtattttatttcatattgctattttttttatgtccaagatcacacaattggtagttaacggaactaagtttagaatagagttatttgtatctgacttcaaacaggcaacaatacccttagctccatgtcctgctggagattttcttagttcaggaacatttcttttctctttaagataaccttcactatttacaatttttgagcaccataatttccttaaaaag

SEQ ID NO: 748511 - DNA, 591 bp, Homo sapiens
gaaacataacttttataagatgcttctgttattactagctgtcaggcgaaaattaaatgagcttgctccgagcttcagatttatctttctgtctacaaaaggctatgtgagagactgaggagatacatagcatttatgatgattctgtaaattagtcccatcaatctgtggtaaacataatacatcctctccctgaagctaatggcttgggccagcaatgatactttgcagcccagcactctctcggtgtctgtttggaaaatacctctagctaccaggaacttctaccagttagtgtgcggggacgcagttgtttactcagaacatgcrtggcagcatgaagcagtgcgtgcaccatcacagattggaaaaagtgtccagtttaaccggtggaatatagtgtctggttcactgtagtttcatggcaatcagattcagaaatgaaacatgaaactgactcaagtgatgtggaaggcccttgccagcactgtctccgaagggcttatttacagtttctgtaccaggaaccatcatccttggtgtctcggtgaggcctgacgccacttcagcctcacgataagattatcaatc

SEQ ID NO: 748512 - DNA, 662 bp, Homo sapiens
atatatttttgtgggacaaattttaaggacaaaaaatctgcaaagaaatcttaaactctacttactaggtttattgttagtgttagtatttatattgtaattattaaaaataaatacagtagtatatagtaggtaagtacattattgtaattctaaaccacaatttttactataaaagaggtgtaaatataaaggtaagaaaaactctgtgatatatttgaattgactctattaaatgaattggtgatttcagataatatatttcctagctctstgcattgaaggcgtctggagaatgacacctcattaacaatatacacattcagcactaatgtcttgatttctaagtaccgttttctacccaaaggaaacagtactttttatacaaatggctacttccagatctggattagggaaagactaagatgagtctagatcatctttttggagcagaaagcaaggagatgctcaaagagtaatgggaatcatgtcatagagatgcttgagctggcctaaagggatttccacagtcatgtaaggcaatttaagcaccaaaaagaacagtgacaataatggattatcacataatgataaaaaagaaatgaatgaagcttcttcaaactcttaattctgataatttgcattttctgtaggggttttat

SEQ ID NO: 748513 - DNA, 636 bp, Homo sapiens
gcaagctgtctagggaagaagcaaagattacagccaaggcacaatgtcattgaggtattttgctgttggccaaaatgaagtgatgatatattggtgatctaagcattactgagactgacacggaaattcttgtttacaaggaataagcctggagaccaagaattcaactcatctttctagaagaaaagactaataggagagaagcccaggatacccactgcacatccaaacacccaacagggtcacagtgcttggttcagcygtgcttgagcctgcttggtgctgcccagcctcagaagcccctaaaataggggggacatcaggattaggaaaagtagcaaaaagccctggctgccttccttctgattggacagtagagatctgagcttttaccccatctttctctgcccccacacctcaggctgaagagggaaatgaagtccaaagctctctttatccctctccctcttcctggttcaaggtccccttccttaccctggtaccagatacatccctctttctgaatgtcttcctctccattttctgccacagggaagagatgtatcaatctttgctaaaatgtcagctaaaaaagaaatatggtactaaccatctcagggatagctggaatttcaa

SEQ ID NO: 748514 - DNA, 619 bp, Homo sapiens
aactttacacattgcagtatgcagtatactctcacatttctcctctcatttagttctcatagcagcttgagaggttgggattcatagctccattttttttcttttttttttttttttttgagacagagtttcattcttgatgcccaggctggagtgcagtggtgccatctcagctcactgcaacctccgcctcccaggttcaagcaattctcctgcctcagcctcccgagtagctgggattacaggcaaccaccaccatgcccagctgatttttgtatttttagtagagatgggatttcgacatgttggccaggctggtcttgaaatcctgacctcrggtgatcctcctgccttggcctcccaaagtgctgggattacaggcgtgagccactgcgcccagcctatatctccattttgcaaatggattgaactgagattattgagtcagtaagcagtggatcataggcataaatccctagttttgtggctcaaagttcacagcctccatgagggctccatacctttgttgtgtcttttcttctatcctaccctaaagcaggcattcagcctatcttgctagaacctcgtgacatgtaatctctgtaggtttgggctacgg

SEQ ID NO: 748515 - DNA, 603 bp, Homo sapiens
gcgtagtatatgggccagatagcaccgtccctcatggcaagttccctcacagctttccttaggggagggagttcctgaccccttgcacttctagggtgaggtgacaccctaccctgcttctgctcaccctccgtgggctgcacccactgtctaaccagtcccagttatatgaaccgggtacctcagttggaaatgcagaaatcactggccttctgcattgktctcgctagggagggagttcctgaccccttgcacttctagggtgaggtgacaccctaccctgcttcggctcaccctccgtgggctgcacccactgtctaaccagtcccagttatatgaaccgggtacctcagttggaaatgcagaaatcactggccttctgcattggtctcgctaggagctgcagaccagagctgttcttacttggccatcttgcctgggagtccccttgtctacactgttataagcacataaagaagaaacccttcatgattgcaggcaggtctgagaaaaaaattatttttattattgtgtacatgtacatttgtaaatgtatatacaaaatatcaatactctttgatggaatgtaacagaatccagaat

SEQ ID NO: 748516 - DNA, 653 bp, Homo sapiens
ataaaatttggctttaccattaggtcagtattgtaataaagcaaataaagaattttcagaatgtagcagtctgacaattataagcaatgtaaagcgttaaggaaatacctcattctctgctttaaaaaatatctccccatcctatatttattatttatgtgtccatatgttgtattttttcaytttcatctaactttaaatcctaacataatttgtactacttgaaagaattattgccagtcaaaatgccatgtgtggactgtcagatctagaaaaatgcttctaagtcattcactctagatccctcatcatcacaacaaggacatcagcctcagagtggttagaggggatacggctgggaaggctgactctgggaaaaatgaagaatatcttgtgcacaatggaaatgggaggactcaccctaggggaagagagagtggcagagaaccctccctgacagctgtgtgtatacactgtttcctgatgttaaaggagaaaatcactcttacccatccccaggctaggacctaacaatgtctattctaaaaaacatgaaaaaaaaaaaaaaaaaaagttaggaaagaaaaacaatagcaagcttgagagagagaatacagcagtttgaccttccaccatgcacccttcttggggaa

SEQ ID NO: 748517 - DNA, 653 bp, Homo sapiens
ataaaatttggctttaccattaggtcagtattgtaataaagcaaataaagaattttcagaatgtagcagtctgacaattataagcaatgtaaagcgttaaggaaatacctcattctctgctttaaaaaatatctccccatcctatatttattatttatgtgtccatatgttgtattttttcactttcatctaactttaaatcctaacataatttgtactacttgaaagaattattgccagtcaaaatgccatgtgtggactgtcagatctagaaaaatgcttytaagtcattcactctagatccctcatcatcacaacaaggacatcagcctcagagtggttagaggggatacggctgggaaggctgactctgggaaaaatgaagaatatcttgtgcacaatggaaatgggaggactcaccctaggggaagagagagtggcagagaaccctccctgacagctgtgtgtatacactgtttcctgatgttaaaggagaaaatcactcttacccatccccaggctaggacctaacaatgtctattctaaaaaacatgaaaaaaaaaaaaaaaaaaagttaggaaagaaaaacaatagcaagcttgagagagagaatacagcagtttgaccttccaccatgcacccttcttggggaa

SEQ ID NO: 748518 - DNA, 616 bp, Homo sapiens
gcctctaacatggataactaaaaactattagctacttttatagaatcatagatccacaaagttttagaaacaaaagttacagaaataatccctcgattccaaaaatatcggtaacaaacaaaagggatatttagttaaaaatattactttaaaacttgtaagacctagtaactgaaagttttcaaggttcaaaaaaactaaaaaacctaaatgtgttctgtatacaaactaattgttaagactctgcccaaactgaagctgtaycttcacttttgttcttctcttgataaacttttattttaatccagatatcaagatttctgaatttaaaggaaagtctgcatatgaaaggagcagaattctctgtcactgatagttcactgaccttattagagaaagtatagataggactcttgatatctgctgacttgatgagggtcaaggcctctggagctcagcagcagccctgacttcctcttacaagtggaaacttaccaccccaggcccagctcagcccaagtcccaacttcagtctcatctcagccccaggctcacccagcctaagtcccaggcccaggcccaaacccaggaccagactcaggcctggatcatgtct

SEQ ID NO: 748519 - DNA, 647 bp, Homo sapiens
aatccagatatcaagatttctgaatttaaaggaaagtctgcatatgaaaggagcagaattctctgtcactgatagttcactgaccttattagagaaagtatagataggactcytgatatctgctgacttgatgagggtcaaggcctctggagctcagcagcagccctgacttcctcttacaagtggaaacttaccaccccaggcccagctcagcccaagtcccaacttcagtctcatctcagccccaggctcacccagcctaagtcccaggcccaggcccaaacccaggaccagactcaggcctggatcatgtctcactcagcctcagccccaggccaagacccagatccagcgtcagaacaagccccagttccagcctcagacccagccccagctccagcttcagacccagacccagatgcaggcccacacacacgctccacagcctggctcctgcactcaggtctcttttctttgccctgtgcccttaggattcatatggatactaaggcaaacactacctgcttttaagagagaaataaaatggtgtgaagtagggatatagatgacttatgacagtaagagaaatctgacatagttgactccatcttgcttctaaccaccaagctatccttggtcattcctgg

SEQ ID NO: 748520 - DNA, 550 bp, Homo sapiens
tgagaagagtgctggagtatttgcagggaacagctggttggttagttggtgatgggtcagctgcaggtgctctttttaacctggaaagatggtaccaagacttgtgttctcaaagtttggctgcagtggaggtagcgagaaggacttggaaagggatttcgcactttggcatgagacttgttgrtttttaggaagacatattctcctggaaggagtgtttggtcagtggtgccttggtggggttttgtgggggcctggtcagcttgttcgcagaggagatgatggatgagggagagtgttgggaggtattctaattgatactcaggagggggtctgttttgtaagaggaaagggcatccatacattaagtcgaatggactgaggaaggagggggcctttggactggctctgatatgagccagtgctatgggtaaaatggaggtctaaggttttttaacctcaagtgtgagtttggttaactgagttttgagaattccatttgccctttggacttttccaaatgactggggctggtatgggatatggaggc

SEQ ID NO: 748521 - DNA, 624 bp, Homo sapiens
atttaattgtagaagtattttaaccactcacaaatgtaatttttcctccaaatgtcatacatttttcacttccacaaatggagtatgaatgaattacattacagcccctcctctatactacattatttgatatttttatatatacatttttgttttaatgtatatatctttggccactatttagattaaacatcagtatcttgtcatttttagggatctgctgtgtatactggaaaattttcctgtgtatattgtaagtgttgtaaacattttctcccactttgtaatttgttttttaatttttaatttgtgggtcattttattgctgagaaagttatttagggaaaaaggcaggaagttctgatttatttgctttaatttcacatagtatacttatacgaaaattgttctccttatgtttttccaagtwtttgtcttaaaaatattcaaaatttaaaaaaaaaaacatagttctattccatgtattgctccacatgatgtggatttagcagtaaattagaggagacttttttaactaaaagactttcacaccatggtagggagaataatggacccctaaaaagatatgtctcccaatcccagaaacctatgaatatgttacct

SEQ ID NO: 748522 - DNA, 641 bp, Homo sapiens
tcctgggccagaagggaacttgctgccatgaagcaaaagacacaagctgggctagattcaccacttgcagattaaaagccccttgaccttgaataaacattagcagtaaccaggcaacagtcaccacaggccttgggcsaaattctatattatgctggcttcaggtctgacccataacagttacaatggtgatggccaaaagggtactttgtcttccctcccccaactccaggtagctcagcatggagagagacaccccatttatttgggagtaaactaaaagaagagaacaagagcctctgcctgataatccagggaattctcctagatcttacctaagacccccaaggtggaagttctacaagagaaacagcataactgccctttgggtgtcgcctaatgcagatacagcttcagtgactaaatagttagattacaacactcaattctctttgaatacttggaaagccttcacaagaagtatggatacaaacaaatctacactgtgaagattaaaataaacacctcattcttcaatgcccagacatcagcaaatatccataagcattaagaccatccaggaaaaccaaccctcaacaaaaaactaaataaggcaccagtgatcaatcccagaatgacag

SEQ ID NO: 748523 - DNA, 605 bp, Homo sapiens
gaatcaattatactttggctcatccatttcttaaaaacgattttagattgctttataactctcatctatttgtcagattactctgccattatctctgtgttcactaaagctaggacaaaattgtgtttaaacaacagtttactttaatatcctaaagttcaaaagaagataaatgaacaaacactatgcaaatatgcacttagatattagcatccttgtttactttatactakaatctaattctacttacctataaaatagtacgctttatatgatgggaatgggccagaaattatattaatttttctcaaatattttaaaagttatgcaaccttcatcttactaactgaacctgctgtcagcatagctaattaaattatcatgccaaccaactttgttatgcagcaggaaaaaaaggcaataattcatagattactgcataaatcgcttaattgaactgtttgcctctaagctcattctcctctactccattgtcaatgctgccatcaagttgatttccttttacttcaattgatttgcttctttattcactaggcgcatggacagaatttgtatcaaataaacttcacgatcagactgtcaag

SEQ ID NO: 748524 - DNA, 518 bp, Homo sapiens
ttctcaaaacattcttataaattctatggttttgaatttggtaatgaaacagagcccacaagccccaaagtgaagcataatcttctgggttcttggcttttcccaagaaagaattcaaaggtaagacagaagtagaagaaaacagctttactgaagaggcagtgttaaagctccatgagtgttcctgcaaagcagkgtgacctcacaggcagagtagcagctcagggcagtttttcagtcatatttgtgcccacttttgattgcatgtagattaaaggggagttcatgcagaaatttttaggcaaggggtaataatcattgggtcattgccatgtaaaggggtggtaactcctagctgttgccatggcaatagtaaattgaaatggcacaatggtgggcatgtctgattgaaagttgctttcaccccaggcgtgtgttagctgtcactcaatctggtctgatgtccaagccctgcctctggagttgagtcctgcttcctacctcatttcccccctcac

SEQ ID NO: 748525 - DNA, 591 bp, Homo sapiens
aactctctgttgttcaacctagcccgtgggcttccttattcttgtaaaatcatcctgaggcttgaaacaattcctagcacagggtttgctaaagggttaatgaaaaggtttaaacattaagtaagaggaaatttaaaaggttctttctattcagagttaatggattttgttttatttagaataagtagtgactggccaggtgcagtggatcatgcctgtaatcccagcactttgggaggccgaggmgggcaggtcacgaggtcaggagctagagaccagcctggccaacacagtgaagccccgcctctattaaaaatacattagccaggcgtggtggtgggcacctgtaatcccacctacttgggaggctgaggaaggagaatcacttgaacccaggaggtggaggttgcagtgagccaagagtgcgccattgcactccagcccaggtgatagtgtgactccgtctcaaaaataaataacaaataaagaataagtagtgactatttctatgttatttatacttaattacgttacaagagaattaatagatacagccactagtttggaaaggaaaatcctacaactttgtat

SEQ ID NO: 748526 - DNA, 591 bp, Homo sapiens
aactctctgttgttcaacctagcccgtgggcttccttattcttgtaaaatcatcctgaggcttgaaacaattcctagcacagggtttgctaaagggttaatgaaaaggtttaaacattaagtaagaggaaatttaaaaggttctttctattcagagttaatggattttgttttatttagaataagtagtgactggccaggtgcagtggatcatgcctgtaatcccagcactttgggaggccgaggagggcaggtcacgaggtcaggagctagagaccagcctggccaacacagtgaagccmcgcctctattaaaaatacattagccaggcgtggtggtgggcacctgtaatcccacctacttgggaggctgaggaaggagaatcacttgaacccaggaggtggaggttgcagtgagccaagagtgcgccattgcactccagcccaggtgatagtgtgactccgtctcaaaaataaataacaaataaagaataagtagtgactatttctatgttatttatacttaattacgttacaagagaattaatagatacagccactagtttggaaaggaaaatcctacaactttgtat

SEQ ID NO: 748527 - DNA, 501 bp, Homo sapiens
tttgcattgtacaaataatccattgttctttcaagacagtttggaaaacaagtacaaaaagaagtacaaaaatgagaaaacatgacctagattgccgttcccctagaaaaacagctattgatgtttttcttcatcttctcctcctcctcctcctcttttctcttcctctcttttttaagtggatttgtaattggctgccctgctttttaaaaaataaaacatcataacttatgtctgcacatttagataagctctattggagacatartcatagtaaaccctgaagtcggcttggtgggaatttgattatagcgaatccacagtgatgtttcagttgcctgagaagcttgggtgcattcatcccacccactgcttgtccaagagaggtggggaagaaacctcagataatagctgataaataaatggaattttgtgccttggaagtgagaaaactagggtcaatacaccatactcaaaagaagcttcaggaggctgtctgtt

SEQ ID NO: 748528 - DNA, 501 bp, Homo sapiens
tttgcattgtacaaataatccattgttctttcaagacagtttggaaaacaagtacaaaaagaagtacaaaaatgagaaaacatgacctagattgccgttcccctagaaaaacagctattgatgtttttcttcatcttctcctcctcctcctcctcttttctcttcctctcttttttaagtggatttgtaattggctgccctgctttttaaaaaataaaacatcataacttatgtctgcacatttagataagctctattggagacataatcatagtaaaccctgawgtcggcttggtgggaatttgattatagcgaatccacagtgatgtttcagttgcctgagaagcttgggtgcattcatcccacccactgcttgtccaagagaggtggggaagaaacctcagataatagctgataaataaatggaattttgtgccttggaagtgagaaaactagggtcaatacaccatactcaaaagaagcttcaggaggctgtctgtt

SEQ ID NO: 748529 - DNA, 620 bp, Homo sapiens
aatagtaagacagataaagagggacatttcataatgataaaaggttcagatgatcaaaaggaaataacaataataatagtaaataattggcaaattacagaacatcgaaatacatggagcagaagtgccataactataaagagaaatagacaaactcaccattagaatagattttaaactctgttctctcaggaattgatagaacaagttgtcataataccactaaagatttagaaggcttgaacaacataactaactaamttgattgagtcttccttcatagaacgttacctgcggtgattgcagaacacatgttattttcaagtatatatggaacagtcaccaaggtaaaccattttgaccataaaacaagcattgctaaatttaaaaggattgaaatcatatagagtatactctgatcacatcagaattagattaaaaacctaaccaaaagtatatctgaaaaattcccatagtttagaaaattaaacataatattcctaaatagtccatgaaacacaaatcacaaggtaaaatagaaaatactttgactcttaaaaaaacaaagcacaatattttaaaatttgtgaatgtagctacggaagtatctaaaaggaaac

SEQ ID NO: 748530 - DNA, 574 bp, Homo sapiens
ttcacaacattgggataggtaaaaatttctgagataggacacaaaaagcaggatccatgaaatttttaaagtatgaatttgattttgaaattaagaacttctgctctttgaaagagacttttaagcaaaggaaaagacaacacaagaccatgacaaaaaatctgtctatctatctatctacctatctatctatctatctatctatctatgccattctcctcagcctcccgagtagctggaattacagccacctgccacacccagttatatatacatatgtctctgacaagggacatgtgtagtcctttgcacagacaaagaactcttcttacaagtcawcaataacaaggcaaactaatttaaagatggacagaggctgtgaacaggcttcacaaaaaagatatgcaaatgtttaataaatgcataaaaagttgctcactacctttagtcatcagggaaatgcaaattaaagtcacactgagataccactacacaccactagaatggctcaaaataaaaagactgacaataacacatgtcgatgaaaatatggagcaactgaaactctcataca

SEQ ID NO: 748531 - DNA, 632 bp, Homo sapiens
gcatggcacataataagtattcaggaaatctcagctattattatttttataaggagagaaattgagttactgcagaggaggtgaacatttttggcatgaaggcctgaggttttgcatgaggatgtcatgtatgaaagagaggaagtagagtacataaaccagagaagagattccatttagaaagccattagatggaggtgtggtggtgggtgggagtggtgaggagagggagctgtacaaacgatgaattaaggccaagtggaagagctttaatttgatatgatgaacaacaatagctaccgcataacaaggggatcccgtgaaagcagctttcacggattccctgggactgcattcctcaataaagtattatcacataaatttttacttctggctttaattcttagggaaaccaggccaagaaagaagaataaactytaagaaatactacgatggaggaatgaggacttggtagtggtgtaactgtgtatggcaaagattagggggaagtttaaagattagctccaagtttgtgggcctggggacctggggatggaggtggagtgaaggtaattttcatagtggtgaggaaagggggaagttaagaatcagccctagtcctccttacggta

SEQ ID NO: 748532 - DNA, 634 bp, Homo sapiens
tatctctaggtacatgcaagaagtttgtggatacagagcagcagcaggaaccagacacttcttatcagtggggtgggttggaacttcaggaagcgccttcacaacagtgccatcctaattggagtatagacggatgggcctctctgaaaccagagactaagtttgggtctctatggtccagtaaccttccttgaaattccccctggaacactaggaacctatttcctacatgctaaatctctccagctcttcaaggagcctcaacacagtgtgcctgctattgggcactggggactgaatcargaagaagaggttgatgatggtgggtgggtaggaaaggccagtgaaaaagatgttgccaaatgtgcaggtgtcaaacctgtaagacttggatattgtaaaaatcctagctgtccaattctatccactttccccgtgagggccagaaagtttgagtgactcaccaaaaaaatacatagcacatccaggattcaaacttgcttcctgtccaagagtaccctgacttttgccccagtcatacccattttgtaattggctctcagttgaggtgggtacccagatgcccagcatagtgagatcatgtcttaggcacagtagctcctatgtgctcccc

SEQ ID NO: 748533 - DNA, 625 bp, Homo sapiens
aaggtgaaaatatcacaaaaatttgggaagctagggctgggactcttctcctctgccatcagttagcataacccaggtttggaagacctctgtgcaacaggctgggaaaaatccaggggcagtttctaggtggtatttccttccttcaagtaaggtsactccagaaagttaaaggtcaagggatagatgccaggtgtaaaagtttctttgctttactgtgaaaccttttcatacagaaaaaatgggtaggctgaatgaggcaaggagcatgtggctggttaagttaaattctgcaggccatcatatgattccagaatagaacgaggcaaaacaaagtgtggagtccatttggacagataattacaactgaaatttaaacaatattatagaaaaatctagacattaggtttacattatacttggtctttatgctttacttcatgtgagaggagcaccttagtcatataaagtcagagtcccagaaaccttagtctcttgttctcaaaagctaaggggaagaataaacattttagccctcctgaaattattctatttatggccctgccttcagctaggaagacacatcctaggttggtcatttaggtcctctagcaatttcatccta

SEQ ID NO: 748534 - DNA, 494 bp, Homo sapiens
atttgagatttgtactttctgacgtaaaatgaaattgaagaatagctattgcagcttgcactgatgtgcagaattgccccttaattgctttgccactcttctcatatttattttttagttcttggcattttatgttctagattttttttttttttgcttaaattgattgtataagtaatattttgtttcacttcttttggcatcttgtatatttcaggtgttaaaaactggataaaaatttcttgacatctaggcacagcaataattagtgacccataccaayattgttttcttcatgagttgtttttaattaaaatatatagaaatatatcaagacaggtaaatgtaaaggctttgcagtctttataacctgtgttaaaagttctctttggaaataaaaactattactgggacaaaaaggaaaacttggtcatttaaaatctatcttctaaggaagggggaaaatcctggttttaaatagcccatctggcctt

SEQ ID NO: 748535 - DNA, 550 bp, Homo sapiens
atatcttctttgatttcttttatagtttttctcacataaagcttatatataatttttagagttacacctctttctctctctctctttccctctctagtattgatggaaataatggtgtgttttttttgtttgtttgttttttgagacggagtctccytgtcgcccaggctggagggcgtggcgctatctcggctcactgcaggctccgccccccggggttcacgccattctcctgcctcagcctcccgagtagctgggactacaggcgcccgctaccacgcccggctaattttttgtatttttagtagagacggggtttcactgtgttagccaggatggtctcgatctcctgacctcgtgatccacccgcctcggcctcccaaagtgctgggattacaggcgtgagccaccgcgcccggccggtgtgtttttaatttcaaattccaactgctcattgctggtatataggaaggcatttgacttttatctattatgttatatcctgcaaccttcttcattggtttcaagagttgtttggttttgggggtgg

SEQ ID NO: 748536 - DNA, 550 bp, Homo sapiens
atatcttctttgatttcttttatagtttttctcacataaagcttatatataatttttagagttacacctctttctctctctctctttccctctctagtattgatggaaataatggtgtgttttttttgtttgtttgttttttgagacggagtctccttgtcgcccaggctggagkgcgtggcgctatctcggctcactgcaggctccgccccccggggttcacgccattctcctgcctcagcctcccgagtagctgggactacaggcgcccgctaccacgcccggctaattttttgtatttttagtagagacggggtttcactgtgttagccaggatggtctcgatctcctgacctcgtgatccacccgcctcggcctcccaaagtgctgggattacaggcgtgagccaccgcgcccggccggtgtgtttttaatttcaaattccaactgctcattgctggtatataggaaggcatttgacttttatctattatgttatatcctgcaaccttcttcattggtttcaagagttgtttggttttgggggtgg

SEQ ID NO: 748537 - DNA, 476 bp, Homo sapiens
tgacccaaatagaaattgggcaaagaatctgaattaacatttcttcaaaaagaatatacaagtgactaagcatatgaaaacatgcttattatttttagtcattatttaggaaacataaattatggtcacagtgagttcccgctttacactcactgtgataaaagaaaagaaaaaacatattcacaagtgttggtgagactgtggagagactgaaagcctcataggctgctgtacartaagtggtaaatcacccttggaaaacaatcaagcacttcctccgaaggttaaaaatatataatagttatcatatgacccagtaattcccctcctcctaagcatatgcttaagaataatgaagacaaatatctacacaataacttgtacacagatgtttgtggcaagattgttcataattaacccccaaatggaaactactaaaacactatcaaatgatgaattgataatgtgcagcatat

SEQ ID NO: 748538 - DNA, 525 bp, Homo sapiens
ctaagcatatgcttaagaataatgaagacaaatatctacacaataacttgtacacagatgtttgtggcaagattgttcataattaacccccaaatggaaactactaaaacactatcaaatgatgaattgataatgtgcagcatatccatccaatggaatattattcagcaataaaaagaaagaagtactgatacatgctacaatataratgaaccttggaaacattatgccaagtgacagaagcaagtggcaaaacaccatgtatggcttaattccgattttatgaaaggtccaaaataagcaaatccatagagataaaaatatagattagcgattgcccaggcaggggttggcagtaagtggggagtgatgccaatggatgcatattttatttttgcattgatgaaagagttcactgtgttgatagctgcaaaattcactgtgctgatgttgcacaattttgtgtaaaaccattaaattgtaaactttaaatagctgaattgtatggtatatgaattacaactc

SEQ ID NO: 748539 - DNA, 568 bp, Homo sapiens
tggttgacagataataaataagatgtaaaagtattgcttacaatgttaggagattaataaatgggtacatgtgtgaaaatatatgcaacacacaagaattaaagcaaatagcttcaactcagagaactatatatacttcactaaaattcttcttaacatgagatcagatataaaatttattaattcaaacacaagagcttcaaaccataaatctgggtgaggttacacctttttaaaactgcaaattgaggttaacagatcaaaatcaattaggtctgctaatctgttcacaaaggtgtaaattcttaatcagaatttattacaaggctgacaatgtaatttaacagcagtacttaaatcttgatcagacaattcaactttcagactccggtccactttttcttttccttcttcttgaaggaaataaaaagkctcgattttaatgttagtaccgaatgacaattataatattaagtgtatataatatatacaaaatgttacatataatatgtcatttatgtgctaaaattatattactcagtgtcaattaggattttggtacatctta

SEQ ID NO: 748540 - DNA, 603 bp, Homo sapiens
ggttaataggcattggctggtcagggtctagaaagagaaaggctggaaggtcagtagaaaaggattgcagggaagagtcatgtgaaatacctatagaaaagggcacaaggtgtggaaatgattatcttatctattaacataaactatggggccactaaataatggagaacatttaataacatagcaagttgacatctactagattgtgtcattggccacttaatgctagcacaaggtttgtgtgaagagggtagccagggtgtcagggatggaggtattcatgtacctaacmgcatatgtatcagcataggctgatttaggcactgccccagcccaatgtataaactgtcagcagaacagacttacattgaatcctaataaagtacaatctctgttggaaaccagctagctatttggctacatgtttactatacactgaccccacacgtcctcgaagaggcagcagcctggatgggactccatacaaagtccagttacagattttcttctgtctgcagccctcagccagcaccattatctgagaacttatatagggtttgaatgactgacacaggaaccaatatactattgcatttgaccaaa

SEQ ID NO: 748541 - DNA, 600 bp, Homo sapiens
gctatattataactttcagttttagaattttcatatacttttatgttttcaagttcttttgtccatgtttcccatcttctcactgattacaagagcatttttctttatctcattgagaataattatacagctgttttgaattccattttgtgataattcgaaaatgtaaagattgatttccattattctattttctcttgaaaatgagttacatttgcctggctcttcacatgttaagtaataatttgcttgtatcctgaatgttacgttgtggaaactttagattatactcyatttctctccctggagcattgacatttttgttttaacaggcaattaacttggttgtacataaactgaaaaatttatgttttctacagaaactcgtatatttgttcagtcatttatttattttagatgggttgttttcagtctgcaaagatggcactagggtcagtcagatatttgtataacgtttctacacagaggtttttcttcctctcctctctgttttctagggttctcaccatacattctgatggaagtggttgccctaatttctgttctattcctcttcagttcaaaaagactgtgagtcag

SEQ ID NO: 748542 - DNA, 600 bp, Homo sapiens
gctatattataactttcagttttagaattttcatatacttttatgttttcaagttcttttgtccatgtttcccatcttctcactgattacaagagcatttttctttatctcattgagaataattatacagctgttttgaattccattttgtgataattcgaaaatgtaaagattgatttccattattctattttctcttgaaaatgagttacatttgcctggctcttcacatgttaagtaataatttgcttgtatcctgaatgttacgttgtggaaactttagattatactccatttctctccctggagcrttgacatttttgttttaacaggcaattaacttggttgtacataaactgaaaaatttatgttttctacagaaactcgtatatttgttcagtcatttatttattttagatgggttgttttcagtctgcaaagatggcactagggtcagtcagatatttgtataacgtttctacacagaggtttttcttcctctcctctctgttttctagggttctcaccatacattctgatggaagtggttgccctaatttctgttctattcctcttcagttcaaaaagactgtgagtcag

SEQ ID NO: 748543 - DNA, 647 bp, Homo sapiens
aggttaaggtgctacattcaaaaggttaagtatattaaatacatttttaacttatgatattttccatttatgatcagtttatcagcatgtaaccccatcataaattgaggagcatttgtatattgtttgatcaatcccagtacaacccagagagttatgtattgttaccagatttttcaaatgaggaaaaaaacataaggtcactctgctggtaagtggtagaactggaatttaarctagatctatcaagctctgtagtctatgttctttctactccagaaaaaaaaaatgagataacattttatgcatgcccagatgagttgttttgactcagtgattcccaggtgttttcatccctttcccatctgttgtaatatattttcaaacatcaacccaatgcaacattattttttcttaaatggagtctcactcttgtcgcccagaatggagtgcaatgacacaatctcagctcactgcaacctctgcctcccaggctcaagtgattctcctgcctccaccttccaagtagctaggattacatgcttcacaggaataaaatagagctcagagagcagcccaggccaaaagggagcaatgtacatggaagtatgagtcaatgctcacaacaatcgaggtcccaggaaact

SEQ ID NO: 748544 - DNA, 543 bp, Homo sapiens
ttctacatgcaaatctttttacaatttgtctcctgggggatctagcctaaggcaggtagtgtcaagaagaatgaagatctgacaaaggattttggtgttagactaaatggagtatgccctattggcatactatggttgtgcaattttaaaatttttcagtcgtggtaaaatgaataaggtattggtgaaagaaaatatgctggcaagggtaatgtctctggtatacgagaaattttagaggaggtagtaagttataggacaatggaattagatgaataacagctaactgtaaagtcagcaggcactgttaatgtcatatggagaawctcttatctcatgcaatcaaaaagcagaaaataattcaggtctggcctaggacttaatgaatggcagaattttagaacaggttgaattcttcatcttagaaaatagattttgccaaaatcagactcttgatttggaaagactaggatcttctgaaaatatgaaatggaaatatcttggtggatgtatccaaatgtctcgaatctccaaatgccttac

SEQ ID NO: 748545 - DNA, 452 bp, Homo sapiens
acaaaagttggctacttgtgttcaggactcagctggcgtggcatcttcctaaattcctatggctataagaaaaccacactattgctaaaatccctaataggacctatcaggcacatcatcagacccatcctaactcagatttacaacctaaaccactacaactcttactggacaaaggaccagccttacaaacttttttttttcttttyctgaaaagcaactacagaccttgagccagtttcaggcagcttaaagagccgacacacaaactttgtgtcctacaggtcatcttttgatgtgaagaaccacattctacctcattttaatgttaaaaccctgccacgcagtgaatatgggatatttgttacatatatgtttacccattgcacatgttcttgactcctctcataaatatgtatatcttttcccccaaaagtgctgaatatgtatgc

SEQ ID NO: 748546 - DNA, 658 bp, Homo sapiens
cattctcccctgaggctagtcataaaaaactagaaccccttttctcccaagccagccacaaaccctaaaaatattactccaatttccctccctaccttcctgtgtaaaacctggccttacagaaattatctgacctaccttgtttcgttatagtcataagacccctattccagagagggtcatgttccatgctcagagaagagaaatgaatgtgcagagaggccaagacgaatctagatagacaggtcttgctggatattgccactaagtctgttagcattaggttacaacctttttttgaccctaataggttcattgcctgatacccatggcaagtcaatacaccaagacaccagctttcagcagagaaaraggtttaatagtagggccctcgaatgaggagacaggaggaaacctcaaatccatctccctgaggaacttggggttaagtttttaaggattttggagtgggctgaagtgtggtgatcagagatcactgattgttgaagagtgcagggtgaagtcatggaacagggagaggaagaagttgtatccacatgctgatcctgttcctctgtgggagtcctcaaactgggttcgggaattcggtgtctaaaaaacatctccaaggatccttaaacaggagccttatgattct

SEQ ID NO: 748547 - DNA, 530 bp, Homo sapiens
ctttgggtcttcattctaaagactcccatgtcacataaaaccatgaccaggaaaatttgtatgccttttctcctatggatctgcctcttgtcaatgattttcagtcaacagatggcaaaggggaagtattctcttagtgccctcactactaagaattttctgcaaatgatattgttactggaaaggggttctgatccagatcccaagaaagggttcttggatctcatgcaagaaagaattaagggtgagttcgcaaagtgacagcaagtttatcatgaaaataaaggaataaaagratggctactccatagacagaacagccccaagggttatttttatggttatttcttgatgatatgctaaacaaggggtggattattcatgcctcccctttgtagaccatatacggtaacttccagacattgccatggcatttataaattgtcatggcatggtgggtgtatagcattgaggatgaccagaggtcactctgttcaccatcttggttatggtgggttttggatggcttc

SEQ ID NO: 748548 - DNA, 468 bp, Homo sapiens
gtatgtcattgtggttttgatttgcatttctctgatggccagtgatgatgagcattttttcatgtgtctgttagctgcataaatgtcttcttttgagaagtgtctgttcgtatcctttgcccactttttgatggggttgtttgtttttttcttgtaaatttgttggagttcattgtagattctgggtgttagtcctttgtcagatgagtagattgcaaaaattttctcccattttgtaggttgtctgttcactctgatggtagtttcttttgctgtrcagaagctctttagtttaattagatcccatttgtcaattttggcttttgttgccattgcttttggtgttttagacatgaagtccttgcccatgcctatgtcctgaatagtattgcctaggttttcttccagggattttatggttgtagttctaacatttaagtctttaatccatcttgaattaatttttgt

SEQ ID NO: 748549 - DNA, 596 bp, Homo sapiens
gctccagttcacattgtactccagtaactctctatttcttcttgctctttatgtaatgtcttttctgtttttattatttttttaaattttattttattttgttttacattctgggatacatgtacaggatgtgcaggttcattacataggtaaatgtgtgctatggtggtttgctgcacctatcaacccatcacctaggtgttaaaccccacgtgcattaactacttatgcttatcctctcccttcccccgtcccctgacygacaggcctcagtgtgtgtgttgttgccctccctgtgtctatttgtcctcattgttgagctcccacttataagtgagaacatgtagtgtttggttttctgttctggtgttagtttgctaaagataatggcttccagctccatccatatccctgagaaggacatgatctcgttcctttttatggctgcatagtattccatggtgtatatgtaccacattttctttatccaatctatcgtcgaggggcatttgggttgatttcatgtctttgctactgtgaatagtcttgcaaggaacacatgcatacatgtatctttgtaatagaatgatttatat

SEQ ID NO: 748550 - DNA, 606 bp, Homo sapiens
catttcccaggaaatggaacacagcatgaagcaagccgactgcaattttccaccaacaatgagcatcgtggggcacaggtactatatttaaacaattttcctccagcgttttggcaaggctgtctctcaaggagacttaccaagttgggctgaggtctcattcccctccggccagcaggatcagaatgtttaatatggccctgtctcttcaacacccatgtgtaaaccaccaataaacaagccaggaaagacctgcaggcctaattgccttttaactctgccaagatgataaactcccagagcaaagaaggaaagacttccagggatttaacaagtttatctgcctgccacttgaacattttctgtctgcctacacttcagtgaattcaccaataaaagsataaaagggcccagaatgtcagacccctcaaatgaccaagaagttccacattcaaaacgtatgaccagcaaaaattaaccagttaattgagcttcattttaggtgtttttaagatctggagcaagggaagtggggccacttgactctttctagcactggccatttctcttttattgaccaaggcctagaaatctttacttacaata

SEQ ID NO: 748551 - DNA, 665 bp, Homo sapiens
tcacagagaggggctcagtgggagtacgggatcccacggcctcaagctggtgccccaggaggggctgctgtgactgcttcattcttctgttggactgtgaggccccaccaacttcttgtggactaagcataaaatgcagaaggaggacaaaagcaggtgggttttatgaaaaaagaactagggccaggaaacacatgggcctggagctgtcacctgcctccagccacaacatcgatgaggacataattgcagggatggctggaaattcccctctttaaggaaygctcttataggatgctgactaattctacctgagagcagtacccaaggctcaggtgtatgcagaatggacagaggtaggaggtgagagagcaaaagccctgcttttcttttctgagccaactctaccttatggctcttttgcctgtagaaagaggggagaagggacatatttagggaccagaaatctcaaaaccaaggcagtgagtgctgcagcctctctgaagcagagtataggttcagtactgtaagcatctgcctatatgcaagaatccagaatccaaacacagaaaggaaaagcagattcctatcaaccattataaattaggtcactgggatcattttactgtatcttaaaatacaatctgtgtatcagttctgtgacc

SEQ ID NO: 748552 - DNA, 599 bp, Homo sapiens
ggtaaggggtggaaccagagcccaactgggactcacattgaagcttttccatgctcttcccaggagctatccctgaattggtgcaatacttcagttaggtcttagcccctgtaaacttgaggctaaaaagcagaataaagaaggctttattctgtgaccctgagcaaccactccccacccctcctgacccttctcgcctggcccctgctggctcccgccatgacctgaggccaccatgtgcaggctgggaagggcgacttatctcttcctgcatcaccagacatcaccggttgccactaggggagaaggctgcaggctcaatcaagtgtgctgtcattttggttttcttgcaaraaatgttggcacttacctcctgcagcctttgtgtttcattctcaaggtatctgttggaaagcctttttctctttagttttacattttctttttcatcatttaacatataaaaccaggtttttcctggtccctttctctctctccctccgttccttcctctcatcatataattaaaagtcctttcagcctgtcttcaccttatcatttcaaatacattgaaaaaagatcccacttcctgcccttgt

SEQ ID NO: 748553 - DNA, 623 bp, Homo sapiens
ctcgtctatagaaaaccctgaagactccacacacatacaaaaaaatctattagaagcagtaaataaattcagtaaagtttctgtacataaaatcaacataaaaattcagtagtgttgctatacattaatagtgactatctgaaaaagaaatcaagaaagcaatcttatttgtaatagttacaaaaaaaaatacctaggaataaatttaatcaaggagatgaaagatctcttcaatgaaaactatgacatgccgatgaaagaaactgaaaaggacacaaataaatggaaaaatatcccatgtccatgaactggaaaaatcaatattgttaaaacatccataaattatagacttaattcaatctctataaaaataccaatgacattcttcacaaaaaatgtttttaaaatcctaaaattcatataaaaacttaaaatgtgtacaaaattwaaaaaccctaaatagccaaagtaatcttggacaaataggatgaagctggaggcatcacattacccaactttaaaatatactacaaagcaatattaatcaaaacaccaaagtaccggcataaaaatagacacagatcaatggagcagaacagagaaccgagaagtgaattcacaca

SEQ ID NO: 748554 - DNA, 485 bp, Homo sapiens
ttttgtataaacttaggataaacaatggggatccatcatatttaccttagtgtaaataaaatataggcctatacgagtcatttaagttcattgcataaacatatgtttccactgaaattttaaagtaataagaacataaatattagatattttttcatgtttatktatgcatttcacattaactgtattagtcatgatagtcttggttatgctgtggtaacagagtcctaaaatctcagaggccttcaaaaccaaaagcatgcctatctcccatgctattttcccgctacaaattgtccagaataatagaatagcctgaggtgtgagaatatacagttctctaagcagggtgaaagagaataatagcaaaccaccttttggttcttaaaacttctgataagatgtgacacacattacttctgttcatatttcattggctaaaacatgttattttcccatacctgagtgaaacagagcagggatga

SEQ ID NO: 748555 - DNA, 657 bp, Homo sapiens
ctaccaagactgaattacaaggaagtggaaaatctgaacagagcaatagcaaaaggagattgaatgagtaatcaaaaaaaatctcccaacaaagaatattccagaaccagataatttcatgaataaattatgtcaagcatttaaataatgattaatccaatctttctttaattcytctaaaaaaattaaagagggagacaacttcaaaactttttcataaggctagcattatcctcaaagcaatgccatccaagaacactgcaagacaagaacactacaggctgaagaacttgataaagatggatgcgaatttcctcaaatatattagcaaactgactcaacagtacactaaaatgatcatctaccttattcaggtaaaatttattcctgggatgcaaggatagtttaacttattcaaatcaatacaagtgatactccttattaacagaatgaagggctaaacgtcacatgatcatctcaattgatgcagaaaaagcatttgacaatattcaacatcctttcatgataaaaactctcaacaaatatcgtatagaagtaatgtgcctcaacacagtaaaagccatgtagacagcttacagttaaaattatattcagtagtgaaaagctgaaagctctttaggaaaacaagtgtgccca

SEQ ID NO: 748556 - DNA, 611 bp, Homo sapiens
tatatataaggattgagtgtggagataattaaaggattcaattttttttcacttgtttgtgtatttttgcataaagtcagcttgggattaacttattaaacaatttctatattccttatgctttgataactttctgccaattaaattgtgaatttaaaaatatatattatttaaatacatttcactgtcattgaatcattgaatttactactaatatctcacttatttcatttcattctccagtttacacgtttagaaataagagtcctgaagactggtgcctgattactagccctcagtacttctcctcttctcttcaacatacatttatttgrcattgcaagtgtatgtgaatgacaattcttcttaagtgatcagatttctttccatggagactagatatttatttgtgttttttcctattaaatatgctattgtaaattgttaattctaatgtttatggagaataattttttatgataggttggacttaacctcatctatttattttcggcattatcttgctttagtttacttttcctgctccttcttgccctttagaagtcacaattatttaaacatgttaaaagtagggttcagtaatacatata

SEQ ID NO: 748557 - DNA, 631 bp, Homo sapiens
aaatgtctactcacatgtattaatcagaagttctttcttgatttaaggagacctctctcaacacccaatatgggatctttataggtcctgagactctagatgggagcatggcatggctaatttttaaatttttccttatctagtgtttccacttgtgaattcttgaagatggaagcatatatagaggtaagaggtatgagagcagsatagttcattcctgatagatacgtcaaggtgatctgacatcagtgccctctgaactaaacaaatgctcaaagatgacgttttgggggctgtctgttgccttctgatttccaaggaatctttcgtcagctccttgtaaccagtttttgggtggctgtgaaaggtccactataactgtacaaatacgatatttctagtgatagcaaagcatttcaaagtcctttttaattttcttattctatctcatataataagcaagtatcttattatatcttatatatcggtaatgagattatctttgtgtgtttgcctgtgttctctttcagtggaaacaaagctctgtaatgatatgaactgttttgtatctattaataccctttcaggttttatcactattttaaaatagctagctcatggatgtttgcta

SEQ ID NO: 748558 - DNA, 631 bp, Homo sapiens
aaatgtctactcacatgtattaatcagaagttctttcttgatttaaggagacctctctcaacacccaatatgggatctttataggtcctgagactctagatgggagcatggcatggctaatttttaaatttttccttatctagtgtttccacttgtgaattcttgaagatggaagcatatatagaggtaagaggtatgagagcaggatagttcattcctgatagatacgtcaaggtgatctgacatcagtgccctctgaactaaacaaatgctcaaagatgacgttttgggggctgtctgttgccttctgatttccaaggaatctttcgtcagctccttgtaaccagtttttgggtggctgtgaaaggtccactataactgtacaaatacgatatttctagtgatagcaaagcatttcaaagtcctttttaattttcttattctatctcatataataagcaagtatcttattatatcttatatatcggtaatgagattatctttgtgtgtttgcctgtgttctctttcagtggaaacaaagctctgtaaygatatgaactgttttgtatctattaataccctttcaggttttatcactattttaaaatagctagctcatggatgtttgcta

SEQ ID NO: 748559 - DNA, 671 bp, Homo sapiens
atacgatatttctagtgatagcaaagcatttcaaagtcctttttaattttcttattctatctcatataataagcaagtatcttattatatcttatatatcggtaatgagattatctttgtgtgtttgcctgtgttctctttcagtggaaacaaagctctgtaatgatatgaactgttttgtatctattaataccctttcaggttttatcactattttaaaatagctagctcatggatgtttgctacttgaaggaaatagtttcctacttttcattttaattttaatttattgttattctttttaaatgtttgggaaatagtccaagccctgttttttctttttgtcataataatatttcattaattttcctttgaaatctattcattcatagaccacattttttctatgtgatttcctgaaacataattttatagataaatatacttatttatacttatttctgtggtraggatagaaatatatattatttttatatgataaaacttgcgttaatgtgctctgtgactttgaaatgccttgctaacactagaaatgcagtgtttatacatttttaaaatatttgctattttgagattctgggagggactctatcctgctcacataaaaatcttctaacaatgtttttttttgtttgtttgtttgaaattgg

SEQ ID NO: 748560 - DNA, 494 bp, Homo sapiens
tacatacctgtatgtatatatacatgcatacacacacacacatagatagaaatatgttatatatgtatcatagataaataaataaatttcttaacatttctagatatatacccttaggtacatttcgttacttgtcttcttaaaatattttagctactttatctgtaaatgtggatggaaatctgttaatttgagaattgagttataatacattatcaatgagataataatatagtatctagcacagaagtcactcaatawaggctctttctaaaaagtattaaacatacacaattgataattcataaatacaatgatcaaaaataaaaatgttttaatacgaattataacacaagctccaccctacatttttcaactaacctatatacttacatatataaatatataaatggtacagataacatctgaaaatacatgagctttacattcatttagctatttatgtcactgtttttaaaaataaattatagaaa

SEQ ID NO: 748561 - DNA, 641 bp, Homo sapiens
aatatgacattatgaatctcagcctctatatgaaaacaaattctttcaatctgtatggtgaatcatctctatgctgcagatttttcttctatcaatagaaggcaagaaaagtgtatcaccagtagaaaatgcaaccagtaaagaataaggtatcaaaagaatactgaatttgtcctttttaaaaaaatctatgaatataggatttttccaagtctcctagtcaatactaccagtattaccacatttgaattttagtaaagtaatatatgtagycgtagtaaatagtctgtgtagaattcctgtgttattcacaaatacaagagattacctttatgcaaccatttgtttacaagttctgtctcctgaaagataccttcattcggtatttcccttttatagcattgctagcctaaaagctgagtgttacttctgtttcccaatgccagtgctataaatataatataaatcacattctatataaatataatataaatcacattctaagtaattcttcctatataataggcataaacacagtgattaggacacataggtatgtatgagtcacttgggattcaaatgttgctttgaggcaagcaaagaaagagctgaattagctcccacttcacaaaggatttact

SEQ ID NO: 748562 - DNA, 526 bp, Homo sapiens
ccagcctctcttcacctttgataccatggaggagaaatgtggcttttctttgtatcctggctccagggaacacctgataggccactgtgctgcggatactttcaagtcaatttgaactgctttgtttaaggagcatgggctcttaaaccagattacctagtccaaaatcacaactccactrttgcctagctttgtggccttgggtgagttacttttttgtgcctcagtttcctcatcttttaggattgttgtaaggattaaatgagataaaaagtactttaacagtaccagcacacagtaacatctcaatagtgttagctcttcttatttgaccagtgatatttcgtctctgtttaactctttaaattttttaattaaaagtgtgcatttttaggatttcatggggacttattttttaagagacaaggtcaccctctttcacctaagccaaacttgtccaaccgtggcctgcaggccacatgtggcccaacacaaatttgtaaactttcttaaaacattacgagat

SEQ ID NO: 748563 - DNA, 603 bp, Homo sapiens
actaatgggcaaaataaccagctagcatcataatgacaggatcaaacacataacaatattaaccttaactgtaaatgggctaaatgccccaattaaaagacacagactggcaaatgggataaagaggcaagacctatcagtgtgctgtattcaggaaacccatctcacgtgcaaagatacacataggctcaaaataaagggatagaggaatatttaccaagcaaatggaaagtcaaaaaaaaaaaaaaaaaaaaaaaagcaggtgttgcaatcctagtctctgataaaatacactttaaaccaacaaagatcaaaaaagacaaagaagggcattacataatggtaaagggatcaattcaaccagaagagctaactattctaaatatatatgcatccaatacagaagcacccagattcataaagcaagttctcataracctatgaagagacttacactcccacacaataatagtgggagactttaacatcccactgtcaatattagacagatcaatgagacagaaaattaacaaggatattcaggacttgaactctgctctggacaaagtggacctaacagacagctacagaactctccaccca

SEQ ID NO: 748564 - DNA, 681 bp, Homo sapiens
tgagcaataatgaactcataataggtaaaatgactcattttattttgttttatgtcacttcttataataatatcttagtctaaaagattacttcggttgattcagagttcttacaaattttattaatgttctattattatttttagttatacatgcattttcccaaatttgctttatctccacttcaatatggggtatttatactccttgttcatttgctactagttgtgaagatgctacctgctgctgacttcaaatgaatccttgattattcactaaatcttgtggaacatttagctctactaaacactttttaaaaagcacacggaaactccaaaataaagacactttcaaataacttacaaaatgaaggccattattatggctataggttaatttgtctctaatgcktctgtttctattcttccgagtcttgtagaaccacatttaactaaactttatcttggacctggggcttcaatttaggtatgcttttcccctcattgctgtttgaaagttaatttatttctcaataccaaaaattcaaattatttttcttttctctaattcttatttttttcaaatattctttaaaaacaaatttctttaaaatcttatttttctaaaaccaaactttctagttaatggtcctccattctgattttatttcatattacttct

SEQ ID NO: 748565 - DNA, 617 bp, Homo sapiens
atggtccttggaaaaatggacatccacatgcagaagaataaagctagatgcctatctctcctcaaacacaaaattcaactcaaaatggattaaagactgaaacatgaaactataaaattactgaaaggaaacgggaaatgctcaggacactggtttaggcaaagattttatggctaacacttcaaaagcaygggcaattcccccaaattctgacaaatggaattaaattaaactaaaacactctttacagaaaagaaaacaatcaacaaaatgaaaagacaacctgtagaatgagaaaaaaattgcaaagtactcatttaacaacagacttatatgtaacatctgcaaaaaactcaacagcaggaaacaaaacaaaaatgaaaaaaaactgaataatgtaattaaaaagtgggtaaaggaactgaacagatatttctcaaaaggagatatgcaaatggtcaataggcatatgaaaaatgctcaacattattaatcatcactgaaatgcaaataaaaaccacaatgagataacaaatatattttaactggattagttagaatgacttatcaaaaagttagaatggctattatcaaaaagacaaaaaataacaaatgct

SEQ ID NO: 748566 - DNA, 534 bp, Homo sapiens
tttaacatatatatgtctgtaaaatcataaccataattgatacataaacatgtctatcatccgtgaaggtttacacatttcccttcataatctccccataataaccctccttattccctgctttcccatcaccagacaactactgcactgtcttctatcaatataagttagtttgcactttctagaaatttatataaatgaagccacctagtatgtatcctttttgtctggtttactaataataattgaaaattggcaaaataattgaacagatacttgaccagaagacataaacatagcaaaaagcaaataagatgctcaatctttttcatcagcagataaatacaaatgaaaacatgaaaagatacaygacacaaatacgtaagtggttaaaatgatattaaaaaataaaaccatctcgagttagaaaagatgcaaagtacctgaaacagtcaaacaatgcttggagggatgtaaaatgatacaggtacattggaaaatagtttggtagtcccataaaattaaacataaaat

SEQ ID NO: 748567 - DNA, 455 bp, Homo sapiens
  misc_feature 428, 429, 430, 431, 432, 433, 434, 435, 436, 437, 438, 439,440, 441, 442, 443, 444, 445, 446, 447, 448, 449, 450, 451,452, 453, 454, 455: n = A,T,C or G
agatgcttcagatggattgtatcaaatggaagtaaggatcagggtatttcgctgggccgagattggtgagaacagctgtagatgtttcatggaagccctgagagcagctctctctaatccagatctgtgattcatcgtcttgcctgttcattacattaccaggggagcatctgaaactcctgatgcccactgaaatcagtgactctgggggtaggatccagrcatcagtatttttaagcatcccgggaatattttgacctcacagggttcaggctgaacttgagtcctggccattggggaactgtggcgtctgcccggatgagcaccagcttgacaattacacgtccaagccttagcttgaagaaagatgggcaggcattttatttttatgtgtcactcccccacaatgttgataccaagctaatttnnnnnnnnnnnnnnnnnnnnnnnnnnnn

SEQ ID NO: 748568 - DNA, 455 bp, Homo sapiens
  misc_feature 428, 429, 430, 431, 432, 433, 434, 435, 436, 437, 438, 439,440, 441, 442, 443, 444, 445, 446, 447, 448, 449, 450, 451,452, 453, 454, 455: n = A,T,C or G
agatgcttcagatggattgtatcaaatggaagtaaggatcagggtatttcgctgggccgagattggtgagaacagctgtagatgtttcatggaagccctgagagcagctctctctaatccagatctgtgattcatcgtcttgcctgttcattacattaccaggggagcatctgaaactcctgatgcccactgaaatcagtgactctgggggtaggatccaggcatcagtatttttaagcatcccgggartattttgacctcacagggttcaggctgaacttgagtcctggccattggggaactgtggcgtctgcccggatgagcaccagcttgacaattacacgtccaagccttagcttgaagaaagatgggcaggcattttatttttatgtgtcactcccccacaatgttgataccaagctaatttnnnnnnnnnnnnnnnnnnnnnnnnnnnn

SEQ ID NO: 748569 - DNA, 624 bp, Homo sapiens
agctcacacccataatcccagcacgttgagaggccgaaggggatactgcttgagctcaaaagttcaatcagcctgggcaacacagtgagacctttctttccacacacacaaaaatttaaattagccaggtgtggtgacacgcaactgtagtcctatctacttgggaggctgaggcragaggattgcttgagcgagtgagctagagttgcagtgagctatgattgtgccactgcactccagtctaggtgacaaagcaagacccagtcatgaaaacaaaaaaaattttatatgttccagatagctgaattgtctgtaagttgctaaaataaataaaaataaattactttagcgtcttaagaacaatgtctccctctagtcaactacaggacacaaagcttaagaaatgacaaacagcaactcctccataagaagaaaacaactaagttttatgcattccttttttaagttagaaagaaatttgctgtttttattgcaagttagttaaaactgatataatttaacgagccaattcagttaattcttaaattcctgtattactccaacttgagacatataaataaagacaatgataaaattttaaaaattccttgaaagacaaactac

SEQ ID NO: 748570 - DNA, 624 bp, Homo sapiens
agctcacacccataatcccagcacgttgagaggccgaaggggatactgcttgagctcaaaagttcaatcagcctgggcaacacagtgagacctttctttccacacacacaaaaatttaaattagccaggtgtggtgacacgcaactgtagtcctatctacttgggaggctgaggcgagaggattgcttgagcgagtgagctagagttgcagtgagctatgattgtgccactgcactccagtctaggtgacaaagcaagacccagtcatgaaaacaaaaaaaattttatatgttccagatagctgaattgtctgtaagttgctaaaataaataaaaataaattactttagcgtcttaagaacaatgtctccctctagtcaactayaggacacaaagcttaagaaatgacaaacagcaactcctccataagaagaaaacaactaagttttatgcattccttttttaagttagaaagaaatttgctgtttttattgcaagttagttaaaactgatataatttaacgagccaattcagttaattcttaaattcctgtattactccaacttgagacatataaataaagacaatgataaaattttaaaaattccttgaaagacaaactac

SEQ ID NO: 748571 - DNA, 634 bp, Homo sapiens
gtgaggagagatatttggactacttcttttcctatttggatgtcttttatttctttctcttgcctgattactctggctaggaattccagtgctgtgttgaataggagagtgagagtgggtgtccttgtttagttcyatttctcaaaggggctggttccagcttttgcccttcagtgtgatgttggctgtgaggttgtcataaacggctctatttttttgaggtatgtttgtttgatacctagtctgtggagggtttttatcgtgaagaaatgtttgattttctcaaaaagatttttctgtctctattgggattatcagatggtttttgcttttaattctgttgatgattcacatttattgatttgtgtatgttgaactagccttgcattccaacaacaaagccaacttgatggtagggaattaactttttgatgtgcttctggattttgtttactggtattttgttgaggagtcttgcttagactaaacagaaatattggcctaaatttttttgttgctctttgccagattttggtgtcagtcagatactggctgcattaaatgagttagggaggagcccctcctcatctatttttttgaatagttttagtagaattgataccagttctttata

SEQ ID NO: 748572 - DNA, 669 bp, Homo sapiens
ccctttcagggcgactctaaaagcatccccaaagcaaatttaaggagatattcaggtgcttattattttagaataaatttattttaattccagctttatatagctgtttatgttatattagttgtttttcctactatacagatacttcattttctctgctaaatactgatttaggatgccaagtatacatttatgtacaaaaactaagagtgagtattaaaatctaattaggtaacatgagtttttaaatattttctcttacttctttccaatattctcatcttaatatcatgattttaatatttaccatcctcttaccctgaaatgtcttatttttacaacaaagttttaatcaaatacagaactatggcatgattccataatgtcttagttcattttgttctgctataacagaatactgcagactggataattaataatgaacagtaatttattggcttacaattctgaagacttggaagtccawcattatgacagcagcctctggtgggggcctttttgcagagtgatcacatggcaaaaggcattacatggaagaagggaaaagagagagagggcaatagggggcttatcttgcctgtctgtggtggcattagtcccaacccttagggcagagcccttatagtctaatcaccttttaaaggtccc

SEQ ID NO: 748573 - DNA, 571 bp, Homo sapiens
gggcttatcttgcctgtctgtggtggcattagtcccaacccttagggcagagcccttatagtctaatcaccttttaaaggtcccaaccgttaatacttttacaatggcattaagtatatttcaacttgagggaacagacatccaaaccatagcaaatgtgaataccataaagcatttaaaattcatgccctgtggattttagatttttacagattacagtttaaattaaagcgaagccatttactctctatgagaggttaactccctaggctaaaattttctcaagattataaatggagaaaaataatacttgcttyttacatttatactaggggtaaaataatatttaaagtaggcataatttttgacataaaattattttttaaacagactactcattttcaaatatgcaaaaatttcacaagttaattttttccacttatttattgcattggttttgtgtctttcctcagatgtaataaaatctttgattaaacttttatggatgttttatatgttcttaaatattgtctcacatatacacacttcaatcattattaattgattcaga

SEQ ID NO: 748574 - DNA, 545 bp, Homo sapiens
caattcaatcaaaaggaaaatatgagtattttatgaaaatatccaaaatttaattttcattcttcaaaatatcaagtcgtgtattatgtcttctgcacaaatttgtaagtactgtttattacagactatttaattagttgtttcatggttgaggcttccaactgtaagcttacataagagctgtggctatagttctcttttattctacatatcacactctaataacttgactgtttacatatatgtgttttcattagttctacattagtaggrtttttttttaattttgatatttcaccctgaattacagccttatttctctttttccagagaataatcaccattcatcgtcttcttcattcccccttgtccctttctcttcggaacctaggttttttgaaggggagaggggaggcactcccacacattcctcggaattgcaacttggcagtaacctcaatgatgttcatattacaaaatctaaatgccagtttctttcccttatccaccacaattaagtgatatttacagacaagtatttcaga

SEQ ID NO: 748575 - DNA, 544 bp, Homo sapiens
gaatttatcaccactaatcttcactaaaataaatgtaaaggaactttttcaggccaaaggcaaattatccaaaaatatcttgttttcaaacacaagaaaataggagaaaatttgaaaatcaatagaaaaggtaaaacttgtgggcaaacccactgaaaacaataaaaataatgatatattgtagaattaaatatgcatacaattaggatacagaaaaatgatgcaaaagccaggataggaaaatgaggttaaagaattataacgtgcttgcatccaggagcaagtgtgctaastctgatacatcaccaatgcaggtgaggagtcattaagagaatgatttaaaatgcacatgactaaaagcttagtggagaaaaataagaaaaagtattaactcatcaaaaactaacaggaaaagatgaaaaccagctaatgaggtcacaatgaagaaaactgtaatggggtaaatctaagcacagaagtatcgttaattaatgtagtcatataaattacacaaatactccaactaaaagacaaagattgtcat

SEQ ID NO: 748576 - DNA, 614 bp, Homo sapiens
tttggtcataataatcaagaagtaaatggaattatgaatcctaaaactttaatgtaatatcttgaattgtcaatgtaagaacatacctgcatgttggaaatttagaaatgagaatcaccacagtgctactgatttgtggacattgattttgtatcctgaaactctaatgaatttgtttaygagatctaggaacttattggatgagttcagggttttctagggtacaatcctatcatcagagaacagcaacagtttgacttcgtcttctccaatttgtatgctctttatttctttctcttgtctgacggctcaggataggacttccagtactatgctgaataaaagtggtaaaagtgtttgtctgaaaaagactgtgcctttccttcatttatgaagcttagtttttctagatacaaaatccttggctgataattattttgttttaggaagctgaagataggatcctcatgccttctagtttgtagggtttctgctaagaagtctgctgttaatctgatcagttttcctttattggttacctggtgtttttcctcacagctcttaatattattttcttcatcttgactttagataacctgatgactatgtgccta

SEQ ID NO: 748577 - DNA, 614 bp, Homo sapiens
tttggtcataataatcaagaagtaaatggaattatgaatcctaaaactttaatgtaatatcttgaattgtcaatgtaagaacatacctgcatgttggaaatttagaaatgagaatcaccacagtgctactgatttgtggacattgattttgtatcctgaaactctaatgaatttgtttatgagatctaggaacttattggatgagttcagggttttctagggtacaatcctatcatcagagaacagcaacagtttgacttcgtcttctccaatttgtatgctctttatttctttctcttgtctgacggctcaggataggacttccagtactatgctgaataaaagtggtraaagtgtttgtctgaaaaagactgtgcctttccttcatttatgaagcttagtttttctagatacaaaatccttggctgataattattttgttttaggaagctgaagataggatcctcatgccttctagtttgtagggtttctgctaagaagtctgctgttaatctgatcagttttcctttattggttacctggtgtttttcctcacagctcttaatattattttcttcatcttgactttagataacctgatgactatgtgccta

SEQ ID NO: 748578 - DNA, 614 bp, Homo sapiens
tttggtcataataatcaagaagtaaatggaattatgaatcctaaaactttaatgtaatatcttgaattgtcaatgtaagaacatacctgcatgttggaaatttagaaatgagaatcaccacagtgctactgatttgtggacattgattttgtatcctgaaactctaatgaatttgtttatgagatctaggaacttattggatgagttcagggttttctagggtacaatcctatcatcagagaacagcaacagtttgacttcgtcttctccaatttgtatgctctttatttctttctcttgtctgacggctcaggataggacttccagtactatgctgaataaaagtggtaaaagtgtttgtctgaaaaagactgtgcctttccttcatttatgaagcttagtttttctagatasaaaatccttggctgataattattttgttttaggaagctgaagataggatcctcatgccttctagtttgtagggtttctgctaagaagtctgctgttaatctgatcagttttcctttattggttacctggtgtttttcctcacagctcttaatattattttcttcatcttgactttagataacctgatgactatgtgccta

SEQ ID NO: 748579 - DNA, 588 bp, Homo sapiens
gaaaactcaaagataggtcattttaaagtaaccaattaggagaataaaaaaaaaagatatttaaaagagtaaagaaagcataaggaaactatggaatactactagacatacaaatacaagaattatgggagtactagaaggagaagagacaaagggacgaatagcttttttaaaaaaaatgatgtctaaaaatttcctaaatctttgggggcatatgaacatacagatttaggaagttcaaagaatcccaaacatgatcaattcaaaaaagaatcctcctaggcacgttgtgatcaaattgacaaaattcagagacaaagaatcttaaaagtagcaagagagaaaaaacttgttatatataaaggatctctcaraaggctatcagtggacttcctaacagaagccttgcaagccaggaaagagtgagattacatacccaaagttctaaaacaaataattgccagccaaatagactgtgcacagcaaaaatgtcctttagaaatgaaagataaaaacactccagaacaacaacaaaaatgcgaagggaattcatcaccaccagacttgtcttacaagaaatgctaaaag

SEQ ID NO: 748580 - DNA, 548 bp, Homo sapiens
atgtgtttaaaaaaatttaaaggattgaaacctgatatatatgcaacaaaaaagaaaagcaaagttaaatcaattcctgtgtagagatcaaatctatctagaaatatacaactaagctaaagaaatcctgagagcttacctagcagattatcataaccattccttgaaatttataattctttcctgtcgcttcatgtcacttccttcaaatctcacttcaaacttactccttcatgaagtcttccctgatgctgagctattcactccgttcatgttacatcctttctgctcaacacacagaactgtcccagattagtgctaatgaatccaaatctgattttctctctagctctttcatctgggtttcayggtcacagacttcatcctttaatatatctaccttgaaaaatgcatgccctctacatttatactttcagtatatactgtcagttctctcaattaattacaatggtaaatacttacatcatacttactttgtgctagtcactgttgttccaagtgctttagattaaaaaaaaattatatag

SEQ ID NO: 748581 - DNA, 493 bp, Homo sapiens
ataatgattgtctcttattctactcttcaaactcctgtaagtcatttagtactcctgtaagtcaaagtggtatatttaattacttctagtaactccttattgcatttagaataaagttcaaattccatgatctggccactgtttccatcagcctcattctcatttgtcatgcctgagttacactgaccttctttctttttctggaacatgttaagctcattgtcacctcrgggccttcatatttctttctgtctggaatggtacatgctactcccccagatctttctgtgatctttctcatcattcacatctcagctccttagagacttatctgatcatcataactagagtagcctcgccttgtatctgatcttctatttcattttgctgttttatatatttttatagtactgttgcaggtggatgcccagggaaccagagagtgagtagtggttttgcatggaagaagttattagaggtactcttgatcaac

SEQ ID NO: 748582 - DNA, 300 bp, Homo sapiens
tttgcaagctggagaaccagggaagctggtaacttgcttcagtctaagtccaaagggctgagaaacaaagaccagagaacctgaagttctaatgtccaagggtaggagaagacaagtttccctgctccagaagaaagagsaaattcagctttcctttgcctttctgttctatccaggccttcagtggaatggatggtgccacacacattgggtgaggatagatcttcctactcagtctattgattcaaatgccaatctcttcctgaaacaactctacagacatacccagaaataaagctt

SEQ ID NO: 748583 - DNA, 563 bp, Homo sapiens
atttggagacagggtctcactctgtcgtccaggctggagtgcagtggcgcgatctgggctcacagcaacctccgcctcctgcgttcaagtgattctcgtgcctcagcctcccgaataactggggctacaggcacgccaccgtgctgggctaatttttstatttttagtagagatggggtatcgccatgttggccagactggtgtcgaactctagacctcaggtgatccgtccatctcgtcctcccaaagtgctgggattacaggtgtaagccactgcacccagcctgcagcactttaaatatatattattttaataaatgcaactaaacattgaagatataaaagtacctagtgagaaggggtcctcaaaattggttatacattagaatccttcaggaagctttaaaagccttgatgttgtcctaccccagattctgatttaattggtctggcatgtggcttagacatcagggttcctaaagcttaacaggtgattctattatatagccaaggttgagaactactctaaaaatagagactactgagagaaaaaaaaaacacaa

SEQ ID NO: 748584 - DNA, 608 bp, Homo sapiens
tactctctacttctatgagatcattattttttcttttttttttagctttcacacgtgagtgagaatgtgtagtatttatctttctgtgcctggcttattttacctaacataatgtcctctaagctcgtccatgttgccataaatgacaggatttmattcttttttgcagctgagtagtattctattatgtatatatgctacattttccttatccattcatctgttgatggacacttaggttgattctatatcttgcctattgtgaatagtgttgcaaaaaacgtgggagtgcctttcaacatacttatttactttcctttaaatatatacccaatagtaggattgctggatcatatggtagttctattttaggtttttgaggaacttcaatactgttttccataatggctgtattaatttacattcccgccaccagtgtataacagtgcccctttctccacatcctcaccagcattttttgtcctaaagcagtattttaaagtttatgttgctatacaagttggaaacaggaaattctaatgatggataaggaaatatggccaaatgtcttaaaacagatttctattatatgcattctttctttagtg

SEQ ID NO: 748585 - DNA, 487 bp, Homo sapiens
catcacccttcggttaaaattctccaggtaattctcattacctacagcaggggtccccaacccccggatggttgactcataccagtccctggcctattaggaaacaggcctcacagcaggaggtaaatggcgggccgctgagcatcaccacctgtgctttccctcctgtcagagcagtggcggcattagattctcataggagcatgagccctattgtgaactgtgcatgtgagggatctaggttgcatggtccttrtgggaatctaactaatgcctgatgatctgaggtggaacagtttcatcctgaaacatcccccctactccatcatgccccgacccctgcttcatacatccttgaatttgtattaactgcacaagtttttaaaatttcttcttagatattttaagtataaaataatatgtactcaaaaattcaaacagtataaacagtacaaagaaaaaatattatgttcccctattttatctc

SEQ ID NO: 748586 - DNA, 487 bp, Homo sapiens
catcacccttcggttaaaattctccaggtaattctcattacctacagcaggggtccccaacccccggatggttgactcataccagtccctggcctattaggaaacaggcctcacagcaggaggtaaatggcgggccgctgagcatcaccacctgtgctttccctcctgtcagagcagtggcggcattagattctcataggagcatgagccctattgtgaactgtgcatgtgagggatctaggttgcatggtccttgtgggaatctaactaatgcctgatgatctgaggtggaacagtttcatcctgaaacatcccccctactccatcatgccccsacccctgcttcatacatccttgaatttgtattaactgcacaagtttttaaaatttcttcttagatattttaagtataaaataatatgtactcaaaaattcaaacagtataaacagtacaaagaaaaaatattatgttcccctattttatctc

SEQ ID NO: 748587 - DNA, 376 bp, Homo sapiens
ctttaccttggaggcagtgggaaagccataaaaattttttgagagatgtaatatgaccagatttgcattttaaaacaatcaataatgatactgtaagaagggattcaataaggaaagactagtcagaaggctgctctaatgatacaggtgagagatgatgacctgaatgtctgtgaaagttgagagacatgggaacacatrgtagacatacagtcagtagtgtgggaagggaaggggagacggaaagggaggcattcagaaacactccagggtttctggctgggcaactgcatgaataatgatttcattctctgagacagaagacaggatgggagcaggttttggagagaagatgatgagttaagtttggaggata

SEQ ID NO: 748588 - DNA, 376 bp, Homo sapiens
ctttaccttggaggcagtgggaaagccataaaaattttttgagagatgtaatatgaccagatttgcattttaaaacaatcaataatgatactgtaagaagggattcaataaggaaagactagtcagaaggctgctctaatgatacaggtgagagatgatgacctgaatgtctgtgaaagttgagagacatgggaacacatggtagacatacagtcagtagtgtgggaagggaaggggagamggaaagggaggcattcagaaacactccagggtttctggctgggcaactgcatgaataatgatttcattctctgagacagaagacaggatgggagcaggttttggagagaagatgatgagttaagtttggaggata

SEQ ID NO: 748589 - DNA, 619 bp, Homo sapiens
cccttctggtgtcagtaactgcaatcctactcacactaaagaaaaaaaacagggcagaagaggaatttatcagcttgggtaatccaaccacacatgaacctgagcttgggaaaattagatgtggggctttaagtgatgtgtggtcctctgtctttctgtctctgtctctgtctctgtctgtctcttctgtctctctccttctttctctctctctctcagagtgtgtgtgaaacttatttcattatctggccgactagagccagatccacaggcagctctggccacacacttgtccaccttgtgaacaggtgcagaggaagtctttgctatgtgcatcagctggaaaaatcccagtgaatgatttctggatggcccagtccgaatcatgagcggacacttgtggccaagggtggatggctgtgatggatggcctgcaccaaaccatgtagttmaagagaaaaagaatgattactgtattgagcagaaaaagaacatgaaaggccaccatatgttataaatataatcaatactatcacaaatctgaaacatacaaatttgtagaagggataaaagtcacatctaacctccctacccaaagataacccctgtaattgttttt

SEQ ID NO: 748590 - DNA, 615 bp, Homo sapiens
cagcaatatctattttgtttacttccatattctcatttacctacaagtgtgcctgcccataatagggcctcattaatatatgttgaagggatggatggtggataaacagatagatgaatagcatgtaggtttactcacagccaacctaccaggcattgtactgatgacacaaaggtggatcagacagaccccccccgccaacccctcyggaactcacagccttgtaggcgatgcaggcaacatttgtacatatgatggcaaggagttaaggggcttgcatccgaggcacttgaagttcgcaaggggggatgctgagatcagaggctgggagatcagttcagatgggccaatgaaggcttgaccagggcagaggaaatggggagaaaaaatgctaattttagacatcagtaggtggtgtaacaaagggatctggctactcataagatgtacagaattaggggcatagagatgaaaagacaactcttgggtctctggatagaagatgatgatattaatgaactacagatatagaaggagaaggttgaagagaggtaggcagtgatttcagattggactcagaatgtacatctttccatttctacaactagttataga

SEQ ID NO: 748591 - DNA, 615 bp, Homo sapiens
cagcaatatctattttgtttacttccatattctcatttacctacaagtgtgcctgcccataatagggcctcattaatatatgttgaagggatggatggtggataaacagatagatgaatagcatgtaggtttactcacagccaacctaccaggcattgtactgatgacacaaaggtggatcagacagaccccccccgccaacccctctggaactcacagccttgtaggygatgcaggcaacatttgtacatatgatggcaaggagttaaggggcttgcatccgaggcacttgaagttcgcaaggggggatgctgagatcagaggctgggagatcagttcagatgggccaatgaaggcttgaccagggcagaggaaatggggagaaaaaatgctaattttagacatcagtaggtggtgtaacaaagggatctggctactcataagatgtacagaattaggggcatagagatgaaaagacaactcttgggtctctggatagaagatgatgatattaatgaactacagatatagaaggagaaggttgaagagaggtaggcagtgatttcagattggactcagaatgtacatctttccatttctacaactagttataga

SEQ ID NO: 748592 - DNA, 615 bp, Homo sapiens
cagcaatatctattttgtttacttccatattctcatttacctacaagtgtgcctgcccataatagggcctcattaatatatgttgaagggatggatggtggataaacagatagatgaatagcatgtaggtttactcacagccaacctaccaggcattgtactgatgacacaaaggtggatcagacagaccccccccgccaacccctctggaactcacagccttgtaggcgatgcaggcaacrtttgtacatatgatggcaaggagttaaggggcttgcatccgaggcacttgaagttcgcaaggggggatgctgagatcagaggctgggagatcagttcagatgggccaatgaaggcttgaccagggcagaggaaatggggagaaaaaatgctaattttagacatcagtaggtggtgtaacaaagggatctggctactcataagatgtacagaattaggggcatagagatgaaaagacaactcttgggtctctggatagaagatgatgatattaatgaactacagatatagaaggagaaggttgaagagaggtaggcagtgatttcagattggactcagaatgtacatctttccatttctacaactagttataga

SEQ ID NO: 748593 - DNA, 622 bp, Homo sapiens
taacctagctatccggtccttctgtcatgaatggcatccaaatgctggctctttgaagtggagaagcagtgggaccttcagagacagccaaagggggacatttgtgctgcaccagcagtgacctctcatccaggctcaattcctgcccctggtgctactgcccttggtgaccacaacagttttgccctgyctgggtgacgggctgagttctttcaggacaaagatcttaggtgcgggctggatctccagggctgagttctttccagacagagatcttgggtgcctgtgggcattccagtgtccctgccccaccaagcatgggaagcgtagccactgcctctcccctcattggctatcccagatgtctcccctagcctcccagcttttacttcccaaggccagactcaggcactgatctgtataagaaacatcagttccttctaagaactctcactgtccccaccctacaccccagccctactccccaggactatgctgagatgggtgtcagaatctgcggctcagcttccagacaggtagggaaagaacacaggccctggccctgacaatatgttgaatgaatacgaaaagtgaaacaccaagaaacaccaacatttaagag

SEQ ID NO: 748594 - DNA, 574 bp, Homo sapiens
ccaaggatattcataggtgctgatggttctgaatgggcagaagaaataatatttgactgggtaccagaaaaattagaatcttcttccatctctggcaccgtctcatcgtgtagctttaatcaaattactcagcccttttgggtttattattgaagttggaaaaataaaagcattgcattagattttctttataaagttcctttcacactgtgatttgggtgttacctcttccagtggtatttgcattttgccttccaaaagatccctagaattgctaaatagtagaaaggagagctttattggcggtatcagtttgcaaactgtgaagagatagtcttcagcatggagcaaaggtgctctctcttcaaagagggaaagggcagttgggttttatgtctctcaggtccagcatcatgcaatagagtcctacacattgagsaggtttggggataaagttatacatatttatgaaggaagttgagcgcatgtgcgatgggtaaacatacatgtaatatacatcccacgttcactttgaggtggggtttcagcattaaaatgaggtggaatttggatc

SEQ ID NO: 748595 - DNA, 638 bp, Homo sapiens
cactgactgtttggcacctatcccagccagggtgagcttctactgctgcagaatcagaaaggaaaggggacattttacagcatggagactatgatgattaatattgactatcaacttgattggattgaaggatgcaaattattgttcctgggtgtgtcggtggaggtgttagcaaaggagattaacctttgagtcagtggactgggagaggcagacccacctgcaatctgggtaggcaccatctagtcagctgccagtgtagctagaataaaacaggcagaagaacatggaaggactagactgggtgagtcttctgaccttcatctttctcccgtgctggatgcttcctgccctcgaacatcggacttcaagttctttagcctttgggctcttgggcttacaccagtggtttgccagggsctcttgggccttcagccatagactaaaggctgcactgtaggcttccttacttttgaggttttgggactcagattggcttccttgcacctcaccttgcctatggtctattgtgggacttcattttgtgatcacgtaagtcaatactgcttaataaactccccttcatatatacatctatcctattagttctgtccctttagagaaccctgactaataca

SEQ ID NO: 748596 - DNA, 509 bp, Homo sapiens
cccatacagcatttgtaaaatcatcctcttggaaataaatctgatgataaatcttagtgtaactgtgagtgggtcaaccagataagtgcctcccaatgggatgcaatataaagtactcagcaccacctgggaagtattcctgccyttaacaaactaaagttgaattggattaggccttttagagtaaactacaagttataggaaacagaaaaggtagaagaaaatgttaaatgaaaccaaaaaggaagcaaacagacaaatggagtatatgaaaaggtcctaggacattacatcaggtttctccagtaactcaacgttaacaaggtggagggaagagaaagtgctctcaattaagatctctaagaatcattacaacctagtacaacatgagacagtgattggggtcccaatttgagcaaacatactattaaaaagatatgagacatatgaatgtagacctgattaaatgatgccaataaaatatttttaatttagttagcttagaaaac

SEQ ID NO: 748597 - DNA, 625 bp, Homo sapiens
ggttcactgattcttttctgttattgagccatccactgagctttttatttcagattatattattcagatgaaataaatcaactttctaatccaatccctgcagtgtttatatgacttttttggggcctcttgttacgttgaaaacccctgttcataacagattagaattaggcttattattgcttaatcctaactaggttcctagactgccagtgcttatgtgaacattctaggatactgctaattctagttgacattaccttaacaaattctggggagtcatctttctgatagtggaacaaagatccyatttaattaaccacattgcctctaccttaaataagcccactttttctaatttgatcctctgtcaatcatcttcacaaaggtaaggaagatgaaggccagaaagggaaaggaggagaaagaaaggaaaaaacccttgtaaaacttggtagtactaagtcttctctcaataaaagcatctacttcctttaacctttacctggaacctctattacttgcactttttgctttttgatcttcttttcattaaacaagacaataacaagaagggcaacaacaacaaaatcatgggggtattacttgatctgaattacaatat

SEQ ID NO: 748598 - DNA, 589 bp, Homo sapiens
agctcctgcattgttttattgtgagtcttagcttctttgcattgggtttcaatgaactcctgcatctcaatgatcttccttcctgtgcatattctgaattctatttatgtcatttcagccatctcagcctggttcagaatgcttgctagaaatgtggtggggtcctttgcaggaaagaaggcactctgggtttctgggtttctgagttttcagggtgcttgcaccggttctttctcacttttgtgggctgatgttcctctaatctttgaaattgctgacctttggatggcttttcttttcttctgttatcctatttgatgaccctgaggtttgactgtggtataaggtgattcagccaagtggcttcatttctggaagattttagggggycaacactcagctctgaactcctggactgtgtgttctgactgtgggggacttttattgggccctgactttgttccctgactccttgagattaggaacccactgcgctgggggtccaggggtgaggtactcccagactgctggtcattaccctccaatgggtggtgtcaggcaaagtgtttcatactgcagtgacagcagg

SEQ ID NO: 748599 - DNA, 620 bp, Homo sapiens
gtaggcaaggttgatttcttagggcgtgggaggatccactcttttctgtgcctcgtttcactcccctagtggtattggcgtaaggggtgggtgctgtcaggggcagggctggctggctctgcacgtcaaagctcccactgcaatggcagttgatggtggggatggactgctccactgctgcagcagtgacagggcagggtgcacacacacacatacacacacacacacacacacacacgcaggaggggcaaggaaggcaaaaccygctcacccgtgttttgcaaacaatgtggacggttgctttggacctgggggaagctgcagttttgggagggagaaggtgggctgggctggtgtgcagtggtgaggaccaccccactggagctctctgctggtcaggcacggcccaccagtgcaggagctatgatgtgggccctcagggcaccaaaggctgccctgcaagcaggcccagcaatgctggggccttgggagaggtcagcagaccaagaggtgctcaggtcagaccacccagcctaatgggcaagactgctctgcagagttcatgtcccatagttcccctaaggataaagtctcctttgggagcaagtcaagcctagggg

SEQ ID NO: 748600 - DNA, 620 bp, Homo sapiens
gtaggcaaggttgatttcttagggcgtgggaggatccactcttttctgtgcctcgtttcactcccctagtggtattggcgtaaggggtgggtgctgtcaggggcagggctggctggctctgcacgtcaaagctcccactgcaatggcagttgatggtggggatggactgctccactgctgcagcagtgacagggcagggtgcacacacacacatacacacacacacacacacacacacgcaggaggggcaaggaaggcaaaacctgctcacccgtgttttgcaaacaatgtggacggttgctttggacctgggggaagctgcagtkttgggagggagaaggtgggctgggctggtgtgcagtggtgaggaccaccccactggagctctctgctggtcaggcacggcccaccagtgcaggagctatgatgtgggccctcagggcaccaaaggctgccctgcaagcaggcccagcaatgctggggccttgggagaggtcagcagaccaagaggtgctcaggtcagaccacccagcctaatgggcaagactgctctgcagagttcatgtcccatagttcccctaaggataaagtctcctttgggagcaagtcaagcctagggg

SEQ ID NO: 748601 - DNA, 620 bp, Homo sapiens
gtaggcaaggttgatttcttagggcgtgggaggatccactcttttctgtgcctcgtttcactcccctagtggtattggcgtaaggggtgggtgctgtcaggggcagggctggctggctctgcacgtcaaagctcccactgcaatggcagttgatggtggggatggactgctccactgctgcagcagtgacagggcagggtgcacacacacacatacacacacacacacacacacacacgcaggaggggcaaggaaggcaaaacctgctcacccgtgttttgcaaacaatgtggacggttgctttggacctgggggaagctgcagttttgggagggagaaggtgggctgggctggtgtgcagtggtgaggaccaccccactggagctctctgctggtcaggcayggcccaccagtgcaggagctatgatgtgggccctcagggcaccaaaggctgccctgcaagcaggcccagcaatgctggggccttgggagaggtcagcagaccaagaggtgctcaggtcagaccacccagcctaatgggcaagactgctctgcagagttcatgtcccatagttcccctaaggataaagtctcctttgggagcaagtcaagcctagggg

SEQ ID NO: 748602 - DNA, 643 bp, Homo sapiens
tccagcaaaacaccaaactgaaactaagttttactgactaaagatcatacataagagatcttttggtttaataataagaaccaaatcctgtttctctatgagtgaaaatggagagagatgctttatgggcatgcaaccatgragtaacaaaacaccctatagctcaaggggtcctttgcttggcttaatgctctgttattgctgtctcaaaattctagatactttttaaacaaagggcaccatatttttattctgccctgagccttgccaattatgttgctggttctggttcccaaggcaagtggcagctagctaccgtctaaggactcttgaggtgacaatggctgtcaaatccactttgtcctcaggagggtgctgttccacctttaatactcagtcctagtcttagatgcagactttttgccttcatttcccaatgtgcagctaaatataaaatcaggaatgtgtaagtaggattttaaagtctgagctactccaaaagagaaatagacatggaaatacaaatagatatgaatttgttatctatttgttgagctttgaccttgtgccgggtgcatggtaaattctgtgtttctttaatttgtataacaccttatgatacagatgtgatcattcccatttt

SEQ ID NO: 748603 - DNA, 380 bp, Homo sapiens
caggaacaccactgctcccagtcacaacaaccaaaaatgtctccagacatcaccaaatttcctttgtggaggcataattgttcccagttgtgaaccactagcctaatgagaaacaggtggcttttgaagaagaggaaagcaggttttttttttctctctctcctgctgggtataaagtggggagcatttytggtagcagccatcttaggaccaaaagaggaatcagctgatgctatgggtgacacaatggaaagatggaaataatatggggccctggtaacatggtaaagacttgattcctggagtgtgccccacctctggacctctagactcaccgttaagtgagatagtgcatttctatgttgtttaagcaaaagagt

SEQ ID NO: 748604 - DNA, 538 bp, Homo sapiens
gtaagaactgtctgaaaatggaaagcgctccattgggaaatacagacacctctcaagacagagttacatcctaataaactcattctaaattgaaaatgtcataagctgaaagtgcatttaatatgcctaatctactgatcatcatagcttagcctagcataccttaaacatgctcaaaacattgtaggccaaaccatcattaagtcagggactgtctgwactgctaaaggaatacttttagcaaggctgctttagacggaattaaacatttgcaccagagttgaattgtacattctctgagtttcccctctaatcctgatgtttttcttattttattcaccaaggctttttctaacttacttcactcatggacattcattttacagttgagagcttattctcctgtaaccatccttgaatctctctcctagtttgctgttcacaaaatgctgtgaatattttagacaatcaaacttgttaactctgtgcttaaaataacaatcagtatgaaaaaggcagaatataaattttaaagtga

SEQ ID NO: 748605 - DNA, 607 bp, Homo sapiens
gtctctaacaaaatttttttttctttaattaccagggcatgatggtgcatgcttgtagcccagctacttggaaggctgaggtaggagaatcacttgagcccaggaagtcaaggctgcagtgagccatggttgcactactgcactccatacctgggtgacagagtgagacacagtatcaaaaacaaacaaacaacaacaaaaagtgtttgttttagaaaaaacatttggtgaggtttgggcttaaaaatatattattctaaaatattcataaatattccctagtaataagattaaagtgacaaagacaaatatttttcctgtgcatttccatctctcaccttcccgtaatttgtctgttccatccagcatccaaaggaaattatttacaaaataatgtctgcatcctgggtctatatatctattgyctatgaggagagcatttaagatctgagccatcttcaagtcttatactttgtgtatagctctcatgtttttgcaggttaagtaagtttgtataccctttcttttattaatctgtgtatggtcagttcatttcgggtaatcttcagagggtgaaaggggaagcttttcacttcactcctattgt

SEQ ID NO: 748606 - DNA, 641 bp, Homo sapiens
gatgaagaggtaatgaaactattattaaggatgcctttgttctggttattttaaatcagattggtttgtagtttctcatattttactttgtagttttctgtggcattgtatgataaagcaaactttaatgaatgatgttggatgtttcagagaaatttgcaatgccattttcagcacttaaagcaattctcctatgttagaatgtgatatctatttccaccttttgcttaacaatctattgggcgcatctcctactttcagttgtaataaaatttaaattttttagcatttcaaaggcaattcaatcatcagttgacttctgtttaatatgaaaaatatagtcattctgactttgtggtttggaaaaggttrtagttcccaactttatattaatactttcattgtagttaaggcttaacacttcttttgattttaatattcttaacagatgctcaactctcaataactataataagatatacatttaagaaatatgtaaaaacatgccaatcctctccaagtttatttatagacctgaaattgagtatttatgctgtttactctgcagcaaatacaaatactgcccttaggtgttgcctttttacttgcaggttgtgtttcttgttatcatcataaattct

SEQ ID NO: 748607 - DNA, 569 bp, Homo sapiens
ttacccacctgctagttatgtcacctgggagggtccagagtacacacacttcatcaaggctttgagaaataaattggcaaaggcagcatcaacatccataaaaaggctccatagtggcagttctctgcaaagaaataagtgatgctgccatggraatgagccccttgaattaaataggtgatgggatcccagagcaacaaggtacaagaagtgatcagaatgatttggcctatagaaatctttggtgagaactaatttatcatggggttcctaggaccataatgaactacctactaaagtcttatttgtgttgtataagcaaaataaacacataaaacccaaaaattggtctggagacagaggtccaacatgaatcactacaattgatagtcatgcttcctcaacaaattctcagacttgagtcgtattatagatctagatccctttttaaaagatatagtagacagaataatggcctccaaaggtatctacatcttcatttccagaacaaatgaatatgtcatggcaaaggggaaactaaggttacagatggaaataaggtattctaa

SEQ ID NO: 748608 - DNA, 569 bp, Homo sapiens
ttacccacctgctagttatgtcacctgggagggtccagagtacacacacttcatcaaggctttgagaaataaattggcaaaggcagcatcaacatccataaaaaggctccatagtggcagttctctgcaaagaaataagtgatgctgccatggaaatgagccccttgaattaaatmggtgatgggatcccagagcaacaaggtacaagaagtgatcagaatgatttggcctatagaaatctttggtgagaactaatttatcatggggttcctaggaccataatgaactacctactaaagtcttatttgtgttgtataagcaaaataaacacataaaacccaaaaattggtctggagacagaggtccaacatgaatcactacaattgatagtcatgcttcctcaacaaattctcagacttgagtcgtattatagatctagatccctttttaaaagatatagtagacagaataatggcctccaaaggtatctacatcttcatttccagaacaaatgaatatgtcatggcaaaggggaaactaaggttacagatggaaataaggtattctaa

SEQ ID NO: 748609 - DNA, 569 bp, Homo sapiens
ttacccacctgctagttatgtcacctgggagggtccagagtacacacacttcatcaaggctttgagaaataaattggcaaaggcagcatcaacatccataaaaaggctccatagtggcagttctctgcaaagaaataagtgatgctgccatggaaatgagccccttgaattaaataggtgatgggatcccagagcaacaaggtacaagaagtgatcagaatgatttggcctatagaaatctttggtgagaactaatttatcakggggttcctaggaccataatgaactacctactaaagtcttatttgtgttgtataagcaaaataaacacataaaacccaaaaattggtctggagacagaggtccaacatgaatcactacaattgatagtcatgcttcctcaacaaattctcagacttgagtcgtattatagatctagatccctttttaaaagatatagtagacagaataatggcctccaaaggtatctacatcttcatttccagaacaaatgaatatgtcatggcaaaggggaaactaaggttacagatggaaataaggtattctaa

SEQ ID NO: 748610 - DNA, 562 bp, Homo sapiens
tttcatttttttctcttgcctgatggctctggctaggacttctactactatgttgaatatgaatggtaaaagttggcatcttagtcatgtttcactttttagttttttctcattcagtataatgttagctgtgtgtttgtcatatatggtccttataatgctgagatatgtttgttctatgcctaatttgttgagagttttatcatgaagagttgtttaattttattaagygggttttgcatctattgagataattatatggtttttgttcttccttttgttgatatatctcatttattgacttgcactatgtcaaactatattttagttcctgtgataaatcttatgggatcataatgtagtatatttttgatgtgttcttggattaaaatttgctagtattttgttgaggatttttgcatctatgttcgtcagggatattggtctgtagatttttgttgttgttgctgtgtccttgtctggttttggcatcagagtaatgcagtcttgtagcatgaatttggaagtattaccttctccttaattttttgagaaagtttga

SEQ ID NO: 748611 - DNA, 661 bp, Homo sapiens
ccatcattctatcgactcaactaatttggggtcacagagaatgtgttaagactagtgaatacccttggcatgtgtgtcttgatcaactgcctttcctgtagtgtgtcttctaatcagataggatagatgtgagatgaaatagtaacacacgagagataatttaaatctatgaatgttggtgttgatagatgtgcttcaagttcttataaaaatacaacatacaacyccaactgtggcaaaaagggttgaaaataatcaaccctattcaggtggctgcctagactcctaggaataatgaaatattgaaaactcattaatctctgcttttggcagattaggcattcagattagctttgctaagagaaagactacattgtcaagtgtatgcagtctccaccatggtcattttgttcatggactcatttaaaaagccatatggaggtggagcaagatagtggaatagaaggctatgctgatcatcctccacccccagccaggacaccaagttaacaatcgtctacacagaaaaaacaaaaaacaaaacaaacaaacaaacaaaaaaaacactttcataagaaccaatattcaggtgagcactcatagtacctggtttcaacttcacatccttgaaagaggtactaaagagatagaaaaaacagtc

SEQ ID NO: 748612 - DNA, 596 bp, Homo sapiens
tggaactttgcaaaaaatagtgcaaaagtaagaacttaaattcataatccaggaattattgaatctaaaaataaataaataaattttgctcaaaattcagtaaaaaatacttcaaagaacagattttttagaaagtaaaataaaatgaagaaagatatgttcattgaactgggataagacaagcccacacttgataaaaaaaattttaatatatgaaaggaaaagtaagtatacctacacgtaactcatgttatcatttgaactagacaaatggaaagttgacactatcccaaattgacggaaaaaaaatgatgacgggcacagtctcagagttatcttgaataaatcttacaaagcagtcaaatgtcaagaaaatattgagagatgcccctcaacagaggaacagagtaattttaatccctgttttcatgactgsaatgactgctcctgggagttactaaaaacttttggatttgagaagtgtcctcagcatggaatatttcaatcatttgtaggtgaattgaaggctacagatgtattataaacaaaaagcatgtatttcacatgccctgaggtaacattgttgggaaatattt

SEQ ID NO: 748613 - DNA, 523 bp, Homo sapiens
ggggtgcactgctgaaaagatacgcaaaaatgtggaagtgactttggaactacgtaacaggaagatgttggaaaaatttggagggctcagaagaaaatgtgggaaagttgggaatttcctagagactggttgaatggctttgacaaaaatgctgataatgatatgaacaataaggtccaggctgaagtagtcacagatggagatgaggaacttgatgggaactggaccaaactggactcttgttatgttttatcaaagagactggtggcattttgyccctgccctagagatctctggaactttgaacttgagagaggcgatatagggtatctagtggaagaaatttctaagcagcaaagcattcaagaggtggcttgggtgctgttaaaggcattcagttttataaggggggagagcataaacatttggaaaatttgcagactgacaatgtgacagaaaagaaaatcccattttctcaggagaaattcaagcccactgcagaaattagcagaagcagtgagga

SEQ ID NO: 748614 - DNA, 636 bp, Homo sapiens
gaagcattggagcttctacttctgggaggcctcaggaaacttaaaatcatggcagaaggcaaagggaaagcaggcatgtcttacatggctggagcaggagcaagagagagagggcaggtgccacatacttttaaactaccagatcttgcaattacttactcattcactatcacaagractgtaacaaggagacggtgctaagccattcatgaagaatccaccctcatgatccaattagctcccactagtccgcacctccaacactggggattacaatttgacaagagatttgggtatgaacacagatctaaatcgtattattctgcccctggcccttcccaaatttcatattcttctcacattgcaaaatacaatcatcttttctcaacagtcctccaaaattttaactcatcccagcattaactcaaaagtccacagtcaaaaatctcatctaagacaagacaagtcccttcaatctatgagcctgtcaaataaaaacatgttagttactttcaagatattatgggggtataagcgttgggtaaatactcctgctccaaaaggaagaaatcatccaagagaatgagtggggctacaggccccactcaaatctgaaactcaacagggctatcatta

SEQ ID NO: 748615 - DNA, 636 bp, Homo sapiens
gaagcattggagcttctacttctgggaggcctcaggaaacttaaaatcatggcagaaggcaaagggaaagcaggcatgtcttacatggctggagcaggagcaagagagagagggcaggtgccacatacttttaaactaccagatcttgcaattacttactcattcactatcacaagaactgtaacaaggagacggtgctaagccattcatgaagaatccaccctcatgatccaattagctcccactagtccrcacctccaacactggggattacaatttgacaagagatttgggtatgaacacagatctaaatcgtattattctgcccctggcccttcccaaatttcatattcttctcacattgcaaaatacaatcatcttttctcaacagtcctccaaaattttaactcatcccagcattaactcaaaagtccacagtcaaaaatctcatctaagacaagacaagtcccttcaatctatgagcctgtcaaataaaaacatgttagttactttcaagatattatgggggtataagcgttgggtaaatactcctgctccaaaaggaagaaatcatccaagagaatgagtggggctacaggccccactcaaatctgaaactcaacagggctatcatta

SEQ ID NO: 748616 - DNA, 537 bp, Homo sapiens
tttgttggtttctggtttgtaaaaggatacatagacagggatcatgctctcccccttcagaattttgtaagtaactttttactaccttcagatattgcattgttatgcagaatctgaaatccagctcatgaaaaaatatttgaagtggcaaaaaaaaatcttcaataaactgggtaagttggttatatgaatgcaagaattaatatgtaggtttagaaaaaaacataaaacataaacagaacttaatttttctgtagtggatagcatgtaggtatataaatattaaacagagtatatagagataaagaagaccttataaagaaggcagartggacaactcaaaattttgtttttgagagagagaaatttgcatagaaattgagataataacagtgatgtcatcctattaatctttcacaatctgcagaggataaaaacaggctatcaatatagcaaacacaataagcagaaagcttgcaccgcaagacttctttccaagtacacaatagagcattgttaactatcatcatcatacta

SEQ ID NO: 748617 - DNA, 536 bp, Homo sapiens
gttgaaaatattacatacaaataatatgtgggaaagtattataggataactcgttaacttgtatcagtgtaaagatatcacagagtcctctgttggaatcttcgttctaaaacttgttagttatttcagttcaatcaggcttattagcctctctratattcttttttttgtatgtacaaaattcacactgctgcatttctagtactctaagatgccatagaatgtaggccacatcattgttttacacatcattaataaaaaacaaaaggccaataattacactatggtattccatcaattttaacatgaatcctgatttcagagatgttaatagaaaaaagaataagaaatgattactgtatttaaattgatgaaatacggtaggcttttttgataattaaatgagataatgaatgcacaaagcttaacacatgcctgaaatgtcaatctcagtaatatcagcaacacaaaaatatttggaaatctctactatctttaaaataactgggaaatataatataacctgtctaaatttg

SEQ ID NO: 748618 - DNA, 603 bp, Homo sapiens
ctggataaatatgggaaactcaaaggctttggctacatgaattttaaatttctttctctccataggcacccttttaggccaaggactctatttattgtgtcaagggtagaatatctgagtattgaagagagtggctgacacaaagaagtatktaacttcatttgtcaattttaataattggcatgtattcgtaggcttttaaataatattcaaattttaaaatcctgtaacttgggtcttcaaaggagcctccttccaaaacaatttccaatagacataaggagaaatgaaggatgtgacaatatatatgtgaaccagaattatatttggatttaacaggtcaattattcagctgatatttctatttgaatacgcttacacaggaaaatgtagggataagttgaatttatggtgatgaggagtggagcacgtaaggtcaggggtagcaccatgatccatggtgctgaagggccaacaggtcccaaaggctaatggatcaaaagcagatgataacattatgtatccagcaccatgctcctaagaccttgcacactgtgtgaaaggtgaccacactgctggatgaaattccaagtgaagcggcat

SEQ ID NO: 748619 - DNA, 564 bp, Homo sapiens
gaaccaattagttctcttttctttataaatcacccagtctcgggtattcctttatagcaacgcaaaaatggcctagtacaattcacaaacgtgaaaccagtggagtgcattctacagctatcgctgtagaaatggtagacttttaaaggcaaaggcaaggaattccagtaaacaaatcttcctttaggktgctcttttatgataggtttcttcaaaaacatccaagaaatgttttactttcctatcaccttaaaataaaaataaaaataaaaaaaaaaacaccccagaacctttagcatttcaaatgataaatctacataggcattttcaaaagccattttgtatatgtgtttagccccaccatgtttgcttgcctcgttgaatattctggtgacaatactaagaacacaaaggaatttcagaattagcattttaatgcttctcataagtaaaaaaatcaactgagtctcattctgaagcaaatgttaagtttgctatgtggaggctgtggccaataaccagtcagcagcactaaagctgagtgtggatgttggctgttttctt

SEQ ID NO: 748620 - DNA, 481 bp, Homo sapiens
taccttaatttttgctttcacaattttagcgcatacccattttatgcgctaaaacacagttaacaatttttaggaaaaggattttaaaagacaaagaaaaaccccatatatcttttccctaaaaaagttctaaaaagttcttgccgaagtctaaaagtagacttctcctaccaagaaggatcaggatttctgaactatcttagaagtataggttacatcacacagaaaggacaaactgactgacccatctggaacataaaatcatgttcctaagaaaattatcttaaccaactacaaaacctaaaaactcatcattttttgccaacgwgtcttagccataagaattttcctttttcgcaagatagcaaaagccattaacccacctactggtaattattcaggctcgattccttaacatgctagtgccaaaagtttaataatagttatctatgtaccacatgttgaacctattgtataaaat

SEQ ID NO: 748621 - DNA, 642 bp, Homo sapiens
gagccgttagccacatgtggtcattaagctcttgaaatacagctagtgtgacggaattactgaatttaaatgtaaatagctgcatgtggtcagtggttactgtattgaattgcccagtcttatcttttgttcacttctctcctcatctagataattacaaatataaaaatattaacaaacgggaagtttctcaaaaacactcktcacttaaataattaaagtttactcttttttttcaatttttttttttttagctactccttctccagctgaaaataattaaactttagagcgatgctagaaaagtagcttgaagtcttagatttcatcagtctttagggtcaaattatttgtaaggatgttttacaggaatctaaaattgattaaccatgggttaatactttacagtgacttttaagaaagaaaagttacatgtttttgttttgtttttaaagatttactttggtctgtgaggaatatgtaagacaaaaaattcggagtccttaccgaaagagctttaataatgaaaccaatcctacctttagctctgcttgtatgaactcttgcacgtacccaaacaacttcatcagctttttgtattgtcaagtctctaacccgaaccaaaactcgatctgtaataac

SEQ ID NO: 748622 - DNA, 577 bp, Homo sapiens
taccaaaagaaaaattactgtcaaatagttaagtaagacaaatctgttgaaattacatatatagaatagaagtaaaagaaaggcaaacatttataaataaaaaatctacaggtctgagagaaacaacatgagtcaggtcaatttcaaagaaatataaggccgggtgcggtggctcacacctgtaatcctagcactttgggaggccgaggtgggtggattgccttgagttcaggagttcgagatcagcctgggcaacacagtgaaaccccatctctactaaaatacaaaaaaaaagtgaggcgtggyggtgtgcgcctgtagtcccagctgctcaggaggctgaggcaggagaattgtaggaacttgggaggcggaagttgaagtgagccgagatcatgccactgcactccagcctgggcgacagagcgagcctctgtctcccaaaaaaaaaaaaaagaaatataaagatgccaacatacactaacaaaaaagagcggttataagaaaagatagactggggtctaagaataattcatttcattcccagacactaaagctacgagtaaacaaaatggag

SEQ ID NO: 748623 - DNA, 606 bp, Homo sapiens
gggtgcccggatgagcatatcaaagcctggtcccctgagcagttgcatcaatatctcctaggaacttgatagaaaggcaaattcttgggccttaccacagacctactgaatcagaaatcttggcaatagggttcaccattctatgttttaaggagcctgccaggtaattctgatgcactgccccacacaataccaacatcttaccagtgtggagaacccacagtgttcaaagctctcttacatatatcgctgttgttctggacttcataaaagccctgagaataggcatggcaggtgtcattatttcccctttacagatgaagaaattgagccctaggaaattattccatttgtgttggtaatacttgctttatcagaatcacttggaacgcttgttaaaattgcagatacctgggctytaccctagacctactgaatcagaatcattggggctggggctctggaatctagatgaaaaaaaaaagaagctcctaggacattctaaagctaaaagtttgagaaccaattgcaacaggaaacagtggaatagatatcagagcttatagcccctcattcctaaggcatgctcttagagagtcttgagaa

SEQ ID NO: 748624 - DNA, 619 bp, Homo sapiens
agtatactgagcagtctgctaaagattctatgatgtgtattatcacaatagaatgaatgcagaggcaatatgagaatctagttgtctattaagccagaaatcacaaagaattgtggttatataaacagaatgtcatccgaaggatgagggagctgagtggttaaggcaatggactgctaaatacaatgtcactcttaacaataattattttttgctttggacaactgtaattttttcataaaatgttattagcttcattatttacataatactacatatgcaaacatgtatgcaatgtatatataatttttaataaagtaataaatatttaaaaatgttttaattcccaatactgtaaatattgatatatataccaataaaaacaaaagcttgtagggttcttaattatttttaataatgtaaaaggcaactcgataccaaaaggtttgagaattgctgattttaagartaagtttaaataacaatggagctcaaaatcaattcacagacacccttagtacatcaggttttcaatgttttgcaaactaaatatacagcggaagcataatatttcataagtataatttttacctcttctccttctgcctcaggccgaaca

SEQ ID NO: 748625 - DNA, 670 bp, Homo sapiens
  misc_feature 173: n = A,T,C or G
caaagaaaaaagtaaaaatcaaagatgtttatcaaagtgtaatttagaatgggggagaaattagaaagggcttacatgttcaaaaaaaaaaaaaggaaaaaaatgaatatttaaaccgtaggcctggcactgtggctcatgcttgtaattctggcactttgggaggccaaggntaggaggatcatttgaggccaggagttcaagaccagcctgggcaaacatagcgagattccatctctacaaaaaattttaaaaattagccaggctcctgcttaagccatgatctcatcatgcactcgagcctaagcaacagagcaagaccccatctcttaaaaaaaaaaaatttaaaaactatggataataagtaatgcctaaaaattaggtattgcaagaatttatgacaccatggcaaaatgctrtaggataaaaatgttactgaaaaaagcaagatattcattgtatatacaatataattagagtaattacgaagaaccaaaatttttgtataaagttaattaccaaaatgttagccattttactttttaaaaatgtattttaattgcatttattctttttatagtatgatacagatttttatattcttgataaatatccattggctgtaagacctttctataccatgcctgacccaagaaatcccgtaagtaat

SEQ ID NO: 748626 - DNA, 635 bp, Homo sapiens
gtttcttttttttaaattatactttaagtaatgggatacatgtgcagaatgtgcaggtttgttacataggtatacatgtaccatggtggtttgctgcacccatcagcccatcatctacattaggtatttcttctaatgctctccctcccctagtcccccacccctcaacaggcccgggtgtgtgatattcccctccctgtgtccatgtgttctcattgttcaactcccacttatgacttatgtggtgtttggttttctattcctgtgttagtttgctgagaatgatggtttccagcttcatccatgtccctgcaagggacaggaactcatcctttttatggctgcatagtattccatggtgtatatgtgccacattttctttatccagtctatcagtgataggcatttgggttggttccaagtctttsctactgtgaatagtgctgcaataaacatacgtgtgcatgtgtccttataggagaatgatttataatcctttgagtatatactcagtaatggtattgctgggtcaaatggtatttctatttctagatccttgaggaatccccacactgtcttcaacaatggttgaactaatttacactcccatcaacagtgtaaaagcattcctattt

SEQ ID NO: 748627 - DNA, 621 bp, Homo sapiens
ccattaaacgagtgatttctgggtctaagacaccatagcaaacattattatttagcgtgcttacattccagtggggcctctactctcaagaaaaccagtgctattggagatatgttatatgaactgggacatgttaaatatcactggaacatatgctattgctttacacttccrtagcttcattcctgttactggagagtagcaccattttcaaaagtgagtaagtcataagatcaacctggaaaaatccatcttaagatgttccccttgacaaatcgaaaggatagctcaccatacttatttaactgctaagttgaaaatagccatttgtctaattatgcttttatataactttttggtaactcattatttcaactttaaaagtcaaattctagggatatggaattgtgaaagaaaagactttgcattcacaagtcagtgcgtgaatcgcaatcaggcaaaaatacagtgatctcatctgtaacacataaactgggtaattttttatttatgaagtaatgcaaataacttaatatagattactacactaactcatagtatactttacttcagttaaataacaccattttgggcattactgaaatataaatggacgtgaag

SEQ ID NO: 748628 - DNA, 613 bp, Homo sapiens
aataacacagaagaaagaaataaaacagctcctatttacatagtaaagtaatatacttacttctagcttatttgataatgtatataattcaaattacttttagttgttttatttataactgtattctcaagttccttaatttgaacaattttaaatgataatacagtggttaaaatggaatgaaaaatttagtttcctaaaataaaatgtatcacaatcactgaaaacctaaattatctaagttgtaacacagtgtgctgtcctatttctgatractctggttagaaagcaattggtggacagttttgcagagactcctaagctacacatcatcactgtacagaaaactctatacatcattagcaacgtatcaatgcaagcaatataattccctagagaagaatagtttgcacttaacatcaatttaaccattttctctagacacatcctattatgaagtttcataactcagcagaaacattcggtatgtagcagggggcaaacattatgtaaaagtggggaatgatcaaaaacttcactctcagatggactctaatctttaactagagaatatactatattataatttaaattacctcgatgccttactttt

SEQ ID NO: 748629 - DNA, 613 bp, Homo sapiens
aataacacagaagaaagaaataaaacagctcctatttacatagtaaagtaatatacttacttctagcttatttgataatgtatataattcaaattacttttagttgttttatttataactgtattctcaagttccttaatttgaacaattttaaatgataatacagtggttaaaatggaatgaaaaatttagtttcctaaaataaaatgtatcacaatcactgaaaacctaaattatctaagttgtaacacagtgtgctgtcctatttctgatgactctggttagaaagcaattggtggacagttttgcagagactcctaagctacacatcatcactgtacagaaaactctatacatcattarcaacgtatcaatgcaagcaatataattccctagagaagaatagtttgcacttaacatcaatttaaccattttctctagacacatcctattatgaagtttcataactcagcagaaacattcggtatgtagcagggggcaaacattatgtaaaagtggggaatgatcaaaaacttcactctcagatggactctaatctttaactagagaatatactatattataatttaaattacctcgatgccttactttt

SEQ ID NO: 748630 - DNA, 588 bp, Homo sapiens
aatttttcctttgtttcttttcctttgttttccttaaaatcccttttaaggaattttctttcagtgatatcctctgtatatcattgtatgaagggctagtctgtgatagaggattagtctggttccatatgcccttgacccaagatcaatgactaggtcccaaactcarttacctcttcagaagtcttcctggtgaaaccccgtatctactaaaaatacaaaaattagccgggtgtggtggcgcacgcttgtaatcccagctactcaggaggctgaggcaggagaatcgcttgaacccaggaggtggaggttgcagtgagctgagatcacgccactgcgctccagcctggcgacagagcaagactgcatctcaaaaaaaaaaaaaaaaaagttttcctaactacataagtgtgggaattgtggtgaacttagagataatgtccagtgtgaagggggcaactgctacccaactccaactaattgttgccagccaggaatgaaaatccgttatgtccacatcttcctgttttttaaagagaagctggaagtgctgagttttatatgaaatctgatttttaaatgttagtg

SEQ ID NO: 748631 - DNA, 602 bp, Homo sapiens
atgaaaattaggactgaacttttttacccactaactggtcaaggaatcaaaaaactgtcagctaagaagtgtccatttaattcctctccagcgtgggccacctctaatcactgcctccaacccacatccaaggcaagattgctctcaatggattagagtcttctttcattgtgaataaatgtgttaaaattgtaaaaccctccatccatataataccttatataaatacatccaattccatcccaaactgaacagaaagctgatgattaaaacacgtctcaactgagtgtaccaacgtacatatgtccacagctcrgtagccactaaaaccacgatgcagagcagacaaagaagtaccttaaaacagagagaagcagaaatcagccaccaaaaacacttaagacagctaaaaagaactggactcaaaagcacaaaatcatttctacaattttgtggcttgttcatcaatacggtataagtgacctagtacaggttcttaacgtaattatggtggagtttggaaagtattttaaaaaggaaacttaatgacgttgcccttgccctcatcccatcttaccattaacacattatatggatccact

SEQ ID NO: 748632 - DNA, 644 bp, Homo sapiens
agagcaatgcaaaataccaccacactaggggagtagccacaaagaaacttcatcagatgaaacagactataagcatatctttctcacaggaccaacttattctaaccaagcttgcagaaacataaacatacacatgtggactgggtgtagtgactcacgcctgtagtcccagcactttgggaggctgaagcaggaggatcgcttgagcccagaagttagaagttacatacagtgagctatgatcacaccactgcacacctctgaacaacagaggaagaccatgtctctaaacaaaacaaaacaaaaaatatatgtaggcccacaggttagtgttgtttccatttctttacttttgggttgatttttttgtttataacaagaaatgcaaatgtctagcagactagaatgctctcatcagcagatgagtacattttytccctcagctagaggcctgggcatggtggctcacacctgtagttccagcactttgagaggtcgaggtgggaggatcacatgagcccaggagtgcgagacaagcctgggcaacatggcgaaacatggtctctaccaaaaatataacaatcagccagcatgtgtgcctgtagttccagttactcaggaggctgaggtggaaagatcactgg

SEQ ID NO: 748633 - DNA, 653 bp, Homo sapiens
gtacaagttcagcatcattacattattcagttctaaaatctgatacacaaacccatatgaaatgagaaaacctgtacaaatatgtattcttccaagaataataattttctataccagctacacaaaaatagaatatacattcccctctaaaatgctttgatgtaaggaagttacattttggttggaaactaacactggttactacattaccccttaatttgaaaaaggcattttataacaactggttttatactatccacacagtttcaaaaataacaatctgtagagcagtttattccttataacagaaggaaaaggctgtaggccttcaattgcgtgaaaagaatcaaaatarcatccccactactatgctgttactcttttctaggttacccctttctattttaagatctcattagatgacagacttactgccagtcagaaaacaagtaaacgagtccttaaacttttttcaataaagttattaaatacagagaatttccatatccattcaatgttttaaaatattaggcaatattttaaaaggcataagaaatacctaatacccagcttaaaaaaagaaacattacaaacacattaaactccccttgtataactcccctcataatttcccttgtcttccctgcgctttt

SEQ ID NO: 748634 - DNA, 602 bp, Homo sapiens
aagtagcagttattgcatgttttaaatagctttcaaataactccatattttaaaaagtgattagaagaccaacctattaaggaactgttcagtaagattctgctgctgatcaggaccatcctcctgattcacgcctccttcaagcaacatctgttggtatatctgccgctgttgctccttctgttctaaatgctgttgatagcgtaatctttgcctataatattcttgaaattgttctgttgaatctcgaagcttaaaaacattagaaaaaaayatatatatttgagcaaactatgacagaatatatcttaacagtaccttttataaatgctgaataaaatatacaattagctatatttaacaatcacaaaatacttaatctattgctctttgaaaaacagtatgtgtcttaatactcaagtggatcagttaatttgctttattccacggaaacagactgaccgaaatgaatggttgccttggttccctgactaacccaaaataaaaatacaaattataatggttacaagggggccatgatcagagaaaatgaatgtagataaagactaatacaaatctggcatttctttaaaaatatccat

SEQ ID NO: 748635 - DNA, 602 bp, Homo sapiens
aagtagcagttattgcatgttttaaatagctttcaaataactccatattttaaaaagtgattagaagaccaacctattaaggaactgttcagtaagattctgctgctgatcaggaccatcctcctgattcacgcctccttcaagcaacatctgttggtatatctgccgctgttgctccttctgttctaaatgctgttgatagcgtaatctttgcctataatattcttgaaattgttctgttgaatctcgaagcttaaaaacattagaaaaaaacatatatatttgagcaaactatgacagaatatatcttaacagtaccttttataaatgctgaataaaatatacaattagctatatttaacaatcacaaaatacttaatctattgctctttgaaaaacagtatgtgtcttaatactcaagtggatcagttaatttgctttattccacggaaayagactgaccgaaatgaatggttgccttggttccctgactaacccaaaataaaaatacaaattataatggttacaagggggccatgatcagagaaaatgaatgtagataaagactaatacaaatctggcatttctttaaaaatatccat

SEQ ID NO: 748636 - DNA, 605 bp, Homo sapiens
cagtaatggattcttcttatctgtgatccctagacccattcctccctctgctctttgcctcctgctagggtccaggggtaggatctctttctggagtagatgcacctgtaccaaatagaattcctgcctaggggtgtaccaaggataggttggggggtaatgccccaccctgactgcaggcatttagaacttagagtaacaaaatattttttcagggaggagaattttatcactgtcatggtttagaattactagcaaatggtaataataaaaagaagactgactttcagttggtattataatttttttaagktccttaaggcaatggatccccttattgccagttcctggggcagactgcactcactgtcccacccttggggcaccactgttcctagttcttcctcatgaccatatgagctttgaaaagagagaattgggaagaggtaaaatctgaaaatggcaggagtccaaggcaagaactacagtaagggttgtgggggcccctgttctatgcagggcttttgcaggcattgttgcttttaatcctcaaggagaccctgcctgcattttaaccaaggaagacaggaaggctctcctgggtg

SEQ ID NO: 748637 - DNA, 485 bp, Homo sapiens
aggagcagcagaaagatggagcctcatctgcgcgtggctttgctatcttacatgataagcctcagtggcatccagtggtgtctgatgggctgatttggagtcatattcctgcccacttttggaatgagcgggaagggtcaaaaacggactctttaacttccttaatsatgaccaagtgctccctttccctaagatgtcaccccatgggggaattccccatgatggtgggcggacactctctacccccaagaaggcatcagtgggatttcccatattgggatggtaacaggaaggggattatatgctggagagtcaacaaagtgacaatcccactacttagggtcagttttgaggaatgaaagatgtctaacttcttgacaggagacctcatcacttcgtaaacctagcctcaaaaatgcaggagcctattaagccaagtcttctctcaaggtgatggagggacaaagactctcagagcacggcac

SEQ ID NO: 748638 - DNA, 549 bp, Homo sapiens
acccaagcttggggtcttggggatggggatgctaggggatgggatggccagatacaccagagtggctgggaatgaaagagtgtcccggaaaacctgcttcctcggagccgatcctgtgtgagcagaagaaatctatccacagaggggtgagatcgcagagcaagtgggttacctaaaaatagcagtgctggtttcccacagttagagatgggtcctctgccattcatctcaattgctttgtgcaagtttgcttatttattgagagygagagaaaaggatcaaaccattcatccaaagatggaaatctgcaacctcttctacaatgatcagccagacagatgagctgagtgagaagtccctgaaatctcagaggcctagggctggccaggagagtgggatgggcatgcttaggagagtggggtgggcatggttaggagctgcccccagcttgccctgccttcgtagcagagttgatggtgggctgaaccttacccccaacatggggacttttgcaggggaggcagacctgtgtgtacatgtgagggtaca

SEQ ID NO: 748639 - DNA, 613 bp, Homo sapiens
tattaacagttagaatcttactttaaaaaaagaacccaaattaggctgggcatggtggctcatgcctgtaatcccagcagtttgggaggccaaggcgggtggattgcttgaggccaggagttcgagaccagcctgggcaacatagyaagatcccatctctaaaaaaaaaaaacaaaagaacccaagttggaaatacttgcaagtcatgtatctaatctgataaggggttaatatccagaatatatagagaactcataaaactcaacaataacaaaacaagccattcaattaaaaaatgggcaaaagacttgaataggcatttctccaaaggagatataaatggccaataaacacatgaaaaggtgttcaacaacactaatcattagggaaatgcaaatcaaaactacaatgagataccacctcatacctatcggtattaggatggctactatcactgtcaatggggatgtaaatgatacagtcactctggaaaacagtatggcaattcctcaaaaaattaaaaatataattaccatatgatccacaattctacttctgggtatgtacccaaaataattgaaagcagggtctcaaagagatctttgtacaccca

SEQ ID NO: 748640 - DNA, 601 bp, Homo sapiens
gtgcatataaaagttttgttggctggacatgttggctaaaaaacttttgtttatactatagtgtagtttattaagtttgcaatagcattatatttaaaaatgcaatgtacataccttaattataaaatattttattgctgctgggtgtggtggggcatgcctaaagtcccagctactcaggaggctaagacaggaggatcacttgagcccaggaatttgagtccagcctgggcaacatatcaggaagcttgagaagagggagagagacaggggaatggccagtcagtggagcagtcagaacagaaacaacatttattgattaagtttgccatcttacatggtcacaactcatggtgtctcaaaacagttataatagttataccaaagrccactgatcaaagatcaccacaacagatataataataatgaaacatttgcaatattgtgagaatgaccaaaatgtgacacagagacataaagtgagcacatgctgttggaaaaacagtgctgatagacttgctcaatacggggtttacagggttgccacaaacctttaatttgtaaaaaaaaaaaaacaaaaaaacagcgaaacacaataaaa

SEQ ID NO: 748641 - DNA, 629 bp, Homo sapiens
gaatgtccctcaattcgggtttgtctgatttttttttcttataattagactgggttatgagatttggaaggaaagtaccataaagtgccattctcatcatatatcattccacatactatcaacatgatttagcacatagtcttgatcacctggctgaattactgtttgccaggtttctcccctgtaaaatcactcattttcccctttacagatgttgtacttttgggaaggaagtcactatgcacagcccacatttaaggaggcrgaagttatgctgcaggatggctgtctacataagttatttgagattcttctgtgggggatttatctcttcttcctcattcgttaatttattcaatcacttatatcggcatgggctcatgaatatttcttttgtactttgagttataatccaatatcacttgttttattgctcaaggcaatttgaaatgttctgagtaactcagtgcaaaacaacctcttccaaaggttgtaccagctcacagggtagacgtcattaagatccatttcccctcaacttcacagacccattaaaaaggtcagaaagcaagagataagctgacatccctgcctagcgcccaatttctggaagcccctaaggaagatga

SEQ ID NO: 748642 - DNA, 452 bp, Homo sapiens
tttggtgactttttattttttacatctcagatagtcctaggaacattgataccccccagcttgatactttaatgttattaatattaatctgtggttatctttttcttaatagtgaggatgccattggtgttttggatgggacaattctttatggtgcattgcagaatatttagcatctctgcattattcacacccccttttcattgtatcaacccaaargcctccaggggtgatccctaggtggattgagtactcccagttgagaaccagtgtattctattattgttaatattagttggcatttattaagcactcaactatgggccaggcactgtactatggacttagcatatactcttatttaatgttcacaattccactatatggtggataccactatttgtatttacagaagggaagttgaggttataagagcttagataatttgccta

SEQ ID NO: 748643 - DNA, 563 bp, Homo sapiens
ccctctctttagtttctggttaccatcagctgggaaaagagaacgaaatcaggtaagatcatttttctttgtcatctttattttatcatttggtttccttttctttagaaagaataaagcgttggcttctgattttcctcacatttctgcttgtgcacatgaggtaaggtttcctctttcttgttattttgattttcttggagaaccgttttctaagagtatccaacacttactggtaaaaactgcagctaattcctctttgtaggttcaactgtgatcattagtttcttgtagcatatatttcataggaatcctgtttttattttagttttgaactttgcagtaagaaagcagaatgaatctgatttgcatatggtttagttcaacatcagaatcctgcrttgagaagtactatgttgaagcctaaacgtatggagcagaaggtagagctgctttgggtgaagtggggtcaaagccttagagcagtggtccccaaccttatgtcaccaggaaccatttttgtagaagacagtttttccatggacccgggttgggggcgtggt

SEQ ID NO: 748644 - DNA, 581 bp, Homo sapiens
gtgtgtgtgtgtgtgtgtgtgtgtgtgtgtgtgtggcgacaatgttatcattagtggtataattttattttgcaaagagagaagtgtttcctgttttatcacagctttccccgaggagggctggtgtattaatttgctgtattgcctcctggctgttcccaggctgtttttcctcttcatcatggaatttttaatggccctactgcctcttgggaagcatgtgaggaagagttcctcagggagtgcttcccttttttcacatgcctataattactctcctttaagagcacaaagagtttgataatcatgcctgaactatgaaggttccctcctgtcaggttactgagctgaggctgcttcttgcctggacactgccaattccattctccyaagcaagagcaagggcttttcaacagtttcctccctgctagaaccatatgcccttctggttctcagaataggtgggggcggggggcattgggaggatggtgcatgacctaaaatcctctcttgtttaatatttcattgctataaacaaataaataattggaccataatattaaaataacattttattgatg

SEQ ID NO: 748645 - DNA, 612 bp, Homo sapiens
gtttaaatgttttttaaaattaaacatgtttcttagtaaatattgaaggggtataaaagaacatttatagcagatatgtaaggagtaaataaaatacagcaaatatccaygtacctaccattcactttaagaaaaagttaaaattttcttttataaaaggtttaaaagttttaaaaagttaaaatctttaaaaatcttctccctgctctcctcagaggtaaaagttattctgattgttttttatcgtttgtcattcttttgtttttttcaagtagttttagcagacatatgtatcttcaagcaatacattgtccagttttgtgtttttgaaccttgtgtatatgaaatcaaagtatgtcatattttatgttgcagctttcaccgggttctgtttttgagattcaattatgctttgtcctgccaaaatctatgtttcaactgccatgtatgtggtattctattgtatgaatatgattaatatgttataattaaatgttcttgatgaacatttggattgtattcctgttttatgctattatggaaaatactgcactgttctctgagagaacaagtgcaaacattcttttaggccacttcctgctcattaggatg

SEQ ID NO: 748646 - DNA, 612 bp, Homo sapiens
gtttaaatgttttttaaaattaaacatgtttcttagtaaatattgaaggggtataaaagaacatttatagcagatatgtaaggagtaaataaaatacagcaaatatccacgtacctaccattcactttaagaaaaagttaaaattttcttttataaaaggtttawaagttttaaaaagttaaaatctttaaaaatcttctccctgctctcctcagaggtaaaagttattctgattgttttttatcgtttgtcattcttttgtttttttcaagtagttttagcagacatatgtatcttcaagcaatacattgtccagttttgtgtttttgaaccttgtgtatatgaaatcaaagtatgtcatattttatgttgcagctttcaccgggttctgtttttgagattcaattatgctttgtcctgccaaaatctatgtttcaactgccatgtatgtggtattctattgtatgaatatgattaatatgttataattaaatgttcttgatgaacatttggattgtattcctgttttatgctattatggaaaatactgcactgttctctgagagaacaagtgcaaacattcttttaggccacttcctgctcattaggatg

SEQ ID NO: 748647 - DNA, 570 bp, Homo sapiens
ccacgtacctaccattcactttaagaaaaagttaaaattttcttttataaaaggtttaaaagttttaaaaagttaaaatctttaaaaatcttctccctgctctcctcagaggtaaaagttattctgattgttttttatcgtttgtcattcttttgtttttttcaagtagttttagcagacatatgtatcttcaagcaatacattgtccagttttgtgtttttgaaccttgtgtatatgaaatcaaagtatgtcatattttatgttgyagctttcaccgggttctgtttttgagattcaattatgctttgtcctgccaaaatctatgtttcaactgccatgtatgtggtattctattgtatgaatatgattaatatgttataattaaatgttcttgatgaacatttggattgtattcctgttttatgctattatggaaaatactgcactgttctctgagagaacaagtgcaaacattcttttaggccacttcctgctcattaggatggctatatcaaaaaacagagaacatcaggtgttggtgcagatgtggagaaattggaacccttgtg

SEQ ID NO: 748648 - DNA, 647 bp, Homo sapiens
ttccccattccaccctccccagggacattggagtggacgtgacattggaactcctgtagaggctgccggctttggcaaggttgattgggacccacatgtcagcctgggccacttcctcatcaccgtaactctgcgccaaataacaagaccacgggaatctgctagcrcaggcctggggaatgctctccattactctcttttattctctcgggagatttatgtggcctatctcccttccctttgtccacctgcaaggccctataagtcatgtctcggggctgacaggtcacagggcctgtgctgctgctctgtcagagtgagtgaagctgaggggtgattaaaagagaggaagggtgagaggtcagcagcagacggcatgatgggagtttgggatgtaattatcactcctgtgacatactgcggggctgttctcccccttcttataatagatatacacacttaggtgcagcttagagagaggaggagggtagtgatgccgagaggtgcagaagacctgctggaatgggctttgtgtactgggcctcacaggtgaagttagagcaccaagggacccagcagcatctgtggcctcactggagagcagcaccctccattcaatgagatgttccccaaagccctctgcacaa

SEQ ID NO: 748649 - DNA, 642 bp, Homo sapiens
ctgtccattctgcagtctaccgaggcagtggtttttaaccctggctgcatgttagggtcacctgggaagttttaaaaagtcctaattcctggactggaccacagaccagttaaatcagcatggggaggtggggatgggtttcagtctttaaaaagaaatgtagctgaggctgagaaccaccactctaaaacctggctgctacccttgctaccattaaaactgttcttgctggattcacccaccagtgacttctactattaaaatttagcccataggttgatttttatgacactgatgctrtataaccacttccttctttggaatgctccctttcctgaccctactttcctgatttttctgccacttctttgctctttctcagtttctgtggagttgtttggtaggtcagtctagcacagactggatgccggtctctgccgccacctccgttatttcagtgaacacctgtatgccagtgagttcctttgccataccaccttaatgcaccaacttaaaagcacagattagagtggagcattcacatttattactgcaggcttctaggaaagcatattaaaggtctctggtccttctctcacctcccttgttcctcctccaagcccagtgaggtaggaggaattg

SEQ ID NO: 748650 - DNA, 642 bp, Homo sapiens
ctgtccattctgcagtctaccgaggcagtggtttttaaccctggctgcatgttagggtcacctgggaagttttaaaaagtcctaattcctggactggaccacagaccagttaaatcagcatggggaggtggggatgggtttcagtctttaaaaagaaatgtagctgaggctgagaaccaccactctaaaacctggctgctacccttgctaccattaaaactgttcttgctggattcacccaccagtgacttctactattaaaatttagcccataggttgatttttatgacactgatgctatataaccacttccttctttggaatgctccctttcctgaccctactttcctgatttttctgccacttctttgctctttctcagtttctstggagttgtttggtaggtcagtctagcacagactggatgccggtctctgccgccacctccgttatttcagtgaacacctgtatgccagtgagttcctttgccataccaccttaatgcaccaacttaaaagcacagattagagtggagcattcacatttattactgcaggcttctaggaaagcatattaaaggtctctggtccttctctcacctcccttgttcctcctccaagcccagtgaggtaggaggaattg

SEQ ID NO: 748651 - DNA, 647 bp, Homo sapiens
ttccccattccaccctccccagggacattggagtggacgtgacattggaactcctgtagaggctgccggctttggcaaggttgattgggacccacatgtcagcctgggccacttcctcatcaccgtaactctgcgccaaataacaagaccacgggaatctgctagcgcaggcctggggaatgctctccattactctcttttattctctcgggagatttatgtggcctatctcccttccctttgtccacctgcaaggccctataagtcatgtctcggggctgacaggtcacagggcctgtgctgctgctctgtcagagtgagtgawgctgaggggtgattaaaagagaggaagggtgagaggtcagcagcagacggcatgatgggagtttgggatgtaattatcactcctgtgacatactgcggggctgttctcccccttcttataatagatatacacacttaggtgcagcttagagagaggaggagggtagtgatgccgagaggtgcagaagacctgctggaatgggctttgtgtactgggcctcacaggtgaagttagagcaccaagggacccagcagcatctgtggcctcactggagagcagcaccctccattcaatgagatgttccccaaagccctctgcacaa

SEQ ID NO: 748652 - DNA, 541 bp, Homo sapiens
tcactagtttctgattcaaaatatggggtaggtggatctgattagtagtcatatgcctgtgtcctggctaggaagtcagaatgaggttatctggaaagttgagcttcctcacacatgggaaggtacttcagatgctggacagccaataagaataacaaaggtccaccagaaccattgccccagtcactgattgaacaaacrtttactgaacactgatgaagcgaagtcctcctcagggacctcttagggaagagggtaactgccctaaagcaggatactcctgggctccttagatatactatccttgaaactattaggcccctgtccagagtacctaataataataatggcaaatatgtatttggtggtctgccatttggaagcaacatctcacttattcaacaactctaaaggtaggtacttttatctccattttaaaacaatgaaatacacttacagttacagacaaacttgctcgagtcacatatctattaagtgtcagtcaagattcagattcaagtctgatgttaaagagtgtctg

SEQ ID NO: 748653 - DNA, 683 bp, Homo sapiens
tcgcaaaaatcagtccttgaaaagagctgacctgaaagtgtgtttcatggtattaatttatgtcttctctctatgcagtatttaatatttttgttactgtatatctcagtttttaattctgatggctgcatcaagtgatatttccagtctgggctctggtttgaaacctgaggtggagaaagcctttttaaaaccagttaatatagtatwcacagagtttctctgtaggtaatgaaggaacacagaatacataaagtccctgccaaggacagaatcccccaccccatctaatggaagagatacaggcttttccctaaaagtccctgccaaggacagaattccccacccgatctaatggaagagatacaggcctttccctaagaagtcactgctataattgggcaggcagagaaaatcacaaaggctgcctgcaagcaagccatccagaggttaagcaactaacagtaaccactgcctttcttactgaactcctaatatgagcctggcattttacatgtactctctcctgtcattcccacaacaattcttcaaggtaagtatcattatcctcattttgcagatgaggaaaacgtcactccaagaggttgaataatttacccagggtcacacaaccagaaagtggcagagatgagatttgaacccaggtgtttctgatatccatt

SEQ ID NO: 748654 - DNA, 683 bp, Homo sapiens
tcgcaaaaatcagtccttgaaaagagctgacctgaaagtgtgtttcatggtattaatttatgtcttctctctatgcagtatttaatatttttgttactgtatatctcagtttttaattctgatggctgcatcaagtgatatttccagtctgggctctggtttgaaacctgaggtggagaaagcctttttaaaaccagttaatatagtatacacagagttyctctgtaggtaatgaaggaacacagaatacataaagtccctgccaaggacagaatcccccaccccatctaatggaagagatacaggcttttccctaaaagtccctgccaaggacagaattccccacccgatctaatggaagagatacaggcctttccctaagaagtcactgctataattgggcaggcagagaaaatcacaaaggctgcctgcaagcaagccatccagaggttaagcaactaacagtaaccactgcctttcttactgaactcctaatatgagcctggcattttacatgtactctctcctgtcattcccacaacaattcttcaaggtaagtatcattatcctcattttgcagatgaggaaaacgtcactccaagaggttgaataatttacccagggtcacacaaccagaaagtggcagagatgagatttgaacccaggtgtttctgatatccatt

SEQ ID NO: 748655 - DNA, 614 bp, Homo sapiens
aactgacatccctaacaaagatgtgatgtgtaaaggatgcttacttacccagactatgacctttgccattctagggagagttacaggaatagtgcagggtttaagatattatcctagacagatggaagacaaaccagagcagccctaattttccatgaggtgggttytacattttaaggttcttccctcttcttctaatagtttttttttttaagacagatgaagattgctttaaagggccttcttttctcaaggatgtgccatcagaaactaaagagatgtatctgttatagacttacttcttcctgagactgatttggaggtatgagatagattttgtattgtctgaactgctgcttcctgctatttctatttctatatttctaataatacaaaataatcgtagaaaaaaacctaaatgctcagacttaacaattgctttatgattttttaaaaccccaataaccaagaatacttaatccaaaaattacttaagaaatttctgaggtgagccagggagtcagtccacatatgcctgaatataattctctttgaatcatggaagaggagaagaaaatagcaagcttatatttctacattagaatggttaaaaa

SEQ ID NO: 748656 - DNA, 633 bp, Homo sapiens
aacatctgaaaatcaatcaatgtaaaatagccaataaataaaataaatggcaaaactcatatgatcatttccacagttacagaaaaattatttggcaaaatctaatatccttttgttattaaaacacccagaaaactagattagaaggggtcttcttgagcctgataaagcacatcaatgaagaatttgcatctaacatacttcatgttgtaagaytgaatgtacttccttaagagcaggaagaagcagggatgttcactcttgccattcctattcaacattttactggaagttctagtcaaggcaattaggcaggaaaatgaaataaaaggcattaggatgaattaaaactatctgtattggcagataacccaacaaagtgctcggaggtaagcatattccttaaagaatcacacacaaaaaattaaatagaagcatttttccaaatagatttgttttcttacttacatattaaaagaaaaaatcaaacaaaaaatagaatgggcaacaggacaacagttttaaaatgcacttttattacaaaacaatgcaaatgatttgctaaaaatatggaagtctacggagtaaaagtgaagtttttctaagttcctcttttcagaattatccttgata

SEQ ID NO: 748657 - DNA, 633 bp, Homo sapiens
aacatctgaaaatcaatcaatgtaaaatagccaataaataaaataaatggcaaaactcatatgatcatttccacagttacagaaaaattatttggcaaaatctaatatccttttgttattaaaacacccagaaaactagattagaaggggtcttcttgagcctgataaagcacatcaatgaagaatttgcatctaacatacttcatgttgtaagactgaatgtacttccttaagagcaggaagaagcagggatgttcactcttgccattcctattcaacattttactggaagttctagtcarggcaattaggcaggaaaatgaaataaaaggcattaggatgaattaaaactatctgtattggcagataacccaacaaagtgctcggaggtaagcatattccttaaagaatcacacacaaaaaattaaatagaagcatttttccaaatagatttgttttcttacttacatattaaaagaaaaaatcaaacaaaaaatagaatgggcaacaggacaacagttttaaaatgcacttttattacaaaacaatgcaaatgatttgctaaaaatatggaagtctacggagtaaaagtgaagtttttctaagttcctcttttcagaattatccttgata

SEQ ID NO: 748658 - DNA, 494 bp, Homo sapiens
tggaaataaatttctggaatataatccatttgtaatgtggtgttctctataattttatattgaaacacattttaatataaacaactcaaatgatgtaataataaaaaactgataatgtgtaattcttactgtagactatttttgtttaatgtttacaaagtttaggagcatgtcagaggaaaatacttcctccagttgggaactcagctttgggtgatactgacccagctttcaacatcagcaccattatttttagtgtatgaacatggataagctccttaactctctctgtcttggagtwtctgtcaatacaatgtagataatacctactttacagggttggatgctatataaacagcaccttgcctagtacttgacacttacttgtcacagaataagtcagagctcttattacctgatgagaaattcagcagaaaattcaataggaatacagtagatggcttctgcttcatttttactcacctgactatttc

SEQ ID NO: 748659 - DNA, 612 bp, Homo sapiens
ctctctatcaagtagtactgtgtaggcaaaagaagaaacaaaagagagtttatcactagtagtataattagtgaatattcaaattaaagtgtcaacttttggttacaaaagcatcaagtctgtgattctgtggtcaaggggaccagatttgccacaataaaaatcaaagcaagtgatgaaagaaatgaacctttcttcagggatgaacaccagaggcactctgcacaactccctgsagtaagtactgtggtgtcagacgaccctggggccgcatcccagctctaccacctatgctgtttacctttggaatggtgctttgcctctctgaacctccgtttttctaatcttgaaaattatattaagaatagtacttatattctaggataattggaataattttatgagatattgtatgcaatgtgtttagcaatgtcttaataaatattagtgatatttattgtagctgctattacatgtggaaaaagtatgggaaaccaattgatgagtgaacttttaagaattaaaataatgaatgaatcatcttcctactggacgggaaaaagaaatatttgctaatgtgactgttggttaaaattgctaattataaacata

SEQ ID NO: 748660 - DNA, 612 bp, Homo sapiens
ctctctatcaagtagtactgtgtaggcaaaagaagaaacaaaagagagtttatcactagtagtataattagtgaatattcaaattaaagtgtcaacttttggttacaaaagcatcaagtctgtgattctgtggtcaaggggaccagatttgccacaataaaaatcaaagcaagtgatgaaagaaatgaacctttcttcagggatgaacaccagaggcactctgcacaactccctgcagtaagtactgtggtgtcagacgaccctggggccgcatcccagctctaccacctatgctgtttacctttggaatggtgctttgcctctctgaacctcygtttttctaatcttgaaaattatattaagaatagtacttatattctaggataattggaataattttatgagatattgtatgcaatgtgtttagcaatgtcttaataaatattagtgatatttattgtagctgctattacatgtggaaaaagtatgggaaaccaattgatgagtgaacttttaagaattaaaataatgaatgaatcatcttcctactggacgggaaaaagaaatatttgctaatgtgactgttggttaaaattgctaattataaacata

SEQ ID NO: 748661 - DNA, 562 bp, Homo sapiens
ttattaatgtatctatcccaggtttatttgaggttgcattcttattgtatatctatctgcatcctttacgtgtgtctcttaaaaaatagaggtaaattcttcctactgtccaatcattcaatataattggttggcaaattctcacttttttacagtgtgcagttttacccacaatggaatctggatacctgccaagccatttytgagttatggaagtatatgagttatgccaaaatgtttaaattgccctttgtagcgcggtggctcatgcctgtaataataccagcactttgggaggccgaggcaggtggatcatgaggtcaggagatcgagaccatcctggctaacacagtgaaaccccgtctctactaaaaatacaaaaaaaaaaaaaaaaactgggcgtggtggtggtcacctgtagtcccagctactcgggaggctgaggcaggagagtggcgtgaacctgggagacggagcttggagtgagctgagatcatgccactgcactccagcctgggtgacagaacgagactctgtctcaaaaaaaaaaaaaattgccctt

SEQ ID NO: 748662 - DNA, 579 bp, Homo sapiens
ctgttttgcctgttattaatgtatctatcccaggtttatttgaggttgcattcttattgtatatctatctgcatcctttacgtgtgtctcttaaaaaatagaggtaaattcttcctactgtccaatcattcaatataattggttggcaaattctcacttttttacagtgtgcagttttacccacaatggaatctggatacctgccaagccatttctgagttatggaagtatatgagttatgccaaaatgtttaaattgccctttgtagygcggtggctcatgcctgtaataataccagcactttgggaggccgaggcaggtggatcatgaggtcaggagatcgagaccatcctggctaacacagtgaaaccccgtctctactaaaaatacaaaaaaaaaaaaaaaaactgggcgtggtggtggtcacctgtagtcccagctactcgggaggctgaggcaggagagtggcgtgaacctgggagacggagcttggagtgagctgagatcatgccactgcactccagcctgggtgacagaacgagactctgtctcaaaaaaaaaaaaaattgccctttgtaa

SEQ ID NO: 748663 - DNA, 645 bp, Homo sapiens
cttggatttgtccttgtggatttgtgattaaccagcaacttttgccattttgttttcattgcaactcttccttgtatagaccaaaatgaacaaaggtgtaagttttgagcctcaaataacagtgaaaattctcattatttatattttctagtcaaaaataagtatgtttcacttttttccttggtggtagataattatttttctccagaaaaactgaaaatttgtatttgtgatttggaaaaactgagttttgcatrttatcattgtaatagcaaaacacttcgttatctatattgctttataataataacttaagggtgagggataaaagactacaaatcaggttcggtgtatacttctcgggtgatgggtgcaccaaaatctcacaaattacccctaaagaacttactcatgtaaccaaataccacctattccccaaaaacctatggaaataaaaaaattaaaaatcataaggtagatgaatttattttactgatatttttctaattatttgaaatggaagtttagcttattgacttttggcctatgtttttaatatatgctatacattttcttctaagttgcaaatttctctctaaggaaagctttagctatatctcataaatttgaataatatagtatttc

SEQ ID NO: 748664 - DNA, 645 bp, Homo sapiens
cttggatttgtccttgtggatttgtgattaaccagcaacttttgccattttgttttcattgcaactcttccttgtatagaccaaaatgaacaaaggtgtaagttttgagcctcaaataacagtgaaaattctcattatttatattttctagtcaaaaataagtatgtttcacttttttccttggtggtagataattatttttctccagaaaaactgaaaatttgtatttgtgatttggaaaaactgagttttgcatattatcattgtaatagcaaaacacttcgttatctatattgctttataataataacttaagggtgagggataaaagactacaaatcaggttyggtgtatacttctcgggtgatgggtgcaccaaaatctcacaaattacccctaaagaacttactcatgtaaccaaataccacctattccccaaaaacctatggaaataaaaaaattaaaaatcataaggtagatgaatttattttactgatatttttctaattatttgaaatggaagtttagcttattgacttttggcctatgtttttaatatatgctatacattttcttctaagttgcaaatttctctctaaggaaagctttagctatatctcataaatttgaataatatagtatttc

SEQ ID NO: 748665 - DNA, 645 bp, Homo sapiens
cttggatttgtccttgtggatttgtgattaaccagcaacttttgccattttgttttcattgcaactcttccttgtatagaccaaaatgaacaaaggtgtaagttttgagcctcaaataacagtgaaaattctcattatttatattttctagtcaaaaataagtatgtttcacttttttccttggtggtagataattatttttctccagaaaaactgaaaatttgtatttgtgatttggaaaaactgagttttgcatattatcattgtaatagcaaaacacttcgttatctatattgctttataataataacttaagggtgagggataaaagactacaaatcaggttcggtgtatacttctcgggtgatgggtgmaccaaaatctcacaaattacccctaaagaacttactcatgtaaccaaataccacctattccccaaaaacctatggaaataaaaaaattaaaaatcataaggtagatgaatttattttactgatatttttctaattatttgaaatggaagtttagcttattgacttttggcctatgtttttaatatatgctatacattttcttctaagttgcaaatttctctctaaggaaagctttagctatatctcataaatttgaataatatagtatttc

SEQ ID NO: 748666 - DNA, 645 bp, Homo sapiens
cttggatttgtccttgtggatttgtgattaaccagcaacttttgccattttgttttcattgcaactcttccttgtatagaccaaaatgaacaaaggtgtaagttttgagcctcaaataacagtgaaaattctcattatttatattttctagtcaaaaataagtatgtttcacttttttccttggtggtagataattatttttctccagaaaaactgaaaatttgtatttgtgatttggaaaaactgagttttgcatattatcattgtaatagcaaaacacttcgttatctatattgctttataataataacttaagggtgagggataaaagactacaaatcaggttcggtgtatacttctcgggtgatgggtgcaccaaaatctcacaaattacccctaaagaacttactcatgtaaccaaataccacctattccccaaaaacctatggaaataaaaaaattaaaaatcataagktagatgaatttattttactgatatttttctaattatttgaaatggaagtttagcttattgacttttggcctatgtttttaatatatgctatacattttcttctaagttgcaaatttctctctaaggaaagctttagctatatctcataaatttgaataatatagtatttc

SEQ ID NO: 748667 - DNA, 589 bp, Homo sapiens
tttcctatttgtaaattttcaagtgcacattatttgctatgtccaaaaatttctcaaatatttacaatttgtaagattctatgtgagtgttcatacttctctatccttgatatccccaactataaattggggacaataattgtgccagtatgacaaagtgttagttagcttgaaattctgttaagctacataaacatatagaacactataagtaaaggaagttattcatgatatgacttgatgcagattaaaatttctgtattgtaaaaamatgaagagaaacaataacaaaacaattacgtgaaacaaaacaattatgtctaaaacattaaaaatatataaccaatcagtatgtgacactgttaataaaaattatattgatcaatctttaggtatcagttattgttctaagacagcaatcctatttggttagcattattgacctcagttgaagcctctaattctctcttatcggataagaatttttctctaatgatgtataatgcaatgaccattgttttcgtagcaagactttttcagtgattaaaatatttcattgtaacggattgctaaaactataattataaag

SEQ ID NO: 748668 - DNA, 588 bp, Homo sapiens
agcatgcttcctatgatcagagaataagcaacatcatttatttccattttggaggaaatattattcagtgacctacaccataatcaaagatctaggtataaattataagaatatctgacttcaattatattaacttacttacagtactcaatccaaaagcatctttgactttcctttgttgtgcaacattaaaagtaagcattcctttatactcattacttatttatcctcaaattttatgttgtctaaacatgttctctaaggctgtcaaatacaagyacaaggcacatatatttattatttgtgccttgtacttgtacctcagtagttctaggtatgaatgtcctaattgcctcaactatatatacacctttgtgtcctgcaaatctttccaactccttattccaaagagaactcaacttgactccctgacacataccttttgtctcctggttcttttctaacagaatcaacagtatttcatggtatcaaatacaacatataaaaattgctgtaactctgctgcttttctcattcccagatttcatggctaatatttcaaatcaattccacttcattatctttcaa

SEQ ID NO: 748669 - DNA, 588 bp, Homo sapiens
agcatgcttcctatgatcagagaataagcaacatcatttatttccattttggaggaaatattattcagtgacctacaccataatcaaagatctaggtataaattataagaatatctgacttcaattatattaacttacttacagtactcaatccaaaagcatctttgactttcctttgttgtgcaacattaaaagtaagcattcctttatactcattacttatttatcctcaaattttatgttgtctaaacatgttctctaaggctgtcaaatacaagtacaaggcacatatatttattatttgtgccttgtacttgtacctcagtagttctaggtatgaatgtcctaattgcctcaactatatatacacctttgtgtcctgcaaatctttccaactccttattccaaagagaactcamcttgactccctgacacataccttttgtctcctggttcttttctaacagaatcaacagtatttcatggtatcaaatacaacatataaaaattgctgtaactctgctgcttttctcattcccagatttcatggctaatatttcaaatcaattccacttcattatctttcaa

SEQ ID NO: 748670 - DNA, 588 bp, Homo sapiens
agcatgcttcctatgatcagagaataagcaacatcatttatttccattttggaggaaatattattcagtgacctacaccataatcaaagatctaggtataaattataagaatatctgacttcaattatattaacttacttacagtactcaatccaaaagcatctttgactttcctttgttgtgcaacattaaaagtaagcattcctttatactcattacttatttatcctcaaattttatgttgtctaaacatgttctctaaggctgtcaaatacaagtacaaggcacatatatttattatttgtgccttgtacttgtacctcagtagttctaggtatgaatgtcctaattgcctcaactatatatacacctttgtgtcctgcaaatctttccaactccttattccaaagagaactcaacttgaytccctgacacataccttttgtctcctggttcttttctaacagaatcaacagtatttcatggtatcaaatacaacatataaaaattgctgtaactctgctgcttttctcattcccagatttcatggctaatatttcaaatcaattccacttcattatctttcaa

SEQ ID NO: 748671 - DNA, 544 bp, Homo sapiens
tttattttttaaagtagaattataattcctagcctacctataatatacactttaaatggttaaattttaaaatttattacattttatttcattttaagctatcttcataatatatagaagtattcttttaaatttaaaatcacrtcaagttgatgcttatcctaatagtgtctttacaaattatgttcctgaaatttaccatattttaggtgttgtttttctggtgtcattattttatcgagttgtgacacacaattttacatttactttatgtaaaaaatatgaattttagttgtattataattttaaacacaactacattctagatcatttatgtttcctggttaaattcaacagttcttgactctgaaaaaccggattttatggaaatatataagggaaccagaggtagatgagaatttggaggtttggttttgagattaggcagggagttttgctgtgtagggaacaagaaatagaacaggtgagtttgtgaaaatacaatctggtcaggtcagatcacttttactatgatgaatgacct

SEQ ID NO: 748672 - DNA, 595 bp, Homo sapiens
tatcaaactcagaataacaggacatagtctgaagtctcctaactttaaagatagcctctttgatccaattcgtcattaataaacagaattcagatatttttagacatatttatttgtccactatgcttatgaaatcatataattttatataacttatttttataatattcataatgtgtttttcatttgttcaaatattctctataaatttgytatttcacaataactctatgaattattaatatagtaacatcttagtggcacaaaacaatgaccattttattttgttcgtgaaatctgtgggtcacttaggaagaaatgaatggctccgggctgaaatcattgatactagaggatccactttaaacacaggtctttcaattatgtgtctgtcatctgggctgagaaggctggaaaattggtttatctgggactcctagactgaaaggaacatgtagccaatccatttaggttggatgtcgcacaacatgcgttctgagttttaaaatggcatagccagcaaaggagcctggagatagtgagaatatcaagacaaccaggtgaaagctacatgccatttgtgagagcctcagaa

SEQ ID NO: 748673 - DNA, 629 bp, Homo sapiens
aagagatgagaacttagatcaaaaatacacaaacaaaggtaaaacaaaaaaagaattctatgctttaactccatctcctccacattttgactcaatttacatttttaatattacctacattacctatctcttaacaggttgctgtagctattattgtttttgatagatgtgattttgggcttcatattagagttataagtgtactgcacaccacaattgcagtaagagtattctgtatttgcctgtgtacttaattttaccagtggattttatatgttgaaaagtttatgttatatgttgaaaagttttcctttagcacgttagtggtttgttggtttatgttttctttcagattgaagaattccctttagcatttcttgtaagatgggtctggtggtggtgaattctctcagcttttgtttgtctgggaaaygctttgttgcaccttaatttctgaaagacaattttgcaaaatattcttgggtggcagttttttccttgagaattctgaaaatgtcattatactccctcttggcctatatggtttccactgagaagtctgttgccagaccaattggagttcctttatatgttatctgcttcttttctttgctgcttttaggatcctc

SEQ ID NO: 748674 - DNA, 629 bp, Homo sapiens
aagagatgagaacttagatcaaaaatacacaaacaaaggtaaaacaaaaaaagaattctatgctttaactccatctcctccacattttgactcaatttacatttttaatattacctacattacctatctcttaacaggttgctgtagctattattgtttttgatagatgtgattttgggcttcatattagagttataagtgtactgcacaccacaattgcagtaagagtattctgtatttgcctgtgtacttaattttaccagtggattttatatgttgaaaagtttatgttatatgttgaaaagttttcctttagcacgttagtggtttgttggtttatgttttctttcagattgaagaattccctttagcatttcttgtaagatgggtctggtggtggtgaattctctcagcttttgtttgtctgggaaacgctttgttgcamcttaatttctgaaagacaattttgcaaaatattcttgggtggcagttttttccttgagaattctgaaaatgtcattatactccctcttggcctatatggtttccactgagaagtctgttgccagaccaattggagttcctttatatgttatctgcttcttttctttgctgcttttaggatcctc

SEQ ID NO: 748675 - DNA, 630 bp, Homo sapiens
tacacaaaggcatacagagtgatataatggactttggagactcagaggagggagtgtggaataaaaaaactacatattgggtacaatgtacactactcaggtaattggtacactaaaatctcagaattcaccactatatacttcatctatacaatcaaaaaactatgtaaccatctatgttacaggtggttgtaaccaaaccacctgtagcccaaaagctattgaaattaaaaaatacttttwaaaaaagaaattaaatgtcttacatcaacatatatatcattctttccactaatcaaatctggaatttgggcaaagtcagtcatcacagttgagaaagaacttgcaaaaagacaggtccccatgaaggcatggcagtgccgatcataaaataccaaaaagtaccatcacgtgacaaggtgagaaaaggtattctggccataagataacttcgttttctttgtacctcagaataaattttccaagatgaaaataggtctataaattatatgacagccctatctttcttatcaactgttacttccattctttgggagacacaaagtagaaagattacaaatgtaggctcatttggtggcttaagattggttccacatacaactcaaacct

SEQ ID NO: 748676 - DNA, 629 bp, Homo sapiens
agtcttggttgttatttccttattcatttatttagaggagtctcgttctgttgcccatgctggagtgcagtggtgcgatctcggctcactgtaacctctacctcccaggttcaagcaattctcctgcctcagcctcctagtagctgggattggtgtctgtcaccacgcccggttaatttttgtatttttagtagacatggggtttcaccatgttggccaggctggtcttgaactcctgacctcaggtgatctgcccacctcggcctcccaaagtgctgggattacaggcgtgagccaccacgtccagccgttatttcttctttgatgcacatttcaaataccagaagattttccagtgaaaatgtaatttctatcttaattccactgtggttagagaacatactctgtatgatttaaatcccttgaaatgtattaggacttgctttatggcctaactgtggtcwgttggaaaatgttccatgtgcacttgaaaaaagcaagaaccctgtaataccttttgttggatctgatgttgccatgggcttttaataccagctgagttgaagttgacatttttgtgtgtatgacaaagggcttaactttgtttcctcacagcctagagagatatt

SEQ ID NO: 748677 - DNA, 522 bp, Homo sapiens
taaaatgagagggttgagacagatgcttttttgaaatcttctccagatatgaaattctatcattctaaatatttactgggtgccgactaagtgcccagcactaaaatcatatgaacttatatattttaccaatatgtcawttgcttttcctccgttatctcatttgatcttcagatcagcagggaaaagtgggctaatccttatgtagagatctgtttccaattcattggaaatggtcattagaagacagacaagaatcttagtagttaagactatggggtttgaggtcaggattcaaatctcatccctgtgacttactagccatggatccttaggcaagctacttaactcctctgaggctgagaccctttttcctctgtaaaatggtggtgataatgatgtccagtacgtgcctggtacattgtaggtggtcaataagtattaagatgtcttcttgtaagaagtagaaattctagggtaggagacagaaacaacagatggaaaacacactgtggaagaatg

SEQ ID NO: 748678 - DNA, 577 bp, Homo sapiens
tactatattgtatatataattagatttatttatttattttttactgccattatccttccacctctcttttatccccacattatcttatagattggcaggaatttgggccttgttagcaactccccaaaagtctctttgcaggttttccagattgaaatacaataattatatttattatggttatcaaatacatgattttagttacaatttatttcaattctcctrgagagattctcttgtccctattttatatatgagaaaattgaaactcagattgaatgactcacacccaaaagaacaaagtaattgtcaacagcaagggccagaatcaggatttctgactgaaagttccatgttcttttcatgaccacaagccccatacataaagctatgaagcagaggaagcaatggccaagagagcgacctcagccccagtcatgatgggggcatttgggcctgagtttgctgccactggatttttaacttagctaccttctgacatatggccctaatgaaaggcaggcaggcatgactttaattcagactctcctcttggaagagactactgtactacttt

SEQ ID NO: 748679 - DNA, 494 bp, Homo sapiens
tctctctcctcatcattgtcgtcattccttcccacatttggctcatccctttactgttaattttgttttgaatgaaatccatactcgaaatatcacagattttgtcaactttattacaaccatagaaaaaaattatggtaacaacaaagtcctttttcaaatgaggtaaaagagttataatttatttttcaacaaatggtattgtgawtatgatccttagtctatattctccaccttctaaataattaaattccctcaaaaacatttttcctcctattctggtggtcttcttccaccttagatgggtaaaacccaagtttctctccccagcagcattctccacaataatcattttcacataacttaggcgtgggtgcaacatgacctgcaactctcccaagggctaggcaggtgagcctccccactccaattcccggagaaacacaaaacagcttcagatggagcttcccttgaatcagacagatttcagatag

SEQ ID NO: 748680 - DNA, 494 bp, Homo sapiens
tctctctcctcatcattgtcgtcattccttcccacatttggctcatccctttactgttaattttgttttgaatgaaatccatactcgaaatatcacagattttgtcaactttattacaaccatagaaaaaaattatggtaacaacaaagtcctttttcaaatgaggtaaaagagttataatttatttttcaacaaatggtattgtgaatatgatccttagtctatattctccrccttctaaataattaaattccctcaaaaacatttttcctcctattctggtggtcttcttccaccttagatgggtaaaacccaagtttctctccccagcagcattctccacaataatcattttcacataacttaggcgtgggtgcaacatgacctgcaactctcccaagggctaggcaggtgagcctccccactccaattcccggagaaacacaaaacagcttcagatggagcttcccttgaatcagacagatttcagatag

SEQ ID NO: 748681 - DNA, 632 bp, Homo sapiens
cacaggatagtgagctctcacgagatatgatggtttaaaagtgtgacagcccccaccccttccaccatgtaagacgtgccttgcttccccttggccttccaccatgattgtaagtttcctgaggcctcctaagccttgtgaaactgtgagtcaattaaacctcttttctttatcaattacccagtctcacgtagttcattataatgtatatatgamctaataaagaaaattggtaccaggagtttgggtcactgctgtaaagatacctgaaaatgtggaagcaactttgaaactgggtaatgggcagaggttggtacagtttggagagctcagaagaagacaggaagaggtgggaaactttggaacttcctagaaatgtgttgaatagttttgaccaaaatgctgatagtgatggggcaatgaagtccaggttgagatgctctcagatggagatgaacttattgggaactggagctaaggtcactcttgctgtgctttagcaaacagactaacagcatttttcccctgccttagagatctgtgaaactttgaacttgagatgatttaaggtatctggcagaagaaatttctaagcagcaaagcatttaagatgtgacctgggtgctcttaac

SEQ ID NO: 748682 - DNA, 649 bp, Homo sapiens; identical to SEQ ID NO: 736520

SEQ ID NO: 748683 - DNA, 645 bp, Homo sapiens
ctgttttcacttcagaatccttacttagttatcagctgacatataaataaaagatgaattttccaatgattaggagactctgtcttggttttagagaagatgaatggaggaattttctgactttaaggacacagaaatacatgaaagaaaaggtttgtcaaagaataattaaaaggatttttactaaacaaaaagaatatggttcattaatgtggtcagtgaggactcaagtaattatacgagtaatttttatatgttttcaggaatgaaaattgactccaaggttctaattatgttaaaccacarcatcaatatttcctggatttgggaagagaaaaatcatgtgcagataaaattaataatgccttaccctcttccatgatgtaattaatgcatatggaagtaggggatgactgtcagttcttttctacaatgtaagtttgggaacaactttggcattgttgcaaatgcccagctggctatttctaagaaatgaagtatttgtatgacagagactctgtgttcttaaaggaagttccctattcattattcagatccatgcacatccctggaacaggttcagcaacagaagtttccatgctttaagatggtgagatataaatagttgtgtaaggttgaacacca

SEQ ID NO: 748684 - DNA, 645 bp, Homo sapiens
ctgttttcacttcagaatccttacttagttatcagctgacatataaataaaagatgaattttccaatgattaggagactctgtcttggttttagagaagatgaatggaggaattttctgactttaaggacacagaaatacatgaaagaaaaggtttgtcaaagaataattaaaaggatttttactaaacaaaaagaatatggttcattaatgtggtcagtgaggactcaagtaattatacgagtaatttttatatgttttcaggaatgaaaattgactccaaggttctaattatgttaaaccacagcatcartatttcctggatttgggaagagaaaaatcatgtgcagataaaattaataatgccttaccctcttccatgatgtaattaatgcatatggaagtaggggatgactgtcagttcttttctacaatgtaagtttgggaacaactttggcattgttgcaaatgcccagctggctatttctaagaaatgaagtatttgtatgacagagactctgtgttcttaaaggaagttccctattcattattcagatccatgcacatccctggaacaggttcagcaacagaagtttccatgctttaagatggtgagatataaatagttgtgtaaggttgaacacca

SEQ ID NO: 748685 - DNA, 484 bp, Homo sapiens
ccagggcatttactccttgttggtcgatttgtggtttcagaatatgcctctctgtagtttcctcccattgatcttagtctggacactagaataatccagaacaagagaccctacctgtccacatgatagcagtttaaatatttaaagacattatcctggcctccattctcaagttaccctctccacttcctttcactctatgtaaatgattttcagacacctcaacatctttcttgcctatgyggggctcctccctagtttatcaatgcccatcttaaaatgtagttgcccaaattaaattgtatatccttgtgatctcagcagatagctcaaagactatctctagtaatctcagaaactgcttctccgaatgttttggttttattagtagtgaaacaacagcatgcactggctgttgatgtggtgctgatggtggtggctgatgtttaaaccagctacattatactgttgcttctcagaggtg

SEQ ID NO: 748686 - DNA, 523 bp, Homo sapiens
atgaagtatatagaggaaaaaacataagtagaaaaaccacggactgataatactaccattcttctaggaactgccaaggccaacacacatacccagtcacaggtgctcagtgtagcccagagacttcaggtatttcctcaaatattataccaaaaggacacacaaatgcggagtgacttgacaactcctccaaagcacggtgctgatacaagaattgtgctgtcggttcatttcattccccaacattttattctctaacaatcctatgaggtagacatcttacagataaagagaccagataacataaatgtgtcaattaagtctaygggtgactaagtatgggctagccctggcccagccacattcacagtgagtcagtgcttggcttctggagccacactgtgtgagtgtgaacctcagctctacaatgtctgagctacactgtctggggccagttacatgacctctctcaaccacaagttcctcacctgtaaattaaaaataataataacaatcagggtat

SEQ ID NO: 748687 - DNA, 616 bp, Homo sapiens
atttataaaagaaagaggtttagttgactcacagttccataggacaggggaggcctcagaaaacttacagtcactgcagaaggggaagcaaacacgtccttcttcacatggcgcgggaagtagaagaatgagagaagtacagggtgaggcagggaaaagcccctcacaaaaccatcacatcttgtgagagctcagttgctgcacgagaacagcatgggggaccacccccatgattcagtcacctcccacgaggtttctaccsctgacatgtggagattacaattcggattacaattcaagatgacatttgggtgggaacacagagccaggccatatcagacaactcgaaatttcacacgaatcagtagagactcatgatgtgtttttctcttaattgaaaaaaaggtagcctcgctccatctactgaaaaagtctggaaacagtgaccaaccccaaagccctgaccatcccgaatgactagactgtgggctctaaataccatttaacactagaaggagatagagctccttgaagaaaagattaattccagacccaagacaggaaatgcacaagatgtttccaattcacatataattaaagggttttttccttacct

SEQ ID NO: 748688 - DNA, 618 bp, Homo sapiens
cttcatagtcttgaccagctttgctcaactacaactggatattgccttgtttttggcccaagctataacctcctgctttctgcctggaccttctcttcaccccagctgaaatgcaggaacccttttggtacttatgtatgtacaatttggagatgagggaaatttaacaccattctgactcctgtgagtgcaataaatacttctgttttgtaccttagcagacagttgagagtatttcaaaagtctttctcagtaagtcccatgggattgaaaactagttgcctggagcagtaaccaactccctaatatgtcgcttttaaaaaaatcccccccsccttctctgtttagttcatatcctgtacaccttcctgggagtacattttccaaaaattctctgtgcataagtgtttatcacagggctctgcttccaggaaacccaggctaagcaacacacagggaaataaaagataaagaataagagcaaaaaggaacatatggggaaccaaatgaagttttcggatataatataaaatattataaaattgaatatttaatggaaagattggaagataaagttagaggatttccaaaaagtagaataaaaagacaaatggttgg

SEQ ID NO: 748689 - DNA, 634 bp, Homo sapiens
ggtaagaatgaacattcttgcttttttctcctcatcttagtgggaaagtttttagcctttacaactgagcataatattaaatgtaggtttctgtatatgttttttatcaagttgagaaagttgtcttctattcatatttttttctgagagtttcttttgcatgaatgcatgttgaatttttctaacactttttctgcataaattgatataatcatgtgatattttttcttcttgagcctgttaatatgggtattatattgattgatttttgaaaatattgagccagccttagttccccaccctttttttttttttttttcagagatgggatctcactctgtcactgaggctggaatgcaggggcacaatcatagctcactgcagtcccaaactctcaggcccaagtgatcctcttgtctyagcctcctgactagctagaaggacagttgcccatctggtcccccaccctttttgataagagcccttgctgtatagtagaggagagtggacagtccttctaatgcagggaggaaggtgggggaagacagagaaaagaacaaatggagaaagccagagtctttactttctaccctcctccttctgacggtataaccctcagacaaatttttctatg

SEQ ID NO: 748690 - DNA, 645 bp, Homo sapiens
atcttcaggcaattatggatctgctttctgtagattaatttgcgttttgtagtgttttatatgaataaaatcatacaatatgtactctcatgtctaacttctttcgttcagtagaattactttgaaatacattctttttttttttttttttgagacggagtcttgctctgtcaccaggctggagtacagtgacacaatctcagctcactgcaacctccacctcatgggttcaagcgattcccctgcctcagcctcccaagtagctgggattacaggcacgcgccaccacacctggctaattttttttttgtatttcagtagagatggggtttcaccatgttggccragatggcctcgatattctgaccttgtgatccactcaccttggcctcccaaagtgctgggattacaggtgtgagccaccgcacccatctgaaatacatgctttttgtatgtatcagttattttgtattactgatagcatttcattgtattgatataacacaatttgtttatccaacaaattaccaagacatttgggttgttttcagttttgagctgtttacaaataaagcttccaggaatactcatatacaagtctttttatcaattcatttttcttgagtaaatacctaagagtggagt

SEQ ID NO: 748691 - DNA, 585 bp, Homo sapiens
ggagaagaaacttcctaggcatgcacagtgagagacaaaaatggtgaagtatgatctttcaggtacactccactggaaaaaggaagaaagcctcaggtgggcatgcgtacaactccctaaacacactgcatgctcacttcctgagggtaaggagtgctctgcgcatgcgggcagcctgtccagaccagctccataggggagaccctaaccyagcagcgctagaggaattaaagacacacacacacacagaaatatagaggtgtgaagtgggaaatcaggggtctcacagccttcagagctgagagccccgaacagatttacccacatatttattaacagcaagccagtcattagcattctttctatagatattaaattaactaaaagtatcccttatggggaacgaagggatgggccgaattaattgcagcaggaacacgcccttaagacacagatccctcatgctaattgtttgtggcttaagaatgcctttaagcagttttccaccctgggcgggcctggtgttccttgccctcattcccataaacccacaaccttccatcttgggcattatggccattatgg

SEQ ID NO: 748692 - DNA, 606 bp, Homo sapiens
tcatgactcactgacagatttttccatttatatattttgttcctggaagacataaaactatatcttcagtgcatactcagttaacacatcaatgttctattcatactacttaaaaattctagagctttacatgaagtttatttattcacctagatgagtggctggcaccctttttctgcatagggctagtgagttaagattttagtatttgcaggccatayggtttccggcacaactactcaactctgccattatagtgcaaaagctgccctagataatactgaatcaagtaggtgtagctgcaatctcatgacactttattaaaaaaaaaaaaaaaagcaagcagcaagccagatctggcctatgcgtgtagttgtctgacccctgatctagatatttgaaaaaatgaaaataaagtgctcaaatatttcaaccctatttaaccttttctaagggaaataaattcaatgaagctctttgagtatcacaattgcactctgtgagtatatgtatctaaaccctgaattcacattaaataaaacaagtataagcaatagtctgaaaattctgttttgtgttaacaaacacaaagaagagcttttagag

SEQ ID NO: 748693 - DNA, 643 bp, Homo sapiens
attcataacagcaatattaaatatcatatgaagactaaaactgggcaaaattattacagtatagcttcaaaacagcatagcataaaagactgcagaaatttatgtcttttcaatcatgctgttgtatagattagctcaattcctgctggttctgctaatgtgtaaaaacccattttaaactggagttcaagctggaataatctcatgattcttattggtctcatatatmctctatggctctagttaggatgatctcgtggtttacttagtttttttttctcatataaaaatttcaccaaaagtgttctaggctatgaaagattaagtcttggaataaaatcaaagattaggttcacaaaaataataaactattgacaaggtgtaccagtcattttgttaaagacgtggtcaataattaggtttataaacttttttactaactggtaattgaattgaccgaatttaccaggtgctttgacaccatacacacctcctttaactgatggtatggaaaagaattccaagatcataatttatttgaactatttccccaacaaatttagtgtatagcacattatcatgactttctttaacttacaatgcctttgaaggcatgcttattttccagaaagtttatgggaaa

SEQ ID NO: 748694 - DNA, 633 bp, Homo sapiens
tctatattagatgtaaataatgtgttcttattttacatatcttatacaggtgacatgggaaacaacagcatatcatccagctaatgataaattattattacacttttttttgttttgttttgtttttttgtttgagatggagtctcattctgtcgcccaggttggagtgcagtggcacgatcttgactcactgcaagctctgcctccggggttcacaccatcctcctgcctcagcctcccgagtagctgggactacaggtgcccrccatcacgcccggcaaatttttttgtattttcagtagagatggggtttcaccgtgttagccaggatggtctcgatctcctgaccttgtgatccgcccaccttggcctcccaaagtgctgggattacaggcgtgagctaccgcgtccggcgcattattatactttctaacttaagtaagtgtgctaattattagtctaatacctaatactccacaaaagttaactggataaatctttcatataaagtattttgttgcatccactgcagtgtctaacatttttttaaaaaattaactattttgcatcattatcttatttccttttcaaaaaattcttgtgtatttaagctacaaaagtttcatgggagag

SEQ ID NO: 748695 - DNA, 597 bp, Homo sapiens
attatcattatatattaataattgagtcccttgtcattcagagtagtttgggtaggctgtctactttgaaaatgttgtaactctagcacctcacagtgttttgcatatagaagatgttattttgctgaataaagttgtttttttttttttgttttgtttttttgatacagagtttcccgctcagtacccaggctggattgcaatggcacaatcttcactcgctgcaacctccccctcccggtttcaagcgattctcctgcctcagcctcccaagtaactgggattacaggcatgtgccactgcacccagctaattttgtatttttagtagagatagggtttcactatgttggtcaggctgatctcgatctcctgaccccaggtgatccacccaccttggccttccaaagtgctgagattacaggcgtgagccaccgcrcccagcctataaaaagttcttatggttgtggaggagctgcatgagtctctgtgaaacaaataatagcttcagagctttacgtttttatctatatgttgggatgtctaccccacgtggttttagtccgcctggcacaaatcattaggccctgttctacca

SEQ ID NO: 748696 - DNA, 567 bp, Homo sapiens
agcagggtgaggcattgcctcacccgggaagtgcaatgggtcagggaattctctttcctagtcaaacaaaggggtgacagatggcacctggaaaattgggtcactcccaccctaatactgcgcttttccaacaggcttaacaaacggcacaccagattatatcacacaccgggctcggagggtcctatgcccctggagcctctctcattgctagcacagcagtctgagatcaaactgcaaggcggcagtgagcctgggggaggggcgcccaccattgccaaggcttgagtaggtaaacaaagcggccgggaagctcgaactgggtggagcccaccacagctcaaggaggcctgcctgcctctgtaggcttcacctctgggggcagggcacagacaaacagaaggcggcagtaacctctgcagacttaaatgtcccygtctgacagctttgaagagagtagtggttctccctgcacgcagcttgagatctgagaacgggcagactgtctcctcaagtgggtacctgacccccgagtagcctaattgggaggcaccccccagtaggggc

SEQ ID NO: 748697 - DNA, 677 bp, Homo sapiens
agaggatcctgcaagcagcaacagaaaagaagcaaacaacatatagagaagtcccaatatatctaacaccagacctctcagcagaaatctaatgaccaagagagagtgggatgatgtattcaaagtgctcaaataaaaaaatcctgccaaacargaatactgtattcagcaaatctgtttctcagaaatgaggaagaaagaagattttccagacaaacaaaagctgagggaattcatcaccaccaaatctgtcttacggaaaattttaaggagagttctttaaggtgaaagaaaagaagtctaatgagtaacacaaaaacaactgaaagtatataactcactaataaaattaagtacatagtcaaattctgaatattctaataatgtaatggcagtatgtaaatcacattttctgtacgaaggttaaaaagtgaaactatgaaaataataactaatgttaagagatattcaatgtaaaaatatataaattatgaagtcaaaacttttaaatgggagagtgaaataaaagtgtagagtattgtggagtctttgttttttcaatcaagttaagttgtcaacagcttaaaataaccagttatgactataagatgtttttttgtaagcctcatgataaatacaaagcaaaaacctatagtgagtatacaaaaaaagcaagg

SEQ ID NO: 748698 - DNA, 566 bp, Homo sapiens
agtcctaggcagctcaagttctgcctcccgccagtcctgtctgcaggcaggatccagtcctcacgcacccatgctgggcacggccctgcttccacaccgtgctcaggaggagagcgtccactcccaggagaggacttgccaggcacctctccttagggacacctgcagttaggggtctggcgccagcttgtgtgtgagagatyaactccccctggtaccgtcaggccccgagtgagggagccgcagcccagagaggcctctttctgtccagtttgcatcgccacatttgggtttctgtcccgcctggcctgggccccacctgcctgcggagctgccgaggccctcgtctagtgccctcccagaggggccttcagtcctggttcttatattacagaggcagccagaggcttccctgactctgtggctggcgcagccttgacaagtcatctggaattggctcacggcctcctcgcgtctcccggtgtctgatgtggcaatgaagctctatttcagggcctgcgggaggacccagcgtggctcagggtttgtcctcaagggagggcgtg

SEQ ID NO: 748699 - DNA, 566 bp, Homo sapiens
agtcctaggcagctcaagttctgcctcccgccagtcctgtctgcaggcaggatccagtcctcacgcacccatgctgggcacggccctgcttccacaccgtgctcaggaggagagcgtccactcccaggagaggacttgccaggcacctctccttagggacacctgcagttaggggtctggcgccagcttgtgtgtgagagattaactccccctggtacygtcaggccccgagtgagggagccgcagcccagagaggcctctttctgtccagtttgcatcgccacatttgggtttctgtcccgcctggcctgggccccacctgcctgcggagctgccgaggccctcgtctagtgccctcccagaggggccttcagtcctggttcttatattacagaggcagccagaggcttccctgactctgtggctggcgcagccttgacaagtcatctggaattggctcacggcctcctcgcgtctcccggtgtctgatgtggcaatgaagctctatttcagggcctgcgggaggacccagcgtggctcagggtttgtcctcaagggagggcgtg

SEQ ID NO: 748700 - DNA, 566 bp, Homo sapiens
agtcctaggcagctcaagttctgcctcccgccagtcctgtctgcaggcaggatccagtcctcacgcacccatgctgggcacggccctgcttccacaccgtgctcaggaggagagcgtccactcccaggagaggacttgccaggcacctctccttagggacacctgcagttaggggtctggcgccagcttgtgtgtgagagattaactccccctggtaccgtcaggccccgagtgagggagccgcagcccagagaggcctctttctgtccagtttgcatcgccacatttgggtttctgtcccgcctggcctgggccccacctgcctgcggagctgccgaggccctcgtctagtgccctcccagaggggcctycagtcctggttcttatattacagaggcagccagaggcttccctgactctgtggctggcgcagccttgacaagtcatctggaattggctcacggcctcctcgcgtctcccggtgtctgatgtggcaatgaagctctatttcagggcctgcgggaggacccagcgtggctcagggtttgtcctcaagggagggcgtg

SEQ ID NO: 748701 - DNA, 636 bp, Homo sapiens
accaaattgaagaaaaatttattgccagctatctttctgccatagtttatggcctgcaattctcaaatggtttagagagtatatttaaaatgaacttcctggtcattttctgtttttcagggactttaaacatgatttgggtttgtcatctaaaagtagagtcactctttgaggttcaaatttcttgcccaacttttatttttaaagctttctcaaatacaaagctcaagagtcttggtcgatttaaaagcccactgtctgttttccctaaatatttacttttaaaaatatgattgatattaagtatgttattactgaaaaaggaagaaaaggactgtgggaaggtcagaaagaaataaaacactaagcttttccttttattatgatgatgtcatataatcagttacatatggactgctgcttcagtgcctttcttgggaggcccaaagacaaggggctatggcctaarctgtcctcactggatacagatcaaggacagagaaaggtatggggaatggagtacagttctagaatatggcagggaaagaatatgtgtggatttcctgtgggccagatgtggacttctcaaaaccaagaagctctgttatcttgggagcccaagaggaaaatccagag

SEQ ID NO: 748702 - DNA, 493 bp, Homo sapiens
ccagataattgggatgaatattgcctgcgtactagtatcaaaggcatttgcatctaaataaagatcttaaaataaatactaggatgtcaggatagagatggacagagaatatgatctttgttagatggagacaatggataaatatctcttggatttggggcttttgttatgctactgttcttgtaagtgaaggttatcaataaattattataaaaggtttgtgtgtgataygttctgactgaataatgctgattttaattagccactttaaaatgaattactagtaatatagcagaaagccacatcaaaagggagttcaagaacagaagattcaaatatatactaaactggtcacagaagtgactgggaaataaattatctagataattctgattgtgacataattaagttcagcatctgagtgggagaatcaaattcctagaaattcatcttaaatagaaattcaatctttaaagagaaattgaaagatcat

SEQ ID NO: 748703 - DNA, 610 bp, Homo sapiens
gattttttggtccgcagattggatctgttagaagggtagaaattaatagtttgcattcaagacttgaaaatattctaaaagattagaaaaatgtggtgtgggcccaccctgaatagtcctgcacctttattcaattttcattgccttaaagttaggcctgtctacttttttatcagttgagttctttaaagacatcccaattaaggagaaatttagcctagggagacaagttttgcagataagaaaattacattgtcartgttatatgattaacacccaaatgtggatacactattttcctttcaagaaggtcctaatgattctgaaaaaaaaaaaaaaaaaacatttaattttagctcctgttgtaacaggaagaaaaaaaatcctctaaagcagtcattaactcactgttacataaaggcagtagcacattagattagctctacgtaatcaagcagaaattgtgctttatttcttatggttagtgtccttgagatgagttaaaactacatgaaaaagataactccccctgaccaaaatgacacgtacagatttcacggaaatatctcatctttcttcaagttagacctgcccactgtttttttttctt

SEQ ID NO: 748704 - DNA, 573 bp, Homo sapiens
aggaagatttgtgaattataagtagtcgtgttcaatatggttagaaatgtggacagggatttgtgtgctgttctaaataattgagatgattgttgcaaactcagtgttgcaccactgaaggtttttaagctgtagactggtttcatttaaaatggcctctgaaggaaaacctagagtcacactttgcttcaaaaatagaagactttaaagatacctcagcaaatccagagttatcctagttttgttcttatggaaaaaattgaagttagggtgaagaaaattgtgcttttaaaaagacagcagtcaaccataatcacagcagtttctgaacctaactaaacatgaatagttaactgatcttataattattataatkattatcaccatgatgttatgattattgtatcatcaacagccatctattaaataccaatatgggatggcacaattgggaataaaccgtagccttgcttagtggacatttatagtcagctcttttatatgtttcttatgctctatatctgctcctatatatgaatactgaacacatcagcccaatataaactttaccag

SEQ ID NO: 748705 - DNA, 348 bp, Homo sapiens
agggaggatagtatccaataggtagattttcaacctacaccctcttcctctcctccactctctagtagtctgcagtgtttattgttcccaggtttacatccatgtgtgctcaatgtttagctaccacttgtaagtgagaatgtgtagtatttagtattctgatcctgcattaatttttgaatcatggcctccagctccatccatgttgctaagaggcatataatttcattctttttcatgactgtatattattctgtagtttatatgtactacattttctttatccaatccaccattagcacatratttgattccatgtttttgctattgtgaatagtgcagcaatga

SEQ ID NO: 748706 - DNA, 618 bp, Homo sapiens
ttccacactgtgatcacagatgtcacccacaaaccatattaacagctaacatttttaagcactgattagatactttgctgagtgtttcatgtggattatggcattaggataagatggaaacatgagtcagatttaaacaagatctaaaatgcactatagtggagtgcccattactgaaagggaatgtgggttgcaaaaggcattcaaaaggtaaatgaataatgtgtttgggcttgaagtgatgtcagacatgatagaacccacatttctccatttgtagtcaaattattattctactttaaaytgatttagacagtagcctatgaataaaatatcagaaattatgaaagtcatgttttgaattctgttgatcacagtaaaggtaagaaatagaattgaatgagaacaaactggtaagaaaaagagaatgcattagacttcagaaaacttataagattccttaaataggtcatggaatacttgtagttgataataataatggtcatttattgaacatttaatatgtgccaaccactgttctcagggctttgcaaacattaacttatttaattttcacaatgatcctgtgaattagatgccaaggtttttatttccttt

SEQ ID NO: 748707 - DNA, 616 bp, Homo sapiens
agtgaatatactttttatactttgaaaactttctttaaaaaggatagtgataaagggtaaattagaatgtgctttgacacaagtctaagctctttccagattcaggtaacaagagccaagtgtctcagtgtgatatagaaatgacccctgggaaatcatcatgtttagtaacttaatggatagaacagaaaatgccagtagattgctrtgaaaaatatgtcaagaaaacatttttacagaatttctttcattttatttaccagtgaactagacactcaataaattcgtgtgtctctgttgctcagtgttaccgcactgccaacttttctaccccattattgatataagttgagaatagccttactgttcaccatctgtcgtgaaagagtcaagtttttcttttttttttaataagtttagttaatcctttattttttcatttagcagctacataggcatagtgtactgtacaaaaccaggatatacagcagaaaccaaggcaaacacagcccttccattatggagctcacatcttgtgggatggagaaggaaggtattaaataattaagtatacatttattcattctttctttttttagttatcaagcaatatctt

SEQ ID NO: 748708 - DNA, 616 bp, Homo sapiens
agtgaatatactttttatactttgaaaactttctttaaaaaggatagtgataaagggtaaattagaatgtgctttgacacaagtctaagctctttccagattcaggtaacaagagccaagtgtctcagtgtgatatagaaatgacccctgggaaatcatcatgtttagtaacttaatggatagaacagaaaatgccagtagattgctatgaaaaatatgtcaagaaaacatttttacagaatttctttcattttatttaccagtgaactagacactcaataaattcgtgtgtytctgttgctcagtgttaccgcactgccaacttttctaccccattattgatataagttgagaatagccttactgttcaccatctgtcgtgaaagagtcaagtttttcttttttttttaataagtttagttaatcctttattttttcatttagcagctacataggcatagtgtactgtacaaaaccaggatatacagcagaaaccaaggcaaacacagcccttccattatggagctcacatcttgtgggatggagaaggaaggtattaaataattaagtatacatttattcattctttctttttttagttatcaagcaatatctt

SEQ ID NO: 748709 - DNA, 632 bp, Homo sapiens
taaaagaaaaaagacaagtgtgctgtggaaatcttgatattctttggttgagtcctgaggatcaaggctgaggaatgtgacaccagtgagctcagcagcctgcatgcagcaatagtgaagagaaatctggccagtggggcaaaacttccctatcaacctcatggcagcctgaccctgcagactcctgtctcccagcccacccctctagtcagctcccatttcggggctgcttatgcacctatgaggaaataacaggtttctcctctgctcattttattaaggtggcataaatttctcctatgaacagactcttccaaagagtagggaaactcttcattaaatgctcgtgcaactcgacaaaccgtgtaggtggcttgatactctactggctagaattcaggcctgaatcaaaggactrggagctggagggaactttaaggacttaaaaaaatccaatctccttgatttacacatgaagaactgagaccctgttacagccacagagtcaattagtggcagagaaatgggacaggaatggagtgtcttgaccaggattcttgtaaataaaagagccactgattatctcagaagagctgagagtgctgcctccaggcctatgcacattcctatgt

SEQ ID NO: 748710 - DNA, 461 bp, Homo sapiens
gactgagtacaaattgccaaattcctttgaatgccaaaccatatttctcaggaaagttggccactgccaaatttataacatttgtgtttctgttacctgaattccaagggcagaggggtgattgagggggtaagggaaaggcacaggtgaattttattttcagatgtctaataggacagtgtgacattgcccagagatagtctctcaaaggtagtgagtgccagcagaacttctcgaatgcgaagttgagaaattttacttatttacttattttcccatkaaaaaaaaaaaaaaaactttaaatgttttctgagttaaaaaggcctctgactggtagtcctgacacagcttcttgagagtctccgagagagcctcttctcagtacaattcctaagaagataggaagaaaaaaaaaatattcttaacacataaaactagaattagtgggaagaaatgcctac

SEQ ID NO: 748711 - DNA, 461 bp, Homo sapiens
gactgagtacaaattgccaaattcctttgaatgccaaaccatatttctcaggaaagttggccactgccaaatttataacatttgtgtttctgttacctgaattccaagggcagaggggtgattgagggggtaagggaaaggcacaggtgaattttattttcagatgtctaataggacagtgtgacattgcccagagatagtctctcaaaggtagtgagtgccagcagaacttctcgaatgcgaagttgagaaattttacttatttacttattttcccatgraaaaaaaaaaaaaaactttaaatgttttctgagttaaaaaggcctctgactggtagtcctgacacagcttcttgagagtctccgagagagcctcttctcagtacaattcctaagaagataggaagaaaaaaaaaatattcttaacacataaaactagaattagtgggaagaaatgcctac

SEQ ID NO: 748712 - DNA, 471 bp, Homo sapiens
tgagttttatttcattgtggtcagaaaatatcatctataccattttgactatcttagaaattctcctgttatatttctttaagtgttccctgagtgcttgagtaaaaggtgcatttcctgtcctcaggatataaagttgtatgcatgtatatgtaaaattttataccattagatcagaggtgggaaaactatagcctatggaccaaatctggcccactgcccattttagtaaataatgtttagtttgattacagctatgaccatttgtttctatagtgtctgtggctgcttttacactacagttgagtcgtacagcagagaccatatggwctgcaaagcctaaaatatttattatttgattgacccttatatcagatcctatgtcaattgattatattaatcacattttctatgtcctattttattttattttattttattttattttgagatagagtctcactgtcaccc

SEQ ID NO: 748713 - DNA, 561 bp, Homo sapiens
agaatgcatttcagaatggctcctctgaaagatgggaggctggaacattcatccatgactcacatctttccttggttgtggagtacatgtcggtgttaacattctcaaagttctagggaccggctgagcaagctcctgggcatttcaaggcccaaaggctgagaaagctgaatggtactgagttcatagtgggaacagggccaccaatcacmgcaattattcacagcagctttagctaaagtctggagatgtgctgtggtcaccaatagttttggaaacaccattactcaaaaagtattctaggtaatttggggaatttgtaaaaggtatattacatgtatgtccaattgggtacctggtagtacccaatttcttaaaaattctactgcagctccatagtgtgttaccactctgcttaatgggcactgctgtaatcaggaaggcctgagtcacttcagctacaatttctggctatatttccctttgttagacacttttgctagttcatttctgaactcatgaatactatttgcctggcactgttcaaatttccattaggtg

SEQ ID NO: 748714 - DNA, 557 bp, Homo sapiens
ctaaactacatcttgcacaccaatcattctttaatttggtcttttgaggtaattttctttatcttgtaggcaatctattatagatttttgtgttgtggtttaccatgttgcttacaaaaaacataggctcattttattattttgcatgtggatrtccaattttcccaacaccatgtattgaagagacaatctaggggcatatttctattaaatattgtactaaagctatagctcactctgggtagtatagacattttaacaatagtaattcttctaatccatgaacataagatacctttcaaatccatgaacccagagttgtgtgtgtgtgtatgtgtgtatatacatatgtatacacgtatatatatatatatatatatatatatatatatactcacacatatttaaatatatttaatcagtgttttgtagttctcagtgtacagaattttcaccatcttggttaaatttattcgtaagtattttattttttgatgttattttaaattggattattttcttcatatcttttaaatagttcctggtttgtatataga

SEQ ID NO: 748715 - DNA, 666 bp, Homo sapiens
ataaatatagaaaaagtatttgatgaaatccaacagcatttcatgttaaaaactgtcggtaccctaggaatgaggagaaaaccttctcaaattgatgaaaatatcctcaaaaaaccttacagctaatattgtaattaatggtgagaaactcaaaattttcccactaagatcatgtacaaggcatggatgtcccctctcatcactgcttttcaatgttgtactggaactagctaaggaataagaaaaggaaataaaagaaatacacaggcaaaagacccagaatagccaacacagtgttgaaggagaacaaagttggaggattgacactacttaacttaaatcaagacttactatgaagctacagtaataaagacattgtgattttagtgaaggaatagacaaggagatcaatggaacagaatagagggcccagaaagaggcccacacaaatatagtcaactgatctgatctttgaaaaaggaataaaggaaataaaatggtggaaggagtcttttcarcaaatgatgttgaaactggaaacacacacacacacacacacacacacacacacacacaaaatatagccatagattttatacatttcagaaaactcaactcaatatggattagagacctaaatgtaaaatgcaaactataaaactttta

SEQ ID NO: 748716 - DNA, 537 bp, Homo sapiens
ggtgtagcaaaaaggaaacaaaataaatactatatatattaactgtttataaaggcagtggaggaaaattaagcaggagctacaaaatgaaacaaaagtttagagtaggtctgtccgaaaaggtggcagttcagtaagacttaaaggatgtgggragcaagccagagaaatagttagtgcaaaggccctgggccaggagactgggagcagcagtcagaccaccctccactgaagggagagggagatagaaagagacaaagccataaaaggaatggaggcctgtgggtcatcaaaggtctttggcttttaacacatagaaaatccctaatgctttgatttgtgctgtctagtacagtagttttttgtggagctttcctgtattctctttatatcctgatatgatttgagtgtatcccctctaagtctcatgttgaaatgtgattcccaatgttgaaggtggagcctggtaggagatgactggatcatgggggcagatccctcatgaatggcttagcaccatccccttggtgataaacc

SEQ ID NO: 748717 - DNA, 537 bp, Homo sapiens
ggtgtagcaaaaaggaaacaaaataaatactatatatattaactgtttataaaggcagtggaggaaaattaagcaggagctacaaaatgaaacaaaagtttagagtaggtctgtccgaaaaggtggcagttcagtaagacttaaaggatgtgggaagcaagccagagaaatagttagtgcaaaggccctggrccaggagactgggagcagcagtcagaccaccctccactgaagggagagggagatagaaagagacaaagccataaaaggaatggaggcctgtgggtcatcaaaggtctttggcttttaacacatagaaaatccctaatgctttgatttgtgctgtctagtacagtagttttttgtggagctttcctgtattctctttatatcctgatatgatttgagtgtatcccctctaagtctcatgttgaaatgtgattcccaatgttgaaggtggagcctggtaggagatgactggatcatgggggcagatccctcatgaatggcttagcaccatccccttggtgataaacc

SEQ ID NO: 748718 - DNA, 537 bp, Homo sapiens
ggtgtagcaaaaaggaaacaaaataaatactatatatattaactgtttataaaggcagtggaggaaaattaagcaggagctacaaaatgaaacaaaagtttagagtaggtctgtccgaaaaggtggcagttcagtaagacttaaaggatgtgggaagcaagccagagaaatagttagtgcaaaggccctgggccaggagactgggagcagcagtcagaccaccctccactgaagggagagggagatagaaagagacaaagccataaaaggaatggaggcctgtgggtcatcawaggtctttggcttttaacacatagaaaatccctaatgctttgatttgtgctgtctagtacagtagttttttgtggagctttcctgtattctctttatatcctgatatgatttgagtgtatcccctctaagtctcatgttgaaatgtgattcccaatgttgaaggtggagcctggtaggagatgactggatcatgggggcagatccctcatgaatggcttagcaccatccccttggtgataaacc

SEQ ID NO: 748719 - DNA, 623 bp, Homo sapiens
cgggttgataggtgtagcaagccaccgtggcacatgtatacctaggtaataaacctgcatgttctgtacatgtatcccagaatttaaagtaaaattaaatttaattttaaaaaataataatttcagtgtgaggttgacaagttggctgaaagtgcaagttatttatcaaaaaaaaaataggtaaatttttgatggagagatggatggcagatagacagaccttcctgcaagtctaccaggatttcaaattaatggcaattggaaaasatattcttttgtgccacaggaaaaaatcatgttagctctgaatttatttcattttggtaggtgggctcgcacatttttttcttcttatttcatctcatacactcttccttgtgaaccagagcagagtcaaggaatatcacgtttaagagaagacaatcattcacacaccttttccctgttaatcctgtcccagtctgactgccaaagaacttttccctttaaaataaatatattgccatcaaatgaatttcagaaaagtttttgtgctttgttttgttttaatcccattccctatggcttgacttttgcttgtcttcctgtccaccttctacccttaccttcgcatttcttctaat

SEQ ID NO: 748720 - DNA, 574 bp, Homo sapiens
tttagacataattctaatagtctagttaattaatcttgggccctgagtaatcagaagaaacaataatatgaataagaagaccgattcttagaggcaggcatacatacatcagagagaagtgacccatcacagaagtgatatgggaaggatattaaaaacatcccaaaatccaatagtttgtgatctctttattgtatttaaaagatgtctaaaataggtagggacaaagaaatctacatgacccaagaatcccaaagagtctcctggaatacagtaaacattgagattaagtgcagccatagcctgaacttcaatcctgttcagtgccacctggtttcagttctcagtgttctcaactataaaggggggataatactattatstaactcataaaattactctgacagttataagacattataactatgaattcgtatatgacttaatgtgtacctggcacattgtattgtaagtactacgtaaagtattagctatgataattatgcatgtacatataaaccgaatagtctggatcacaataataattacaccataaccttgtatagtgcttcag

SEQ ID NO: 748721 - DNA, 585 bp, Homo sapiens
tggatcaccttattgtctaggatgacttcttcagctccagtgacacattcaagccagcaaaaagaacgaaacggggggaaaagggcctacctcctccataatgaacactttctggaaattgcacacacaacttttccctacatctcattgctagaatttagtagcctggatatacttacctgcaaaagagggtgggaaaatcatccctgttggccctgtgaccatccccaaatcaaaggctatgttacaataaaagagggaaaagacggatattaagggacaactagtagttctgttacaagtgtagacctatagcaatacattaatcaggtatttataattatccaagtgtgctatggtgttctgttgtacatttttatttattgttcttttgataaacatttatattgtaccataattaytaaaattatgaacaatattatgatgaatttccatgaacatacactttttatagttaataagttactgtgcttagaatattcccagaaatataattgctgaatcaaaatatgcatgtatgcaagataaatctatatatcaaagcagtacatgtggcatggtgaa

SEQ ID NO: 748722 - DNA, 556 bp, Homo sapiens
agagaaatattttgtgaaggggtcaatcagtgtcatgaacttcattgtcttattttaagaaattgcacagccacttaatacctttggcaactaccaccctgatcagtcagcagccatcaatattgaggcaagaccctgcaccagcaaaaaaggttacaacttgctaaaggcccagatgattattagcattttttagcaataaacattttgaaattaagttatgtacttcttttttttttttttttttttttgagacagagtctcgctctgtcacccaggctgtaatgcagtggcatgatctcagctcactgcaacctctgcctcccakgttcaagcaattcttctgcctcagcctcccaagtagctggaactaaggtgcccgccaacatgcctggctaatttttgtagttttagtagagatggggtttcaccacattggccaggctggtctggaactcctgaccctgtgatctgcccgcctcggcctcccaaagtgctgggattacaggcattagcaagttatgtacatttctttagacataatgctgttgcacac

SEQ ID NO: 748723 - DNA, 557 bp, Homo sapiens
ccctctttgacgggtcccacttggaattactcatcgacgctttcgaaactcaagcctgtcttcttccaggtgaagaacccacttgtctgggtctcccaaatgagcacttacattgtgaaaactctctttcagaaaccctatctgtgcttgtgtgcatgaccttgacagaggctgagctgctgcctggggcaccggactgagmtctgggggctgggggttggcaagggcgtggcctcctcttccgtgccctcctaatgtctgctttctcttgtctgagtgctgtcttttgtctccaggccatccagatttcttcactggcttcctcccactcaagtctggtttcccagggagggccagttgatgacctgtattttcaccatttcctctaccaagatttgcctgacatatatttccctttcatagaaaattggcagaaaaaaaagtttgttagaaaaattcctgaggtgtttaataactagtcataattgagggcgatagcctctatcagaggacaatgccctaatctgggggatccctaaccttttctcatgtctgca

SEQ ID NO: 748724 - DNA, 611 bp, Homo sapiens
atacttgtccctgaacaccctttaactgtgacttgtaggataatttctgaacccatttaaattctggaaacctgagagttgcctgtctaagcagtagctgtgctccttctgtggcatcttcttgtaaaatattggrttctaaactggttgcagtggaaacccagggccactgagggaagagtggaagccagatagagtgtcccctccttctgtgctggctgggacaggcaatctcagcccaggggtcggggagaggaaccgggattcatacccgcaggattttgtttgagatttcatgcctatcaagttcatcctcaaagaacccaatgtcattctgatttattattattatttgaatgagagtcaaccaccgactaattgtgtctgggatatgtcagccccaagcctgccttagggcaaaaggttggacaagataattaggactgtgaggaggaattgagagacttcctgtggaagtatcagagtagaagaagccaacacaaaaatctggcatcagtaatggtctttcttttattctcctctcaggacggtttggaactttgggatccttgaaggaccccgtggcctagcagatgagcaccctgcctgcg

SEQ ID NO: 748725 - DNA, 640 bp, Homo sapiens
caagcagacttctccttgcatctgattggttggaactggatcccttgccttcccttaaaccagtcactggcaaaggggaatgagattgccttgggcttaaagtaatgatgactcattctctggaagttaggagagggacttgcccttcccaataggaaggaaaatccacctattacaaaatcagggagtgaaacacggggcaaatgccagtgagtaggccatgaacattgcctgccccaggaagaaaccagttcctacttgtagagaaggcagcagaatgccaaagcccaatttcacctatgccacagtgcagccaagtccagcccttccacycacccccttgtacctccccatgatttcttcactttacaacaggaacagtaatttgatgtttactttgagttcaggaaggctgtggggggcacagaatgtgcagtgggcattgtcagaagaatgatctgaggtgttgagagagaggcagagatgtagagaaaggtgctcagaagcaatgggtaataaagcaaagtgtttaatataaacattatttcatttaaatctcaaaacaatcctatgaagtagggtccttttccacagtttatggatcagaatgcagggagactaagttttgcccaaattcaca

SEQ ID NO: 748726 - DNA, 584 bp, Homo sapiens
aaggagtagtgtccccaaatactaagcaaaatgaatatgggatttttcaaagcagtctagaaatcagagctcactaggtttggagataatccatgttcaaggcctcataatgaaatctttccgtatttccagattcttgatrtggaatctgtcacaattttaaggagcttctgccaaaggaaaggagatcgcttatgctgcctgaaatggcctacgcctcctaaatttcctttgactctgtcactaatatagcaagggttcattccagcaaaggattactactgaggaccaactcctctctggtttagattttgctttcataaacacattgacccttgccaaggagagctctatgtatatccaatttcttttctttttatccctgctacacaactctggctacaaaatctaggactctcacagcaatggcagcattggtcagaaggtaagtgccagttcgaacgcaagaactctctaaagttcaatggtcacaatttttttttaaccacttctgccacgacttttttttctctttaccttgccaattatttcttttaaaactcaatcctccaagctacattctg

SEQ ID NO: 748727 - DNA, 655 bp, Homo sapiens
gagaatggattgaggcaagacagaactgagtcctggagttccaggagtaagtcactataatccaatcaagactgatttggtagctaagtcatgtgtccctgatgacacaagtaaggaattacccccaaaacacaactcttccatataaagacccagaaactcctgaatttcttaaaagttctaaaggctgaatggacaagccctttctaaccagttttcaacacgcagcatgagtctaatagcctggttacatcagtcaaaagcgtcaracatagaacgccacccactccttccaaactacatacgaccaacaacctctgggcactcttccgtgcttcttgttcatgctttatcgccaaggcctagaaaagtgaatgcaaacagttaagaaccggccctacattcttgctgtctctgcctccgagactcaggagccacttttcaagagccgagacaactcataagagaggagccgtggcctgctctggccgaaaaccccttcctattaacagactgcaactagcccggaacgactttcaatttgcagagtccaaccatattccacaagacaatctaccacctcaaggttcacgcgtggattctacaccttaaatccttggatactgtctttgatttggagatgagcaaagaaagg

SEQ ID NO: 748728 - DNA, 600 bp, Homo sapiens
ccgttcaaacgtcgcagttgtggcccacacagagcccagtctgttccaggggcgcgccctgcacccctctgcctgcccgaggtcttccctcccctccgctccccagaaacgcacccactgagacatgtgcggggagggggcacgcttactcccacatcccgcccgagacccgcggagcagccaagacccggccaaaaaggggagggcgtggcaggcaagggccgggggcgggagcgcgggcggccgcggactcacgtactggctgtggcggcgccgcggraacccggccgccagcgggacaaaagcgcggaccgcacggccggaagaacccgcgccggccctggggcacttccgcgccctctctgggacgctggaggactgactcgatggtccgggccgacggcgccggcgggagggagggaggggagcgcctcctcggctatttattgaggaccagctgcagggcgcgcgctccaggcgcggccaggaggccgtcggcggggcttcctgtttccgtgcccattagcttctggggtaggctgggggaggggcacaggtaataaagtaaatacctgcctacctggttcctgaacacgtgat

SEQ ID NO: 748729 - DNA, 499 bp, Homo sapiens
acacacacatatatatatatatactttttactaaggctaggaacttgaggggaggattttttctttcccagtttggattccctttagaattttgggttcagacaacaacttttacagttcttgaaccaagttcccttttactgaaagttaacaaaatacaaagaggggctgtgggctgtgggctgtgaaaggattctgtagaaaattgtaaggcccagattaagagcatgcagacagcagtstatcagtcagattctaacctgaaaatcagaaaccactcaagtgttcagatggaagaaatctaatgcagagaataggtgacacactcagagtcaacatcagagaaagcactgccacagatgctatcagacacagcttttaaactaaaaatgctactatgttcaaggaaaataaagctacatttgagaatctggcatactatgaaaaaggaagaaggtccagtgctgtggctcatgcctgtaatcctagagctttggga

SEQ ID NO: 748730 - DNA, 571 bp, Homo sapiens
gacgccattctcctgcctcagtctcccaagtagctgggactacaggtgcccgccaccatgcctggctaatttttttttgtatttttagtagagacagggtttcaccatgttagctaggatggtctcgatctcctgacctcgtgatccgcccgcctcggcctcccaaagtgctgggattacaggcgtgagccactgcgcctggccaattttaagtataatttttaaaaagccacagcaattgcacaaacaataaaaaacaaaggattcaaagcatgcaactgtgagaaawcatcaaatttcaaaggaagacagccagagaagaattaaaaataaaagatctacaaaaccaacataaaacaaattataaaatggaagtctgtacctataaataaccttgaatgtaaatgggttaaattctccaattaaaatacatagactggctgaatgtatttttaaaatcaaccatatactactgtctataagtgactcacattactagtaaagacacacaaagtctgaaagtgaggggatgaaaaaggatattccatgcaaataaaaaccaaaaaaaaaa

SEQ ID NO: 748731 - DNA, 458 bp, Homo sapiens
agaatggaaacacaacacacaaaacttatggggtgcattaaaggcaaaaatgagagggaaatttatagcaatagacatctgtatcaaagaagaaggatctctaataaacagcctaatgttacacatcaaggaactagaaaaagaaaaaagaattacatccaaagaacagaacaataataagtaaggagactgacttagtaataaaaattctcccatcaaagaaaagcccaggacccagtgacatcactgatgaattctaccaaacatttaaagaaaaactgccarcatttctcaaactcttccaaaaaatgacagaggacatacttccaaacttattttacaaggtcaacattaccctgataccaatatcagacaaggacactgaaaaaaaaagaaaactacaggccaatattcctgatgaaaatagatgcaaaaattccaccccccaccaaatacta

SEQ ID NO: 748732 - DNA, 614 bp, Homo sapiens
tttgcccaagtttttcttaggcccattgggcttgttctgcccccttggccttgcaggctgtgcttggcttgtgataccagtccagatcccacacctgccaagggcgagccaggcacagagcagtgaggagtgcatgagtgagcgagcacaaaatctggccactgtgcacagccaggcatgctggctgctgtggtggagcaggcagctctaggcaccagcacaggtgccagctccatgtaaacctctgtgtggctagatcagatgcactgcaagtagcttccactgtaggcasctgtgtctggacgaggggaatgtggtggtgcctggaagcttggaaatgccagaaaccatacaggcccaaagagggtgtcacagtcctggcatgggaagcccctaggtctgggctcctggaagggctgcagctcttctctccttctcattgtctgcaacattgcaaacagggcagtgtgtatcagccctgtttgtgttacagctttttcagtcccacctttcagtggttcccaagttcttgtcccatatccaggaagaatgtggtacacagacaactggagggtaaggcagtgaggagctttattgagcaacagaacaattct

SEQ ID NO: 748733 - DNA, 614 bp, Homo sapiens
tttgcccaagtttttcttaggcccattgggcttgttctgcccccttggccttgcaggctgtgcttggcttgtgataccagtccagatcccacacctgccaagggcgagccaggcacagagcagtgaggagtgcatgagtgagcgagcacaaaatctggccactgtgcacagccaggcatgctggctgctgtggtggagcaggcagctctaggcaccagcacaggtgccagctccatgtaaacctctgtgtggctagatcagatgcactgcaagtagcttccactgtaggcacctgtgtctggacgaggggaatgtggtggtgcctggaagcttggaaatgccagaaaccatacaggcccaaagagggtgtcacagtcctggcatgggaagcccctaggtctgggctcctggaagggctgcagctcttctctccttctcattgtctgcaacattgcaaacagggcrgtgtgtatcagccctgtttgtgttacagctttttcagtcccacctttcagtggttcccaagttcttgtcccatatccaggaagaatgtggtacacagacaactggagggtaaggcagtgaggagctttattgagcaacagaacaattct

SEQ ID NO: 748734 - DNA, 466 bp, Homo sapiens
tattttcccaagagagaatttgtttgcatttttaagaccccctatccaaaggcctaaccaatgtgggaatttgagacaccgagcaggctcagggggaggtagtaggagacaatgaagctttttggaatctttaatcactttgagatgggaagtctattgaatagagagtcgagatttccttagcatttagttcctgttaatcttggtggcgggaggttgggatttggggagggagggagagagagagcaagaaccctcaggactgatgttgtgggtgaacatacatrgatatgcagttacataaaggcattccataccgagcagaggatctgcttcagttacgatggaacgtttcaactccatcatttggcatgttctgtaaccagaggtctttcagcacaaggcaggctggtgggaatgggatctgatttgaggacttaatgtcatggcctgttctgtgtgtatg

SEQ ID NO: 748735 - DNA, 640 bp, Homo sapiens
agcctgtaatttcaaggactcttcagttcctaaatgacctttctgttggatatccttttcactgtatatctgacattatgtgtaaacaacctagcagatgcatttaattaaccaggtattctccttgtttataatttttgcaattttttaaaaaaataaaaagacctttcatttarccttatctgtaaatgcatgtttttgaaaggttttaattagctgtatactatgaagcatttagtcggaatcactgttgaatttatatggacatatagattcctaagtagttacagttatatttatactcacccaggctaataaatggttatataagaaagtccacatgtattttagttcatgcttttttgtaattgtcagaaattcgtgtcctaaaagaaagtatgtaacttaattttaaggaggtcaaaatgttctaaaaatattaccttataaaaactgcattcctgtgagtaaatatatctctaatattcttcagttgaaaagaacatcattttcattagttgaaaggcacaatggagtaatacaaagaaaataagttttttgaccatttctttgattattgcccccaccaaatcaacatctaatctaatctaaaataagattccccattatacattaaatg

SEQ ID NO: 748736 - DNA, 573 bp, Homo sapiens
gtgcatatatagatttactttttatatttatatctctgatccatttggagtttattcttgggtgtagtggaaggaatgaatctacttttaccttttttcaaatggctatccggtattccctacaccaaccatcctcaacctttttggcacyagggaccaggttcatggaagacagattttccacagaatgggggggtggggtgaaggggacggttttggcatgaaactgttccacctcagaccatcaggcatcacttagattctcataaggagcacacaacctagatccctcccatgcacagtttacagtaggtttcctgctcctgtgataatctaatgctgctgctgacctgagaggagacggagctgtcaggtgataatgctggcttgccctccgctcatctcctgctttgtgactcccagttcctaacaggctatggactggtaccagtccatggcccagggctttgggatccctccccgccctacactgtgtattaaccagagcatctttgacccaatgatttgagataccagttttatcatatactagatgtttatatgtaattggat

SEQ ID NO: 748737 - DNA, 627 bp, Homo sapiens
gtcctactgacaccttaattttaggccagggagacgtctgacaacatttctaacatacagaactgtaagatagtaaatttgtattgtttgaagacaccatatttgtgacaatttgttacagcagtaataagaaactaatataggaagaaaacaaaaaagctaattgaaaaaaaaaaagacaaaagatctgaataggtacttctccaaagaagatatatggatggcaaacaaggatatgaaaagatacttaacatcatttatcattacagaatggaaattaaaatcacaattagatgctatgtcatagttgytagaattgttacaaacagacaataaataaataatggcaaggatctggagcagcaggcattctcatttattgccagtgggaatgcagaatggcatagccactttggaagtcagtttgatagtttcttaaatatcacttctgggtatttacctaaatgtattgaaaacttttgttcacacagaaacctatatgcaaatgtttatagcagctttatttataaattgacaaaaactaggaacaaccaagatgtctttcagtaagtggtacagtggaatactactcaaccatgaagtggagtgagttggttattcctgcaa

SEQ ID NO: 748738 - DNA, 593 bp, Homo sapiens
agcagttttttccatgcacacaatgaatcgctgctgcaaatagaacattctgcatagaacaytcttcatcattattataagaaagaagctgtgtaagactggccttggtaatgtagagccttttggggcatttttgtatgaaaagagaggaccatatcttacaattttgttttcatcataagtgtaatttatgtgccaaactttttcctcaactaaataataacagtttttatatactgagaacctcctttgtactgggcattgactgtgtgatgttttaaggtagattatttgaccccactttatagatgacaaaattggagcccagaggctctaagttcgtctgactagtgatagaactgatacttaaaaccctagtccatctgagtttaaagcttatccttttactactttccagctgtgtctctgaggacaggcactcaataggtgttcttgcccttggttctatttcttcggtagtggtatctcttattttctttctccttttccccctagtcagtaaaactaatataagtgatggccttcacatcatttaataagaggataagagctacatcatggtcattgaataa

SEQ ID NO: 748739 - DNA, 625 bp, Homo sapiens
taaatagagatgaagcttctctcacttgcccgccgcccacctcctgctgtgtggcccggttcctaacagaccatggaccaatactctgtcctcattcagctccaatactggtctgtggcctgggggctggggaccctgagctatgttgtctctaagggtgcttgcagggctaatattctgtgatttgcttagtctaatttgaactttgtaatatcaactacattgtatattttcgcttcaggtatgcactgaatgctcattattgtcaaatggcttgcgttaatcattccatattgtattcatataacataacatcacattgtgccccacaataatatacaatgacgatttgcccattagaaataatgttcattaaaaaaatggactgggcatggtggctcgctcacgcttgtaatcccagcrctttgggaggccgaagtgggtggaacacaaggtcaggagatggggaccatccaggctaacacggtgaaaccttgtgtctactaaaaatacaaaaaattagccaggcatggtggcacgtggccatagtcccggctactcgggaggctgaggcaggagaatcacttgaacccgaggcggaggttgcagtgagacaagatcatgc

SEQ ID NO: 748740 - DNA, 625 bp, Homo sapiens
taaatagagatgaagcttctctcacttgcccgccgcccacctcctgctgtgtggcccggttcctaacagaccatggaccaatactctgtcctcattcagctccaatactggtctgtggcctgggggctggggaccctgagctatgttgtctctaagggtgcttgcagggctaatattctgtgatttgcttagtctaatttgaactttgtaatatcaactacattgtatattttcgcttcaggtatgcactgaatgctcattattgtcaaatggcttgcgttaatcattccatattgtattcatataacataacatcacattgtgccccacaataatatacaatgacgatttgcccattagaaataatgttcattaaaaaaatggactgggcatggtggctcgctcacgcttgtaatcccagcgctttgggaggccraagtgggtggaacacaaggtcaggagatggggaccatccaggctaacacggtgaaaccttgtgtctactaaaaatacaaaaaattagccaggcatggtggcacgtggccatagtcccggctactcgggaggctgaggcaggagaatcacttgaacccgaggcggaggttgcagtgagacaagatcatgc

SEQ ID NO: 748741 - DNA, 683 bp, Homo sapiens
taatcgtgacaaaacttctgggatccagcaaaagtggtgccaaaaggaaagttcctagcattgaatgcccacagcagaaggtctgagagagcacaaatagataatctaagatcacacctcaaggaactagataaacaagaacaaaccaaacccaaactcaacagaagaaaataaataaccaagatcagagcagaactaaatgaaattgaaacaaaaaaattacagaagataaatgaaacaaaaagctggttctttgaaaagataaacaaaattgataaaccattagtgagattaattaagaaragaagagagaagatccaaataagctaagttagaaatgaaacaggagatgttacaactgataccacagaaatacaaaagatcattcaaggctactatgaatacctttatgcacacaaactagaaaacctagaggagatggataaattcctaggaatatacaactattttagattaaaccaggaagaaatagaaattctgaacagaccaataacaagcagtgagatagaaatggtaataaaaaaattgccaacaaaaaaattccaggaccagatggatgcattcacagctgaattctatcagacattcaaagaagaattgatatcaatcctatcgacactatttcaaaagatggagaaagagggaatcctccctaaatcatt

SEQ ID NO: 748742 - DNA, 560 bp, Homo sapiens
ttgcccatcctctcttttgaattttgacagatgagtctcccaggaaacttgtgcatcttttcaagattaccctgtataatttcaatccataaaaatggtgacaaaatcaaccaaccatatcactccatttgaagctcttagaatcactatcttcttttgtgagtatagctcaaatgattatggcatcaatactatattattggttcctttatttcctttttattatgagttttttctttttattgtgagttttaaaattgcaattgwataaagaaaaagatactggatgtttattgtcttgcatataatcatactggccttcatgttttcaagatggaaagaccaaaaggaaaagtaaagaattagagctttatttacatttccttagtcatctagtctccaaaatgtactttttctagattcctctgcttctgcttaagttatgatgattctttacccaagctgggaaacatggaatcctctctgacaatggtgtccttttctctgttaccggttgtcaagttccattgttatttgtgtgtgttttttttctttctggt

SEQ ID NO: 748743 - DNA, 535 bp, Homo sapiens
ttaattcagtgactccttaattgcctgcaaggcccactaccttagattgacgcccaccattcagcctcaacatacctttcagagattaatcaatcatttttacttaaaattgcagcacaagacgggctctgttgaattccagtctccaagataatttttcacatatgttacactctagttttcctatctactaatttgaatcttattcttctatagggcttgccttaaattctcccttctccaaaartttcctttgatcattagaactcacaaaactgtattcatctgacctaatccattatcagatgaaacacattactgtgtcattaaccaccaagaaggaaaaacacctgtccattaaactaggcttcattgctttcttagaatttcaattttattttaattgaagctcttttaaacatcacccccatgcatccatacaaagataagtgcaatgaattagttaagaaacttctaaaacttcttcacatgtagggtctgactcttctgggattttcttccaatctactaacat

SEQ ID NO: 748744 - DNA, 619 bp, Homo sapiens
ctgtttataatgatgggctttcatagatattagctcatttgatcttcataataaccaagcagcagctactccacctgccctcttacttaagggtctttgatagtaaacaacagaaactcattctgattaattacctaaaaggggatttttttaaaggatgtcagaaactccccaaattaacaggaggctggaaagggtcctagagacaggagagaagtaagatggcttcagaaggctcgcaggtagaaatcctgggaaccagcagagtctgatcacagtgaagaaactctggtttctgcctctttgtcatggtagagtcatatcccaggcagggctgccaggctatttcagattgggttccttccccaccccttgactcgatggctctrttggatggtattcagtgaggagaaaatccccaaaggaaatctgcaaagaaggggatagatgctggacagccaaaaacctaccagggctatcatatctcttgtgcaaataggaacattgaggctcagagcttagctgatttcttcagtgttatgcacatggtgcttcaaaaactgattcaaacctgggttttctcacaaattccgtattctttccttttgtatgccacagt

SEQ ID NO: 748745 - DNA, 619 bp, Homo sapiens
ccaaattgagaatttgggatttcgtgtttgttggcaattggttgaggtcatcagggctgttctgacttgacaggtaggaggctctgaacaggaaagcaaaagacagaaaggatggtaagaagattattcaagattaaagataagagagaattcaaatcagttctgtgtcttaagccctggaaatagtcattatgtgttcatccaaatatccagaactatttgataaagacacgaaacacttgctgttatttatagcagcctagagaagcaaactaaatgtagaatacagcttatgtcttgtagtgtctgtgatatcttggtaaataattctcaaaatattaccccttttagtgtatgaaatggctattttcaaaacataatttttatgttcaaaatatgccgttgctatttaaacacatatttaaaagtgactgtcttccagrcactgtcctaaatgctttacaaatattaattcacttaatcttcatattgtacacccttagaaggtaagtactatactagccctgttctacagatgagagagcagaggaaccagggaggaaggaaacttgcctagaattatggagttaggaaagaatagagctgagattcaaaccca

SEQ ID NO: 748746 - DNA, 570 bp, Homo sapiens
agctgtcagttcaggaaaccaaaaaagaaataaggtttataatgacgacaagatccacaatcactcacttgtacttcctgaaaggtgagacagcaccagaccctgttctttagagtagctctgagatatagaggagagagctcttgagaaatattcaagtgtactttgatgggtgcaggggacaaacccttttcaatgtttactgtagtggcattgatcaagatcccaggcactccctacaaaagtggcatttaagakaagtagtagctaagtgaacagtgggggaaagtgtttagtgggagcagaggaggatcagagacaaaagaaggcatgaagaaagaagtccaatctggttggaatgtggagggtggtcttgactattgcctgtccctactccatcattcccgcccaactaaactccatcctcagtcaatctaattctttgtctaccctctgtcttcactggggcagtagacaatggccaaagaacaacatacactcatactaactagtctctctttaacgtcatgattcctaacctcaagtgggttgacagtacagtccagagat

SEQ ID NO: 748747 - DNA, 570 bp, Homo sapiens
agctgtcagttcaggaaaccaaaaaagaaataaggtttataatgacgacaagatccacaatcactcacttgtacttcctgaaaggtgagacagcaccagaccctgttctttagagtagctctgagatatagaggagagagctcttgagaaatattcaagtgtactttgatgggtgcaggggacaaacccttttcaatgtttactgtagtggcattgatcaagatcccaggcactccctacaaaagtggcatttaagagaagtagtagctaagtgaacagtggggsaaagtgtttagtgggagcagaggaggatcagagacaaaagaaggcatgaagaaagaagtccaatctggttggaatgtggagggtggtcttgactattgcctgtccctactccatcattcccgcccaactaaactccatcctcagtcaatctaattctttgtctaccctctgtcttcactggggcagtagacaatggccaaagaacaacatacactcatactaactagtctctctttaacgtcatgattcctaacctcaagtgggttgacagtacagtccagagat

SEQ ID NO: 748748 - DNA, 580 bp, Homo sapiens
aattgataataaaatgttgacttagtactttaactattgtttacaacagtgtttaagggctgggtgactaaaatttgcttcattcatgccactgtgccctctgcttggggttaattttctactcctaaacatggaggcctacatttctagtcttccttaacaagtccttattgctcagtttaatattcttctctttatgaactcttttacccttttattataaattctacctgggcatcaagttaatggtacagccaaaatgtggatacttttcctcccaagccatcctcaaacatactcagggyggggaagcgtactgaaactcatcctaataaaaccaaaaccaaaagaatctaactttctttggaaaatgaatctcaataaaaagcagtatgatttttgctttttattcatcaggaagctgccaagtcaaatggctttatacagcttctttttcttatgtggcaatagttatatttgaggggaaattaaatatccaagttttaataaaatgagactttaatattttaatttatattttttgttacccttcttactatgagtgggagacaattctcat

SEQ ID NO: 748749 - DNA, 593 bp, Homo sapiens
atatcttggatattggtgataagctgtgtgtgattagcttgcactgattctgcctagacattgcatatatcttaaagaagatgagtttctttgtcaggactctgagatcaaaggaattgaatagtcccttactaatttacttcagagaacgctaatatttgactttgtgtcttggccagtcctttagtagtgatgtgacttacatcttgtccttcgctactattttgtagtttcgtgttttcattcatggtgagttcaaatatgtttactaaaatacttcaatcaaccacctggtataatcatattcaattttgtaagaaattctaaggtaaaagtcacttgaaagataaatttaaacccttactattttcttgctcatctctatgaasgatagagaagtttagcatattatctaccttctggatatataatttcaaattatgtgtatcaatagcaggtacaaattccaacccataaggattattatttttaaggacttaaaaaaaattcatgtagatcacccattcttctagatagcataaacttattatcagttaattcaagacatcactgtcttgtcatctcactctgat

SEQ ID NO: 748750 - DNA, 611 bp, Homo sapiens
cccctatgattaggggtagccgggcaggtacaggagactattatgagtgaggagatactccccaaaatgtccactacgacttggctaggtaggacagacaagaatttccttccctacccatcagtgaatgtttgataatttgagtttataaaataaactggcaatagaccagttaacaggaaagaaggtatacatatttattaacacatgtatggacatgggagttagttatacacgaagagtgagactcagaagaggggctaagatgactgaagtttttatattatcctggggggacaggaagaatatggactttgaacatgtyggggggggcgttataggagggagagaggaggaaaggcctgggagtgaaggggtcctgttaggcagatgaaacctctcaggtagcagctctcagaaggaacagacaggagcttgtggtaaacgcttctctgtcagaaccttatattgtcagacttcagcctccttttcctgtgagttaatctttcctagatccagataagaggtcctcagagaaagtctgtttgcatctgttgtttacttcattttactaatgtggatttcctctccagatgcaaatctcccgaaca

SEQ ID NO: 748751 - DNA, 611 bp, Homo sapiens
cccctatgattaggggtagccgggcaggtacaggagactattatgagtgaggagatactccccaaaatgtccactacgacttggctaggtaggacagacaagaatttccttccctacccatcagtgaatgtttgataatttgagtttataaaataaactggcaatagaccagttaacaggaaagaaggtatacatatttattaacacatgtatggacatgggagttagttatacacgaagagtgagactcagaagaggggctaagatgactgaagtttttatattatcctggggggacaggaagaatatggactttgaacatgtcgggggggkcgttataggagggagagaggaggaaaggcctgggagtgaaggggtcctgttaggcagatgaaacctctcaggtagcagctctcagaaggaacagacaggagcttgtggtaaacgcttctctgtcagaaccttatattgtcagacttcagcctccttttcctgtgagttaatctttcctagatccagataagaggtcctcagagaaagtctgtttgcatctgttgtttacttcattttactaatgtggatttcctctccagatgcaaatctcccgaaca

SEQ ID NO: 748752 - DNA, 611 bp, Homo sapiens
cccctatgattaggggtagccgggcaggtacaggagactattatgagtgaggagatactccccaaaatgtccactacgacttggctaggtaggacagacaagaatttccttccctacccatcagtgaatgtttgataatttgagtttataaaataaactggcaatagaccagttaacaggaaagaaggtatacatatttattaacacatgtatggacatgggagttagttatacacgaagagtgagactcagaagaggggctaagatgactgaagtttttatattatcctggggggacaggaagaatatggactttgaacatgtcggggggggsgttataggagggagagaggaggaaaggcctgggagtgaaggggtcctgttaggcagatgaaacctctcaggtagcagctctcagaaggaacagacaggagcttgtggtaaacgcttctctgtcagaaccttatattgtcagacttcagcctccttttcctgtgagttaatctttcctagatccagataagaggtcctcagagaaagtctgtttgcatctgttgtttacttcattttactaatgtggatttcctctccagatgcaaatctcccgaaca

SEQ ID NO: 748753 - DNA, 624 bp, Homo sapiens
tctccagatgcaaatctcccgaacaaaagggcagcttttcaaggctagttttgtgatctgcagcccctcagaacaggcatctcaaaatatgccaaaggagttgagatattctggtttctttcagctaggttagccaacttctagtattttcccaactaaacaaggagttacgtattacacagtggccttgcctttgagctgcttaatcctaatcccttcaccaatccagtgatttcaccagctcaaagagctaattgtggcattcacagaggatcctggtatgagtcccaattgtgtcaactaaatgctctagtttcctattyactccagcatacgtgaaaggaattgcaaattataagcttgggattcatatttataattgaccttcattattcacaaattccatacttgtgaatttgcctgtttctaaactttatttgtaacccagaatccacattcactgtgtttacacatttatttatggacatgtgtagagcagtaagaaattggagtcatccaacatacacactcccagctgaggtggaaccaggtgatgttctgccactttgtttcagctcttcttgtaaacaagcatctttcttcatggtctattgattgccacat

SEQ ID NO: 748754 - DNA, 592 bp, Homo sapiens
tgtttacaccagttggactttacatatagatagcccaaacatttgcaaattcagcaatgttgtcttattgtacccttcctactccctacttaataaaactttctgggtctgaagactgctgagaagttactcccaagactttgctcttcttctggtaatttaatcttcttagctcttcttcataattcaattttgtcaatcttttcttcaggggaatttaaaatttactaccataactacttaataggctgcttctcrtgataaggggataagaaatttacttttggggacatgtgctgacttcctcatgggtaccatttagtctacttactgctgacctcaggattctgtaacttcaaatgttaatgatttctgaaatgtgaggacttcttaacctctcactgaagattcacctgaaaagtatgtcacaacagctaagtatgtaatacatgttcctttagtgtttttctcctaaacaactataaccttccattttcaaaatgatcaactattcccattaactattttggtttaaaatgcactaaaataaagacattttatagctacatatacaagtagggttatttagcat

SEQ ID NO: 748755 - DNA, 551 bp, Homo sapiens
agtttccattatttaggatccatgtcgtggctcaaagaactaacggcaaagagaatggagtgtttctggtaggaagaacgacaaatcaaaaagcagagagaggggaaacaaacttggcccatttacataacattaagaaagatggactgggcgtgatggctcacgcctgtaatcccagyactttgagaggctgaggcggatacatcacgaggtcaggagatcaagaccaccctggccaacatagtgaaaccccgtctctagtaaaaatacaaaaattagctgagtgtggtggcgtgcacctgtaatcccagctacttggaaggctgaggcaggagaatcgcttgaacctgggaggcggagattgcagtgagccaagattggccaaggttgcaccaccgcactccagcctggtgacagagcaagactccatctcaaaaaaaaaaaaaggaaaagaaagatggccaaatatagtgtgaaattcaatagaacttagtaaacggaactaaggaattggagacaggtaaaacttggtttaaattcttaactttgct

SEQ ID NO: 748756 - DNA, 568 bp, Homo sapiens
tctaaaatgtatatggaaacacaaagagctaataatagccaagacagccttgagggacccaagagggagggaggaatagctcttctggatatcaagactaattataaagctactataatataattaagtcagtgtggtatttgcttaattattatatagacaaacggaacattatcagaaagttcagagagagttacatctatgtgaacagttgatttatggaaatgatggccttacagagaagtgaagaaaatgaagttattttagtaaaaggtgttggttcaattatawcttcatatggaactacaaagtaaaatttgactctgtgtcactccatacacgatagtaaattccaagtagattataagcctaaatttgaaaggcatgacaatatgcttccaaattttatcatcttaaagagtagggaaatagtggctaaatggtaagcactaactacaaacaaaaattgacaaattaatgtacatgaaattgaaaactgatttatcaaaagataccatcaagaaagtaaaaaacaagctacagattgggagaagatatctataatata

SEQ ID NO: 748757 - DNA, 597 bp, Homo sapiens
tgtttacaccagttggactttacatatagatagcccaaacatttgcaaattcagcaatgttgtcttattgtacccttcctactccctacttaataaaactttctgggtctgaagactgctgagaagttactcccaagactttgctcttcttctggtaatttaatcttcttagctcttcttcataattcaattttgtcaatcttttcttcaggggaatttaaaatttactaccataactacttaataggctgcttctcrtgataaggggataagaaatttacttttggggacatgtgctgacttcctcatgggtaccatttagtctacttactgctgacctcaggattctgtaacttcaaatgttaatgatttctgaaatgtgaggacttcttaacctctcactgaagattcacctgaaaagtatgtcacaacagctaagtatgtaatacatgttcctttagtgtttttctcctaaacaactataaccttccattttcaaaatgatcaactattcccattaactattttggtttaaaatgcactaaaataaagacattttatagctacatatacaagtagggttatttagcatagtta

SEQ ID NO: 748758 - DNA, 630 bp, Homo sapiens
aacagaaaaccaaacaccacatgttgtcactcataagtgggagttgaacagtcagaacatatgggcactggaggggaatatcacacagtggggcctgtcaggggttgggggtttgggaagggataacattagaagaaatacttaatatagatgacgggttgatgggtgcagccaaccaccatggcacatgtattcctatgtaacaaacctgcacgttctgcacatgtatcccagaacttaagtataatttttttaaaaagaggctgggcacggtggctcatgcctgtaatcccaccactttgagaggccaaggtaggtggatcacgaaggcaggtggatcacaaagtcaggagttcgagaccagcctggccaacacgatgaaaccccatctctactaaaaatacaaaaattagctaggcgtggtggtgagcgcctgtagtcccagatactcaggaggmtgagccgggagaattgcttgaaaccagaaggcagaggttgcagtgagctgagattatgccactgcactccagtgtgggcaacaagagtgaaactccgtatccaaaaaaaagaaaagaaaagaaaattagaaacttagttcatttggataaggtcaataagcatcccggatcc

SEQ ID NO: 748759 - DNA, 567 bp, Homo sapiens
tctaaaatgtatatggaaacacaaagagctaataatagccaagacagccttgagggacccaagagggagggaggaatagctcttctggatatcaagactaattataaagctactataatataattaagtcagtgtggtatttgcttaattattatatagacaaacggaacattatcagaaagttcagagagagttacatctatgtgaacagttgatttatggaaatgatggccttacagagaagtgaagaaaatgaagttattttagtaaaaggtgttggttcaattatawcttcatatggaactacaaagtaaaatttgactctgtgtcactccatacacgatagtaaattccaagtagattataagcctaaatttgaaaggcatgacaatatgcttccaaattttatcatcttaaagagtagggaaatagtggctaaatggtaagcactaactacaaacaaaaattgacaaattaatgtacatgaaattgaaaactgatttatcaaaagataccatcaagaaagtaaaaaacaagctacagattgggagaagatatctataatat

SEQ ID NO: 748760 - DNA, 603 bp, Homo sapiens
ccttcccttgtgaatgattcactggaggcctagtccagctattctgccatcttccacactgaagtctacatacacatgtggatttctgacttcctcaattcttttccaagttacctttattactattggagtttgctgtttatttcagtaccctccttccaccccctttgttcttctttacttacacacacacatacacacacacacacacacacacacacacacacacagagagagagatacrcacctgctatgaacaaccaaaagaattctggacctgggcagtaagtttgaagatgtcagcaatgcctacctcaaactccagcactgaacagttgtggatccccgataactaaagtcagcctgtgggacctcctctgctgcctattcgccaacccttctctaccatcagtaacttgtttctacaacatcttgccctcctttcactataatgaacacacaggtccaaacaccaagcatctaccccttttctcctacatcattacttcctgcctcccatggccaactcagcctcacctttatcattacagagccttctcagtgaatcatattgaaccttatctttcttaagaagtcttctcc

SEQ ID NO: 748761 - DNA, 629 bp, Homo sapiens
cacaggcactatgaaattgtaaaggatcctacttgaaaagaggagtgaaggtacatttgtgatttcatattatgttcagttatctgtgaactgaacttctttattgataaaaaaaaaagtacattgtttcgttgtttttaaccctgaatatctatgaacattgtaagttgtatttattgtgactaactttaaagtgataatgtaggtcactttttagtctaaatgtcgagtggattaggcagtcatattaaatattcctttcttaataatttataagataaaaattatctgagcacaataaacagatctaccatatatggagttcatatagcaaaaatgttttgagcaaatcygtaccattaggtaggaacttttctacaaaggtgttaagtctggttcccaaacttctgtggctccagtctaacagtatgagccctaggagaggacacatagggaccttgattcatgccctccaggggcttgcattctgaaagatgccaaagccacatgcttgttggcatgtgggcagtgctcaggtcgggggtgagaggagataagtatatgagttataatcaggagggcaaaatcagttaacatttattgaacacttactctgtgccagtgttcta

SEQ ID NO: 748762 - DNA, 635 bp, Homo sapiens
tcaaggaaacaaagttcttactacacgggggtgttattccactgtgtacttctaaagtaactttgactcatgtgcttcttggctggcttatattgtctatcagtatctgatggaagaacataactaacaaatatcttataaatttgttattactatacttatctctgtttgctgggagacactgcatatgttatatcccaaatttccacatactcagcataagctatgcrcaaattcccaccagcacattttattttatagcagttataatagttgtctctatattatgggtatatgtatatgtatgtgtacacacacacacacacacacctaattaaatccccaaaatgtactaatcattccatggagggtgagtaaaaaaatataacagaaaaatctgttgggaattacatgctgtaactaagtgcttcagctagcacaggttgtggcttatgctgcaaatttctagtttatacagtagttaagagaatgtatataccttagacccgtacaagttaagcataaaatgataactgaaacagaacccatctacttagactacccagatgttttatctctttctattctacctgctaatgcctttaaagacaatagagaacaaaaaacattaacat

SEQ ID NO: 748763 - DNA, 586 bp, Homo sapiens
gccttgaaagagacagtatgacctatcacagcaaagggcaaattcatttcctgctcagtatactgtctcactctggagcaaaagtcagataagctcactgtccattataaaagactggggtcccctaagcttggggttcctctcctataatcacctactgtgcatgaaggcattacccaggcttctttgtgttgccctgtgggaaccgatgctcgggaaactgatacaaatgctgaaactctggctgtggctattgctgtgaataacatagtgtctctgacccagaagtctcatgccttcttaaagcatccaagcaactgtagtaggctaacttgttagactgcaagtgggctaaaagtcttacactcgtcataattcttgaccaaraaaaacaaaaaaacaaaaaaacatacaggaaaagacaaaagcagcttagagaaaacggaaactgtaaagggatataaaattttttaaaaaattaacttgatccttagagagattttgtaaaattattatatccatgaaaggagaatgggatgccacagaaatagaataatcatggactaagaaagaaatttgaggagtt

SEQ ID NO: 748764 - DNA, 624 bp, Homo sapiens
agacccatgacatcaaatgtcctagtttggcacccagaccttctggccaccatatacttccccatctttatatccttcacatacatacactccagcttgagtgaactatgcgccattccctaggcagcccctgattttctggcgactggctttacttggcctttcttctaggaatgccagatgacttcctgtgcacgtaaggccccattcatcagttttcagtcttctcggattctytctaatctgaattatctccaactagctgttatcactcctttttctgaaatctcattaacaactctcttaggctgtttagattggaaacatttgtatttgtgtcttaactgtgccttcaagtagtttacaatccagtaaaggaaatgtgtcttgggtgtctcataaggcctagtactcatctttgtcctgtggtagatgtgtgtggagtgagggagggagagagaagaggaaaaaaaggaagggaaggagggaggaaggactagctttctaaatacaaacaaactctaaaacaggtttctttgatttagaagtgggtgtttcagaatccaagatggatattttccctcactgatgccacaggaaaattattaaggttataccaaatca

SEQ ID NO: 748765 - DNA, 516 bp, Homo sapiens
tctaagatgctgccaccttttcatgtgtccaacactaggctttctaccatagttccctccacccagaatgtgttacttggctcctacaaatgcaagaggaagtgcccttccctgaacagaaatcaaaacacagggtgaaaccacgacttgttttcaacaggcctcctgttgtgagccctcccagctgtgctgcctttctccaagagagctgggactggcggctcgaagcggtataaatggcctgtgcctcttcctgaggctgcctgtaacaagtgtctcaagagcaattygtcatcggctggagattaccaacttggctcactgaaccagatcgtgctttgtcacatgtgaaattctgatgttctaatacatggcttgtttgcaaactacgccttaaataaatatattcaggatatttaacaatatagtgttctgaattagaccatcatttacatctgtatttattcaataatcatttactaagtgccaaatacatgccgagtactatgccgagtg

SEQ ID NO: 748766 - DNA, 603 bp, Homo sapiens
cctgagaaaagtgccaattcccaacagcctgagtgggaaagatctaacaatttggacagaattagagtattataaaggatgttgcatcagtaatggggaaaaattgaccctaagttagatgcagctctggttgagcctaatgatagtcaaaagcaaggcctgaaacataaaataacttaactgcatccaaaagaaaactcaagaataattacacaaattaaaaatatccagcacccaacatagccaaattcacaatgtctgtcactctatcaaaaattactgggaaaaaaaactaggaaaataagacccataatgtggagaaaaggaagtaatcaaaacacacccagaaatgccacaactkgtagaatcagtagacaaaaacattaaaacagttattattaatatattccatattttccagaagctagaagacagatttaacatgttaaatggagacatggaagatatacaatagacccaaattaaaaattcagagatgaaaactataatgtctgaaattaaaaataacctgaataggattactagcagatttgacattgtagaagacatcagaggggattaatagacttcaagacaaaacga

SEQ ID NO: 748767 - DNA, 604 bp, Homo sapiens
gcagagcctgtggagtgggaatgtggggtcagtagcccagacattgctagtccaggtcacctgccgtgagccaccagcaggtcactaccctggctccaggcacagttctcggccttgtggctactcgtccaggacagggagaggtgcccatccggctcattgtggggggctgggccagccccgggaaagcctggtcgggagaggggcaggcatggtggctctctgggcaactggcctgcccrtgtcttccaaggtcttcccaggcagccacagggcctgtgttctctcacattgctgaaaatggccagaaagagggtctgggttcaagagggacctcctgacctggggcctggctgtgtcctgcccatggaagtctcactcctcccttttctgtaccactgaggagtcccaccagggagagggaagaaagcgtggaaggccatgagaaagaacagtggggagcagcccagtgtcatggggacaggccttgggcatagggccgggcccgggggctagcctggggagggagcaaccatggtagcgatggctgagttcagcctgcccagagctcagatcattgatcatcaaagcaatcgcagcttaa

SEQ ID NO: 748768 - DNA, 676 bp, Homo sapiens
atagtaccagtggggactttggaaagtagaaaacttgtgtccgtgggaaagctggactcctgagaggtactggtctctctcagtctaggagtcaagaaatatgttggctctctcttaatgtttgtagtctcagaggaaccatgcactggcattgatgtggaaggagctggatctcccacagtggtggtgataaccatttgagttgtggctttgggtgtctctgagtcagccagtgcaggggaatgggattcatgtccagagttgttggctttcacattggtctcttctgtgtttatagaaggaaaaatttcctttgtgtctttactgtctttagaagtggccagtatcttatctgaggtgctgctgaaatttggaagtgagctggtcacaggttccaagcgtgtacgtaatatgtctgtaatcttcactaggccagaggtgagaagtgaagtcataggagaggagagcttatcctctggtaaggtagaagaaatcagggaaggtgtggtcattgcaggtgaggrcagaaaggaagagggggagctggttttatccacagagggaggacttgtccatgatacatcctgtggaattctgctcataagagtggtcacatccaattgtgaaaatccatgagtcatagctgagtggatccctgcctggggggttgtatttg

SEQ ID NO: 748769 - DNA, 630 bp, Homo sapiens
gacggtagtcgagcatctatatacagactctagcttgtgcactactattatggatagtgaaggacttttttttttttctcattcaccctttcactttcacataaaccaacaggtggcatattttagaatttcttctgcaatctactcttgttattattactgattttattatttagttttcaagtatttcagtttcatttgtacatttgaaattaattgtttaataatatagaaagaacaaaagctaatggcagtcactaatattaggtggttttgtacagtttaccatttgctcttcacagatactagttgatttaattcttactaaaattgtgtggcattggattgttattatttcttcttgtcaaagttgagttaatacatccagacaatgttaaccagttagatatgattctactgacccagtagtatcagcattgaatccaatacttgtgatttctaactatattattaaaatgtcttctcrtgatctcttctgtctctgagttactacatcaaggcaatccagtatatcttagaaaagtagggaaaaatacatttgatgtctaacctttattatcttacttataaagtatgataatacttatatttttaatactctataagtat

SEQ ID NO: 748770 - DNA, 368 bp, Homo sapiens
gttatatgaaaataatttaaattgtgaaggttagaatgaggtgctgcattttatagcataacctttaaaaataataattatttgaagtctgtttccagagttataatggtttgagccacactgttttctaaatactcaaatttggtatgcagctttatgacaggaagttggctttcagagcaggaatgtatgtaaacaaagaaatgtggctcacaggaaggtttagctaaatyaaatcccgaaggctgcctccattctgagcttctttctgtatcttgattatttgcagatgctttacatgaagttagagatgaaacccaatagttaacctccctaaaactcccaaggcaattcacagttagccctga

SEQ ID NO: 748771 - DNA, 645 bp, Homo sapiens
atatacatgcttttaccatcatttaaatttttaattttagcagtttgggctgtgtttaaaatgtagatattgacatattcccaaaaatactgttaatgaagaatacaaaacaaagcacgatagtgttgatggctgttgtgagaccttggttcttagtttcaaaaatttaaacaagagacacaaaacaatgaagatgcaacatagagggatttattgcaaagttgaaatactattttaaaaattaggtgcaaaatagccccaagagagaagggattcagggtgggctgcttataagaatgagacagcaaagactggaactagagagactccatytatgggagtcttagatcattatttatgaagaggtggaaagtggtgttattagttagcatgttctgagtggtcttgttggtgtacatacacagtggctgtacatgcttatgtgtcacatatcttattagcatctttaatctccactcacttgtgtgttttttactattataatgagtaaaaggtcagaggacaagtaaaatcaaaatgtgcatgttctttacaggggagtaaagaactctcttccctactgaagagagctgtgcttcagtgagctgaaatacaatgcaaatgttggggcttattgtgttgcca

SEQ ID NO: 748772 - DNA, 597 bp, Homo sapiens
ctgggtgggttgagcacctcgtccacaccacacctttgggcccagggtgaccggatcctgggtcccaaggagagaagccccaggtccccgacccttcctgctcttcctgcccggccttggaagccaggcccatctctctggggtccrtctgtcgcgtggcagagaggctgggtgtggatggtgacccagagcaccggggtgggggtgagtgtccgaggagtacccaggtccagaggcccctcttgcggggaaggtgacccatagcccctggcgcgggcaggcagctggcacaggataaggccagaggggcagcagggagaaccggccgggcgagttgtcagcagaatccagggctgggccctgggcaccactggctccaggctttcccgaggccccaggcggggtagcctcacctgggggccacctgactctgctagaggaccccagggtgctgccccatgccaggccccagggacatgagccaggatctggagccggaagcctcagctagctgcagcccctacctctgggtagggtctctgagggagggcctcctccttcctcctgtcctccaaccagactcggcccatgtccaag

SEQ ID NO: 748773 - DNA, 597 bp, Homo sapiens
ctgggtgggttgagcacctcgtccacaccacacctttgggcccagggtgaccggatcctgggtcccaaggagagaagccccaggtccccgacccttcctgctcttcctgcccggccttggaagccaggcccatctctctggggtccgtctgtcgcgtggcrgagaggctgggtgtggatggtgacccagagcaccggggtgggggtgagtgtccgaggagtacccaggtccagaggcccctcttgcggggaaggtgacccatagcccctggcgcgggcaggcagctggcacaggataaggccagaggggcagcagggagaaccggccgggcgagttgtcagcagaatccagggctgggccctgggcaccactggctccaggctttcccgaggccccaggcggggtagcctcacctgggggccacctgactctgctagaggaccccagggtgctgccccatgccaggccccagggacatgagccaggatctggagccggaagcctcagctagctgcagcccctacctctgggtagggtctctgagggagggcctcctccttcctcctgtcctccaaccagactcggcccatgtccaag

SEQ ID NO: 748774 - DNA, 597 bp, Homo sapiens
ctgggtgggttgagcacctcgtccacaccacacctttgggcccagggtgaccggatcctgggtcccaaggagagaagccccaggtccccgacccttcctgctcttcctgcccggccttggaagccaggcccatctctctggggtccgtctgtcgcgtggcagagaggctgggtgtggatggtgacccagagcaccggggtgggggtgagtgtccgaggagtacccaggtccagaggcccctcttgcggggaaggtgacccayagcccctggcgcgggcaggcagctggcacaggataaggccagaggggcagcagggagaaccggccgggcgagttgtcagcagaatccagggctgggccctgggcaccactggctccaggctttcccgaggccccaggcggggtagcctcacctgggggccacctgactctgctagaggaccccagggtgctgccccatgccaggccccagggacatgagccaggatctggagccggaagcctcagctagctgcagcccctacctctgggtagggtctctgagggagggcctcctccttcctcctgtcctccaaccagactcggcccatgtccaag

SEQ ID NO: 748775 - DNA, 533 bp, Homo sapiens
tctggggacgaggtgggcgcggtcggcgccgggcaggagccgcatcaggcaccacagacaacggggctcagtttctggaaacttaagccctgggcagagccttcccaccagggagaaaggtcttgtcctcctgtcccctgtggcctggggaatgcctggccacagctgtgccacctaggaagggaagggcatggcgtagccagagtgmtccaggaggcgccacctcctttgcctttctgtgaggaggtcacccccaaggctgcgcgtcctggggtgaacgccgtgtgaaagcacgacctggctcagttttttgtggcacaaaccacactcctggagctcagggtcacacttgcctgaggtcacgtgggagcggggtggaccggagcccaccttctgcaacctaagctacgtggctgtcacctgcatagcaaaggctctgagaagttccgcgagaaagaaaccggctcttttcgcagcccggggtttccaaagctccaggaccatgtgcccccactgctgtgtcttgctggggc

SEQ ID NO: 748776 - DNA, 591 bp, Homo sapiens
ctggcccctcacctgccacagttcaaccgtcctcatctgaggacgaccctgccccaggcgacaccgagctgtgtctggggacatctgtggttgtcagagttaggggtgttcctggcacagagcaggtggaggccagggatgctgctcagcagcctgcagtgcccaggacggccccaccgagggaaccatcccacctcactatccacggtatggagggggaaaccccgtattcattatataactgggaaaaaacctgacttccgccaggcgcagtggctcacgcctgtaatcccagcattctgggaggctgaggtgggtgaatcacctgagtcaggaattcgagaccagcctgatcaacatggcaaaaccctatctctactaaaaatacaagattagccgggcgtggtagtgagcgcctgtaatcccagctamttgggaggctgaggcaggagaattgcttgaatccagcaggtggaggttgcaggaagccaaaatcgcgccactgcactccagcctggaagcctggataacaagagctacactcagtctcaaaaaaaaaaaacaaaaaaacacctgacttaacttcctgct

SEQ ID NO: 748777 - DNA, 596 bp, Homo sapiens
attatacatcatttcacttaagatagaagtttccaagaatctattgaagactttaagtagggaattaccataattataaaaatgcctctgggggatttaaatatatataaagtaagacagacaataataatagcatgtaagtcataatgggaaataaatgtagttaatgtgctggaaggtaaatatattgttcaggtggatagtaaaggatttgactaacattatattttcataaattttcaaataatttagacttctagggtaaccactayaggggagcagaggagggtgataaaaatcatttttaaaaaatccattcaaaagaagtcaagagaaaataaaaaaaatccaaaagaagagaagaaggaaaatgagacataggaatcttcactctacaacttcccaggtgattcattcatataccaacccatcgtgatgaattcaagaaatgtgctacaattctgttgttactagtaatacccgtaactgtaatgctaatagtagctgtagctgtaataggtccattgtccaatgcacccagcaagtcaatacacagagacatcaggttgcagcagagaaaaaggtttaatggtaag

SEQ ID NO: 748778 - DNA, 596 bp, Homo sapiens
attatacatcatttcacttaagatagaagtttccaagaatctattgaagactttaagtagggaattaccataattataaaaatgcctctgggggatttaaatatatataaagtaagacagacaataataatagcatgtaagtcataatgggaaataaatgtagttaatgtgctggaaggtaaatatattgttcaggtggatagtaaaggatttgactaacattatattttcataaattttcaaataatttagacttctagggtaaccactacaggggagcagaggagggtgataaaaatcatttttaaaaaatccattcaaaagaagtcaagagaaaataaaaaaaatccaaaagaagagaagaaggaaaatgagacataggaatcttcactctacaacttcccaggtgattcattcrtataccaacccatcgtgatgaattcaagaaatgtgctacaattctgttgttactagtaatacccgtaactgtaatgctaatagtagctgtagctgtaataggtccattgtccaatgcacccagcaagtcaatacacagagacatcaggttgcagcagagaaaaaggtttaatggtaag

SEQ ID NO: 748779 - DNA, 596 bp, Homo sapiens
attatacatcatttcacttaagatagaagtttccaagaatctattgaagactttaagtagggaattaccataattataaaaatgcctctgggggatttaaatatatataaagtaagacagacaataataatagcatgtaagtcataatgggaaataaatgtagttaatgtgctggaaggtaaatatattgttcaggtggatagtaaaggatttgactaacattatattttcataaattttcaaataatttagacttctagggtaaccactacaggggagcagaggagggtgataaaaatcatttttaaaaaatccattcaaaagaagtcaagagaaaataaaaaaaatccaaaagaagagaagaaggaaaatgagacataggaatcttcactctacaacttcccaggtgattcattcatataccaacccatygtgatgaattcaagaaatgtgctacaattctgttgttactagtaatacccgtaactgtaatgctaatagtagctgtagctgtaataggtccattgtccaatgcacccagcaagtcaatacacagagacatcaggttgcagcagagaaaaaggtttaatggtaag

SEQ ID NO: 748780 - DNA, 618 bp, Homo sapiens
ccatattattttaaattacatacgaagatctaacatgtcacccacagaccatttcatccactgctctgtttggctgcagtctcttgtctctcccttcagcaatggtgaagcggataccctttcctcggggaagagaaatacatggtttgttgcccttgtcaataacaaaaatgatggaaaagctgttgctgttggcatctttcacgtgaatcgtgtcaaaagatccagggtgcctctctctattggtgatcacaccaattcttccccagttagcacctccagtcaccaaacacaggttaccagtgtcgaayttcaaagcagtgatgttgccagtctccaaatcaatctgaatggtgtcgttcactttaatgagggaatcagggtggcggatagtgtgagcatcgtgaatcaccaggtgaggggttccttttgtgcacacaaagatttttctcattttgcataacttgtacttgacttcctcaggtgtaacacgatgtacagcaaagcgacaattgatgccatagatcagacggaaaccctctcccgtcttgtcaatgctgatgacatccataaatccagtagggtaggttatatcagttcgaaccttgccatctacct

SEQ ID NO: 748781 - DNA, 618 bp, Homo sapiens
ccatattattttaaattacatacgaagatctaacatgtcacccacagaccatttcatccactgctctgtttggctgcagtctcttgtctctcccttcagcaatggtgaagcggataccctttcctcggggaagagaaatacatggtttgttgcccttgtcaataacaaaaatgatggaaaagctgttgctgttggcatctttcacgtgaatcgtgtcaaaagatccagggtgcctctctctattggtgatcacaccaattcttccccagttagcacctccagtcaccaaacacaggttaccagtgtcgaacttcaaagcagtgatgktgccagtctccaaatcaatctgaatggtgtcgttcactttaatgagggaatcagggtggcggatagtgtgagcatcgtgaatcaccaggtgaggggttccttttgtgcacacaaagatttttctcattttgcataacttgtacttgacttcctcaggtgtaacacgatgtacagcaaagcgacaattgatgccatagatcagacggaaaccctctcccgtcttgtcaatgctgatgacatccataaatccagtagggtaggttatatcagttcgaaccttgccatctacct

SEQ ID NO: 748782 - DNA, 634 bp, Homo sapiens
atgctaaacaccttttcttctgcttattggcctgtggctatcctctttggtgaaggtcagggcacgcctctgcccctcccctcctctaaaaaaattgggcgtggctaacgcctgtaatcccaacactttgggaggctgaggtggrtggatcccgaggtcaggaggttcaggaggttgagaccatcctggctaacatggtgaaaccctatctctacaaaaaatacaaaaaattagccgggcgtggtggcacgagcctgtagtcccagctactggggaggctgaggcaggagaatcgcttgaatccaggagacagaggttgcagtgagccgagatcgcgccaccgcactcctgggtgacagagcaagacgctgtctcaaaaaagaaaaaaaaaaaaaaaaaaagaaaaagaaaaattggttgtccagtctttttcttatcaattactagggctctttgacacatgttttgcaatgtgttctcctggcccgtcacttaccttttcaccttcttaatggtgttttttgaggtacacacattttactaattaatttacaactgaaacttattctataaattattactctttcatggttattggtatttgcatcctgtttaaggaatctttgcctatgct

SEQ ID NO: 748783 - DNA, 634 bp, Homo sapiens
atgctaaacaccttttcttctgcttattggcctgtggctatcctctttggtgaaggtcagggcacgcctctgcccctcccctcctctaaaaaaattgggcgtggctaacgcctgtaatcccaacactttgggaggctgaggtggatggatcccgagrtcaggaggttcaggaggttgagaccatcctggctaacatggtgaaaccctatctctacaaaaaatacaaaaaattagccgggcgtggtggcacgagcctgtagtcccagctactggggaggctgaggcaggagaatcgcttgaatccaggagacagaggttgcagtgagccgagatcgcgccaccgcactcctgggtgacagagcaagacgctgtctcaaaaaagaaaaaaaaaaaaaaaaaaagaaaaagaaaaattggttgtccagtctttttcttatcaattactagggctctttgacacatgttttgcaatgtgttctcctggcccgtcacttaccttttcaccttcttaatggtgttttttgaggtacacacattttactaattaatttacaactgaaacttattctataaattattactctttcatggttattggtatttgcatcctgtttaaggaatctttgcctatgct

SEQ ID NO: 748784 - DNA, 524 bp, Homo sapiens
cacacattcatagtcaactggatttccacaaaggtatcaaaacagttccatgaaggaatgaacagtctttaacaaatggtactgggacagttgaatatccatgtgcaaaagaatgaagttggacccctatctcataccatatgcaaaaattacctcaaaatggatcaaaggccttaaatataagagccaaaaccayacaacttttcggagaaaatatatggataaatatttgtaaccttttgattgaatctaaaaatgtggtgggaaaaaagtttgtgaccttggatttggcaatggtttcttagataagacaccaaaatcacaagtgaccaaaaaaaaaaaaaaaaaccaaatggataaacaacttcaccaaaattaaaaacttttgtgcttcaaaggacgcccccaagaaagtgaaaggacaactgagagaataggagaaaatatctgaaaaataatctatctgataaggaacttcttctcagtataaagaacgtttaaaactcaataaggaagagagaatc

SEQ ID NO: 748785 - DNA, 496 bp, Homo sapiens
cccgggtccccttatttctttctctatactttgtctctgtgtctttttcttttccaaatctctcgtcccaccttacgagaaacacccacaggtgtgtaggggcaacccacccctacacgcccagctaatttttgtatttttaatagagatggggtttcgcaatgttggccaggctggtctsgaactcccgacctcaggtgatctgcccaccttggcctcccaaagtgctgggattacaggcgtgagccaccatgcctggccaacttcttgctctttttgccactacttttaagctgatatatttggaactgaggtagcctcattctacaggtttagatctgaagtattttaactattgcttcttccagtgtattttctggtttgcaggccagtttcttctttaactcatcagtgacacagtggtttgtatggcttttaatttcaaagaatattttttcaatttgcttttttgttttttgctgatttttatctatgc

SEQ ID NO: 748786 - DNA, 576 bp, Homo sapiens
taaatcaaactttctactttctgaaacttgaaaatcaaattgatttagataagattgtatttcttagtgtctgaactcaggaaccaaatagatgtggatagcatgggatttttggaatacaagataagataatttacrtgggattgcaaaagttcaaataactaaagttctgtcaatgaaaatatatgctctaacctcaacatcttctagatgaacccttttttctagcagtatttgacaggatgggatatattttataaataaacttggactattatcctatctgctgcagtatcactgttcattcatttatgccctttacttcctacttgaagggtctttaaacatagccaacatatccaatcattgctgtgcattttggatgagggtggattgcggggctgcattcaaagccatcctgggccacatgcagcctatggagcgtgggttggatgagcttgatgtaccacgttttctttatccagtctaccattgatgggcacctgggttgattccccatcattgctattgtgaatagtgctgcgatcaacatacaagtgcatttgtctttttggt

SEQ ID NO: 748787 - DNA, 529 bp, Homo sapiens
gtccccgaggccggagtgcaatggcgtgatctctgctcactacaacctctgcctcccaggttcagagtgattctcctgcctcagcctctttagctgggattacaggcacccaccaacatgcccagctaatttttgtatttttagtagagaggagctttcaccataatggccaggctggtcttgaacctcaaatgatctgcccaccttggcctcccaaagtgctaggattacaggctggagctacrgagcccagcctgtcaccttgatttaaatgaatgcagctttcttggtgtcttgatgtttgtgaatttctgtggagtttgatactgctccttttgctgcttgtttttccagagtccccttatcacttgacgtgctgttatattatgtttgatttattacagataccccatcagcctgagtctcttaaaggcctttatacacatatgtctacacatagggatttggatgatctcgggatcccacatcctcgctgtcccctgtccccccacaacatcccacaccaata

SEQ ID NO: 748788 - DNA, 468 bp, Homo sapiens
ggaccgccacgaggtttctccctgatggacggggaagtcttgtttgtggaagacactgagccacgctaagaagccgccaggcttctcagagacggggcagacacagcaagagggaggtcagagcagaggccagagcacaggcaggatacggggggmccatgccaccaccaccggcatccggggaggactgtcaaacgggtgactcggccaggaaggccagcctttgagagacagacatgcttgccgccccatccccttgccggcttccttctccgtccctgcgtcgagctgtggctacatttctcgatgagggcagagggcgacaggcgtgacaaccaccttcttgaagctctgcgggcaccctcctgcgggtggacaatgagcgcctgggaggccgttgtccttggttggggagcgctcgtctggatccagcctagcaaagaggctgctccggatggggaggggatg

SEQ ID NO: 748789 - DNA, 543 bp, Homo sapiens
gacaatgagcgcctgggaggccgttgtccttggttggggagcgctcgtctggatccagcctagcaaagaggctgctccggatggggaggggatgaaaaccctgcgggtccgacgcccatgcccacgttgcccaggccttcacagacccccaaactggaaccgccgggacgacgactgccaaccggccacacgactcaggcagagacgcggggagacgctgaccagaagaaaggccgacgtgcaagaaacccaccctccggcgcacagggcccatgtgtcccaaggcgcacgcacacacagacggacagagacagaaagagagggcgaccgaaagagcgagaagggagagagasagagagagagagagagagagagagagagagagagagagagaggtaagagagagacagaagtcggcacacagacacgcactgcgcgcgcacacacacagacacacacacagacgcatccccccaacacacacacacacacccataacgaacacacacgtacagcagggaacacccacccgcagcagcccct

SEQ ID NO: 748790 - DNA, 617 bp, Homo sapiens
ctttatcagaaacaattccatgctgggcatggtggctcatgcttgtaatcttgtaatcccagcactttgggatgctgagtcaggtagaccccttgagcttgggagtctgagatcagcctggccaacatggtagaacctcatctctatgaaaacaatacaaaacttagctgcacataatgggctcgcctgtggtcccagctacttgggaggctgaggtrggaggattacttgagccagggaggttgagtgagctgtgttcatgccactgctctccagtctgggtgacaaagcaagaccttgccaagaaagtaagaaagaaagggagagagagagagagagagagagagaaagagaaagcgagagagaaagaaagaaagaaagaaagaaagaaagaagtaagaaagataagaacagaaagaaagaaagaaagaaagaaagagagataagagaaagaaagagagtctagtcaggaaggaaggagagaaagagaaagagagagagggagagaggcagggagggagggaggaaggaaggaaggaaggagaagggaaggaaggaagggagacgggaggaaaggagaggatcctcagaggggtgatgggagcacctttccccag

SEQ ID NO: 748791 - DNA, 646 bp, Homo sapiens
tgaaacgtcttctttacaattacaaccaaaataattagaaaagcgcaaagtacattttggaacgattgggcaaaaacgaaatctagccgcagaaatgttttctctgcggcctcagtcaccaaactaattagtccaagaaatcttctggtctttacaactttctcagagtccggaactccctttgctaacattgcaactagaccattttttcagaggatgaayattttttacagaaattgcgaatgcagttgtgtgccatttgggaaccctgcctgtgtttgcgggggagggagagagcttcagtgtgaggacctgcaccctttgtggagagctggggaagggagatgtttgctgttctgagttgtttttcccacctagagggataatatgtaaaaattattcccacccaaaaggtgtgtgtttctccagctctcccactggttctgagagagtaaactcaaacccaaaccctgattctaggcctaggtttccaagccattataattgggtgtttggaagtcaaaagataaaattgtatttgaatgtctgtctgcgcaatttatggtaataatgaggcctaatgaggttgttagaaagataaaatgttatttaccaaaaaacctgatgggataatttgacttgctgt

SEQ ID NO: 748792 - DNA, 552 bp, Homo sapiens
taaacatatacgcagtgggctacctggaaatggtttaatcggtttaacttcataatcacagagtgagccacagataatgtgaatgaggtgatggaatttgccggattcccgtgaaacgctccctccacttcctcagagtccccagccaaagcgggcacgggcttctccggcatctgctttctttgagtcaagctaaatgtgatccttgccctgagccttgctccactattagtagccaaatgctaaagtatatcagggagactggtgggcgtgtacggctttccctaagggacaggagttatgctgtataggagagggagtaagaacaaaatccacaggcyccagaacagctgggcccctggattcatctgtttcgacactgctttaaagaactacttgagactggatcatttataaacaaaacaggtttaactgattcacagttccacatggccgggaaggcctcaggaaacttacaatcatggcagaaggcgaaggggaagcaaggcaggtcttacatggtggcaggtgagacagagagcaaagaagtgc

SEQ ID NO: 748793 - DNA, 616 bp, Homo sapiens
ggaagacttgggtgggctttgacgggggtgtgaggaaacttgaatgggatccttacaagctgggtcctggaatgaaatgagcaaaggctctaggagtgcacaggaatactggctgagcaccgcctctgggaggggccccagatkctcttagctttataggacacgaccacactgtggggccctcatcttcaggccaaaacctttttgattaaattggcagaccagagtttctcaacctcagtgccatagacattttgggccgggtggttctttgcatgggggcgctgacctgtacactgcaggccacctgacagcatccctgcatccccccaccacctggatgccagcagaaccccctccgatgtgagggccaaagtgtctccagacctggcccaggaacccagatcaccctggattgagaaccattgtggtacactaatagtatctccaagttttacaatttttcactccatgtgtggaaaaaaaaatgagcgaaaatcttcaatatatgaaaaattatttagaaattacatacacagactattgtcaatataaaaccattaggaagcttaatttctctaggctttaattgctaacttttgtcctgcatctcaat

SEQ ID NO: 748794 - DNA, 645 bp, Homo sapiens
  misc_feature 196: n = A,T,C or G
gtgcgatctcggctcactgcaacatctgcttcccaggttcaagtgattctcctgcatcaccctcccgggtagctgggattacaggcgcctgccatcatgcccggctaatttttgtatttttaatagagacggggtttcaccatgttggccaggctggtcttgaactcctgacctcaggtgatccacctgcctcagnctcccaaagtgctgggattacaggcgtgagccaccatgcttggccactgactcctttcttactcctggctttgttgagwtatagttgacaaataaaaattgtatatatttaaggtgtacaacttgatgttttgatatacctaccgtgaaataatgaagcaattagcacatccatcggctcacatatttgcttatacaacacaggcggtaagaacacgttagaactatcctcttagcacatttcaagtacataatatgttcctgttaactacagtcaccatgctgtacattagatctccaaaacttatttatctgaaataactgaacctttgtacattttgttttttaaatgatacatttcttttatttttatttttagagacagtgtcttgctatgtggcccaggctggtcatctggaactcctggactcaagcgatcctcctgccttg

SEQ ID NO: 748795 - DNA, 624 bp, Homo sapiens
tgcaaggctcaatgctctccctggaaatgctagggccagggtgcctaaaacaaggtcgtgtagagagcagagtgtaagctctgccggcttgtctcacatcatgtttaaggctaacagaagccagaaatgtacacaattaaacttgccggagcagggaaacataattaaaggacactccttgagaaccatgagttaaagatcaccttttaattgctttccttctgggagagatgagaatgaatgaggttgtcaccattttccrgtcaatcttgtatgttcccttttcataattgctgtaggaaggttccaggttgaattcaggaggctgcttccttgtcccttcgttaggaggagcccgtcattctcttgtccttctgcctgagtttgcaatccctgtgaccaacgccttcttaccccggccttgtcacactctctgtgtcttacccgcatctggaaatttacctacaggagagccagtcagtcaaaatcaacagtgaccccatgccttcttctgtagttttctcctttggtcttgtctgtgttcattccagttttagagtagcatttgtgatagcaagggatggggcccacccagcactggtatcgtggtgaagtctcatgcac

SEQ ID NO: 748796 - DNA, 661 bp, Homo sapiens
ataaggcagaagaaagtggaattagctatacaaatttcagatagaacagaatttatagatatgaaaattatcataaacaaatgccattacataataaaaagtttaatactccaagaagacataacaatcttctgcatacatgtgcttagcaagagagcatcaaactacttgagtgaaaaactaaacgcaagaataaattcacaaatccactaccatagttacagatttcaacatgctgtatcagaatggacagatccagcacagagaaaatcagtaagaacagccttaaactcaacagcacatcaatcaacgggatttcattgacaactatagactacttcaccaaacaacaccaaaatatacattcttctcaagctcttatggaaaatttaccaaaatacatcacattctgggttcagaaaacacatcttaacaaactaaaaaaaawcatacaatgtctgttctcagatagcaatgaaattacactaaaagaaaataacagaaagaaaatggaaaatctcaaaatacctggagacacttctaaataacacaggagtcaaatttaaaaatctcaaaggaaactttttaaaaatttttaaaaatgaaaatatgacacaatttatcaaaattttctagatacaataaaagcagtgtataaagt

SEQ ID NO: 748797 - DNA, 509 bp, Homo sapiens
agccttgctgcttgtcaggttaccaggagcggccactgctctgtagcccagggcacctgttgactcagggatgccctcaagtcccaattagaagaaaaacactgcctgagagaaaacgcaggataaatatgactggccttactttaattaagtttgattgaaagttattctgcacccagggaagccagagccaattttcacaatgtggcttgcagaccaaaggcaagtcttctaagactatgggagaacacagamccttacatttggcctggagtgagctgaaccataccttgaggcagtgcacacagaaaggaaaggctctgtggttcctaaaggctcagactcttaactacagcgcactgtcctcttgtcaaatccttggtggctcaattctccttccttacttggataatcttcctggaaataggtttagttcaccaggggagcattccggggtgagtggctcagacctgggtccaagtcttctcaggctttcccgaacccatccc

SEQ ID NO: 748798 - DNA, 592 bp, Homo sapiens
ttgggaaatacagcacattaattagcacatctcctttccaagggcagattcagcggccatctgcacatgtgcagagtatgtgcccacatccctcattacagaaatgttaagcatttgtttgattctttacgatatatgaaatgttaaattaaacagtaatctggaatgacagaaattaacaaggaaaataatactttcgagtaatggtaattaccactattattactattaacactgatgaaaataatttatttgcaagccttcccttggcatcaaaacattcatgctgtatcacaaagtctgtgttaatagtttcytcatgggggaggacaaatacggtgcctataaagtacaatgacgctcctcctgagttatatcacaaaactcatcatagtcatgtacaggaggaataattagatatcacaggaacaaaacatgttcctatctccatggtttccttgctagtgccacacatgcacaatctgtgaaaaacatctcattgattatcatctgcgtgcagctccaactcaatgccaattaagaactttttctcaatgccccttggaatcttcgcttggaaatacactctgcc

SEQ ID NO: 748799 - DNA, 655 bp, Homo sapiens
tgatgaaaatgaatcttcacaaaacacttcgagcactgtccagtattctaccgtggtacacagtggctacagacaccaagttccgtcagtccaagtcttctcaagatccgagtctacccagcccttgttagattcagaggagmggccagaagatctacaattagtagatcatgtagatggcggtgatggtattttgcccaggcaacagtacttcaaacagaactgcagtcagcatgaatccagtccagatatttcacattttgaaaggtcaaagcaagtttcatcagtcaatgaggaagattttgttagacttaaacagcagatttcagatcatatttcacaatcctgtggatctgggcaaatgaaaatgtttcaggaagtttctgcagcagatgcttttggtccaggtactgagggacaagtagaaagatttgaaacagttggcatggaggctgcgactgatgaaggcatgcctaaaagttacttaccacagactgtacggcaaggcggctacatgcctcagtgaaggactagtagttcctgctacaacttcagcagtacctataaagtaaagctaaaatgattttatctgtgaattcagattttaaaaagtcttcactctctgaagatgatcatttgcccttaaggacaaaaa

SEQ ID NO: 748800 - DNA, 440 bp, Homo sapiens
atttcaacctcctaacacgccagtgcagtaggtctcctcatcttacaggcctggaggacttaagtacaagttcaaggtcacatggccagtaatggcagacccagggtatggaggaatgaccatctgactctgtattagtccgttttcacgctgctgataaagacgcacccacgactgggaagaaaaagargtttacttgacttacagttccacatggctggggaggcctcacaatcatggcagaagacaatgaggagcaagtcacctcttacatggatggcagtaggcaaagagagagaacttgggcagggaaactcccattttaaaaaccatcagatctcctgagactcattcactatcacaagaacagcacagaaaagactcaccccataattcaatcacctcccacctggatccacccaccacatgtgggaattgtg

SEQ ID NO: 748801 - DNA, 466 bp, Homo sapiens
aatcgcattaaaataagaacttctgtttatcaaaagcctccattaagaaagtgaaaaaaaacaagccacagaatgggagaatatgtttgcaacacctatacctgacaaaagatttatatccaaaatatatgtggaaccccsctccttcaaatcataggaaataaagataaataacccaattaaagggaagaatgggcaaatatttaaagggcacttcacaaaagaggatgttcaaattacaaaaaacatatgaataggctcaagattattatccatcaaagaaatgcaaattaaagccacaatgaaatcccactacagatctagcaaaatggctgcaatttaaaagacctataattccaagctgctggaaagcatgaagagcaactgaaactcttatctactactgagaagaacgtaaattggtgtaacgactttggaaaactaacaattcctactaatgtcaaat

SEQ ID NO: 748802 - DNA, 610 bp, Homo sapiens
  misc_feature 95, 96, 113, 114: n = A,T,C or G
aatgagataatccaacataaaagcacttagctcattgctaccctgtagcaagcacatggcaagtggtagctattattaaatggtggtagcagaanngtaacaggcctccttgnnacatgtgctcaggagaattactaaacatagtaaaataaataaatttctgctgctactcaccctggaatgctccatatatttgctctgctgagaggcagctggatcattgctaccaagtgtcaagaatcggaagcatctgccctcagtcactttcctcttgaggattgtgtataaaaccactgtttttgttgtctgcccaggtcatcttaatacatgtaacagtaaacattcaaaaaacatcagctattcttcatagtatgccatgccaagctggtggtaccatggactatttctactcagctgcactggagggcaactgcccatctgttcgaagtgccctctmggtcctccgaagttcatttttgtgtgctccacagagcctgctttttatgtcagattatcccaaacataccctgctgatttcacaaaagtctacccataaaagtttcctgtgatgtgatgacaggcaaatggacagaaccttaattttgtcaag

SEQ ID NO: 748803 - DNA, 584 bp, Homo sapiens; identical to SEQ ID NO: 737349

SEQ ID NO: 748804 - DNA, 564 bp, Homo sapiens
ttgacaaggatgtccagaatatacaatgaagaaaagtcttgaatggtattggaaaatggtattggggaaactagatattcacatgcaaaagaatgaaactaaacctttatcttaaatcatacacaaaaaatccactcaagacttaattataacacctgaagctgtaaacctagaagaaaatttagggggaaaatttcatggcattggtcttggcaataatttgagatgctttcttagagagagtttcagttaagaaaatttttcttaacagtcattaaaaagtaatgtataaacttcaagtaaaacaatttttggttggggctttctggttgccttagtcaactcaggccgcataacaaagtaccctagactggtggcctaaacagaaaygttctcacaattctggatgctgagaagtccaagaccaagattggctgatttggttcctgttgagggctctcttcctacatacagatggctgctttctcactctgtcctcacatggtgaagagagaatgctcttgtgtctctctctgttcttataagaacaccagcactattgga

SEQ ID NO: 748805 - DNA, 607 bp, Homo sapiens
tgacttaatcctcttgcatcttaaaggaaaacagcattcaatgttggatctgctctccaaatttatgttacccatttataagaaacttctgaaattttcagtttggggactctggtctccaaagcatgtgggggaaggctgcttaaatcacactatctcagcaatgtcactttcagccttccattctctaaaaacaatgccagagaaggtgcactctggttcactcctgtttccctataactgttgcattttgacaatttgcattttattttggaccatagctactgtaattgtaaattggtctactttctttaatctgggagtagcagcaaatcatttttaatagcccttaattcccccttwtaatgagatatctgcattcgactgactcaaccatgtactgccgtaggctagggtggatgaatcacagaaaatagacggaagaaacccattaggtaatctcacgcagtcctctgccagactccggatgattcccaacaataaaacttctaggaccagttcagcatacttttaatgctcctccaaggatggaactgctaaccctcccaccacaggccatccagtcatttggacagcccgcactccc

SEQ ID NO: 748806 - DNA, 607 bp, Homo sapiens
tgacttaatcctcttgcatcttaaaggaaaacagcattcaatgttggatctgctctccaaatttatgttacccatttataagaaacttctgaaattttcagtttggggactctggtctccaaagcatgtgggggaaggctgcttaaatcacactatctcagcaatgtcactttcagccttccattctctaaaaacaatgccagagaaggtgcactctggttcactcctgtttccctataactgttgcattttgacaatttgcattttattttggaccatagctactgtaattgtaaattggtctactttctttaatctgggagtagcagcaaatcatttttaatagcccttaattcccccttttaatgagatatctgcattcgactgactcaaccatgtactgccrtaggctagggtggatgaatcacagaaaatagacggaagaaacccattaggtaatctcacgcagtcctctgccagactccggatgattcccaacaataaaacttctaggaccagttcagcatacttttaatgctcctccaaggatggaactgctaaccctcccaccacaggccatccagtcatttggacagcccgcactccc

SEQ ID NO: 748807 - DNA, 599 bp, Homo sapiens
agtttgggaactacaagtttaaataaagacaagtagactttccattttcctgaatgactgaacaatgtcataacacttcaatacctgctcagtatacatataacacacacagaggaaatctatacttgcttctacacacatcttatacctagttaaaagcactgtcattccaggttaggttacaattttaaaggcaatacttttatggcagtacctacccaaatgcatttttaaactgtattccattaaatttcacctttgctttcacaattttgtatctggcatgtgattccatttaggttatactaggaaaaaacatttttattttctcaaataactaacgttttgtgttgtaataaaacctaatgtctagtaccaacaatgtcatggactytaccatgttagatgcccatccatctcaaatgtgtaagatatcacatatttaggcacaatggctgtacagtattggtacattgcatgaaaaggtcacaggccagccacagtggctcacgcctgtaatctcagcactttgggaggccgaggtgggtcgggagtttgagaccagccagaccaacatggagaaaccctgtctctactaa

SEQ ID NO: 748808 - DNA, 563 bp, Homo sapiens
gaaggcaggaaaaacaaaacagtgaaaggtaaagagacggttaagtcgaaaaagcaaaaaatgaaatggcagacttaagctctagactttcgaagatgggaaatacaggattgactctaaaggggtacgactttatcttgatcatggtggtgattacccaaatctacacatgtgaaaaaaaaaaaagacatggaactatatgtacacattatacygttggggctcagaaactgatacaccaaaatatggcgctttgatgtgcttaactgaagaagaagccttaggcctctctgaccttcctcctcccttccttctctcaatcctctgcgcctcccaaagcaaaagatgaagttattctctgaagttcccttatctgctgagagtctggacttgccaaagaagaaaacaatcacctctggtcccttccctgagttttcattaactgaactcatatcacaggaagaaagactgaagtctgtcaacacacctgagcaggtttttgtcacgaaccatcgtgtctgctctgctggcccaacagactttgtcctaggccggtgtatgtt

SEQ ID NO: 748809 - DNA, 563 bp, Homo sapiens
gaaggcaggaaaaacaaaacagtgaaaggtaaagagacggttaagtcgaaaaagcaaaaaatgaaatggcagacttaagctctagactttcgaagatgggaaatacaggattgactctaaaggggtacgactttatcttgatcatggtggtgattacccaaatctacacatgtgaaaaaaaaaaaagacatggaactatatgtacacattataccgttggggctcagaaactgatacaccaaaatatggcgctttgatgtgcttaactgaagaagaagccttaggyctctctgaccttcctcctcccttccttctctcaatcctctgcgcctcccaaagcaaaagatgaagttattctctgaagttcccttatctgctgagagtctggacttgccaaagaagaaaacaatcacctctggtcccttccctgagttttcattaactgaactcatatcacaggaagaaagactgaagtctgtcaacacacctgagcaggtttttgtcacgaaccatcgtgtctgctctgctggcccaacagactttgtcctaggccggtgtatgtt

SEQ ID NO: 748810 - DNA, 563 bp, Homo sapiens
gaaggcaggaaaaacaaaacagtgaaaggtaaagagacggttaagtcgaaaaagcaaaaaatgaaatggcagacttaagctctagactttcgaagatgggaaatacaggattgactctaaaggggtacgactttatcttgatcatggtggtgattacccaaatctacacatgtgaaaaaaaaaaaagacatggaactatatgtacacattataccgttggggctcagaaactgatacaccaaaatatggcgctttgatgtgcttaactgaagaagaagccttaggcctctctgaccttcctcctcccttccttctctcaatcctctgygcctcccaaagcaaaagatgaagttattctctgaagttcccttatctgctgagagtctggacttgccaaagaagaaaacaatcacctctggtcccttccctgagttttcattaactgaactcatatcacaggaagaaagactgaagtctgtcaacacacctgagcaggtttttgtcacgaaccatcgtgtctgctctgctggcccaacagactttgtcctaggccggtgtatgtt

SEQ ID NO: 748811 - DNA, 625 bp, Homo sapiens
gccttgccagccccagcaactgtgaaaaacaatttcttgcaacgaatcctataatatatatcttctgaagattttgtttctctggttgaaccctgactgatacagagttctacatgcttttcgcagggtgaggcattattcctttagttgctcagtagttgtggaggtctacgggatccttggaaatgggcaaaatgaatgtatgtggggtcatgtaggaacatggcattgcatttacttataaatgggatggagaggtatttcactgttttcacaaccaataccattgtataggagaatactggcagatgttagctcagtttcaagaaagagggaaaagagtgtgtgaagaccctgggaccagaaactatttgggatatgcaagagaccaaagggagaacagggacactgaatccagaggtcagaggaagagtaggataaaatgaagggaaaacaaggccagatgaygcaggttctggtgagtacactggattttattgaaaagctccttgaagcatttcaaacaagtgtgtggctgctctgtgaaaaatagattagcctgagactattgtgaagtcatagacaggagtatatgtagtagactagacaggagatgatggataaa

SEQ ID NO: 748812 - DNA, 580 bp, Homo sapiens
aaaatttcttgcaattatatatcttatttggagaaatgtctattcatttgcccactttttgacctaatcttttgattttttcttactgatttgttttagttccttgtagattctggatattagtcctttgttggatgcacagtttgcaagtattttctctcattttgtgggttttctgtttaatgattttttttttgctatgtgtaagctttttagcttaattatatcccattcatttatttctatttttgttgcattcrcttttgttgtcttagtcataaattctttacctaggccaatgtgcagaagaaattttcctaggttttcttctagattttgtatggtttcaggtcttatatttaagtctttgatccaccttgtgttgatttttgtatatggtaagagataaggatccagtttcattcttctacgtgtggctatccagtttcccagcgctgtttattgaataagtgtcctttccccaagttgtttttgtatgctttcgtcgaagatcagttggttgtatttggctttatttctgaatgctctattcttttctattgatctatgtatctacttt

SEQ ID NO: 748813 - DNA, 581 bp, Homo sapiens
atgctcaacaagtatctaccgagtgaatgactaaatgaatggatggatgaatgaatgaatgaacagtggcaaatctacatctcctgtctttttaaacctgctctatcccactgtattaacagtgctgaatatgtgtttgttgctttttattttattatgagacatgcttgcttctagcatctaataatcctcatatcccttaaaatgttttatagtaactttctgattgtatttttcttccctcagatcattttcctcttaaacacatctctttatgggttttattcattactctcaatwttctactctctgtgggtatgtcttaaagtatagttcatatttcatctcactctcaagtctctacttttaaacgtatttttttcccactgtttatctcatgaacctctggaaataagtcttttggtagtgtggaatagtatacttacaagtatattgggatcaccactcagtatggaatgaaagtgagtcactaagtatctgataagtgtttccttctaagttaggtagtctgtcagacatttaacaatactccatgatatcaatgcattagatgactagga

SEQ ID NO: 748814 - DNA, 640 bp, Homo sapiens
aagtgcctagtagaatacttaacatatatatatatatatatattcctgtgtttctatgggtagaaattatatcactgactttgaaaatcctaattttattattattaaatcatttgctaatttttaaacaatttttattttaaattctcaaaatctcacaaatgtcattttttatttctttttttcattttaagacttttagcagataaatctcattttttgaaatttgtatctttttgggaaacttcacatgtctttattcggactttgacatcttgcatcatgaatgcctatggggcaaactttattttccactattargagttcagacctctgggggtaggaacatatggctgtagggagaaacagcaccaattactggaaatccttggaaatgccaagagtcctaatatcctgagaatttactttgccttctctgtgaaagttgtccagtgctacacgtaatagacttcccctttggaatcagtgttgcaatagagagaaaacaggctttaaaatcagggtggggacctggttttaaaagcaatttctgcttagtatttttgtgatcttaggaaagtacttaatctctctgaactttaatttgctcattaattgattaaagacattatatattatt

SEQ ID NO: 748815 - DNA, 590 bp, Homo sapiens
agaattttaaaaatcttttcttgccatgtttccagatttggagaatagattttgaaagttggcctttttccttacataaaaaattaaataatgcttaatctctgtgatcttcttgatagaaaattgcagcaggagatagcatgatatccaatcattgttaagtttaccagatataccatctgcatttttggacacatttctgcagactcctactctcccacaccaatcccctcatttaaaaaatgttaattctcctgaaaataaaaggaatcaacttaygagatgataataaagtatatgttcaaacttttacaatgaagatagaatgttactaaaataggaatgaatatattaattcaagcagcctaaaattgtccaaaagcagatgtcaaaagttcattcagcctataatatatgcctaattaaattttaccttattaaatttcttattgtgtgctgcatgagggcctgctgggtattataaactgaagaatatggaacccaacagtagacataatgactactttatttcttcatctaaactcagcttgaacaaatcaaacaattgtcaatgtctcccagctttgcca

SEQ ID NO: 748816 - DNA, 637 bp, Homo sapiens
atttattgcccaaatagaattcagtttcatcttgggcataaacaccttcagttttaagaagatttgtgtgctccctttggttccagagaccctgcttatagcgcaaaaatggccttggatgacagccttccagaaatacttgccttttagaagtcatgttccaagcaggcctcgacaggcttcatgatggcaggaagagctggattatttttaattgcaaatcccatttcacattttcattctcttgattttagttccatcagtgacttttaaggtccataaaatcagtaactgctgttattataagccattctttatatgtaaaccaatcttgattggtttatatatagatggtatatatctaaatacatataggctggacrcagtggctcacacctgtaatcccagcactttgggaggccaaggtgggaggattacttgaacctactagttcaagaccagcctgagcagaatggcaagactccgtctttacaaaaataagaaaaagcatggtggcatgcacctgcagttcctagctactcaagaggctgagggaagaggatcacttgagactgggaggtcgatgctgtggtgagctgtactcacattgttgcactccaacccagccgacagagca

SEQ ID NO: 748817 - DNA, 606 bp, Homo sapiens
gcattatatttccctagatcagacagtaattttatattgtcacacggctatcagaggtaagagacattctctgcccagcggcctctgatgttataaaatttgtgaagtcctatactaactggagaagttgtttcctccagttgctgcactgcttctgctgtgtcacaagtatgtagatcctgatgaatcgaattcctctctggctttcagaatctgcattctctttcctaagggctgctgttaaggaatcgggatacatttgatactgattaactaccgttgtccatgtgctattcttttgttattagaaggagactggctgtgacggagtagaagtagctgtyaatttttttttctttttttggctgctccgtagaaagagcagggctaccccataggcaagaattttgtcaataaaaaattcagcagctaacagaagaagcacttgtgtgctcatcactcagttacccatattttcatttgtaatattttccacatatatttcaaatattttatttaagaaatgaaatattacaaatgcagttgaattcctctttctctttccagtctcattctattgtctttgttaagcagaggttttacatt

SEQ ID NO: 748818 - DNA, 557 bp, Homo sapiens
aaaattcttctgccttgggatcctgttgatctgtgaccttacccccaaccctgtgctctctgaaacatgtgctgtgtccactcagggttaaatggattaagggcggtgcaagatgtgctttgttaaacagatgcttgaaggcggcatgctcgttaagagtcatcaccactccctaatctcaagtacccagggacgcaaacactgtggaaggccgcagggacctctgcctaggaaaaccagagacctttgttcacttgtttatctgctgaccttccctccaytattgtcctatgaccctgccaaatccccctctgcgagaaacacccaagaatgatcaataaaaaaaaaaaaacaaacaaacaaaaaacaaaacacaaacaaaaaagaaaggtttgagctaagaacttgcaggagacaaggaaattagtcaagcagaaggatatctgggggaatggcatgcgaggcagaagggaaagctagggtcgaggccctcagggaaagaagcaaggccaaggggctggagtagagggaggaagaggggaagtagtggaagatga

SEQ ID NO: 748819 - DNA, 594 bp, Homo sapiens
catggatgtgcttctgcttctctcccatagctgcttcttctaagattcctttttctaagccaccctgggattctgatgaataaatttatatttttccttcttgtttaaactatgtctttcttattcggatgtctaatatacaaaacaggtaaaaatggagctgctctggtcagtctagggaggcagacgcaccccctcttacttcccaaacactaacacacacagatatatatatatatatatatatatatatatatatatatatatatatatatayacacacacacacacacacatgatatgcagactcacacatctcacacatatgatagcttatgagtcatttctgtggagcatagcttgaaattcaaaattctagatcagtatttctcaaggcaggagaggttgtgatactgttatcttgagaacaacagttcttacttatgaggtactctctcggaattgaggaatatatttagcaaccctggaccctgggcactgaatgtccgttatcagaaccctagacattatgacaaacagaagcacatccatgcatttctagatgttacctagaaggtagtattgcccatgata

SEQ ID NO: 748820 - DNA, 621 bp, Homo sapiens; identical to SEQ ID NO: 737340

SEQ ID NO: 748821 - DNA, 433 bp, Homo sapiens
ggctgggcgcagtggcccacgtctctaatcccagcagcactttgggaggccagggtgggtggatcacttgaggtcaggagtctgagaccagtctggccaacatggtgaagccctgtctctactaaaaatacaaaaattagccaagcatggtggcagacgcctgtaatcccagctactaggaaggctgaggcatgagaattgcttgaatccaggaggcggaggttgcagtgggccgagattgtgccattgcactccagcctggaaaacaagagygaaactccatctcaaaaaaaaaaaaagataaagttttctgtctttaagaaaatttcattctacctggggaagacaggcaacaagcatgcaaataaaaagggcaatattaaaggaatgaataggagagctgctcaaaaagtagccacattggaaagatctg

SEQ ID NO: 748822 - DNA, 566 bp, Homo sapiens
ccaaatctcatctcgaattgtaatccccacatgtcaagggagggacatgattggattattggggcagtttccctcatgctgttctcatgatagtgattaatcatgacatctgatggttttaaagtgtggcacctctcctttgctctctctttctctcctgccgtcctgtaaacaaggtgcttgcttccccttcgccttcccccatgattgtctaactttcctgaagcctccccagccatgcaaacctgtaaattaagcccctttcctttataaattacccagtctcaggtagtatctgtaaagcagtgtgaaaatggactaatataccagtcattttggcacaacacttcagaaactctaaaatacttaaatatttcagtaactatgaacaaactttttcataaaataaatatgaaaatacttttaagtgwtcaagtaaatatgatttaggacatgactccactctgattttgctatgtagcttcattatccgccatgagttaaacatgtatttattaagctctttctatctagatgcaaagaatttagtgacacaaagatgaaca

SEQ ID NO: 748823 - DNA, 642 bp, Homo sapiens
ttcctagcataatagaattttaactttcttctttagatcttactatattttgtaatggccacatagtcttttaactactaatgtaaacatctttttcagaagccagtctttgtttttttgcatcatagtcctctcccaaaatgagttatcagacttgtcagctaattaggaactctaaatttatttcttctgttatccttagctgtattattattctagattaataataaggtagaagcccctggttcyactctgtttgcaacagacagaatttgagacaaaaagaaattttacagattgtttttatagttttacagaatgtggtcattgactagtgtcttgaaaaactgggaaatatattcatgtaaaaagtataaaactaaaataaaaccactggtgatttttattcaagtaacctaggaaataaaataaattggtaaaaataccccaatatcagtaacttagatctcttctagattcagggaataagttatttcaagaatggaaacttggctctctctaacctattcagatacaaatcctaagactttagcataggtctaatttcaatgagtcttatctctagtgaggttggcattttgtacagtagtcaaaggccaagatatatcatgttttatagat

SEQ ID NO: 748824 - DNA, 615 bp, Homo sapiens
ttaaagaatttgaggttcatagaaaaattcatcagaaagtagagtttccacataccctcttccactcctcacagtttctcttgttatttacgtcttgtttttttattttatttttatttttatttatttatttatttatttattttttgaaagagtccagctctatgcagtggcatgatcttgatctaggctcactgtaacctccacctcccrggttcaagcaattttggtgcatcagcctcccaagctgctgggattacaggtgcatgccaccacgcttggttaatttttttatttttagtagagatggggtttcaccatattggccaggctggtcttcagctcctgacctcaagcgatctgcccaccttatcctcccaaagtgctgtccttacaggcgtgagccactgtgcctggcctacatcttgttttaatgtggtacatttactacaattgatgaaatgatactgacactgattactaactaatgtctataatttacattagaattcacactttttgttgtatgttttattgtttttggtttttggtttgttttgttttaagagacaggtctcattaatgttgcccaggctgaagtcaaatttctggact

SEQ ID NO: 748825 - DNA, 615 bp, Homo sapiens
ttaaagaatttgaggttcatagaaaaattcatcagaaagtagagtttccacataccctcttccactcctcacagtttctcttgttatttacgtcttgtttttttattttatttttatttttatttatttatttatttatttattttttgaaagagtccagctctatgcagtggcatgatcttgatctaggctcactgtaacctccacctcccgggttcaagcaattttggtgcatcagcctcccaagctgctgggattacaggtgcatgccaccacgcttggttaatttttttatttttagtagagatggggtttcaccatattggccaggctggtcttcagctcctgacctcaagcgatctgcccaccttatcctcccaaagtgctgtccttacaggcgtgagccactgtgcctggcctacatcttgttttaatgtggtacatttactacaattgatgaaatgataytgacactgattactaactaatgtctataatttacattagaattcacactttttgttgtatgttttattgtttttggtttttggtttgttttgttttaagagacaggtctcattaatgttgcccaggctgaagtcaaatttctggact

SEQ ID NO: 748826 - DNA, 593 bp, Homo sapiens
gtggctgcgtggggccaggaaggtgaagaagacatgaggctaggtgtagccttgggtgaggggagggcatccctggtcctttgaaggttctccccaccccagcacacgccacccctctgttctctcttcagctccacctgccactgatcctgcaacttgcttctttctattctctgcctctgtttagaaatcttcacrcaccactgaggcttcttgacttgccccttgtgacttgaaaccccagctcagatacaaattttcacctgccagccctgcctcctcctttctcccttttcctagacacaggactctgacaacttcatcctccttgtttagatgacttcccagtttccagtccccatttctccttctatcacttttcataaaaaaactcaggaaatatttgacatatcttccatttcaaattcttccattttatgcagatatcttgcccttcctataagctctcctcaaagctcaggaaacctggtctgctctcctgcatttagggaaggagaacccctgccaagacctttgctcactgcctgagaccccttccttagagagcacctcctttgctggtcagacatgga

SEQ ID NO: 748827 - DNA, 339 bp, Homo sapiens
gtgttacccatagccttaaaggggcaaaaggaggagtggttttcatatctcaatcaaagcatttctgtagggagggctgcctttggtgaaggatatggtcactgaaaaactgtggcttggcagaaaggaagctggggaaataaatactccagcctctatctcctcctctyctctgatcttctactgatgcctcccagtggtggaatccagctggaagccagcaagcaaggaagtgtggttaacacagtttatggaggtcgacctcttgtagcacagatgtgggtggggaatggatcaggagaagcacacaggcaaacaatattcagctcagcagtgacg

SEQ ID NO: 748828 - DNA, 574 bp, Homo sapiens
acaaatacaagcagagcaaaatctataaacaattcaaggaatgtgtggatcctttctgttttttcataggattaggagtctagagtttcttttaataattccctcatcatggatgtctctgaaactttgaaatagaattcccatttttcatttcatccgtagagcttggctgaaggtctgcaaacaaggaaacacatgattgggttattatttctgatcagatgcccaatttaatgaattgaaacatttgagccaattattaactccttatttggaaacactttcccatactgtttatttatttgcaactttaataaatgacatcagaggcactgaagaagcaaaggtttctaatactsacatgtactactgctccaaccaatcaatatctggaatcacaattggattatacatattggctagaagaatattcaagagatattcacgagcatgagagagaaagcctaaattgctttgaacagactgtgagtagaactggagattctaagaactctgctagtgatgactcagaaggaaggaaagaacatgatagagaaaatctgtattgtcttag

SEQ ID NO: 748829 - DNA, 622 bp, Homo sapiens
agttttgtgatttgaggttactacaaggcttgcaagtaacatcttataacccattattttaatctgatgacaacttaactttgattgcaaaaagaaacaaacaattaagcaaaaaagaacagtaataaaaattctacactttatctcccagtccgctaagtttttgttggttctatttatatcttattatattgtcgaagctcacttattctttcttctgcttgatcaattcttctgttaagagactctgaggcattcttcrttatgtcaaatgcattttcaactccagaatttctacttttttgtttttaattctttcaatctctttgctaaatttagctgataggattctgaatttcttctctgtgttatcttgaatgtcactgagcttcctcaaaacggttattttgaattccgtgtctgaaaggtcacatttttctgtgtctccaggattagttgctggtgccttatttggttcgttgggtgaagtcatgttttcctggatggtcttgatgcttgtaacttgttcatcaatgtctgggcattgaagagttaagtatttattctaatctttgcagtctgggcttgtttgtacctgtccttcttgagaaagctttccaag

SEQ ID NO: 748830 - DNA, 584 bp, Homo sapiens
attcacaatgcaagaatatggaaccagcccaaagtccatcaactgacaagtgtataaagaaaatgtgatatatatatatatatatacacaccatggaatactactcagccataacaaggaacaaaataatgacatttgcagcaacctggatggaattggagaccaytattctaagtgaagtaactcagggatggaaaaccaaatattgtacgttctcactcataagtgggagctcagttataaagacacaaaggcataagaatgatacaatgaaatttggggactcaagggaatggttgggaagggtgtgaggaataaaagctcacacattgggtacagtgtacatcgctagggtgatgggtgcaccaaaatctcagaaatcaccactaaagaatctattgatgtaaccaaacaacacctgttcctccataaacctattgaaaggaaaaaaagatagtaatatattatacctcattcagtgaatttaatatccatggtttgctactgatatgaaatagataggtaaatagatgaattgacagacagatagatgagggataagggaagctcttccttacagctga

SEQ ID NO: 748831 - DNA, 518 bp, Homo sapiens
ggaagtcctgtatcagtccatttctcactgccataaagaaatacctgggctgggcattgtggctcatgcctgtaatcccagcactttgggaggccgaggtgggtggataacctgaggtcaggagttcaagaccagcttggccaacatggtgaaaccctatctctgcttaaaaaagaatcaaaaatgagctgtgaatggtggtggatgcctgtaatcccagctacttgagaggctgaggcaagggaatcacttgaactggggggtggaggttgcagtgagccaagatcacaccactacactccagcctgggtgacagagggagactctgtctcmaaaaaaaaaaaaaaaaaaaaagaaagaaaaaaaaaaaagaaaagaaaagaaaagaaaaaaagaaatacctgagactgggtaatttataaaggaaagaggtctaatcaactcacagttctacatggctgggtaggcctcaggaaacttacaatgatggtggaaggttaacaaggagcaaggacatt

SEQ ID NO: 748832 - DNA, 547 bp, Homo sapiens
ccttataaggtaatttaatttgtaaaccttatataaggaacttatgtttagaagggaagctgtgggaaaatttggaaaatttgcagcttagctatgttgtagagaagaaaagattttcagggaaggaattcaaggaggctgctgaaatatgcacaattaaaaggatggaaaatgccggtagtcaaaacaatggggaaaaggacttgaagacgtytcttagaccttcatggaagcccctcctatcacaggcaaggaggcctagaagggaagaatggtttcataggccaggtccagggccttaccatcctgtgcagcatcaaacactgcttcctgtgtcccagctgctccagcttcagccatggctaaaaggtgtccaggtacagctcaaaccactgcttctgagagtgcaagtaagtcttggcagcttccacaaaatgttatgactgggtgcacagagtgcaagagttgaggtttgggagcctctgcctaaatttcagaggatgtatggaaaagcctggatatccaggcagaagcttgttgtaaaggt

SEQ ID NO: 748833 - DNA, 639 bp, Homo sapiens
gggaccaggtggccatcctagcagtggtttgcatgttgctgttaccatagcaccagtgggtggtccatcctgtggagcagtggcatctttgatgatgagcaccacctccacttctgtgacattgtgggtggtgtcatcttgtttgacaaatgctacctgcctgtgattaggatccaatgttgtacttggcccagcttagctttgcttagttgtttgagctggagttcaacacagtaacaactttccaacacagcccctttcagataatgctgtttgattagtgttggagaacttctcttagtctttttgggctgctataacaaaatactatatgtgagtggcttatcaataacagaaatttatttctcacagtactggaggctggaaagtccaagatcaagatgctagcagattcagtgactggtgatgaaggcccacttcccaattcatagatagtgccttctcactgtaaccttacatggtagaatgggaaggcarctctctgcggcctttcttataaggcactgatctcattcatgagggctccattctcatggcctgatcgccttcccaaagccctacctcctaatagcattacattggtgataaggtttttaacatacattttggagggacata

SEQ ID NO: 748834 - DNA, 617 bp, Homo sapiens
ccacggggaggaggaattctctagctgaactttgtaacaatttgaaagcggcgagaagcctcctgaccagaacttgcgggagagtgcaaatcgggcatgcagacttcacaggcggggaggggggaagaactaaagcccttttctctcacagctgggaggaagatggtcttgggcaaattttcaagcccatctcgcccttcgcctgggaacagacttgggattgttggtgggggcacggtgggagtgagawtggcccttcagtttgcatgggagctgagtgaggcctgtgactgccggctttcccccacttccctgagttgctgtggatattaaattgaatatgtggatatggagcttcatgtggaaatacattaaacaaataagaaaaaaaagtttgggtaaaataatccaatacagtctctcatttcaaaaaatcttaaattcaatttaaaaaatgtgactagataactttccatttatgtcgatatttatagcccatccagattttaagaaacttcactctctaaaacatctgttcctggttgcttaatcaaattcagggttttaaactattttaagcaattcagaagattattcttaagtaatcaaaaaaataa

SEQ ID NO: 748835 - DNA, 678 bp, Homo sapiens
gtttactctaccagtgaattttatactttcttgcattttcatgatggctaatattgtctttttacttccaggtgtagggctttcttacgcatttcttgtagttcaggtttagtggtgaattcccttggcatttgcttgctagagaaacactttatttctctgtgatatataaaagataactttgctgggtatcatatcctgggatggcagatttgttgttttgttttyttctttcagcactttggagatatcatccctttctctactggactatatgatttctgctgaaaaaaatttactgttagtctaatggagtttcccttgtaagtaactagatgcttttctcttgctgtttttagaattctctgtttgtctttgactttcgacagtttgaccaagttgctgtagagaagacctttttgaattgtactcactgtgaatccttgagcttcctgtatctggatctctaaatctcttactagacatgggaagcttacagctattattttattaaataggtttttatccctttggtgttctgtaggccttctggggaccctgataatttgaatatttggttactttagcatgttgcacatgtcacatagactttgtacatttcctttttattctttctcatttgtttttgtctgactgggttatttcaaaatactcaac

SEQ ID NO: 748836 - DNA, 617 bp, Homo sapiens
ttttgcccctgcgctagagatttgtgaaactttgaacttcagagaaatgacttagggtatctggcagaagaaatttctaagcagcaaagcattcaagaggtgacttgagtgctgttaaaggcattcagttttataagggaagcagagcataaaartttggaaaatttgtagcctgacaatgtgacagaaatgaaaatcccattttctgaggagaaatttaagctggctgcagaaatttgcataagtaacaagaagccaaatgttagtccccaagacaatggggaaaatgtctccagggcatgtgagagatcttcacagcagcccttctcatcacaggcgtggaggcctaggaggaaaaaatggtttcatgggccgggcccagggtacccatgctgtgtgcagcctagggacttggtgccctaagtcccagctgctccagccatggctgaaaggggccaacatagagctcgggccatggattcaaagagtacaagccccaaaccttggcagcttccatgtggtgttgagcctgcaagtgcacagaagtcaagaattgcggtttgggaacctccacctagatttcagatgtatggaaatgcctggatgcccaggcggat

SEQ ID NO: 748837 - DNA, 632 bp, Homo sapiens
cttcctccctaaaataatattaaaagttgtttgtaccactgactgaactgctgtaaagacaaatataatctaggctggtgatatggtttgattgtctccccaaaatctgatgttgaaatgtaatctcaaagatggctgaataggagcagctccrgtctgcagctcccagtgagaccaacatagaaggtgagtgatttctgcaattccaactgaggtaccaagctcatctcactgggactggttagacagtgggtgcagcccacagagggtgaacagaagcagggtggggcattgcctcacccagaaagtgcaaggggttggggaactgcctcccctagccaagggaagctttgagggactgtgccatgagggacagcgctgtctggcccagacactaggcttttcccatggttttcacaacctgcaggccaggagattccctcgggtgcctacaccaccaggacactgggtttcaagtacaaaactgggtggccgtttgggcagacactgtgctatcagcaggagttttttctttttcataccccagtggtgcctggaatgccagcaaggcaaaactgttcactcctctggaaagggggctgaagccagggagccaagtggtctagctcagt

SEQ ID NO: 748838 - DNA, 632 bp, Homo sapiens
cttcctccctaaaataatattaaaagttgtttgtaccactgactgaactgctgtaaagacaaatataatctaggctggtgatatggtttgattgtctccccaaaatctgatgttgaaatgtaatctcaaagatggctgaataggagcagctccggtctgcagctcccagtgagaccaacatagaaggtgagtgatttctgcaattccaactgaggtacsaagctcatctcactgggactggttagacagtgggtgcagcccacagagggtgaacagaagcagggtggggcattgcctcacccagaaagtgcaaggggttggggaactgcctcccctagccaagggaagctttgagggactgtgccatgagggacagcgctgtctggcccagacactaggcttttcccatggttttcacaacctgcaggccaggagattccctcgggtgcctacaccaccaggacactgggtttcaagtacaaaactgggtggccgtttgggcagacactgtgctatcagcaggagttttttctttttcataccccagtggtgcctggaatgccagcaaggcaaaactgttcactcctctggaaagggggctgaagccagggagccaagtggtctagctcagt

SEQ ID NO: 748839 - DNA, 632 bp, Homo sapiens
cttcctccctaaaataatattaaaagttgtttgtaccactgactgaactgctgtaaagacaaatataatctaggctggtgatatggtttgattgtctccccaaaatctgatgttgaaatgtaatctcaaagatggctgaataggagcagctccggtctgcagctcccagtgagaccaacatagaaggtgagtgatttctgcaattccaactgaggtaccaagctcatctcactgggactggttagacagtgggtgcagcccacagarggtgaacagaagcagggtggggcattgcctcacccagaaagtgcaaggggttggggaactgcctcccctagccaagggaagctttgagggactgtgccatgagggacagcgctgtctggcccagacactaggcttttcccatggttttcacaacctgcaggccaggagattccctcgggtgcctacaccaccaggacactgggtttcaagtacaaaactgggtggccgtttgggcagacactgtgctatcagcaggagttttttctttttcataccccagtggtgcctggaatgccagcaaggcaaaactgttcactcctctggaaagggggctgaagccagggagccaagtggtctagctcagt

SEQ ID NO: 748840 - DNA, 573 bp, Homo sapiens
caggtgcaagtcacagcacctggttcaatttactcctaatgtagcatatatagtacaaatttaaggagcaaaatgaactagcattgtttgaacataaacacgagtcattcaaggtgaaataatttattgctaaaaccatgaattgttaatttatgagctcatgatttttttaaaaagtgatcagcgttggactaaaactgtcttttctaaccagtatgaccttgaaattcacagggcaaaaaaatgactttaagttgtaattaataaaaaccaattatacaatgaattatcgtgaattcaaaaggaaataattatgaggctttaaraagttcaattggttcttagaatataacaaaaaaagcttgaaaacatttgaaaaagttctatctacttgcttcattatttataagtgagaaaaactgtcagtaacctaaatatctttttatatggtatgcttaaaatgtcattaaatgctgcactcaaaagaatatgaaatattaataacatggaaaattattacaatagaattctaactataaaaaataagtaatcaggtgtttttccctcaaagga

SEQ ID NO: 748841 - DNA, 614 bp, Homo sapiens
agtgcaatcaaatgagaattcaggattatgaaactcactcaaaactgcacaactacatggaatctgaacaacctgctcatgaaggattactggctaaataacaaaattaaggcagaaagaaataagttttttgaaaccaatgagaacaaagacacaacacaccagaatctctgggacacagctaaagcagtgtttagaggaaaatttatagcactaaatgcccacaagagaaagcwaaaagatctaaaatttacaccctaacatcacaattaaaagaactagagaagcaagaggaaacaaattcaaaagctagcagaagataagaaataacaaagatcagagcagaactgaaggagatagacacatgaaaaacccttcaaaaaatcaacaaatccaggagctatttttttaaagatcaacaaaatagatagacagctagacagattaataaagaagaaaagagagaggagtcaaatcgatgcaataaaaaatgatgaaggggatatcaccactgatcccacagaaatacaaactaccatcagagaatactgtaaacagctctacacaaataagctggaaaacctagaagaaatggataaattcctggatccata

SEQ ID NO: 748842 - DNA, 614 bp, Homo sapiens
agtgcaatcaaatgagaattcaggattatgaaactcactcaaaactgcacaactacatggaatctgaacaacctgctcatgaaggattactggctaaataacaaaattaaggcagaaagaaataagttttttgaaaccaatgagaacaaagacacaacacaccagaatctctgggacacagctaaagcagtgtttagaggaaaatttatagcactaaatgcccacaagagaaagctaaaagatctaaaatttacaccctaacatcacaattaaaagaactagagaagcaagaggaaacaaattcaaaagctagcagaagataagaaataacaaagatcagagcagaactgaaggagatagasacatgaaaaacccttcaaaaaatcaacaaatccaggagctatttttttaaagatcaacaaaatagatagacagctagacagattaataaagaagaaaagagagaggagtcaaatcgatgcaataaaaaatgatgaaggggatatcaccactgatcccacagaaatacaaactaccatcagagaatactgtaaacagctctacacaaataagctggaaaacctagaagaaatggataaattcctggatccata

SEQ ID NO: 748843 - DNA, 627 bp, Homo sapiens
ctttgttcatcaaggatatcggtctgtagttttcttttttggttatagttttctgttttggttatgtcctttcctggttttggtattatggtgatgatagcttcatagaatgaattagggagggttctttcttctctatcttgtaagatagggtcaaaaggattagtactaattctttgaatgtctkgtagaattctgctgtgaatctgtctggtcctggacttttttctgttggtaatttttaaattaccatttctatcccactgcttgtcattggtctgtttagggtatctaattcttcctgatttaacctgggagggttgtatttttccaggaatttatacatctcttctaggttttcaagtttatgtgtgtaaagttgttcatggtagccttgaatgatcttctgtatttcagtggtgtcagttgtaatatctcctgtttcatttcttagtgaggttatttggattttctctcttcttttcttggttaatcttgccagtggtctatcaatctgatttatctttttgaagaaccagctttttgtttcatttatcttttgtattttttgtttgtttgtttcagtttcatttagtgttgctctcatctttgttatttccctttttc

SEQ ID NO: 748844 - DNA, 641 bp, Homo sapiens
cacttgggaaattttcaaaatccatgttaaatacagtaattacagcatacgattagaacaaataattgttatctcataatctactatatttcatctatgttaacttaaatctaatagtagaaaccacaattggagttatttttcagtagctgaacaataaataaaatttttccctgataggaaaatatcaaaataacatttattgccaatggaaagttctctctgttaaacatttaagaaaacactgtatctatgatttctttaagaattgtatttttagccctttcattgcaattctaaatgaaatttgatgttgctgacttatataatagattgtgaccataaatattagcataaagtaaatatgcttcttatttatggaattacataagaaaggcattcattggaagggtgagcattttctaactcataagcttccatttttgacttttaccactctctygtctttaggaagaaataaagtcaaaagggatgttcctgaggccttacctgtatataaatgatgtgctcggggcaactctgtgcttgatttactaccatattcttctgcaggcacctttcattgttttctttaaataaccccctggaggttactctggatgaaaatccatctgcatcaa

SEQ ID NO: 748845 - DNA, 567 bp, Homo sapiens
tagcaagaccctgcctctacaaaacaaacaaataaacaaaaacattactgtggcatgtgcttatagtcccagctactcgggaggctgaggtgggaagatagtttgagcccaggaagttgaggctgcagtgggctatgatggmaccactgcactccagcctgggtgacagagtgagaccctgtctccaaaaaaaagaaaaagaaaaataattgaagaaacaaatggtgattagtattttgaaaaagagaagatttgagccttataatagcagtcttcaaatatttgaggaactcttgggtagaattggaatgagatttattctcgtcgttccaaggaagaaacaactaatgagttgagctaacatgacaaactgtcaagagctatagaaagatgattaagtctctcataagagcaagtttcctatactgaaactgcataaatgtactctggaatgtcatttggggagtttttattgggggatttaaatactaatttttttatgtgattatatataatgtgtatatctattatatgcttatggatagttttaattgtatcttccagtta

SEQ ID NO: 748846 - DNA, 578 bp, Homo sapiens
ccagcaattgtgctccttggtatttaccaaaaggagctgaaatgactacacaaacacctgtacacagatgtttatagcagcttttatacataactgccaaaacttggaagcaaccaagatgtctttcagtacgtgaatggatmaactgtggtacatccagacaatggagtattattcagtgctaaaaagaaatgagctatcaagctgtggtgaggcatggaggaaacttaaatgcatattaccgaaaggagccaatctggacagactacatactgtatgattttagctatatcacattctggaagaggcaaaactatggagatggtgaaaagatcagtggttgaacagtcagagcagaggattttgaaggcagtaaaactactctatatgataatatgatggtggatacatgccattatacatttctccaaacctatagaatatacaacaccaagggtgaaccctaatgtaaactatggactctgggtgtcaatgtaggttcatcaatggaacaaatggaccactctggtgggggacgttgataatggggaggctatgcatgtgttggggcagagggt

SEQ ID NO: 748847 - DNA, 569 bp, Homo sapiens
acatgatgcaaagtgtaacagtctgtgagaaacaatttgcccctcactggtggcttcactccaggaagggtgaggtaatggcaggtgggaaagaggagcaggaggtggcagggaattcagaggacaggagtagcctctggaaacayggagagggacagggggcagtttggtgacagcttaggaaggccagagaaataactgcaggaaacagggcagggctcagacctcacgcctcacccagtgccactgacttgttctgcgttgagtcctgtgtttactgagtctcctttcattgcactgaacatggtctttataaattctggtttgtgactccctctcagaagtcctgtgggtcacctggaactggttttattcctgcttatttcctcattcctcttctcattaaaacataatcgctatgcctctgatatgaagccactttcttttgctatctctcttccttcccattcttctcccctcccatcctacctcccaaatccctcagaacttctctaaaaccctatgccccacagtttaaacacttgtaaaaaccaaattccctagggggt

SEQ ID NO: 748848 - DNA, 569 bp, Homo sapiens
acatgatgcaaagtgtaacagtctgtgagaaacaatttgcccctcactggtggcttcactccaggaagggtgaggtaatggcaggtgggaaagaggagcaggaggtggcagggaattcagaggacaggagtagcctctggaaacatggagagggacagggggcagtttggtgacagcttaggaaggccagagaaataactgcaggaaacagggcagggctcagacctcacgcctcacccagkgccactgacttgttctgcgttgagtcctgtgtttactgagtctcctttcattgcactgaacatggtctttataaattctggtttgtgactccctctcagaagtcctgtgggtcacctggaactggttttattcctgcttatttcctcattcctcttctcattaaaacataatcgctatgcctctgatatgaagccactttcttttgctatctctcttccttcccattcttctcccctcccatcctacctcccaaatccctcagaacttctctaaaaccctatgccccacagtttaaacacttgtaaaaaccaaattccctagggggt

SEQ ID NO: 748849 - DNA, 627 bp, Homo sapiens
ttgatgttgattttactgaagtgattaaatgtatttttggaagattctaaacttcaaacttctgcattgggttgcattaatgtgccccaagtcaattagcttaaaatgatgatgctacaaatgtagggcatattatgaaatccctttgtaaaactaaattctggatatagtaatgcttttcttggcttatttgttcctttgacttttatggcctttccayttcatttatagaattccagattctttcaagggcccttgctgttttagaaacagctcttaattttgttccacaagtcatctaatctacttttgactagttaatttattaactctgtaccgaagaatgaaaaatcaaaattaaacttagatttagacccctttgctctttatcatcatcagttattggtcagaggtatgtattccttcctcctgtatcttttagaaactcccttaatgaatttcctttgcttgcttatcagtttaatttactatcactgtttaaagatgacgaaaaatgtaagacagtttaagactggagggtgaaaaatcaggtgaagactttatggtaacatttttctgccttgatgtttctaaagggaattaaggatattttctgatgtttttaaa

SEQ ID NO: 748850 - DNA, 693 bp, Homo sapiens
atgttcaattgtgtggtcaattttagagtatatgccatgtggcaatgacaagaatgtatattctgttgtttgggggttgagagttctgtccatttggtcaagtgtcaagttcaggtcccgaatatctttgttaatttccctcctcagtgatctagtactttcagtggggtgttgatggctcccactattagtgtgagggagtctgtgtctctttgaaggtctctaagagcttgctttatgaatctgggtgctcttgtgttgggtgcatatatatttaggttaagtattcttatggaattgaactctttaccgttatgtaatgcccctctttgtctttttttatctttgttggtttaaagtctttgtgaaactatgattgcaacccctgcttttttatgctttccatttgcttgatagatttttctccatccctttattttgagcttataggtgtcaytgcatgtaagatgagtctcttgaagacagcataccattggatcttggttctttatacagcttgccaagctgtgcctttttttaactggtatttagcatatttacattcaaggttaatattgatatatgtggatttgatcctgttatgttgttagttgtttattatgccaacctgtttttatggttgctttatagtgtcactggtctgtgaacttagagtttttgcagtgggtgata

SEQ ID NO: 748851 - DNA, 619 bp, Homo sapiens
gaatttgaaatatgtgtgatttaccagtaacaggctgttaaataatgaaaaaatcctcagttaatttcttcatattgcctaaatagggaaaaattgagactgttaattttcagaaacacagtgccactgatgaatgagaaacatgcactcattcaagagacttttccctgagttgcagaggatttttggttttttgtaattctcatgtakaaaattcattttggccttatttattttgagcattaaagtcctcaaaaggggctccccaacatttttgtgagccacaggtactttttattttccctctaaccttccctacgttctccaaaggaatatttgtggtatactgacagtgatgtctctgcctaaccaaaaactcccactgcaaaatatgtgcttctgtagaagatgctggttcaaatatcctgttctctaggagtcccaacaagatgtaaaatagaagtgaatataatggccacaaatatggtgtagcattatagccagacagatttagaaataagtcctggccctaaaacttctatctctgtgatactgaataagtcacttgtcggagaatgagtttccttgaagggagcatgataaggatattcaggggatt

SEQ ID NO: 748852 - DNA, 533 bp, Homo sapiens
caatatgttgtatttacaaatataaatgcaaatctgtattagtattttaatcctcatagtcattatgaaccttatctcaaaggatttgatctgcaaacgtcaaaatttcaggtttgggtttatttatgagtcttccaatgatcttactttcaatgtttttatacttagttctgaaaattaaattaaccaaataactaaaaagatgattttaaattttattttatgaaatgacagatggtttctggttaactgtgttttattttttgttgcatatttgttaaaaagagaatggttagatctggaaaatgctgttaaacattccttcttttagttttatgttcagacatttattattcagcagtgagtatgatggctttttaaataaccaaatcasttggaaattaaagctgcttttaaaaatgtcttagtcatatatttgttgtatgccacatcagaatgtgtgtgtgtgtgtgtgtgtgtatagttttcagtctggttgttataagtctcttggcaagggtaaaagtcatggg

SEQ ID NO: 748853 - DNA, 572 bp, Homo sapiens
tccaatagtgctggtgttcttataagaacagagagagacacaagagcattctctcttcaccatgtgaggacagagtgagaaagcagccatctgtatgtaggaagagagccctcaacaggaaccaaatcagccaatcttggtcttggacttctcagcatccagaattgtgagaacrtttctgtttaggccaccagtctagggtactttgttatgcggcctgagttgactaaggcaaccagaaagccccaaccaaaaattgttttacttgaagtttatacattactttttaatgactgttaagaaaaattttcttaactgaaactctctctaagaaagcatctcaaattattgccaagaccaatgccatgaaattttccccctaaattttcttctaggtttacagcttcaggtgttataattaagtcttgagtggattttttgtgtatgatttaagataaaggtttagtttcattcttttgcatgtgaatatctagtttccccaataccattttccaataccattcaagacttttcttcattgtatattctggacatccttgtcaaagatcagt

SEQ ID NO: 748854 - DNA, 584 bp, Homo sapiens
caaatatcctaatcagatgctgatgccatgtccttgaactacccagcctctagaactgtaagatataaacttcttttctatataaattaccctgtctatgctattctgttatagcaacagaaactggactaagatagtgttcttctgtcatcaataaataatttacataatttaccttgactctcaaaaaaaaaaggtcttctgaggtcaagcccagaaaggctctttcctagaacaatggccccagggtaggagcaggcctggtgcactgaagtggcaaggaggccattgagcccgtgggagccagcagagagggatgaagccaaggaggcagagcagctgcctagatgagaaagaagcagatacagagctgcaacgagaagctcggtgattctagagaatgccatggaaggcaggaaattcagaatcatgggtggtaacgagccaggcagcagatcacagagcccttgtatgaaatgtacaagaacttggatttyactctctgatggaagtttgggttggaatttcagctctgccacatactaggtgtgtgaaattgtgcaagttattaaacttcactttcc

SEQ ID NO: 748855 - DNA, 616 bp, Homo sapiens
caggaggcagaggtcaaagtgagccaagatcataccattgcactccagcctgggcaacaagagcaaaactccatcttaaaaaaatatatatatatacatatacatacatatatatacacatatatatacatatatacagatattatatatgtaaatgtatatatatgtgtatatatatacacatatatatacatattataactacatatatatacacacacacatacatatacatgcacacatatgtttattgcagcactatttacgatagaaaatacatggaatcmtcccaaatgcccatcaatgatatattggataaagaaaatgtgatatatattcaccatggaatactatgcagccgttaaaataaatgagatcatgttctttgcagggacatggatgaagctggaagccatcaccctcagcaaactaacacaggaaaagaaaaccaaacaccacatgttctcagtcgtaagagggagttgaacaatgagagcaaacacatggatacatggaggggaacaacacacaccagggcctctcagcgggacaggggtaggagaccatcaggacaaacacgtggatacatggaggggaacaacacacaccagggcct

SEQ ID NO: 748856 - DNA, 616 bp, Homo sapiens
caggaggcagaggtcaaagtgagccaagatcataccattgcactccagcctgggcaacaagagcaaaactccatcttaaaaaaatatatatatatacatatacatacatatatatacacatatatatacatatatacagatattatatatgtaaatgtatatatatgtgtatatatatacacatatatatacatattataactacatatatatacacacacacatacatatacatgcacacatatgtttattgcagcactatttacgatagaaaatacatggaatccwcccaaatgcccatcaatgatatattggataaagaaaatgtgatatatattcaccatggaatactatgcagccgttaaaataaatgagatcatgttctttgcagggacatggatgaagctggaagccatcaccctcagcaaactaacacaggaaaagaaaaccaaacaccacatgttctcagtcgtaagagggagttgaacaatgagagcaaacacatggatacatggaggggaacaacacacaccagggcctctcagcgggacaggggtaggagaccatcaggacaaacacgtggatacatggaggggaacaacacacaccagggcct

SEQ ID NO: 748857 - DNA, 629 bp, Homo sapiens
taggaaaatggatgaggggctcagctgtgtaggctgttatgagccatcaaatgttttggagcagggctgtaatgtgagcagctctgtgtttcagagggaacactgctaacgttttagaaagtttaagcttgaaaaaagacaatgtgttcagcaacgtgcagtgcaaacttgtaatttggtaccctttttgatagaatacattttccctttttaaaaagagacttttcagcccagaatgtattggctgccttcctatacatggttaaataataatagaaggtgagaaacatttattttccacaaatcaaattcaattagacaatgtttaaacttccctaattgtatttactaattggtacttatttaaactccttagagagtagacaattttagaagggacggacttcttttctctcaaaaacattgaatatgaacactaggagctgaatggagatatatgtaaaataattttgaacaaatgrttattataatggggttaccaaaagcttatacaaatcagtaaaaagttaaataattcagtagcaaaataagcagaagaccttactaggtaattcaaaagtagtacactaaacatatataaaaccaagttacctaaatagttactaaaa

SEQ ID NO: 748858 - DNA, 654 bp, Homo sapiens
ttgtatttaattttagctcatggccacagcaagaaagaacaatgaactgactcttgagatcgtttgtttgatacactagcatgcaatcgtttttatctagatacatatttgtcatgcttcaagcttcaggaaccaacaggaacaatgtagatggcattttcagtaatacactgatcgctctgctcagaaacgctatctaatcagtggaagaaaatccaacatcttctaggcggttctctccccaaatgtttctgagatgccctcagttgtgagggctgcgtatgtgtaatcctgtggttgggtgattagcacggtggctttccctctcagagtgtcagggcccctttctgaaatgccacattcctttattccatgcccacctttgtgttgctgatcttgggscatgtgcaccgattgttaatttctttcaggcacctgccttttccactgcctgtggggccctgtgcagtctgttgcttgctccgaatcgtgcgcagaacacgcagggtgtgatctcaggccgtggcctctgtactttctctcccttccttcagctttcacaatgtgccgctgggtctctgcagcttgtctttctgtttctggccactagcacaaatctttttctgtttcggatgggagaggcaggagaaaggg

SEQ ID NO: 748859 - DNA, 617 bp, Homo sapiens; identical to SEQ ID NO: 737346

SEQ ID NO: 748860 - DNA, 468 bp, Homo sapiens; identical to SEQ ID NO: 737347

SEQ ID NO: 748861 - DNA, 612 bp, Homo sapiens
tgaagtgggtcagacggttgaattagggagttgtagggctgagggtgaatgtgtggattttgcacatttggtagtaaaaggctgtggtttgcttagatggacagctcttctgcattgcccttggtacgtagtaatgctgtgtgctgcggggcgctgtcagtggggttttgggagctggtgctcttgacaatgtgttgttacctgctcctgctcccttccgttcacatcttccctattctctccttttccttctgaagtcaccacctctcttgcagtttagaagtgtattatttatgggaaataaaaagttagtgctgataagaagcagcatcactggggctcagtttgcgcatcattaaaatggagcatttgaaacacatggtttccagctccgaagtggaatgtttctaggattcagctaagaytgaccattcttatggaagcatttcctggaaagtgttaatgagaatgctgttgcattccaagagctttgaggaaatctaattcctgacaaaaaatattcttaggaaatcttgctcaatatatagttattaactttttatcactttgtggggagcttttcatctcaagacttttctattaaattgaaaa

SEQ ID NO: 748862 - DNA, 670 bp, Homo sapiens
tgtattattttcattttgtaattttggaaattgaatcttagggaagttaaagtttatgaaggatgcttcctggcattggcttggattagaatatgggtatgtctgaatcctgatcctatttgtttaatcactatgaaacatacaattgacttaaataaggattgttttaagctatgagttcaattgatctaatatgagttttatattttagcttcttttttttatgaaggactgtgccttctctaatttgatcaaaactagtttctttaattttaaaaacgacgcagaaacttttgcttgaaagagagagttcttttgttctttgagaacaaagtgagcacacaaagtacaatatgactgtgggctggaagctattaaccttgatataataaatgcacttcagttagtatataataaacaataaactagagctgttattcatgtaactgttggctactactcagcaaaaccctgcagagaagcatgtaaactttgacttaggagacatattcctcctaggtcatactgacttgraagacaatatgtgtacaaatgtctgattctcaagctcgattttgacatcaagggtataatgtgttaggaagcatcaaaacccataataattgactagaaaggaagcttgtttcatttgtccgtttacttgaggtta

SEQ ID NO: 748863 - DNA, 606 bp, Homo sapiens
gggtcagacggttgaattagggagttgtagggctgagggtgaatgtgtggattttgcacatttggtagtaaaaggctgtggtttgcttagatggacagctcttctgcattgcccttggtacgtagtaatgctgtgtgctgcggggcgctgtcagtgggttttgggagctggtgctcttgacaatgtgttgttacctgctcctgctcccttccgttcacatcttccctattctctccttttccttctgaagtcaccacctctcttgcagtttagaagtgtattatttatgggaaataaaaagttagtgctgataagaagcagcatcactggggctcagtttgcgcatcattaaaatggagcatttgaaacacatggtttccagctccgaagtggaatgtttctaggattcagctaagaytgaccattcttatggaagcatttcctggaaagtgttaatgagaatgctgttgcattccaagagctttgaggaaatctaattcctgacaaaaaatattcttaggaaatcttgctcaatatatagttattaactttttatcactttgtggggagcttttcatctcaagacttttctattaaattgaaaaa

SEQ ID NO: 748864 - DNA, 645 bp, Homo sapiens
ataacaacttgtggcaagtgcagtgaagaggaagaagtggagtcagtgatggagacggaccgaggagggactgactcagagagggtagtgaagaaagcttcctgtgagaatgtgacatttaagtggggtcctgaaggataggaagaaaaatggagcccactctctaaagagcaaggtcaggggaggggttccaggaagggytgatatttaaaaatactgaactactaataaggtggacaactggcagctgctgtgctggaacaatgtctgttgtgatcagtttcatctgtcaacttaggtaggctacaaatcctaattattcaaacactaatctaggtattgctgtgaaggtatttcgtagatgtgactcacgttcataaccagttggctttaagtaaaggagattattttagatactcttgatgtaccttattcaatcagttgaaagaccttaaaagttaagaggaagaacagcatagagaagaaattctgctgtgaattaccacttcagctgaaacctgagacatccagcctctccttactgccctacagatttcccacttgccttgccagccccagcaactgtgaaaaacaatttcttgcaacgaatcctataatatatatcttctgaagattttgtttctc

SEQ ID NO: 748865 - DNA, 590 bp, Homo sapiens
gaggcattattcctttagttgctcagtagttgtggaggtctacgggatccttggaaatgggcaaaatgaatgtatgtggggtcatgtaggaacatggcattgcatttacttataaatgggatggagaggtatttcactgttttcacaaccaataccattgtataggagaatactggcagatgttagctcagtttcaagaaagagggaaaagagtgtgtgaagaccctgggaccagaaactatttgggatatgcaagagaccaaagggagaacagggacactgaatccagaggtcagaggaagagtaggataaaatgaagggaaaacaaggccagatgaygcaggttctggtgagtacactggattttattgaaaagctccttgaagcatttcaaacaagtgtgtggctgctctgtgaaaaatagattagcctgagactattgtgaagtcatagacaggagtatatgtagtagactagacaggagatgatggataaatatgacaatagtggagatgcatggaaatggataattatcaatcattaataattaaggattacataattattaataatcattaataattaatgat

SEQ ID NO: 748866 - DNA, 623 bp, Homo sapiens
aagtgcctagtagaatacttaacatatatatatatatatatatattcctgtgtttctatgggtagaaattatatcactgactttgaaaatcctaattttattattattaaatcatttgctaatttttaaacaatttttattttaaattctcaaaatctcacaaatgtcattttttatttcttttttgcattttaagacttttagcagataaatctcattttttgaaatttgtatctttttgggaaacttcacatgtctttattcggactttgacatcttgcatcatgaatgcctatggggcaaactttattttccactattargagttcagacctctgggggtaggaacatatggctgtagggagaaacagcaccaattactggaaatccttggaaatgccaagagtcctaatatcctgagaatttactttgccttctctgtgaaagttgtccagtgctacacgtaatagacttccccttggaatcagtgttgcaatagagagaaaacaggctttaaaatcagggtggggacctggttttaaaagcaatttctgcttagtattttgtgatcttaggaaagtacttaatctctctgaactttaatttgctcattaattgattaa

SEQ ID NO: 748867 - DNA, 625 bp, Homo sapiens
ctgcacatgctctgcagcttttcattgctgtcccattgctggttcttctctccatcagaacttttcccctcttctttacctggttaatgacctatcacctttgcagggtcaactcacaaagtatttcttctaggatgctgacctgctttggttgcatccctacccaaatctcatcttgaattgtagctcccatacttcccacatgttgtgggagggacctggtgggagataattgaatcwtgggggcagtttcccccataatgctctcatggtagtgaataagtctcacaagatctgatggtttaggggaaactcgttttgcttggctctcattctctcttgtctgctgccatgttaagatgtgacttgctcctccttgccttccgccatgattgtgaggccttcccagccatgtggaactgtgagtccattaaacctctttttctttataaattacccagtctcaggtatgtctttattagcagcatgcaaacagactaatacagatgctttgcctctctttcctaaagattcttcccttcaaactacccccgctggcttagctagttcctttttgtgtttccctcagttgtacatttattacaatgattcaaaatgacctgtc

SEQ ID NO: 748868 - DNA, 625 bp, Homo sapiens
ctgcacatgctctgcagcttttcattgctgtcccattgctggttcttctctccatcagaacttttcccctcttctttacctggttaatgacctatcacctttgcagggtcaactcacaaagtatttcttctaggatgctgacctgctttggttgcatccctacccaaatctcatcttgaattgtagctcccatacttcccacatgttgtgggagggacctggtgggagataattgaatcatgggggcagtttcccccataatgctctcatggtagtgaataagtctcacaagatctgatggtttaggggaaactcgttttgcttggctctcattctctcttgtctgctgccatgttaagawgtgacttgctcctccttgccttccgccatgattgtgaggccttcccagccatgtggaactgtgagtccattaaacctctttttctttataaattacccagtctcaggtatgtctttattagcagcatgcaaacagactaatacagatgctttgcctctctttcctaaagattcttcccttcaaactacccccgctggcttagctagttcctttttgtgtttccctcagttgtacatttattacaatgattcaaaatgacctgtc

SEQ ID NO: 748869 - DNA, 631 bp, Homo sapiens
ctgattctgaatctcttgccccatagaataatctcacacagattttatgaaagaagccaatggagtggcaatatttacttgtatagatttttttttagctgtgtttttttttttcgtaggcaactatttttacatcaataaaagtgaacatcaaatatattaattacctggatttgtcttatttcctcttgcttactgtgtggtgcttcccatttattcaattgtgaaggaattttatgcttccgacttatctgatgtgccagtgtacaagtaatagaaataatcttattcatttaccagaaccaattagggacagttgtttaraaaactttttattgttaaagttcacagtagtgccaatatacaagtaatggaaataatcctttttatttacaaaaaccaatcagagacacatgtttgaaaggctttttattaaaatttacagtaatgcttacctacatttattattaggtggcattcttttgcataatcaatactttttttttttacagtgctctctcagaggaggagaaaactactctgcgtgcagggctcatcaccaacttcaatgaaccaataaaccaggttagtgagaaatgaatgctaatttttctttttatttgtactgctt

SEQ ID NO: 748870 - DNA, 608 bp, Homo sapiens
ctgcattatatttccctagatcagacagtaattttatattgtcacacggctatcagaggtaagagacattctctgcccagcggcctctgatgttataaaatttgtgaagtcctatactaactggagaagttgtttcctccagttgctgcactgcttctgctgtgtcacaagtatgtagatcctgatgaatcgaattcctctctggctttcagaatctgcattctctttcctaagggctgctgttaaggaatcgggatacatttgatactgattaactaccgttgtccaygtgctattcttttgttattagaaggagactggctgtgacggagtagaagtagctgttaatttttttttctttttttggctgctccgtagaaagagcagggctaccccataggcaataattttgtcaataaaaaattcagcagctaacagaagaagcacttgtgtgctcatcactcagttacccatattttcatttgtaatattttccacatatatttcaaatattttatttaagaaatgaaatattacaaatgcagttgaattcctctttctctttccagtctcattctattgtctttgttaagcagaggttttacatt

SEQ ID NO: 748871 - DNA, 608 bp, Homo sapiens
ctgcattatatttccctagatcagacagtaattttatattgtcacacggctatcagaggtaagagacattctctgcccagcggcctctgatgttataaaatttgtgaagtcctatactaactggagaagttgtttcctccagttgctgcactgcttctgctgtgtcacaagtatgtagatcctgatgaatcgaattcctctctggctttcagaatctgcattctctttcctaagggctgctgttaaggaatcgggatacatttgatactgattaactaccgttgtccacgtgctattcttttgttattagaaggagactggctgtgacggagtagaagtagctgtyaatttttttttctttttttggctgctccgtagaaagagcagggctaccccataggcaataattttgtcaataaaaaattcagcagctaacagaagaagcacttgtgtgctcatcactcagttacccatattttcatttgtaatattttccacatatatttcaaatattttatttaagaaatgaaatattacaaatgcagttgaattcctctttctctttccagtctcattctattgtctttgttaagcagaggttttacatt

SEQ ID NO: 748872 - DNA, 608 bp, Homo sapiens
ctgcattatatttccctagatcagacagtaattttatattgtcacacggctatcagaggtaagagacattctctgcccagcggcctctgatgttataaaatttgtgaagtcctatactaactggagaagttgtttcctccagttgctgcactgcttctgctgtgtcacaagtatgtagatcctgatgaatcgaattcctctctggctttcagaatctgcattctctttcctaagggctgctgttaaggaatcgggatacatttgatactgattaactaccgttgtccacgtgctattcttttgttattagaaggagactggctgtgacggagtagaagtagctgttaatttttttttctttttttggctgctccgtagaaagagcagggctaccccataggcaakaattttgtcaataaaaaattcagcagctaacagaagaagcacttgtgtgctcatcactcagttacccatattttcatttgtaatattttccacatatatttcaaatattttatttaagaaatgaaatattacaaatgcagttgaattcctctttctctttccagtctcattctattgtctttgttaagcagaggttttacatt

SEQ ID NO: 748873 - DNA, 428 bp, Homo sapiens
tttaattgactcacagttcagcatggccacagaggcttcaggaaacttacagtcatggtggaaggtgaaggggaagcaaggcaccttcaccaggcagcaggaaggagaagtgccaagcaaactggggaagagcctcctataaaaccattagatcttgtgagaactcactatcacgagaacagcctggaggaagttgcccccatgattcagttacctccacstggtctctcccttgacacttggagattatggaaattataatttaagatgagatttgagtggggacagaaagcctaaccatatcagacacataattgtttcaattttatttccaaatctctaggaataaagatttttaaccttccttgatactcataccaatgttttgtgaccttaagagtcagtaatttttttttttaacagccaaa

SEQ ID NO: 748874 - DNA, 591 bp, Homo sapiens
ccttgcatctgattggttggaactggatcccttgccttcccttaaaccagtcactggcaaaggggaatgagattgccttgggcttaaagtaatgatgactcattctctggaagttaggagagggacttgcccttcccaataggaagraaaatccacctattacaaaatcagggagtgaaacacggggcaaatgccagtgagtaggccatgaacattgcctgccccaggaagaaaccagttcctacttgtagagaaggcagcagaatgccaaagcccaatttcacctatgccacagtgcagccaagtccagcccttccacccacccctggtacctccccatgatttcttcactttacaacaggaacagtaatttgatgtttactttgagctcaggaaggctgtggggggcacagaatgtgcagtgggcattgtcagaagaatgatctgaggtgttgagagagaggcagagatgtagagaaaggtgctcagaagcaatgggtaataaagcaaagtgtttaatataaacattatttcatttaaatctcaaaacaatcctatgaagtagggtccttttccacagtttatggatca

SEQ ID NO: 748875 - DNA, 591 bp, Homo sapiens
ccttgcatctgattggttggaactggatcccttgccttcccttaaaccagtcactggcaaaggggaatgagattgccttgggcttaaagtaatgatgactcattctctggaagttaggagagggacttgcccttcccaataggaagaaaaatccacctattacaaaatcagggagtgaaacacggggcaaatgccagtgagtaggccatgaacattgcctgccccaggaagaaaccagttcctacttgtagagaaggcagcagaatgccaaagcccaatttcacctatgccacagtgcagccaagtccagcccttccacccacccctggtacctccccatgatttcttcactttacaacaggaacagtaatttgatgtttactttgagytcaggaaggctgtggggggcacagaatgtgcagtgggcattgtcagaagaatgatctgaggtgttgagagagaggcagagatgtagagaaaggtgctcagaagcaatgggtaataaagcaaagtgtttaatataaacattatttcatttaaatctcaaaacaatcctatgaagtagggtccttttccacagtttatggatca

SEQ ID NO: 748876 - DNA, 624 bp, Homo sapiens
aacacaatgtacgtatataggtaatataaaatgagcctgtgacccagttacagctttcatacatttttctaaataatcgtagctggtagattaattggaagatggcagctcccgtagcaagtaggggggtaatttccctctggtgcatttgtgctgaaaacatgggtttactattctgaacgtaagggacattaacaatcagcctagccattccaacaccaatagatctttcattcttctttaactgttcttttctattcctctacatttctctgtttcctcccctgactcctcttcaatgccttctggtgaaaagaaagaagtgtcttttcttttttgagaatgctargctgcaattagtgtgcctcctttgacacaaaaactttccccagagaggtagatttacaacctacagtccactaagcacatgggcgttggagcttgactggctaaattctaatcccagttttataacgtgatgctatctcagttacgccttatttccctcatctgtaagatgagaatatcttagtgccttcttcataaagtttttgagtgaagtaaattgacttaaatatgtcaagttcttagggcaatgccttacatcgtaattctgatagacat

SEQ ID NO: 748877 - DNA, 573 bp, Homo sapiens
ctgtggcagatggcataaacttgctccagaatcctatgctacaattctcttattgtggctctccagaggctccacgcagtgttttatctttctatatttttatttttattttcagtcagctttctcaggttgaacaggcattacttttctactagatatacctgtactaccataggatctgcccaagaggcagcactggttgctccacagcccagaattgcttcagagtcctttcttgctctaagatccactcakaactagcagtgtttcactttgtaataaatgggtcacagaagtattcccaagtacagaatatgttgcctttataacccaaagaggcctaccaaggaatgtgcttctttcttagtgttaggaagtataaggcacaacaatctgttcttcacattgaatgaagatattccagcatgccttataacactggaacacataaaaaggtcactaatgtgactggcccttgaactcttttagaacttatctatttccctcaggagcacaggtgtcttaccagggcttacatttaccacttcttgcatataaggtctaacgaacaag

SEQ ID NO: 748878 - DNA, 670 bp, Homo sapiens
agtgttagttttggattggaagtaaagctacaattccaacctgctagtaattagtctctttgtattctttctgatcttgtctgaatgccactttcaaatgctagtggagcggtttttgagtagaaatctgaagaggataggtctgacattaaagtctcacctctgatcaggctagaaatactggactgacttactgtttttgttttttttttttcctgataacccaaaaatccagtacttaaagttgcctctggtccatgggttccctctgcctgtgtttctctttttctggttcttcacatgtcaggttccaccttaaacttcagatgccacctcgacagaggggccttcccaaccttcttgttagacactgaattttgtctcccccaacccacccccagctcttatgttgaggtcctaacccccaatgggactgcatttggaggtagggtcttcagggagataattaaagttaaatgaggtcatggggtggagggrggtggccaatccaataggagtggtgtttcttataagaaaatgaagaggctgggtgtggtggctcatgcctgtaatcctagcaccgtgggaggccaaggtgtgaggattgcttgagcccaggagtttgagaccagcctgggctgaacatgataagacctcatctctaccaaaa

SEQ ID NO: 748879 - DNA, 475 bp, Homo sapiens
ggcaaatgaattccgagcagcaaacacaagtgatgtctgcaacaatacccatccttcaagtccagtgttggaattcaccctttccagttaagcatttctgaacatccagtcttgaagcactctacactgaactcccaaatataatcattgtctctgtcactccttgggcaacaacttctgcacagcctgtgatattgtgccccaagttgtcataaactactggttatatytgtgctcttagctttccatgtgggtcctgggtattgtacccaacctcacatactcattgccaatctttccagtctagatactggtgcagcaatcagccctatgtagggataaacaggcagcactttgcctcagttcctaactctcacttcctgcccaggggctctctgctgccaacactggggatcccactaagccattctgatgcctgggccaatcctgaagtatgagagatccttgaccaagg

SEQ ID NO: 748880 - DNA, 518 bp, Homo sapiens
aacaagttgaagtacctggccttcctcctcaaagggatgaacagcaacccttcccgaagcacttaccacttcctggcccccaccacttcctggcccccagctgcatcttccagcggattgcgaggcatgctgcctcacaagaccaaggaggccaggcctccctggactgcctcaaggtgtttgacggcaccccaccgccctatgacaagaaaaagcagatgatgattcctgctgccctcaaggtcatgcgtctgaagcttacaagaaagtttgtctacctggggcacctggctcatgaggttggctggaagtgccagacagttacagccaccctggaagagaagagkaaggagaaggccaagatccactaccggagaaagaaacagctcatgaggctatggaaacaggctgaaaagaaagtggagaagaaaattgacaaatacacagaggtactccagacccacatactcctgctctgagcccaataaagactgtttatccctcaaaaaataaataac

SEQ ID NO: 748881 - DNA, 658 bp, Homo sapiens
aaaagttttcctgtaattcttaaattggaaattgcccagatacttaatatcaattaataaccttagatcctaaattatgacaagtttgtttacaagcatttattccattacatttacctgattaatttaatagtttacctagattatttacaaaaaaaactataatagccaatattcaaagttatttttctattaaccatttttatagctgtgaattttatgtatttacttaagtaataaaacttatggttacttttaagggtatttataccaacaactcaatatttagctattttcatttaagccaacaatatttcataagcatgtacaagcaaagatcattctgtcttgggctgggtttcatagtttataacccttatggcaaatcatacagtattctgcaggaataaacatgaaactacttgcttaatatrtgtaaacaaaatgtttacaattctaaagatattgctgatattattttaccaataatttcaaagctgacttatttagtaaagattttacttaagtcatgtgaacttggaaaagcatttgactagtctcttttttttagcatctgatttaagcattttttatagccagttaattagagctcttcatatatttttactagtgaaaatattgtgtacacacacataaa

SEQ ID NO: 748882 - DNA, 596 bp, Homo sapiens
atgcttatatggctctaaattgattatcagattatgtacaaaatattttgtgttccaatggaaaaccatgcatcatatatagtatacccttttggattataggattctagctctactcactgtttttgagctattttgtaattcattgtaagttgtaggtaactggtagctctgtaagttctgccttacctggttgtaatttaatttactttttccctcttgtagaaaaaagttttgttcccatttggaattcatctcaacattgctctactccatgtaamtttatactgttttgacttttcttttgaaccggttataacagctacctagttctctcatatcacgagtaaagaaaattctgtaacatatattcattttatatttgtatgagagtcatgattttacctttttccgaaaattatcttttaggaaatattgagtaaaaaacatattgtagtttcctcagatggctagttattagtaggaaaactctgtaaaaaggataaatggacacctatgaaaagtgaaaataaaatattttcaattaagcaagtcaatttaataagttatttatttatatttttgagacggagttt

SEQ ID NO: 748883 - DNA, 633 bp, Homo sapiens
cctgccctccagatccatcagttctgcaaacatggattcaaacaaccaagtatggaaaatattcaggacaaagaaaccaataaaagataataatacaacaataaaatagaatacaaataacaatacaacattataattatttacatagcatttacattgtattaggtattataagtaatctagagatgatttaaagtatgcagaggatgtgcgtacgtatatgtaaacactacaccatttatctaagagacccgagcatcaggcrattttggtatagggatgggggtggtcctggaaccagtcctcagtggataccgactctactactgaatgtaggacttgggtttatcttgattacgatcatattctcaatgcccagcatagtgcttggaacaaaataggtgctaaacgatgtttgttggatgaatgaataattaaataaattcattgaagttgaaatcaagtccatataatgcttagttttatttggattgcatacacatgcatacataataaattatatattactactgtactaatatcagaaatatgtgcaaacaaaagaacatacataaaaatagattttaatagtataaatagattttctaacatttcatgctaatgtattatctc

SEQ ID NO: 748884 - DNA, 534 bp, Homo sapiens
caggtatattaatttctgccttgctagttccttcagtggttttggaaagcaaaatgattcagtgcatgtgaatgtgctttgtaaactgtaaattgctattcaagggcaagctgttactattagtaataattttgctactaagtcttaggtcttagataccaattttgtttctttctttttcatttttatttttttaggacaggatgttgctctgttttttttttttttatttttatttttttgagacgaagcctcgctcttgtctcccatgctggagtgtgatggcacgatctcagctcactgcaacctccgcytcccgggttcaagcgattctcctgcctcagcgtcctgtgtaactgggattacaggcacctgccaccatgcgcggctaatttttgtgtttttagtagagacgggggtttcaccatgttggccaggctggtctcaaactccggacctcaggtgatccaccgcgcccggcctgttgcccaggctggagtacagtgacatagtaacagctgacctgttactcag

SEQ ID NO: 748885 - DNA, 627 bp, Homo sapiens
ggggttttttgttggtggcggcgggggatgttcttcaaaaaaaaacccacaaatatttgctctaaaataacacttgccttacaaaatacaggtacccagttattaaaaattaatgctttgggacaacaatcctagtctccaaaaaacttagatcattattatagctatgtgtgatgaagagaaaaagaaattcttttgttgtcccaaagcattaatttttggtaactgggtacttgtattttctaatgtgagtgttactttagagcgaacatttattttaaaaagaaaagaggaagaagaactccccccacaaaaacaatgtataccacggaatacagtgcagccaagaaaaagaacaagatctgaacccagaaggcagasgttgcagtgagccaagattgcaccattgcactccagcctgggcaacaagagtgaaactcatctcaaaaaaaaaataaaaagaacaagatcatgtcctttgtagggacatggatggagctggaggccattacctttagcaaactaacacaggaatcaaaaaccaaataccacatgttctcacttaaaagtgggagctaaatgatgcgaacacatggacacgtagaggagaacagcacacactggggc

SEQ ID NO: 748886 - DNA, 586 bp, Homo sapiens
ctctggcagagcccacgtgccttctcttggagggagagcaaactgagcctttctgacccctggggctgttggcatttctgtagtgaagtttggattgccaggccaatcagtgcccactcccttaaatctgcccccagcatccgaggagctgctytgggaattctgttccatgtccccagtttcccccacccccagaggccagcagcccttttgttggtttggctctcagcttagatcattgaagcgatttcagctccaactgggcaacactcagcatttcatttatgtcttggcaaggttaccatgttattacttaactgtgccgctgctactcaataagtgggaactgattgaaataaccacaggagttactggattcccctaattttagcacagagttaaagcttactcccacagttggaagttaaaataggctgccagcccacagaaatgcccacccaccacacctaattgtcaccccacagatgcctgtcatggaaggaaacatggaaggctggagagaagttcttagaagcaagttcttctcctcagtggatgcctgaggtcattttggccaggcccaatt

SEQ ID NO: 748887 - DNA, 521 bp, Homo sapiens
ctcaattttcatttcttatttctctacatcaggcagatgttcacatacatagcccatgaatttagcatgtctatgacaagttaaactgaaaacctcaagcaaagcttatttttcccacttcaaatcacattaaaaaatagagccacctaaactgtcactgtgcagcttccttttctttggatggattttggacccactaaccttcaagctttaaggtgcagtctataggttttgtatagtatcatccaactctkgaataagatatattcttattctatatttattttacatattttctaattaaactggaatggatcatgggcatgaaattcgattctgaaaatgaaaatcaaatatgtgagattacatataagagaggaagaccaaggcgcataaactcattttctccactcttactgtttctctccttaatacctgtagcaattatcatggggttgaactttgattcttcttcctgtgactctcacattcaactgatcctcttcataactaataactta

SEQ ID NO: 748888 - DNA, 621 bp, Homo sapiens
aggaattagtaagatattgtgtcagcttttttgttataaaatactgcttttaaaatccagcttcatgtgtgagacccagttcagtttaattattgtaacttagtgacatattgttaatgagagtgtcattaaatatgttagctattagaataagtgggctataagtgtttttttctgtgattttaataaaatcatggcataaagtatttatgmttcctaactattgaatttttaaaattctactgataacttccttttcccagtctgtggatgtaaatgaaatgaaatgactataagttaaggctgctaacataatattaaggctgctgcaaatgtaaaatattttttctatttattgaatgatgaccatgttcaagttctttgcatatattacctttaatcttattaatcatacaaagttaataatatcctcttactactgtagaagaaatggagatttaggtgttacttattctttctaaccatttagtaagaagctgaggcacaataggaacctagttctgtttaacaggttttatttaaatttcataatgtttccacaatcccatgaaacttcaataatgatgtggcactttgggaacagatgctagaactttccac

SEQ ID NO: 748889 - DNA, 621 bp, Homo sapiens
aggaattagtaagatattgtgtcagcttttttgttataaaatactgcttttaaaatccagcttcatgtgtgagacccagttcagtttaattattgtaacttagtgacatattgttaatgagagtgtcattaaatatgttagctattagaataagtgggctataagtgtttttttctgtgattttaataaaatcatggcataaagtatttatgcttcctaactattgaatttttaaaattctactgataacttccttttcccagtctgtggatgtaaatgaaatgaaatgactataagttaaggctgctaacataatattaaggctgctgcaaatgtaaaatattttttctatttattgaatgatgaccatgttcaagttctttgcatatattacctttaatcttattaatcatrcaaagttaataatatcctcttactactgtagaagaaatggagatttaggtgttacttattctttctaaccatttagtaagaagctgaggcacaataggaacctagttctgtttaacaggttttatttaaatttcataatgtttccacaatcccatgaaacttcaataatgatgtggcactttgggaacagatgctagaactttccac

SEQ ID NO: 748890 - DNA, 559 bp, Homo sapiens
ctttagcaaagagattgacagcattttgtccctgccctagagatctttgaacttgagaaagatgatttagggtatctggccgaagaaatttctaaccaacaaaacattcaagatgtgacctggctgtttttaaaagtgtacactcatgtgtgcacaaggggattgtctgaaactggaacttatatttaaaagggaaggagagcacaaaagtttggaaaagttgcagcccagccatgtggtagaaaagaaaaaccccttttctggggagaaattcaagcctcctgcaaaaaattgcctaagtaaagtagtaccaaacgttagtagccaagacaatgggggaaattttctctagggcatttcagagaccttcacagcagcccctctcatcacaggcccagagggctcagagraaaaaatggtttcctgggccaggcccaggtcccacctgctctgtgcagcctcagaatatggcaccctgagtcccagccactccagctccagcagtggctaaaaaggaccaaggtacagcttggaccattgcttcagaaggtgcaagccc

SEQ ID NO: 748891 - DNA, 560 bp, Homo sapiens
atattgaaatgacgtgtggtatataagaaaaaaactgattgataaagaagaatttacatggaaacctcacttcaaataaaatctgaagaccttcaattgcctcaaagcccaaggtgacacatatgtccattgcctctgtgacttcatctcatatttattcttggmagaactcactcttcactggccatgcttatcttccttgctgtcactcaatatgtcagtgacaataatgcccatggtctttgcatctgctccactttatgcctagaaggctcctcatcagatacccacatacctggattctttattaccttcccagtaagactttccttgctcgttaaaatcgaaacacagtattcagtcattctcatccaactttctcacttgattttctccatagcaattatctccttctgatatattatgtaatttactttttattttagtttctgtttctgtctacaatacaaggtatctacccccaaggacaagattttgcttttatttttgttttgattttactgctcttagttctaaaaaatgactgacatattatagat

SEQ ID NO: 748892 - DNA, 602 bp, Homo sapiens
aagatattccacgtctatggattggaagaatcaatattgttaaaatgtccatactacccaaagcaatctacatgcaatccctatcaaaataccaatgggaggccgaggcaggtgtatcatctgaagtcaggaattcaagaccagcctggccaatatggtgaaacmctgtctctactaaaaatacaaaaaattagccgggcgtggtggtgggtacctgtaatcccagctactggggaggctgaagcaggagaatcacttgaacctgggaggtggaggttgcagtgagccgagattgcaccattgcactccagcctgggcaacaagagcaaacctctgtctcaaaaaaaaaaaaaacagaaaaacaaaaaaacaaaaaagactaacaaggcacattccttgccaatcatgacccatggtcataagatgtttacagttgaggaaacagcctaagatacctacaaaaacacacccctacaaaagcaaaaagtccagatgtcccaacacccgtaacaatatatgctttcaagataattgtagttatgctttgatgtattcaaacagtagaatgccaaggatcattttctttaaatcaatagaataat

SEQ ID NO: 748893 - DNA, 602 bp, Homo sapiens
aagatattccacgtctatggattggaagaatcaatattgttaaaatgtccatactacccaaagcaatctacatgcaatccctatcaaaataccaatgggaggccgaggcaggtgtatcatctgaagtcaggaattcaagaccagcctggccaatatggtgaaaccmtgtctctactaaaaatacaaaaaattagccgggcgtggtggtgggtacctgtaatcccagctactggggaggctgaagcaggagaatcacttgaacctgggaggtggaggttgcagtgagccgagattgcaccattgcactccagcctgggcaacaagagcaaacctctgtctcaaaaaaaaaaaaaacagaaaaacaaaaaaacaaaaaagactaacaaggcacattccttgccaatcatgacccatggtcataagatgtttacagttgaggaaacagcctaagatacctacaaaaacacacccctacaaaagcaaaaagtccagatgtcccaacacccgtaacaatatatgctttcaagataattgtagttatgctttgatgtattcaaacagtagaatgccaaggatcattttctttaaatcaatagaataat

SEQ ID NO: 748894 - DNA, 527 bp, Homo sapiens
accacagaaatccttcaggcagagtcacagcttcctgtagaaatggtgaggagtgaagggacatgagtgggcatggtcagcatctgctgatgccatgtgttctataaataaaccctagggacaatggagaacttcaagggttattcaagaaagttttcttgggggaagtttactttgaatgtgtctataaagaatggatacaaacagaatgtcagagagagaaaggcctagcactgggaatgcagatagtgaaaccaataaggacaaagatggtagtaagtaaatagccatgggagcwacaaaggaacagcctacctggaatagatgtaccatattgcctggagtagaggtgccacactggggaatatgtgcggctcgcatggtattggttaaagatgtgtcatgaatgaaacataaataataaaaaatgataataattgctgacatggagtgggcatttctatgtctctgctactatcatgcccatggagtgggcatttatatacgcctggtactactgaatgcct

SEQ ID NO: 748895 - DNA, 499 bp, Homo sapiens
atataaagctggttgtttacaccactgccaacattatctattatcgaacttaaaaataaatgcaagttatcagcaaaaatgatcttattgttttaatttccattttcctgattttagtttgaaaatattcttgcaaatgttttaacaagtttatttaaagtataaaaattagtctgggcagaaatatcatcaagaaactttttttgttaaaagaataattrtctattgttgaaaatgtgtaagaacaaataaaataatttttaaggtgtctggatataagatcaatatgcaaaatcaatgatcagtggtttcaaatttagtggaatagtattagcaaagcagtaataaaactatttgtcttttattctactcatataattaataattagtaaacatagacataaaaaaatgaaatataggcacaatactgcacacagtaaaatttacatctgatgaatttaactctggaagtatttgcttgggatagacagtggccaca

SEQ ID NO: 748896 - DNA, 540 bp, Homo sapiens
atgttagccaactagaatttttctagcctgaccttaagtaaaaactccttcccgtgtccccactgcctgtgatggtcatcatcatcatccctcctgtgaggttccctactttctcccactgagcaagacgcggatgtggaagcatccctctctcccatcatcccctcacgtgctgtatcgggaacacgtggctttgcacccttctgaggacaggtcagtcaatcccaagagcccattccttctggcagttgctacagstatgcacaccttaagcaccgttccccagaaatgggagtcatttgctactttcacatattgcctgctttcggcaattcaccctggtgaaatggcattgtttttccttctaaattgggaatctgagagtgtgtcctgatggaattccatgtcattccatttggggtgtactgagtcatgcaaacattaggaacactcctagagaggccccatccagctcatgggacagctcacaagtgagcaggaaaccaccgtgaggacaggtcagccacgcctccagcctcc

SEQ ID NO: 748897 - DNA, 605 bp, Homo sapiens
cacagctcctgatttattttttccttttgtttaaagcccagtgtattgaactgggcagtcagcatggtatttactgttttatattgtccaggtaagaaacctggagcttattgggagcagaattacaaatataagcaatgccaaccttccctgcaccttagcattacctttaatagtgtcaaaaaaaaaaaaaaaaaaacttagaaggaggcatagttttctccacagtttttgagaaattctccacgatttttctcctgagctaagccagtgagaccacagaggataaagaggaaggcgtggaaggcaragataccagggggcagggcttggtgggactccactggcggtggggggttgaggaggaggtttccaggtgggaggtaaatgtgcctcctctagatggagatgtcaggggaaagcatgggttggggacgtagatttgccccttgtggtattaagagtaccactccccacagggacagtgaatgatgctggggccagcgcagctctgtattgtctttaaggcaaccaggaactgaacatacttgacccgatagctaggcctgaccctatgccatggacatggcatagcccatgcactg

SEQ ID NO: 748898 - DNA, 544 bp, Homo sapiens
aatctaaaacaaaatgtaatgttatcagcaaagcaatgagaagaactggtcgggggtgggagtggtgaagaaaaaggcagaggatttaagagacctgggtatgagacctgtctttcaatgaccaactctggaatcataaatgagccgctcagcccctctgggattcggtttcctctgatacaatgacgaagttgaacttggtggtctcccagatccatttcagctcaaacattctgggaacattgccatttcatgatggacagcttaaatggaaagatcastacttcgtgcttaagaactggaccatatgtcctttagatttaactaaatacctactcagttctaacttttgctggtgtctggtgtcagatattaagtagtggtgatgtggcatcatttaaagggagacacaataattaagtagcaggtgctctgtggtaaagtaaagttcactaacgtagaaagaacgaaaaaggaaagcagtgaagaagccactgactgcaatccatgagtgccgttcagagactggctacgggggattcat

SEQ ID NO: 748899 - DNA, 737 bp, Homo sapiens
tggatcctaggtcataaaaagactatggcttccatcttgattgttcattctctctctctctctatctctctctctccctccccactcacttgggacaaactatctgccatgtcctggggacacttaggcagaagtcctgtggaaaggcccgctttgtgaagaactgaaatctccagcccatagccatgaagtctgctaacaactgcaggagccatcttggaggctgattccccagcaccaggagaaacagggatgacagcagcctctgttggcagctcagttgcaacctcatgctggaccctgaggcagagccaaccagctgagccactctgggattcctgattcttaggaactatgtgagataatgaatatttgttttcgttagctgggaagctttgggtagcttgttacacagcaatagagaacgaatacaggcaagtactattattatcctcattacagatgagcagataaagcagaggaaggtagagtcacttgtcctggacacgtggctgggaagtggtggagggcagacccacactgtctgacttctgagctcacattctgaacccctgtggtttataarcatgatgtgatggtcttctgtgcttctgcttcgtttatttgaagtcctcaagtcttattggaagtctctagcatatttgtagtctttcctttttaattgccccaattttcaagattggtggataatttcagagggattgagattaataggg

SEQ ID NO: 748900 - DNA, 626 bp, Homo sapiens
ctgcttgggtcgtgttcagcagtgtggaagtgttgttcttttgctttttgcagtaaatcttgttgttcactctttaggtccacactgcttttatgagttgtaacagttactgggaaggtctgtagcctcactcctgaggccagtgaaatcaagaaccccccagaagaaatggataactctggaygcagtgccttaagagctgcaacaatcgctacaaagatctgcagcttgactcctgaaaccagggggaccacgaacccaccagaagaaagaaactctgaatgcttcaaacatcagaaggaacaaattccagacacaccatctttaaaaactgtaacagtcactgcgaaggtccgtggcttcattcttgaagtcagtgaaaccaagaacccgccaattctggacacagtatgatctttttcttggatgagcagagtctgtagaagtgtggaccaccctgctacatgccagtccagggcatgggtgagatgccacacttacagcatcccattgtgaaggtgaacaaatgctgcaagtggcgtgaggctaagataagttgacatttcacaggcaatgctaagaaattaagtgggacaaggctggaatggttaggggcaaggtgtgaa

SEQ ID NO: 748901 - DNA, 626 bp, Homo sapiens
ctgcttgggtcgtgttcagcagtgtggaagtgttgttcttttgctttttgcagtaaatcttgttgttcactctttaggtccacactgcttttatgagttgtaacagttactgggaaggtctgtagcctcactcctgaggccagtgaaatcaagaaccccccagaagaaatggataactctggacgcagtgccttaagagctgcaacaatcgctacaaagatctgcagcttgactcctgaaaccagggggaccacgaacccaccagaagaaagaaactctgaatgcktcaaacatcagaaggaacaaattccagacacaccatctttaaaaactgtaacagtcactgcgaaggtccgtggcttcattcttgaagtcagtgaaaccaagaacccgccaattctggacacagtatgatctttttcttggatgagcagagtctgtagaagtgtggaccaccctgctacatgccagtccagggcatgggtgagatgccacacttacagcatcccattgtgaaggtgaacaaatgctgcaagtggcgtgaggctaagataagttgacatttcacaggcaatgctaagaaattaagtgggacaaggctggaatggttaggggcaaggtgtgaa

SEQ ID NO: 748902 - DNA, 618 bp, Homo sapiens
cttagaaacgtatttagtactgtttctgccagtctaagccttaaaaaggtctgtagctcatttgggattgctgagagctgaggagctgctgttctgaatgtcttcgttttaacttttttttttttttcaagatggggtgaggtcttgctgtgttgcccaggctggagtgcagtggcctgatcgtaacttactgcagcctttgcatcctgggctcaacctgtctcagcctccccaggagctggaactataggcgcatcccaccatgcccagctaattttttattttttgtagagatggggtcttgctgtgttgtccaggcaggtctcaaactcctgggctcaagcactcctcccacctggccttcccaaagtgctgggattacaggtgtgagctaccatgccyggcatatcttcagatcattcatatctggcacagacagttgacctttttttagtcaacagagctggtttgcacaggagattgtaagtgggtctatagagatggaaagttacaggttccatctagtagaggctactagtttttgaatagagggagagaaatctattccaaaggaattgcttcctcaatccccactggccactgcttgtgcggtgccag

SEQ ID NO: 748903 - DNA, 568 bp, Homo sapiens
tagttaaaaattatcttacctgactacaagtgatccccttgagaaagagagcttcatgcagtcaggcaagccgcagtcagggctgtcactgcttgagtttactgtcatgtgctcctgctggaaatcaatcagattccttattctttaaattacacacaggtggaaacctagagaagggctgggttgactggccatcttgaaggctgaaattggtggcatcagttgctctctgctaccctgacagatccataagccgtggwgttcatggttagagacagagcccttcaggccccaaggaagggtatgccatgggtcacctagggagggctgctggagaattcctctcttcacaggcagagaaccgaggctgtttgtccaagactcacagatgtttgaccacacactgaaaaactcagactccagtattgagaactcagtaggtgtttccttaccacctgttttctgaaaggatgcagggtcatctcagtttggaaatacaggttagtctgacaaacacacagttttttgcaaaggttaggggaaaaaaatctgttatttaaaatctacc

SEQ ID NO: 748904 - DNA, 637 bp, Homo sapiens
caaatgtctaaatatacctgaatcacgatattttcgactaaactttttaatgtcactaaactcttaataccctacatttttggaagacttattaggtcacggaaatgttataagcagtttcagtctcatatgactctgaggagactcagattcacctttgcggcagatcctttcatgatccgggaaagaccacatttggggtgaacaaatttaaaccaagtcctctgaaaaacacctggagaaatgctagaggcctcagaagggcaagctccgggtttggtcacagaggcttctgcaaaggtagagaagaaccttggtctctgcaaagctggagtttttgggtggtgaggcgacagggactttctctgctcagtgtgtggctggctcttgtgttggtggctatatgtgttgttgctcaagaaggtgggtctgtggcatgaatccaactcaagtcagagtaggcaccaaaaaggcacccaggctcrgcttccctggctcagcctggaccatcggcaggtcatttcagactacatgacccccaccaaagaactggctgacatgggacctctccatcctgacgtgactgccccggtgagaatccaggacaaggccgcggccctgtgggtagaggtgaggc

SEQ ID NO: 748905 - DNA, 604 bp, Homo sapiens
cagaactcgacaacaagattacaaatgaactgcactcacttccccatgaccgtctgtgctgagagtctcccactgagcagttctgccatgtttacagggctcagtttaaagctccccccgcaaccccctgctgaaggcccatctcctccgcttcttgctggctctcagtgccggccatctgcggagactcgctgctttctctaccgagcctacggtttaaaacacctgtgttgtctgcagttcctctatcccatttttaagttcaacagtrtatctgcaatcatcattcctgttacaatctgtttaaggtgctttcagtgagttcctggacagttccttgtgggtcttcagcgttcctttgagttcatctaactggacttttcagctgacctgatgggagcctctgtgtggaaatacttgctaactagaccaagatttattctgctctctcctcccttccatgagctcactgaatacatttatttttcccatgaggatttgtatttgtatttgatgaaatgagacggggactattaggtaggggtgagtgagagggaaaaaagcccctatgttacctgatgtacagctccaagagaaggtgtat

SEQ ID NO: 748906 - DNA, 604 bp, Homo sapiens
cagaactcgacaacaagattacaaatgaactgcactcacttccccatgaccgtctgtgctgagagtctcccactgagcagttctgccatgtttacagggctcagtttaaagctccccccgcaaccccctgctgaaggcccatctcctccgcttcttgctggctctcagtgccggccatctgcggagactcgctgctttctctaccgagcctacggtttaaaacacctgtgttgtctgcagttcctctatcccatttttaagttcaacagtatatctgcaatcatcattcctgttacaatctgtttaaggtgctttcagtgagttcctggacagttccttgtgggtcttcagcgttccttkgagttcatctaactggacttttcagctgacctgatgggagcctctgtgtggaaatacttgctaactagaccaagatttattctgctctctcctcccttccatgagctcactgaatacatttatttttcccatgaggatttgtatttgtatttgatgaaatgagacggggactattaggtaggggtgagtgagagggaaaaaagcccctatgttacctgatgtacagctccaagagaaggtgtat

SEQ ID NO: 748907 - DNA, 622 bp, Homo sapiens
caccttgcccctaaccattccagccttgtcccacttaatttcttagcattgcctgtgaaatgtcaacttatcttagcctcacgccacttgcagcatttgttcaccttcacaatgggatgctgtaagtgtggcatctcacccatgccctggactggcatgtagcagggtggtccacacttctacagactctgctcatccaagaaaaagatcatactgtgtccagaattggcgggttcttggtttcactgacttcaagaatgaagccacggaccttcgcagtgactgttacagtttttaaagatggtgtgtctggaatttgttccttctgatgtttgamgcattcagagtttctttcttctggtgggttcgtggtccccctggtttcaggagtcaagctgcagatctttgtagcgattgttgcagctcttaaggcactgcgtccagagttatccatttcttctggggggttcttgatttcactggcctcaggagtgaggctacagaccttcccagtaactgttacaactcataaaagcagtgtggacctaaagagtgaacaacaagatttactgcaaaaagcaaaagaacaacacttccacactgctgaacacgacccaagcag

SEQ ID NO: 748908 - DNA, 622 bp, Homo sapiens
caccttgcccctaaccattccagccttgtcccacttaatttcttagcattgcctgtgaaatgtcaacttatcttagcctcacgccacttgcagcatttgttcaccttcacaatgggatgctgtaagtgtggcatctcacccatgccctggactggcatgtagcagggtggtccacacttctacagactctgctcatccaagaaaaagatcatactgtgtccagaattggcgggttcttggtttcactgacttcaagaatgaagccacggaccttcgcagtgactgttacagtttttaaagatggtgtgtctggaatttgttccttctgatgtttgaagcattcagagtttctttcttctggtgggttcgtggtccccctggtttcaggagtcaagctgcagatctttgtagcgattgttgcagctcttaaggcactgcrtccagagttatccatttcttctggggggttcttgatttcactggcctcaggagtgaggctacagaccttcccagtaactgttacaactcataaaagcagtgtggacctaaagagtgaacaacaagatttactgcaaaaagcaaaagaacaacacttccacactgctgaacacgacccaagcag

SEQ ID NO: 748909 - DNA, 619 bp, Homo sapiens
atagtactttatatacatagagtgccttatgtacattcactagtgcattattactttaataggatgaaaataatgtaaatgaatatactgagtgagccagcggccaatttgtgagagcattttcaacccccacacacagacacatatgcacagacaagctttaaggatagtcacaataaaacctagttaaaagtttataaatgcagatgaaggtccctcaaaagaatctgcacaggtacactgcttataaagactttcaaatttggtaagacttcaattcatccagtgaatctctcatgttacacattaaaaaactgaagtttccacagattaagtagcttatccttaatttccaaattagttaattgcagaggcagttcaaaaaaatggtatttcatgatatttgaaagagaactaagattgcatttcttcaggctataactagaaaaaactaagctataaaatgttatctatrtgtgtacatattagattggtgtgaaagtgatcagtttttcccatgactttgaatgggaaaaacagcaatcacttttgcaccaacctaatccatgggttaatatgcacatttatatcccctcactttgtcacctactaagaccta

SEQ ID NO: 748910 - DNA, 551 bp, Homo sapiens; identical to SEQ ID NO: 740654

SEQ ID NO: 748911 - DNA, 570 bp, Homo sapiens
caaattcacaaaaagtaaaatcatgccaaccatgtttttggaacacagtggaataaatatgcaaatcaataccaagaagatccctcaaaaccacacgatgtggaaattaaataacttgattttgaatgatctttgggtaaacaatggaattaaggcagaaaaaaaaaacattttttgaaataaatgaaacagacacaacataccaaaatttctgggatacagctgaagcagtataaagaggaaagtttatagtactaatgcctacatcaagaatttggaaagttctcaaataaacaatctcatgtaaattagaaaaatgagaaaaaaaaccccaaagctrgcatcagaaaaaaataactaaaatcagagtagaactgaacacaactgagacataaaaatccatgaaaagtttaacaaaaccaaaagcttgtaccttgaaagaatcaacaagatcaatagctagctagctaaattcaaaaaaagggagaagatccaagaaatgacaaagctaacactacaaccaatcccacaaaaatacaaaagatcctcagagactattatgaacacaac

SEQ ID NO: 748912 - DNA, 634 bp, Homo sapiens
aaactagaaaatgcagaggaaatggacaaattcctggaaacacatgtcagaagactgaatcaggaagaaatcaaaactctgaacagaccaatatcaagttctgaaattgaatcagtaatataaaacccatcaacaaaaaagagctcttgaccagatccatttacacctgaactgtaccacacatacaaagaagatctggtaccaatactgctgaaaccattccagaaaatacagatttctcccatattcattctatgaagccagaatcactctgataccaaactctggcaaagacacaacaacaacaaaaagaaaactacaggccaatatctttgatgaacatagacacaaaaatcctcaacaaaatactagtaaactaaatccagcagcacatcaaaaagtcaattcaccacaatcaagtaggctttattcmtaggatacaggtctggttccacatacacagatcaataaatgtgattcaccacatagagttaaaaacaaaaaacatgattatctcaatagatgcagaaaaagcctttgataaaatccagcatcccttcatgataaaaactctcaatgaactaggcatagaaggaacaaaactcaaaataataagagctatctaagatacacc

SEQ ID NO: 748913 - DNA, 566 bp, Homo sapiens
tgacattgagaatttaaaaaaatactttaatagcataaagaatataagacacaatgataaatttaaaaatatgagtaagatatctcgaggaaaaaattcaactcaaaatgcattacagaatatatatcataagataaaaaaaaacttctcaaagaaaacccaggggaaatttatagtaatcttgggttaggcagaagttttctaaatacagtgtaagaaacatgaactagaaaataattaacaatttaaaacttttttctcctcgaaaattactgtttattaccaagattgggaagggtgtttttatggagacatwgcataaagagttaatttttggaggtgagacagttctatatcttgataaatctacatgtgataaaattgcatagaacagttacacacatagacaaacataaattagtttatataaacacgtagaaaatctgaagaaaatatctagtaaataatattgtaccactacaccgtgataaaaatgggtaattaaaaagtttaccaaggaagatattcaatggaaaataagcacttagaaagacattcatcattat

SEQ ID NO: 748914 - DNA, 587 bp, Homo sapiens
gacaaagaaggccattacataaacgtaaagggatcaattcaacaagaaaagagctaactatcctaaatatatatgcacccaatacaggagaacccagattcacaaagcaagcccttaaagacctacaaagagacttagactaccacacaataataatgggagactttaacaccycactgtcaacattagacaaatcaacgagacagaaagttaacaaggatatccaggaattgaactcagctctgcactaagagggtctaatagacatctacaggactcttcaccccaaatcaacagaatatacattcttctcagcaccacatcacacttactccaaaattgaccacatggttggaagtaaagcactcctcagcaaatgtaaaagaatagatattataacaaactgtctctcagaccacagtgcaatcaaactagaattcaggattgagaaactcattcaaaaccgcgcaactacatggaaactgaacaacctgctcctgaatgactactgggtacataatgaaatgaaggcaaaaataaagatgttcttcgaaaccaatgagaacaaagacacaacataccagcat

SEQ ID NO: 748915 - DNA, 565 bp, Homo sapiens
ttaaggattaaatgcatgaaagtcactttcatagtgcctgacattggtaagtgctaaagaaatgttagttttctttggaacttagtgaccttatggctaggcatgggggctcatgcctgtaatctcagcactttgggaggctgatgcaggaggatctcttgagtccaagagtttgagacaagcctgggcaacataaggagagtcccatctctattaaaaaaaaaattagccaggcaaggtggcatgcctgtagtctcagcttctcataggggtgagatggaagaattgcttgagcctgggagcctgaggcagcagtgagtggtgatcctgccactgcgctccagcctgggcaacagagctccctgtctcaggaaaaaaaaaaaaaatttgtgatcttgcyttctaaactatggagatacccccagaaagtaatgagaatgacctgaatatctggtttgctgggaggtggtttagaaggagggagaacctcatctgcttagaaagctcatttcaaagcagtattacaaagcaattctttttctgaggtattcagcatctggtggct

SEQ ID NO: 748916 - DNA, 616 bp, Homo sapiens
ttggcacaggtgttgtgtgaccctgattcagggtttgtggaaccccctctgggtagtgaaatagatgatcttctcaagatagattatacaatcatgccttaggctggtctttgagtgttatattatctcttcctggctcttttaattttctgctacagacagaacttccattgtatttaaaatagcatttattttatartaaggctgaaaaaaaaacagtacaaaagacttagaagaatatagtcaaggtagagttgatgtcaaatggaaatggtaacattcatttaagtagagcaattaaaaatggccttggggctcttagttttacttgccatattgtcagttctggagccactggtaggtattttgtccttatcatttcaaagcacacagttgaatttattacttcagttattatcctcagttacttctattttttaggatacttttaacttgaaggattaaaaaaaactaatcatatagaaccatctaaagccaacataaatttaaatcttagtctcatttttatcttaatgataaaataatgaattaaagcttttatacattccgtgttgaagttgtctctagtgtattcatgattgaaaaatatactcta

SEQ ID NO: 748917 - DNA, 497 bp, Homo sapiens
gggatagaggaatattttccaagcaaatggaaagcaaaaaaaaaaaaaaaaggaggggtcgcaatcctggtttctgataaaacagactttaaaccaacaaagatcaaaagacacgaagggcattacataatggtaaaggtatcaatgcaacaagaagagctaactatcctaaatgtatatgcacccaatacaggagcacycagattcataaaggaagttcttggagaccttcaaagagacttagactcccacatagtaatagtgggagactttaacaccccactgtcaatattagattggtgagatggaaaattagcaaggatattcaggacttgaacttagctctgcaccaagtggacctaatagacatctacagaactgtccccccaaatcaacagaatacacattcttctcagcaccacgttgcacttactctaaaattgatcacataattggaagtaaaacactcctcagcaaatgcaaaagaacggaaatca

SEQ ID NO: 748918 - DNA, 519 bp, Homo sapiens
gcaagcacatgctttataaatcagctgagctatggcaatcaatgctgctctagaaactgggggcccaataggcatgcaaatggacagacacctgtaggagttcacaaaaccctctcagttaaacacaagcagggcttcaacacacatgtggccatccctgctcaacacccaagccacatgtgtggctctcgtagtattgtcactcctaccaggcagaggcatactttccaaaggactggtaaccaaraagcaatggaggaatggattcggtgttgtgaccagcaggatccccctgctgaattctcccctaagcctccgaaagctccccactgcttcagtggtttcacatctccctgccctttctttcctaggtttcaaggataactggaaacccacactggtcattgagcattcatagcatggcagtccagcactctctaacagaccctggggcagcagatttagtgtttccaggaagaatttcaggaaactcagtcattcactcattcaacaaatgtt

SEQ ID NO: 748919 - DNA, 606 bp, Homo sapiens
atgtgtagtagtctgtatgccaatatgtaaaagactgtctcctttcttagacacaggcagtataagccaaagcaaagtagatgagcaaagccacgtacccaccatccagatattagcaactggctgtttcacccacgcatttgctaaaacccaggattcacttgaaaacagtggccagtgacattgtctgtaactgtgtatattttagttttacagttacaaggaagcttatttcattaaacagctctttgctagggatggtgtgwacacatgcctggaaacataaaaattccagtcctaaaacaaagagttcttactttaaaagtaaggtcaggccattttaggtacattgttgttttcatccagacttgttcctagaagccattaatttaaaaaaaccacaagtctatatttcatttgagcctgttgatgccatatgtttcaagctgaagcttcaaaaccagtgctatctaatagaaacacgatgcgagccaattatgcacatcagaaacaaaaaagaaacagctgaaattaatgttatttaatctaatatatccaaatagtattatttaacatgttatcaatattttaaagttaatgcatttt

SEQ ID NO: 748920 - DNA, 610 bp, Homo sapiens
ttgtggttttgatttttctttctctatcattagtgattttgagtaccttttcatatatctcttggtcatttgtatgtcttctttggagaaatatctattgaggtcctttgcttatgtcttaatcaggttgtttgtttgattttttgctgttgagttgtaggagttcctcaaacattttagatattaactttttatcagatgtatggtttgcagacattttctcccattccataggttgtcttttcactcygttgactatttcttttgctgtgcagaagctttttagtttgatgtagtcccacttgtctatttttgcttttgttacctgtgcttttagtgtcatatccaagaaatcattgccaagccaaatatcaacagggtttttttcctgtgttttcttctaggggttttatgatatcaggtactacacttgagtctttaatccattttgcgttgatttttatgtgtggtgtaagataaggacccagtttccttcttttgaatgtagatatcctgtttttcaagcatgttgtgaattcttacaagtttatgttgcctcagcatccattttaaatatgagattaactttctcatatcagtagcagggctt

SEQ ID NO: 748921 - DNA, 649 bp, Homo sapiens
ttccactcccctgcatatcgaatgctgctctttcccagataccctgtttttcactcagccatgtctttgcacagattattcctttccttctactttttatgacaaaccttgtctatccttcacctgtacagggaagagtcctcctcctcctcctcgtctagtcactttcctgcctttgctcatacaaagggaaaatacccagcacactcctgcagacacttttcaaatggccctgcaccttctcttcactcctgacctatgccctctcaaagacagagaaggcagcagcaggtggtctgaataggaggagccaaatgtgcacaggatctcttctgttagtgggtgggatttttgtgtgcaaaatgagccatctcttctttttttcccctcccttcccttttcacacattaaaaaacaaacraaacacaggatagcactctcccaggctggaatgcattggcacgatcttaaacttcccaagctcaagtgatgctcctggctcagtctcctgagtagctggggctacaggcatgtgccaccatatctggctaatttttttttttagatacggggttttgccatgttggtcaatctggtctcaatctcctggcctcaagcaatcctcccatctcagcctcgcaaagtgctt

SEQ ID NO: 748922 - DNA, 619 bp, Homo sapiens
ctttccaaattactgactcacataaaccttgcaaaataataaaatgattcttgttaagtcactaagtttctgggtgatttaatatgcatcaatagatcactgaaacacatggctcttcagaatttgggcaaaagatctctattttatgtgcctacatctacccatcattgaataaggactgatctgaaattcaggagtgacgttgggcaaggtggctttcttcaacctagggcaattctcaaaaagtgttgatatctgaggactgtcaatcagcaaaattcccagaaacttagggtgtttcagtgttgaggcaggatctggatggcatatcacagcctccatcacagtccaccacttgtaccacttagatcacttctttttacaagttctgcgagcacttcaagatgctagcrggcctctttcctgtgagaaacttagatgaggaaggtaagtggcatgacccacagcctctgctgctgcagtttgtcttaaggccccagctgattttcatccctctccttctttatcatttattctagactccccacaccttcagttagcacatctcctggtctaagtgacttatctgatggggtgacccagatcctcatcactgaag

SEQ ID NO: 748923 - DNA, 612 bp, Homo sapiens
ccaaataatccacttcttctacatttcatccccctttgataatgtgaggacatgtgactactactaaccagtaaaatgcaaccaaaagtggtatgtgtcatttctaggctgaggcagtaaaaattccatgggtaattatccaacactctcttcttgcagagagagggttagaagacttcaagttacacagggtgcagctaaaataccttagaaggctgggcgcggtggctcatgcctgttatcccagcactttgggaggccaaggcaggtggatcatctgaggccaggagttcaagaccagcctggacaacatggcgaacccctgtctctactaraaatacaaaaatttgcagggcatggtggcatgcacctgtaataccagctactcaggaggctgaggcaggagaatcgcttgaaccctgggaggtggaggttgcagtgagccaggatcgtgccactgcactccagcctgggcgacagagtgagactccatctcaaaaaaataaaatacaatatcttagagacttcataagcctggacacctgaatgactatgtaaagcagacagtattattgccatctctccctctggaccaactgctgtgtcatacat

SEQ ID NO: 748924 - DNA, 649 bp, Homo sapiens
aaaaaatcccatttatcaaagcgtcagcaaatataaaattagaaataaccctaacaaatatgtccagttgaaatgaagaaaactataaaacttttcttgaggtttttaaaataaataaatgaactagagggacatacattgtttctgaatacaaaaactagaatattgagatgtcactgttccaattaaatttaacgtgatttgagtaaaattgacaaaatgatttacaaaatgattctaagcaagaagcataaagggaggactaatatcaaaattaaaaaatagtggtcaacactgtgttgcagtttagcaataatggtcatgagttgaggtattggaggtagagtataggattccaggtctagctctgatttatcagccrcatgactatggcccaggtacctaatgtcttcaaggataactttactcacctgtaaagtgtaggattaaatgagataaagagttgagcaaattgctggtgcttgggaagtactcaaaaagatgttagttgctattttgttgttgaccaaaagttaatggaaggtaatagtctacacatagaccatagtataaataagaatttattatttgttaaatcagctgttctgaattaacagtattactcacactatacgtcaaaataaattcc

SEQ ID NO: 748925 - DNA, 624 bp, Homo sapiens
gacctcgtctctacaaaaaaatacaggccaggcacagtggctcacgcctgtaatctcggcactttgggaggccaaggcgggcagaccatctgaggtcaggagtttgagaccagcctgatcaacatggtgaaaccccatctctaccagaaatacaaaattagccaggcgtggtggcacatgcttgtaatcgcagctacttgggaggctgaggcaggagactcgcttgaacccgggakgcggaggttgcagtgagctgagatcatgccactgtactccagtatgggcaacaagagcgaaactccgtctcaaagaaaacaaaaacaaaaacaaaaaaaggccgggcgcagtggctcacacctgtaatcccagcactttgggaggccaaggcgggtggattacctgaggtcaggagttcgagagcagcctgaccaacatggtgaaatcccacctctactaaaatacaaaaattagccctctgtcgtggtgggcacctgtaatcccagctactcaggaggctgaggcaggagaatgcttgaacctgggaggtggaggttaaagtgagctgagatcacgccactgcacttcagcctgggtgacacagcaagagtccatctcaaaaaataa

SEQ ID NO: 748926 - DNA, 590 bp, Homo sapiens
gcctctgccacatggctctctctgaaaggacctgcttaaggttcttcattaaaacacattttctactgcagatgcatgagagagtgctgtgagttactcctgcaggcatggctacattcatgattatgattgagacagagtggaattaataaaacaatttgggcctggcacaatggctcatgcctgtaaccccagctctttgggaggccagtgccgttggatcacttgagccctagagtttgagatcagcctgagaaacatggcaaaaccccatctctacaaaaaatacaaaaattattgaggcgtggtagtgtgcacctgtagttccagctactcgggaggctgaggcaggaagatggcttgagcccaggaggttgacactgcagtgagccatgatcacacaactgcactccagcctrggtgacagagtgagaccttgtctcaaaaaaattaaaaaaaaaataataacaataaaataatttggagccatttaagttttactgtactgaaactacatcataaagctaaaaacaattaccaatagtaataataataatggaagctaccatttattgagacctgactttagg

SEQ ID NO: 748927 - DNA, 642 bp, Homo sapiens
attttacttatatattttaatatatattttagattattattttggaattttacaatattctatttgaaaagtaacatttatttatgatgtattttcttgcatttaagaatggatcactggctttaaaaatgaggattaaaagattcaatttctcatcctacagatgtttcatcaagaaaagatgaaactggctggcgcagtggctcacgcctgtaatcccagcactttgggaggccgaggtgggtggatcacctgaggtcgggatttcgagaccagcctgaccaacatggaaaaccctgtctctactaaaaacacaaaattagctgggcrtgatggtgcatgcctgtaatcccagctactcgggaggctgaggcaggagaatcacttgaacccggaaggcagaggttgcggtgagccgagattgcaccactgtactccagcctgggcaacaagagtgaaactctgtctcaaaaaagaaaagaaaagaaaagatgaaactgacacatcagagaattctctgactcatgagatggagacatctgctacagagaaagtgggctaaactgtaaataaagacaaaaaatgtgaggaaagttatttttcccttgcctttacagatgttaatgatttaccttattgtgt

SEQ ID NO: 748928 - DNA, 562 bp, Homo sapiens
tagaaaaaaattaataaaatgacagtagtaaatccttacctaccaataattactttgaatgtaaatggattaaattatccaattaaaagacacagagtagctaaatggatttaaaaaaaaagaaaacaagacccaactatatactgcctacaaaagacttgcctcacctataaggatacacatagactgaaagtaaataaatggaaaamgatacttcacacaaatggaaaccaaaacaggagtggctatacttatatcagataaaatagactttaagtcatctgtaaatagagacaaagaaggtcattatattaatatatgataatggggttggtcaattcagcaaaaggatatgttacatatttaggtgctctgatgttgggtaaatgtatatgcacccaatgtcagagcacctaaatacataaagccaatattaatagatctcaagaaacagatagattgtaacacaatactagtagaagagtttaacaccctattttcagcaatggacagatcatttagacagaaagtcaacaaagaaacatcagatatgaactgtacc

SEQ ID NO: 748929 - DNA, 624 bp, Homo sapiens
gaaaactatatatgcctacaatatttccacacaatttcatggagttttctgaccctttgaagcccatccatgaacaccagggcccaaggtcctcaagttaaaaaagccaactatagccaagtgcagtggctcacacctgtaatcccagcaccttgagaggccgaggtaggaggactgtttgagcccagaagttccagaccagcctgggtaacaaagggagaccctgtctttacaaaaaaactttttaaattagccgggtatggtggcacgcatctgtagtcccaactacttgagaagctgaggttggaggactgcttgggtctgggaggtcaaggctacaatgagccatgattgtgccactgcaytccagcctgggtgaaagaatcagaccccgtcacaaacaaacaaaccccaatataataaaggaactgtatggtagttatagttgagacgtactgaaagctttctctgccaggtactgtgcatctagccctgtcatcatgcttatcttgcacatggccctcacagtctgcaggaatcgtggcttgttagttaaattgcagagctgactcctgaggaaggccagtggtgctgggcccaagaggaccttctactgctgctgca

SEQ ID NO: 748930 - DNA, 618 bp, Homo sapiens
acaaatcaggaaaatttttaaatttaaagtaaaaatttaaaacatatgcacttttgagtatacaattaagaaaatgaaaaggcaagccacaactgagtggatatgttctctgaatacatatctttgacaaaggaacagtatctggaatataaagggtagtcttacacaccttaagaagaagataaatattttttaatgggcaaaatattttaatagacacttcacaaaagaagatagaatcacatgaaaagatgatcagtgtcaaatcatcagggaaattcataccaaaaccactttgagagactgctatacatccatgaagacgactaacataaaaacagactgataatgtgaggtgytggtgaacatgtacagctactggaactctcataggttggtggtgagaatgtaaaccatttggcagtttcttataatattaaacacatactatcacacaatccagcaattccaatcctaggcatttatccaagggaaatgaaaatgtatgactatataaaacttttacaaaaaatgttcaaactgggcctaggagcacatgtctatagtcccagctacctgggaggctgaggtgagagcattacttgagcccagatgttt

SEQ ID NO: 748931 - DNA, 548 bp, Homo sapiens
gaatggaagactcccaaatctacatctatagcccagttcttttgcacatgcttttgaaacatacagacaactgtgtatcaaatatgttttatcaaaatctcatactcaagatagacaacactgaaagcatcatcttctcctgaaaactcatttgactactgatgttaatatcaccatcattaatttcttcagacaagaaaaaaattcagagtcttagactcttctctttctcccacccacttacttgaatcattcactaactcacacmagtttatccttctaaatcaatttcaaaaccatcctctcttctattcttactgccattgccttaacttaaacatacatcatctcacacctgaacaattttaatagcttcctaagaggtcactcagcagccattatcttcccttctaattcattatccactcttccttgtcaattctaattttaaaactcagatttgactcgtttattcaaaaactatttactgagtacctacataactctggatactttctaaggcactaaggatacagaagtgacccaaa

SEQ ID NO: 748932 - DNA, 548 bp, Homo sapiens
gaatggaagactcccaaatctacatctatagcccagttcttttgcacatgcttttgaaacatacagacaactgtgtatcaaatatgttttatcaaaatctcatactcaagatagacaacactgaaagcatcatcttctcctgaaaactcatttgactactgatgttaatatcaccatcattaatttcttcagacaagaaaaaaattcagagtcttagactcttctctttctcccacccacttacttgaatcattcactaactcacacaagtttatccttctaaatcaatttcaaaaccatcctctcttctattcttactgccattgccttaacttaaacatacatcatctcacacctgaacaattttaatagcttcctaagaggtcactcagcagccattatcttcccttctaattcattatccactcttccttgtcaattctaattttaaaactcagatttgactcrtttattcaaaaactatttactgagtacctacataactctggatactttctaaggcactaaggatacagaagtgacccaaa

SEQ ID NO: 748933 - DNA, 497 bp, Homo sapiens
tactttcaagggaattaggttgacaagaaggtgcagtttatttttcatgaagtagaaaacagtaatggaaaaccttactaaataagaaggtatatttcaaagaagaagaatgaccttagcctttgcaaaacagttttctaaagtcatgcttgttttcagaaaacttatttagtcaaaaaaatccggaccagcccactgtgcttcctgcttctataggcttctagtttgcaccagctactaatttacccgacctcagaagactaggtgacaatcaattaattattgatgattgccataaatgcatatttccacttaaaaaaaacctrcaagataaaataaaaatcggaaaaaagctaactttatctcaagctacctgtttgattttagttaggttaatctgaatatttggggagtttcaggttgttttatataaacacacacacaggccattgctgagatttgttgctcttatttagagatcgttggcaccaaggttt

SEQ ID NO: 748934 - DNA, 629 bp, Homo sapiens
ttggtatagtgtaggcgtctgaccccaactcacctccttttatgtgcggctgatagtgctgtcagaaatctagaaaataataaggtccaggggtcttttgtgactatcacacacagcccaaggggctggaacaaggcaccaagcaggaagggataggctcagagccagatcacctttaaacctctgcccagtggtgcattccccaaaatttcagatcaatccacactggtgcttttctttgccagctcagcaattccttctgaaattttattcagtgggtctgtgctccctctttaacagagtttacatttctttcttayaaggaattacaaaaaggtatgaaagaatcagaaaaaggtatgatttatgtttaatttttaaaaattagatatcttgatttatctccagcttgagaacaatttagaaattgttcatcttcaggaaaactcccttggataaagcatttgcttcagtcattcactggatattaataagaagctttgtgaataagcccagtttgcaccagcattgagaatacagatgttctcttttgggtttcatttatcccttcttgagcactactatatgtgaggcactaggctacatgcattatctttattatctaattg

SEQ ID NO: 748935 - DNA, 602 bp, Homo sapiens
caccagagaaagatgaagtccaacttaaagaaatcaaaaaaagatactgaatatgaatggaaaaatgtccagtgaaatagcacaaataaaaaacaatcacaactctggaaataaaggacaaacttagagaactgcaaaatgcactagaaagtctcaacaagggagctgaacaagtagaagaaagaacttcagagccagagcacaaggctttcaaattaacccaatctggcaaagacaaagacaaaagaatttaaaaaaataatcaagggctccaagaagtttggcgttatgttaaatgaccaaacctaagaataattggtgttccagaggaagaagggaaatctacaagtttggaaaacatatttgagggaatagaggaaaacttccccagccttgctrgagatctagacatccaaatagaagaagctcaaaaaatgcctgggaaattcatcacaaaaagatcatcagattaaaccatcctgcaactcttgatcatggtggattatcttttcgatatgctgttggattcagttaactagtattttgttgaggatttttccatctatgttcatcagggatattggtctgtagttttgttgttg

SEQ ID NO: 748936 - DNA, 571 bp, Homo sapiens
aatgagcagagtccccctctatgtgtgtgctttcatagaagtgcccgttacacttctcccgcaatttacgggaccacatctggttggctatcttggtcagctttaggatattggctcgaaaaagggtcataaattttattttcaattttgtttctgtggcttttatactttaatatgcccttgcagacgtgccgagtgtgatgttccggttaaggagagaaatggctgctagagaggagtgctccacctgggaaagggtttttggyctcagaaagaatccctctctcctttgcgggggtcaggccaagttggggctcaagttagtgagtgcgtggtgtggccttgccggtatgtcttttgtctggccagctgtctttaggaggctaaccctccttccttttagttggcactgaccccacctctggtgacagagtttgagacgtgactcagatccagccagtcagataatttgaccctccttgggatggggagagaccatcgaagctgggccagtcattgccttcattggagctgctgggcaacaggctgcccaccccctgggtccagctat

SEQ ID NO: 748937 - DNA, 552 bp, Homo sapiens
cacgctctggaatgacatacccttctgtgtggttcaactgacagtgtccttgagtcatgaaaggaaaatatttccaattgattgtttcacactgtcaattgctcaaaatcaagatacattttggtttgctgcaaatctggattatatcttgtacgttcagcttgtttttcttttggatagaagaaactttcaccttacccaacaaatgcctcctagcttcctgcttcctaaaattctaattgctcagggtctgtttcattmttattcttgaatcctatccaaatcctggactaatttggaccaggtgcatcatacacgactctgcatccctttgcttttcatttctccctcttacgttgcttgcctttgtcgtgacttcaggttcctgcagtgtctcaagcacgctgttctctaaggagcccatttctcacaggtccttccttccagagccttctgacctcccactccagtggaatggttaatatccaggcttgctattcaaatgcagtcctgggtcttctggtggctctttggggttcaaaactattgttt

SEQ ID NO: 748938 - DNA, 551 bp, Homo sapiens
ttattgaacacctctatttgcaaatttgttttctatttcattaatttctgctattatattctttacacctttcccttttattttctttaggtttaatttgttattttcccaattccttgagatggatgctcagctcattaatttaaaaaatgttaattgtcagatacacatmaaatatatcatcttaaccattttgaagtgtaaggttcagtaacagtaagtagattcatagtgttatgcagccatcactaccatccatctccagaactctttttatcttgcaaaactgcaactctgtacccacgaaatactaactcctttgcccccataagcccccgaaaatcaccattctactttccgtctctgttaacttgaccactctacgtacctcatataagtggaatcacttgtatttatcctggctcattaaattttatcctctttacttctctcacatatccatttcagtatagcttagcttcatctcaaggttttatatcacatatttatcattcagttcaaagaaaaaaattttttttttttttagacgg

SEQ ID NO: 748939 - DNA, 551 bp, Homo sapiens
ttattgaacacctctatttgcaaatttgttttctatttcattaatttctgctattatattctttacacctttcccttttattttctttaggtttaatttgttattttcccaattccttgagatggatgctcagctcattaatttaaaaaatgttaattgtcagatacacataaaatrtatcatcttaaccattttgaagtgtaaggttcagtaacagtaagtagattcatagtgttatgcagccatcactaccatccatctccagaactctttttatcttgcaaaactgcaactctgtacccacgaaatactaactcctttgcccccataagcccccgaaaatcaccattctactttccgtctctgttaacttgaccactctacgtacctcatataagtggaatcacttgtatttatcctggctcattaaattttatcctctttacttctctcacatatccatttcagtatagcttagcttcatctcaaggttttatatcacatatttatcattcagttcaaagaaaaaaattttttttttttttagacgg

SEQ ID NO: 748940 - DNA, 551 bp, Homo sapiens
ttattgaacacctctatttgcaaatttgttttctatttcattaatttctgctattatattctttacacctttcccttttattttctttaggtttaatttgttattttcccaattccttgagatggatgctcagctcattaatttaaaaaatgttaattgtcagatacacataaaatatatcatcttaaccattttgaagtgtaaggttcagtaacagtaagtagattcatagtgttatgcagccatcactaccatccatctccagaactctttttatcttgcaaaactgcaactctgtacccacgaaatactaactcctttgcccccatmagcccccgaaaatcaccattctactttccgtctctgttaacttgaccactctacgtacctcatataagtggaatcacttgtatttatcctggctcattaaattttatcctctttacttctctcacatatccatttcagtatagcttagcttcatctcaaggttttatatcacatatttatcattcagttcaaagaaaaaaattttttttttttttagacgg

SEQ ID NO: 748941 - DNA, 617 bp, Homo sapiens
acacaggatgcagacgctctgtctgcaaggcatttttttctaaggaaaattaaattccaaaaatatttgcactgacttgaaaaaaaaaagcttctcctcacgtctcccagtttcagctgcattcctcatttgtatgttgagtatgaatccctttttaaaaagtttaaataagaacagaagctatccaagattggagaacacattgtgtaaatggaaagaacacrctaaatgggaagcaagaaaaagtggagagaaagccccttccttccccattaaatggcatggaaaggcagccctcagaagctccctcctgatcatccagccatcagatggcaagggagagggccgtgtaaggagtgctgtgtttggggcacaggtggggccagcatgagaggggagcccgggcagtaactccaggatgggatgagagtgccatccccagaggcagaaggcaagcctgcagagcttcactgtggcccctgcagatttgtcagaacggcatctgcaggcagcacattttaggaacacaagtgatcgactgatcccggcggccttcctcagctgggaataacagcagaagggaatgtcttaggatccagagatgggaccagctagct

SEQ ID NO: 748942 - DNA, 616 bp, Homo sapiens
gaggctgggtacattcctatcagccttcctcgggcacccctcctggctgccccctctgctccccagggctggtgggctctgcaacctgaaaaacccacctcttctcagggccacctacaactgtgagttagggaaagtgctggcaacagaagcaacctcatggtctcagggctcatctcccatctcataacccccttcatggggccacagacaccccgggcctgagcttcagcaccttccccattacctgtccccaggaggacatgcacctaagatcaaggcaaatgcaggccccggggcacttctctctcccagggagaaaacacactgagccacagtcacccatcggaatctatactaagtgtcataggtattctcagctaaggggcagtattaataatggaaagcagacagaggaaccgtaacagagccaaatggaagcaagaagggtgggaaacataaaatgcggaaacacrgataatgataaacgagacctgcacactgaggcttgcggcaggagcgtcccaggctgggggcctgtgtcacgggtaagaggggaagtcaggtgcagaggacccccgggacgccaggtccccattagaagcaacggcccaga

SEQ ID NO: 748943 - DNA, 569 bp, Homo sapiens
accttgaaaactttatgctaagtaagccagacacaaaaggacaaatatggtatggttccaattatatgaggtacctagaatagacaaatttatacagaggaacagaggtcactaggggctgggaggagggagatattgtttaatgaatacagaatttctgtttggaataatttttttaagttctgggaatagtggtaatgaacattgtgaatgtacttaatgtcactgaattatacacttaaatggtaattttgtgttaagaatatcttatcacaataaaaaaatctgaataggcctatatctattaaaaaataaaatttgcaagtaaaaacctttcctgaaagaaaactccagctcyacatgactttcctagtgaattctaccatacattttagggaataaataataccagctccacacaaactctttcaggaaatcaaagaggacagaataccaactcattctatggagccaggattaccctgttaccaaaatcagaaaaagacaagcaaatacctgtcatgagcatagatgcaaaatttcttaatgaaacttaacaagctgaatct

SEQ ID NO: 748944 - DNA, 646 bp, Homo sapiens
gcctatgcgggacactcccaggatcccaggaaaaaaatctccgtctctctcaagatcagatcctgactgaggtcctgggaaaggctgccaggactccaggagtcagctttcccaggagtcagctttcttgatgatggcagcttcggccctaagactctgccacggctctgatttccccatgaggcgcgtcactcccaagtctgccccctcatgggcacccgtatgttggaggtgatgatgggagtttggctcgtgttttggcagtacttttggccaaggactcaggaatgcccacgtgcttcccagggaagctggattcacgggaatactggaagactctgggaaatttttcattaatacacttgcatcctcaccttcaatgtggaacatcttcactacaagctaagttgaaggcatgtggtggcttaggctgaagacaaaagtggagcctcatgcctccacacccctataaattataagtgaccctcccrgacacgtgcagaggtgaaggaaaggcaaaaaggaagtagtaaggcctgccctcttggccttcttacccacccagactcagagtggaagagggagtgtgatcaaggcttttctgctttttcatgtgtggaggcccgtcaccaggaggcagaagctg

SEQ ID NO: 748945 - DNA, 593 bp, Homo sapiens
taaattcaaaatggttaaaaggttccaatctttgtcctaaagcacatattgaaaggtgcattcagagctgagatgcaatagattaaaaactgcctgtgtgagtttcctgtggctgctgtaacaaattaccaaaaacctggtgcttacaacaaggcacatttgttctcttacagttttggaggtcagaagtcccaaatcagtttcagcaggatggaatcagggtgccatgagggccgctccctccagaggctccaggggggtctgtttccttgccttttccagcttctagagctgcattccttggctcgtggcccyttcctccgccttcaaaggcagtggcttagcgtcttcaaaattctctccacgctgtcttctcatggccttctcttctatgtcagatttccctctatcctctcttatcaggacatttgtgattgcatttgggacccacccatgtaatccaggataatgtctccttctcaagatcctcaactcaatcacatctgcaaagtcccttttgccacataagatacatttgcaggcttcatagattcagatctgcgtatattatttgagggccattatttaaccta

SEQ ID NO: 748946 - DNA, 593 bp, Homo sapiens
taaattcaaaatggttaaaaggttccaatctttgtcctaaagcacatattgaaaggtgcattcagagctgagatgcaatagattaaaaactgcctgtgtgagtttcctgtggctgctgtaacaaattaccaaaaacctggtgcttacaacaaggcacatttgttctcttacagttttggaggtcagaagtcccaaatcagtttcagcaggatggaatcagggtgccatgagggccgctccctccagaggctccaggggggtctgtttccttgccttttccagcttctagagctgcattccttggctcgtggccccttcctccgccttcaaaggcagtggcttagcgtcttcaaaattctctccacgctgtcttctcatggccttctcttctatgtcagatttccctctatcctctcttatcaggacatttgtgattgcatttgkgacccacccatgtaatccaggataatgtctccttctcaagatcctcaactcaatcacatctgcaaagtcccttttgccacataagatacatttgcaggcttcatagattcagatctgcgtatattatttgagggccattatttaaccta

SEQ ID NO: 748947 - DNA, 638 bp, Homo sapiens
acctccagaaccacgagacaaatgaactgttattttttcataaatgactcagcctgcagtactctgttacagcatcacaaaatatgctaagacacccctgagactcatcggccacctgtctgtcagctttgccgcaaaaatgatttgggagcagctatagtcaactttcctcagactacctcctgctggcacattacggccacctgctgtgtgcctggtgtttttctaggttcttggaataaagtgaacaggccgggtacggtggctcacgcctgtaatcccagcactttaagaggctgaggtgggcagatcacctgaggtcaggagttcgagaccagcctggccaacatggtgaaaccccgtctctgctaaaaatacaaaaatgtgctgggcatggtggcaggtgcctgtaatcccagctactcgggaggctaaggcaggagaatcrcttgaatccgggaggcagaggttgcagtgaaccgaggtctcgtcagtatactccagcctgggcaataagagcaaaactccaagtcaaaaagaaaaaagaaaaaagaaaaaaaaaacagaaagaaagaataaagtgaacaaagcaggcaaaaatacctgcccccagaaagatcacattcagtggatgtgcc

SEQ ID NO: 748948 - DNA, 594 bp, Homo sapiens
tatggaagtgacacagtctaatgctggcctcagagccagcagggagctcaggctgggccacttgtccacctgggggttgaacagcctgccccaggtttgctgaggtccccaggaccaggccaggtcaagctgggatcacacatgttccctctccagcctagagatgtcaaacaggtagattcctctcccattcatatctcctatccttggcccacagcccttcccttcttggacttatcagagaccarggtgctgggcagggcttcaggtggttaaaaagtgaaagttcttgagtgaagtccaaaggcgcacacctgagagctgagtgggcaaaaggtcgctggctgagtgctggggatagtctggctttggagtcagatggacgagtccaaatctcagctccttaccccgtaacatgaagccctcagctctctgaacctctgtttatttgcaaaaccttgccaagggcttcaaacaggatatcctcataaaacaagtatgcctatttgggggactaagtgtgtgaagtgctgagttttaggagtgcagtaaatatcggatccctccttcttcacctcaggtttgcgagttaac

SEQ ID NO: 748949 - DNA, 594 bp, Homo sapiens
tatggaagtgacacagtctaatgctggcctcagagccagcagggagctcaggctgggccacttgtccacctgggggttgaacagcctgccccaggtttgctgaggtccccaggaccaggccaggtcaagctgggatcacacatgttccctctccagcctagagatgtcaaacaggtagattcctctcccattcatatctcctatccttggcccacagcccttcccttcttggacttatcagagaccaaggtgctgggcagggcttcaggtggttaaaaagtgaaagttcttgagtgaartccaaaggcgcacacctgagagctgagtgggcaaaaggtcgctggctgagtgctggggatagtctggctttggagtcagatggacgagtccaaatctcagctccttaccccgtaacatgaagccctcagctctctgaacctctgtttatttgcaaaaccttgccaagggcttcaaacaggatatcctcataaaacaagtatgcctatttgggggactaagtgtgtgaagtgctgagttttaggagtgcagtaaatatcggatccctccttcttcacctcaggtttgcgagttaac

SEQ ID NO: 748950 - DNA, 636 bp, Homo sapiens
ctagagatgtcaaacaggtagattcctctcccattcatatctcctatccttggcccacagcccttcccttcttggacttatcagagaccaaggtgctgggcagggcttcaggtggttaaaaagtgaaagttcttgagtgaagtccaaaggcgcacacctgagagctgagtgggcaaaaggtcgctggctgagtgctggggatagtctggctttggagtcagatggacgagtccaaatctcagctccttaccccgtaacatgaagccctcagctctctgaacctctgtttatttgcaaaaccttgccaagggcttcaaacaggatatcctcataaaacaagtatgcctatttgggggactaagtgtgtgaagtgctgagttttaggagtgcagtaaatatcggatccctccttcttcacctcaggtttgcgagttaaccagtgaggggccttccaggcctagtgctcttgtagaccgaaccactagctttcctagagaaggyaactgaggcctagagagtggcctccaggttccgtgctctgtggcagagctggccttggctccaagtcccagggttcccagctcagtctcagctgatgcctcccagcctggcggtctacgctgcctgctacattcc

SEQ ID NO: 748951 - DNA, 633 bp, Homo sapiens
agcgagaggcgccgggacctctgagcctgggcccaccgcgctggggctggtcgggagagccgcggacgcccgcgcgcatgacgtggggcacacaagacgaatccggcgccccgagggtccggcgccggccagggagtgcttgcgctggccggggagtctgcttgcggcgtccggcgctggctccgcggcgctgcctcccgccaggctccgctccgctgggtttagtggggctcctagcgcagtgagggcgccccggcwccgcggcgcgctctgctgtgctctctcgctgttcgctggctcccgcgcggaggggggaccccgctaccctgacgtaaggagtccggggctgagcggcggaggcggcgaagcagcgcgcgctgccatcactcgggagacggagccctcatgtcatcagcctcctatctggcggcgtcctcggcagaggcggtgaaggcgcggttccccctggcggctcccaggagccacaagtgggcgcagcgggcgcggtcccaagccggggcacatcggacacacccacccgcggccacactcacgcgccccccaccgataacacacacagacacccacgcacgcagtggcggggcacgcacagccacccccacatggccacga

SEQ ID NO: 748952 - DNA, 649 bp, Homo sapiens
ttgtaaaagccgaccagaggaaggcagtgcacgaagtggaaagagactggatcttggcaccagagctcggttcagattctggcctcttattgttgggtgatgccctctctgagcctgagcttcctcacctgtctaattggtgtgatagtaacaactcccaggtgctgatgaggagtacacaagatcatgtattcaaagtgcctggcacaagccgggcscagtggcgtgcacctcagctactcagaaagctgcggtgacatcatttgcacccaggagttctgggctgtagtgcacccggagtgcccattgggggcccatacaatgttcagcatcaatacagtaacctcctggaagcaggggatcgccaggttgcctcagggaggggtgaaccagccaaggttgaaaatagaacaggtcaaaactcccttgcagatcagtcatgggatcgtgcctgtgaatagccactgcactccagcctgggcaacttagcgcgacctcgtctctaaaaatgtatttattttttaaagtgcctgtcacacaatgagcactgaaacattttgtttcctcatccctttcttctcacagtgggagaagcaacatgaagatgaggagggggtgaggctgaggcccaaatcaggctgtcacgctg

SEQ ID NO: 748953 - DNA, 649 bp, Homo sapiens
ttgtaaaagccgaccagaggaaggcagtgcacgaagtggaaagagactggatcttggcaccagagctcggttcagattctggcctcttattgttgggtgatgccctctctgagcctgagcttcctcacctgtctaattggtgtgatagtaacaactcccaggtgctgatgaggagtacacaagatcatgtattcaaagtgcctggcacaagccgggcgcagtgkcgtgcacctcagctactcagaaagctgcggtgacatcatttgcacccaggagttctgggctgtagtgcacccggagtgcccattgggggcccatacaatgttcagcatcaatacagtaacctcctggaagcaggggatcgccaggttgcctcagggaggggtgaaccagccaaggttgaaaatagaacaggtcaaaactcccttgcagatcagtcatgggatcgtgcctgtgaatagccactgcactccagcctgggcaacttagcgcgacctcgtctctaaaaatgtatttattttttaaagtgcctgtcacacaatgagcactgaaacattttgtttcctcatccctttcttctcacagtgggagaagcaacatgaagatgaggagggggtgaggctgaggcccaaatcaggctgtcacgctg

SEQ ID NO: 748954 - DNA, 518 bp, Homo sapiens
aaaagatacgtgttggatcctttgagaaaaactcgagatgttatcataacccattgcttccgaggctgtgacatgcccaagatcaaaatccccatttaggggcactgtcaagatgtggaccaggtacccatgattctggatcacagcctcctttctgtctggttatgcatctctgtaaatcttggccctgcatcctttttccaaagtctacagcttccagtccctcatggcatgagcagtggccaagtggcatgtatttagtacaacagtgctatggagaaactctctggatgacctccttataagcgttcttatcaccttatcaccrgaaattctccagcttattctacgaaaaactccattactgatcgtctctttcaatttaatctcttcccattagccagggttgtcagtgcttgctcatacagctctgtgctgtgttggttgaaaggaagccagctttactgaggaaagcaaaggatgctcttcctatgcagaggagtcaggaaggctctggt

SEQ ID NO: 748955 - DNA, 491 bp, Homo sapiens
tcataaaaaatactctaataggctcaactgtgtattttttaaaaataatgacaattgagtgatactaatataatacagatcctgcttttgtagaaataagtgtatccacaaataaaaatgacctgtcaaacaaggcaattttcatacaccaatcacaagtgtccattgtcaccctctccgtgttatgactgctcaaggactctcattgcttcctaagtaaacttaccctgcaccwcaacagcacatggtttactcattctcagcagatattttagggttttcaatctaactttgaatttagaaatcgaaaatcttagagttaatggctagggtgagaaagttaaatgtatagagaaacagtgaaactgaacaagataattgtcctttcatttgcctatttgaaacatttcttctaaaacttcttaatcataaaagtggtagatcagatgacaaaataccaaaataaatttcctatttagtagcttataagg

SEQ ID NO: 748956 - DNA, 610 bp, Homo sapiens
gtgaaagccatcattcacagtcactgcacttaagcacatcatgtgcggtggctccttcatcctgagggcagccctgtggggtaagtgttggcatccctattgtacaggtgtctcagagagctcaagcagctgggatgatgtcactcaggaaaggccagagtcaaactcctctctccctggttcctttgtgtgttcttgacatccacaccttccttttaccctgagttcttgctkaaattctgggatcctgactcccagctttaccctttatttcaaattcttggagaggccctaatccaaacactttgatcatctgagtagaaagttgctcccctactggaggtactggctatgccactgaggtggcaaagtaaatttttacaaaatgagttatatcattcttcagtcctaagagtacctccagctaggaaagtctgcattttgtgatgaaacattacattttacaaatatctggccccatatttgtggtattcttttttttttaggttttactcaggtatgaaaaaataatcaccttactttgggaagtgttaagaatgctaagattatttgtatgttaatgtgttttgatcattgagaattcacaaac

SEQ ID NO: 748957 - DNA, 610 bp, Homo sapiens
gtgaaagccatcattcacagtcactgcacttaagcacatcatgtgcggtggctccttcatcctgagggcagccctgtggggtaagtgttggcatccctattgtacaggtgtctcagagagctcaagcagctgggatgatgtcactcaggaaaggccagagtcaaactcctctctccctggttcctttgtgtgttcttgacatccacaccttccttttaccctgagttcttgctgaaattctgggatcctgactcccagctttaccctttatttcaaattyttggagaggccctaatccaaacactttgatcatctgagtagaaagttgctcccctactggaggtactggctatgccactgaggtggcaaagtaaatttttacaaaatgagttatatcattcttcagtcctaagagtacctccagctaggaaagtctgcattttgtgatgaaacattacattttacaaatatctggccccatatttgtggtattcttttttttttaggttttactcaggtatgaaaaaataatcaccttactttgggaagtgttaagaatgctaagattatttgtatgttaatgtgttttgatcattgagaattcacaaac

SEQ ID NO: 748958 - DNA, 513 bp, Homo sapiens
caaacactttgatcatctgagtagaaagttgctcccctactggaggtactggctatgccactgaggtggcaaagtaaatttttasaaaatgagttatatcattcttcagtcctaagagtacctccagctaggaaagtctgcattttgtgatgaaacattacattttacaaatatctggccccatatttgtggtattcttttttttttaggttttactcaggtatgaaaaaataatcaccttactttgggaagtgttaagaatgctaagattatttgtatgttaatgtgttttgatcattgagaattcacaaactttgaaagcaaatttttcagaataattgagtcacactaatgtttagaaataataattggaattagtaaaaattctgcggcaaaaacattctctgctctaatggagtaaagataaatgtggcgagaaatgttaatacagactcacttcagcgatttctcctgttttggtcttggtttttatctccttctgagtggaattct

SEQ ID NO: 748959 - DNA, 560 bp, Homo sapiens
caaatagccaagaaagtcaagctgaaatcaaaaggaaaataaaaaaaacctagaaataaatgaaaataaagacatgccataccaaaacctatgagttgcagcaaaagcagtgcttagagggaaatttatagctgtaaaagcttatattaagaaagaagaaaaccctcaaagcaatacgttaaaattgcaccttaaaacgctggaaaaaggaggataaattaatcctaaagaaagcagaagaaagcaaataataacaatagatcagacatcaataaaacagaagataggaaaaygagagacaaatcaatgaagccaaaatctgattctttgaaaagattaacaatattgggaaatctttagctagaatgataaaaagaaagagagagagagagagaaagcaaaagacagagagagaagactccaactgtagagtcagcaaggaatgaagagagattaccactgaccttacaggaatgaaaaaaaaatagaggtgaatagtatagataattgtatgtcaaaatattagataccttatattaaactgacaaattcctagaaag

SEQ ID NO: 748960 - DNA, 590 bp, Homo sapiens
aagagcgaaactctgtctcaaacgaacaaacaaacaaagataatggatgagacagcaacttgggaagaaaatgactttaaacaattgccccaggcccagcacggtggctcacgcctgtaatgccagcactttgggaggccgaggtaggcagatcacttgagcccaggaatttgagaccagcctgagcaacatggtgaaaccccatctctacaaaacatacaaaaattagccargcgtggtggtgcatagttgtagttccagctacttgggaggctgaggtgggacgatcccttgagcccgagaggcagaggttgcagtgagctgagattgtgccactgtactccagcctgggtgacagagtgagaccctgtctcaaaaaaataaaaatagctgggcatggtggctcacccttctaatcccagcactttgggaggccgaggcgggcggatcacctgaggtaggtagtttgaccagcctgaccaacatggtgaaaccccgtctctactaaaaatacaaaagaagttagccaggcatgatggtctatccctgtaattccagctagttgggaggctggaggcaggagaatcggt

SEQ ID NO: 748961 - DNA, 498 bp, Homo sapiens
ttggagtgaaatagactttgctttatgttttagctctgatacttatccattgatgaccttgatcaagttatttttcgctgggcttcgggttctttggctgtaaaatgggtctgcttctttatggaattaatttaagggtaaaattagaaaacataaacaggtattcagcatggattaacaaatagtgatcgttcctttttttctttctcctcctttgattattgtcattactaacattaatggttacaaaacaatatttatgatcagttgacactgacattattttatgtcacagaatcaacagtgatgcaattaccaaacatagaaaaataagaggaaaggtwgagagaagagaaggaaaggaaatgaagaaggtgctgagtagaggggctgcaaaaacgtttcttacgaatgctccttttttaacaataaagctaaaatataacaaaaattttaggtgggaaattaaagaaagaaaaaaataaaattaaaaagaga

SEQ ID NO: 748962 - DNA, 517 bp, Homo sapiens
tatctagagattttgagatttttatctttcagatgaacattagaaattcgcgaagtcacaaatgtcaacaaatggagaattaagacatactatcaaatgtttcaagggccatcatgctgggagaagggctaggcatattctgttccttgagtgacgtgcctaggataagagagagagcagattrggaaaatggaaagaacatgtcttaaattgagagacagtccaaaatcaaatgaactggaaatgttgatattaagccaaaacagccacaatcttaggctattttcatgaaatggatgggttcggtcacctctgagacctacaccaaatttgaaattccatgagattttatgaaatagagtaggtatgctaatttagttttcaagtttcacaagttaagtatatcttctaatgcttgacaataatgctttatttttttaagtctacatgagaagttgctgaaaatttgaatagttaaaaaaagaagtttacatgctgctcatgttttttaagagtc

SEQ ID NO: 748963 - DNA, 645 bp, Homo sapiens
tacctttgtcatctttgtatttaccaaaggcatctaaaacagaacactggcttgttcattggcttgatttaaagggcaactgcaaatttattgaataaatttaataggattagaaagaataacttttgttttcctgtttaattattttttaatcctagagaaattagaggggaggtcagacgtaggattcctaaacaaaagaaagacaggaaagaaaaagagagtatgggaggtggaaaacaataaatgccttctggatttcacccagtgaagttaaatttctttaggtataaattaagaagaatgtatttactttttatttatttatttaattwattaatttatttatttattattatacccagagcccagcatttgggtgactttatataggatcagttttagtgaactcagttactttattttctattgtttttctaatattctagttgctttattcatgttcttttttacatttaatattctatcagctttattaactattcttggagtttagttttataaagatattgtttttgtaaaaatgttctcctgctaaagaacgtacttgcctgtgaaaaaccaggagaatgctgtgtagaaagtagcgcaggtaaaaatacctgggtgagatttgactactct

SEQ ID NO: 748964 - DNA, 645 bp, Homo sapiens
tacctttgtcatctttgtatttaccaaaggcatctaaaacagaacactggcttgttcattggcttgatttaaagggcaactgcaaatttattgaataaatttaataggattagaaagaataacttttgttttcctgtttaattattttttaatcctagagaaattagaggggaggtcagacgtaggattcctaaacaaaagaaagacaggaaagaaaaagagagtatgggaggtggaaaacaataaatgccttctggatttcacccagtgaagttaaatttctttaggtataaattaagaagaatgtatttactttttatttatttatttaattaattwatttatttatttattattatacccagagcccagcatttgggtgactttatataggatcagttttagtgaactcagttactttattttctattgtttttctaatattctagttgctttattcatgttcttttttacatttaatattctatcagctttattaactattcttggagtttagttttataaagatattgtttttgtaaaaatgttctcctgctaaagaacgtacttgcctgtgaaaaaccaggagaatgctgtgtagaaagtagcgcaggtaaaaatacctgggtgagatttgactactct

SEQ ID NO: 748965 - DNA, 636 bp, Homo sapiens
gagcttttgcaccacaaaaggaacagtcagcagagtatacagacaactcacaaagtgggagataatcttcacaatctataaatctgacaaaggactaatatccagaatctacaatgaactcaaacaaattaggaaggaaaaaacaaagaatcccatcaaaaagtgggctaagaacataaataggcaattcccaaaagaaaacatacaaatggccaacaaatatgaaaaaatgctcaacatcactaatgatcagggaaatgcgattcaaaaccacaatgcaatacctccttacttctgcaagaatggccataatcataaaatcaaaaaataatagatgtttgtgtggttgcagtgaacagggaacactactacactgctggcgggaatgtaaactagtacaaccactatggaaaacagtgtggaaattccttaaasaactaaaagtataactatcacttgatccagcaattccattactggctacctatacagaggaaaaaagtcattaaatgaaaaagatagttacacacgcatatttatagaagaacaatttgcaattgcaaactgtggaactaacccaaattctcatcaatcaacaagtggataaagaaactgtgagagatatatgtatatata

SEQ ID NO: 748966 - DNA, 552 bp, Homo sapiens
caagatataccttgcaaagacaactgtgcccctaatatctaaactctacataaatgaaactttacaagatgtttttcatgttaccttaactcttttaaatgaagacaccaagtcctgaactgccagctttggaaagaccatgagagactgtgaggccaaacactttctccctaactttatttctgccatgaaatcagctcagagagcccgggaaagtcattcaatattttgagacctctgctccagtgatattcaggtcccatgtatgtgggatgactagaatgtttaytcatttaggtcaggtctttatttttaattaagaagtatttattatattcctgctatgtgccagacactgtgtggttgcaaaaagatttctcattctgtattactcagtcattggagtctgtgtaggtcacttaccctacctatgtcatctgtaatatggatgtaataatgtatgctttcccgggtgtgagggacagatactatataaacatttttagtgtaaaagtttgagagatttttcttagcataaagcttcttttatat

SEQ ID NO: 748967 - DNA, 591 bp, Homo sapiens
gaagttaccagtacgaactctatcagttattatttctacagctgttgcaatgttaaaaattagcatttaggtcgggcacagtggctcatgcctgtaatcccagcactttgggaggccaaagcaggtggatcacgaagtcaggaggtcaagatcagcctggccaagatggtgaaaccccatctctactaaaaataaaaaaattagccgggcgtggtggtgggtgcctgttaatcccagcaactcgggaggctgaggcagagaattgcttgaacccgggaggcagaggttgcagtgagcygagatcacgccactgcactccagcctgggcgaaagaacgaaattccgtctcaaaaaaaaaaaaaaaggtgtttagatttagataccatcaatgttttccattggctagtggataaaatctaagttccccagttcggagttcaaatctatcaactagtatttgatataatatactttccgtctattggaacttgctacgtggagaatattcatatcccagttttaacttttgatttatttttaattaatttttaatttgggggtactagtaggtgtgtatacttataggttata

SEQ ID NO: 748968 - DNA, 591 bp, Homo sapiens
gaagttaccagtacgaactctatcagttattatttctacagctgttgcaatgttaaaaattagcatttaggtcgggcacagtggctcatgcctgtaatcccagcactttgggaggccaaagcaggtggatcacgaagtcaggaggtcaagatcagcctggccaagatggtgaaaccccatctctactaaaaataaaaaaattagccgggcgtggtggtgggtgcctgttaatcccagcaactcgggaggctgaggcagagaattgcttgaacccgggaggcagaggttgcagtgagctgagatcaygccactgcactccagcctgggcgaaagaacgaaattccgtctcaaaaaaaaaaaaaaaggtgtttagatttagataccatcaatgttttccattggctagtggataaaatctaagttccccagttcggagttcaaatctatcaactagtatttgatataatatactttccgtctattggaacttgctacgtggagaatattcatatcccagttttaacttttgatttatttttaattaatttttaatttgggggtactagtaggtgtgtatacttataggttata

SEQ ID NO: 748969 - DNA, 570 bp, Homo sapiens
gtacacatttgatgccaatgattttcatagcatgatatgctacttactggtataaaatactaatgtgtgtgcatatgtatgaatttaaaagtgttattccaggctgggcagggggtcccatgcctgtaatcccagcactttgggagcctgaggccggcagatcccctgagtcaggagtttgagacaatcctggccaacatagtgaaaccctgtctctactaaaaatatgaaaattagctgggcatggtggagggcgcctgtagttccagctacttgagaggctgaggcaggagaatcacttgaagctgaraggtggaggtagcagtaagccaaaattgggctactgcactcccgcctgggtgactgagtgagactctgtctcaaaaataaaaaaaaaataaaaatttaatccataccaactttaaagcaaattttcccttctatacagttctattagacatgatgcaagcccttgaaagtgcttgttaactaaaattatttatctaattcttcagtgcttgttaactaaaattatttatctaattattcagtgatcttgatattggagat

SEQ ID NO: 748970 - DNA, 548 bp, Homo sapiens
cacccatgaaccttaccctcatggaaggcccagaggatactgtcttcaccaaatcattaagaaatgcattggcaaggcagcagctttaataagttctgtggtagctgactctgtaggtcagagatgatggtagaggakgcttcactggaattgggctccctatttttaatgagaataattaataagatcctacatgagaaaggccaggatgtagaacttaaaaatcagcagctaaaactaggcataattgccataaaagttcacaaggacaaagtagtaattagaatattgacctgtagggatgtgtggtgattgttaattaatcacacctaaggatggaaagtttattttttactgatttacatatacaagaaaaaaaattctaggtctggtaccagttgtagcttattaacatagagaattgtgatctcttacatgatgcctagacctaagctattttatagatctagagtccttcgatagagaaaaagaccctacaatgtgaccagtgcagtatactttaagtaatagctcaagccttcccccaa

SEQ ID NO: 748971 - DNA, 602 bp, Homo sapiens
tgtgctgattggtccatgggcagccatgggcaggcctggaaaaagcaccatctcgtcacagaaggcatcaaggaagttctcactccaggttgtggactccactgggaactggaagcccagtgcccaggcttcaggctgtccctggcttgaaggtgggatttcacaggggaacagccccctcccgcctaggaacctgtctgcctcccactgccatcaacatgccatccacagagtccaggatgtctgcaccgaggggcacccacaaacccatacyaagccaccctcagccccctgggctccctcccatgaccgtcagcacccaatgttttagcctcagaagcagtttccagaggaggccaagccagcaggagactggtatgtcagcaccaccctaagtgcacacatgcccagctgggtagcaagagtgcctgggctcagctatcgggacatgtccacaactttgttctgctgcagagtagcactgggagcagggagaggccagggagtgggagcaggcacttccaagcctgtgggtgcaggggtcttcctaggcccccgagagtacagggatgactggatccagagctgtgactgggtggctg

SEQ ID NO: 748972 - DNA, 602 bp, Homo sapiens
tgtgctgattggtccatgggcagccatgggcaggcctggaaaaagcaccatctcgtcacagaaggcatcaaggaagttctcactccaggttgtggactccactgggaactggaagcccagtgcccaggcttcaggctgtccctggcttgaaggtgggatttcacaggggaacagccccctcccgcctaggaacctgtctgcctcccactgccatcaacatgccatccacagagtccaggatgtctgcaccgaggggcacccacaaacccatactaagccaccctcagccccctgggctccctcccatgaccrtcagcacccaatgttttagcctcagaagcagtttccagaggaggccaagccagcaggagactggtatgtcagcaccaccctaagtgcacacatgcccagctgggtagcaagagtgcctgggctcagctatcgggacatgtccacaactttgttctgctgcagagtagcactgggagcagggagaggccagggagtgggagcaggcacttccaagcctgtgggtgcaggggtcttcctaggcccccgagagtacagggatgactggatccagagctgtgactgggtggctg

SEQ ID NO: 748973 - DNA, 539 bp, Homo sapiens
aaaaattccagtctctgccagcagagtaggggtactgggtctttctctagaccccagaaaagtagaaggggccacttctatgacatttctgttttaatatttgtgcaccctccattcccactccctaccaaaccaaagaaaaggggccaaacaatggatctaraatgtgtttgggatttcacgcttcaccttttcctttcttcttccaccaaagaatgcagggcccctttcctctcaggttagccaaagtcacttgatctgctcttagaagaggtgttatccagttgcatacttggggctagcaacatagaggcccccacatgggacttcgatctaggtccattctttctagtcacattgttgttctgggctctcctcatacaggatgtattctttcattttttttcctctttcctcatcactctcctacgccactttgcctaactcgcccttacccacctctcaggtttccagaaaaacattctcttcctgaaagatgtcactgatctttccaggggttagaaaatgtgccaatatcc

SEQ ID NO: 748974 - DNA, 599 bp, Homo sapiens
attttgttaattgttttgtttctcttgtagttcttttcccatcttttcccctcttgctgttttcctttgaatttcgttaattttttttgtattgctgtgctttcattttcttctttttttcttttgtgtaatttctacaagtattttttgtggttaccatgggacytacattaaataccaatagttatgtttactgtaagctgataacaatttaagctaaattgcatacaaaggttatacttttatcccggacacacacactttatgttatcaatgtcacaatttacatctattcatactgtgtaccattaacatattttaaaattacatttatttataatacttttaaaacttttcttctagcataaaagtgacttatgcaacagttacaatcaaggagtattctatatttgtctataaattaatctttaccaatgagttttatactttcttattttattgtgctgctgtttagcatccttttgtttgaactggaagagctctctttagcatttcttataaggcaaatctggtggtgatgaacactctcagcttttgtttgtctgggaaagtctttcatttctgaatgaaagttttgc

SEQ ID NO: 748975 - DNA, 621 bp, Homo sapiens
tccatttaaattaacattagttacagtatttaacttggacagttgaaaacttgaatgtactggtaatacctcaatactctttgaaaatagatgaaaaatacagagaatagtaattttcacactttatgattattctttacatagtataaaggagtctccaacccctgggctgcaaaccagtacctggctgcacagcaggaggtgagtggcaggtgagcgagcatcactgctggagctcttcctcctgtcagatcagcrgcagcgatagattctcatagaagcgtgaaccctattgtaaactgtgcatgtgagggatctaggttgcatgctccttaagagaatctaactaatgcctgataatctgaggtggaatagtttcattctgaaactatcccctctgccacctatccatgaaaaattgtcttccatgaaaactggtccctggtgtcaaaaaggttggggaccgttggtattgagcatggtttaagacacgtatttaacatgtctaccccataactgtataatgctatacaagcaactgagggtagagtagaagaaacatacatcaataaaatgtccgtcaaaataaattgctagttaaaaaaattacagtactgccat

SEQ ID NO: 748976 - DNA, 621 bp, Homo sapiens
tccatttaaattaacattagttacagtatttaacttggacagttgaaaacttgaatgtactggtaatacctcaatactctttgaaaatagatgaaaaatacagagaatagtaattttcacactttatgattattctttacatagtataaaggagtctccaacccctgggctgcaaaccagtacctggctgcacagcaggaggtgagtggcaggtgagcgagcatcactgctggagctcttcctcctgtcagatcagcagcagcgatagattctcatagaagcgtgaaccctaytgtaaactgtgcatgtgagggatctaggttgcatgctccttaagagaatctaactaatgcctgataatctgaggtggaatagtttcattctgaaactatcccctctgccacctatccatgaaaaattgtcttccatgaaaactggtccctggtgtcaaaaaggttggggaccgttggtattgagcatggtttaagacacgtatttaacatgtctaccccataactgtataatgctatacaagcaactgagggtagagtagaagaaacatacatcaataaaatgtccgtcaaaataaattgctagttaaaaaaattacagtactgccat

SEQ ID NO: 748977 - DNA, 591 bp, Homo sapiens
tgtatttcaggcactgtgccagtgcttgagttaaaacaaagggcaggctcttaacacctgcctgaaggggcttatggcttgctggtggaaaggagagtttggcagtgtggattgtgttaacatggagaagatttttgtgttttcctgagggcatacacrattagcatcttagtttagtttgtatgtgattggattcttaaaaaatatttttccttttctaccaaatagaaaatttaagaaattctatatatggctaggtgtcaagtctgaatcaatgttgtagtcatttcccttattcatatgtactatagggcactcgaataaattacttattttactatcttttgacatcccaatttgttgttacttaaattttttttttttttttttttttttaatggagtctcactctgtggcccaggctggagtgcagtggccccatcttggctcattgtcacctccaccttccagcttcaagtgattttcctgactcaccctcccaggtagctgggattagaggtgcacgctaccacgctcaggttattttttatatttttggtagagatggggtttcgctatgttggccaggct

SEQ ID NO: 748978 - DNA, 478 bp, Homo sapiens
gtacactggtgaacacacaataattctgtctttctagtcatatatattcattgtaggactgtaaataaaacatcctgttctccttagccaaggagtagttgtatgtcccagactagtgaattcatacctgaaacacaaaaaamggaaaaatcattttaagttaatttattctattggtggtatcatgatgaatattctctgatacctggacccctatttcttccctggaagctacatttttttttctgattctggttctgtagccttcctatcagtcctatgatcccactgatacctttcccaaaaattgtttattctgtccaaactagtgagacacaagttttattctttacagccaacgaaggtaactgatacgattatcaacacttaaaacaagttttacaattttgaatagaggtacaagtctaagaaaaaaaacactaacacagaaaattaaaaattcaaataaaaataaaat

SEQ ID NO: 748979 - DNA, 478 bp, Homo sapiens
gtacactggtgaacacacaataattctgtctttctagtcatatatattcattgtaggactgtaaataaaacatcctgttctccttagccaaggagtagttgtatgtcccagactagtgaattcatacctgaaacacaaaaaacggaraaatcattttaagttaatttattctattggtggtatcatgatgaatattctctgatacctggacccctatttcttccctggaagctacatttttttttctgattctggttctgtagccttcctatcagtcctatgatcccactgatacctttcccaaaaattgtttattctgtccaaactagtgagacacaagttttattctttacagccaacgaaggtaactgatacgattatcaacacttaaaacaagttttacaattttgaatagaggtacaagtctaagaaaaaaaacactaacacagaaaattaaaaattcaaataaaaataaaat

SEQ ID NO: 748980 - DNA, 535 bp, Homo sapiens
gtacataaagaggagcaattaaataatatcaatacaaaagaagccttgtaggaggccctggtagaatcctaatcttctctagatcaatgttggcagaacaagaaaaatgtataaaagttaaaacccaattgaacttatttggattaaaaatgaaacctgattacggctaaagataaactgctgagaccacatctataacaataaaattagattaatgaaaagatgagatttgattaaccacttaggatcmtccatcaagatttcatgtgttaaactcaattctaatacgtaagaaaaaaaaaaacaccaacccagtataaaattatgctcttaatatgcatccttgtagtacaacttttgttgaatactctaggtgaaacctaaaggtccagaaaaatgctttcttaaaagacctccaagaaaagaaagaaaaccaaaacaacatcacaccaaactgccatatagttcacaaatttatctatctgaagctgatatttgaagtttgccaggggcaaacttgcatttgatttggatt

SEQ ID NO: 748981 - DNA, 620 bp, Homo sapiens
tggctatgtccccacccaaatcttatctttaattgtagctcccataattcctacatgtcatggggaaacctgttgggaggtaattgaatcatggggatgggtcttttctgtgctgttctcatgagagtgaatatgtctcacgacatctgatggttttataaaagggagttagttcccttgcacaagctctcttgcctgccaccatgtaagatatgactttgctcctcattcaccttttgccatgattatgagggtttcctagctatgtggaactgtgagtcaattaaacctcttttcttcataaattagccgctctcgggtgtgtctttattagcagcatgagaacagactaatacaagtatgaagcaccaattctcttagaaagaataatctggctgcatggtatcaatgacacctcttttataattaaatctataattttttttgaataccytctaggtcccatccttcaccaccatggatgcatttgtgtctaatattagtgattgtttcaacagaatttcaggccttttttcctgatctctcttcctccccagcagtagttgctcttgaggatttcctccatccttttcttccttgaggaactgagctgggacttg

SEQ ID NO: 748982 - DNA, 554 bp, Homo sapiens
gctattttgtcaggttttggtaacaggagcttcataaaacaagtacataaactttaccttttttctctattttcaaaaacattttccttttttttttttttcattttatttgagatggagtctggctctgtcacccaggctggagcaatggcatgattttagctcactgcaacctccaccttctgggttcaagtgattctcctgtctcagcctcccaagtagctgggacaacaggtgtgcaccaccatgtctggctatttttttttttatttttagtagagacagggtttcaccatgtcagccaggctggtctcaaactcctgacctcaggtgatccaaccgccttggcctcccaaagtgctgggattatgggcgtgagccaccgcgcccaggctgaaacattttcarataagattagatttcttatttcttacagattttatagattcaactgtaaaaaatgtctgaaccaagtacttttgtttttgatgttctcctgacaactttttcattttaacttcatatttttaccaggatatattttggcaatttgt

SEQ ID NO: 748983 - DNA, 554 bp, Homo sapiens
gctattttgtcaggttttggtaacaggagcttcataaaacaagtacataaactttaccttttttctctattttcaaaaacattttccttttttttttttttcattttatttgagatggagtctggctctgtcacccaggctggagcaatggcatgattttagctcactgcaacctccaccttctgggttcaagtgattctcctgtctcagcctcccaagtagctgggacaacaggtgtgcaccaccatgtctggctatttttttttttatttttagtagagacagggtttcaccatgtcagccaggctggtctcaaactcctgacctcaggtgatccaaccgccttggcctcccaaagtgctgggattatgggcgtgagccaccgcgcccaggctgaaacattttcagataagattaratttcttatttcttacagattttatagattcaactgtaaaaaatgtctgaaccaagtacttttgtttttgatgttctcctgacaactttttcattttaacttcatatttttaccaggatatattttggcaatttgt

SEQ ID NO: 748984 - DNA, 571 bp, Homo sapiens
cctcactaaaagggccatttcactagtgagaaagggattggatttcaaggctacactgggagccctgatgaaagtcctttgcaggccattggaatcagaaacatcagaatcctcggaattatagtaaattgcaagtagacggttgtactgaagaccacagcatagtatttaatgatcttgattcctgaaattggattgatgggatcagagggacctagcagggtagaatataatgtcatttaggcctcaaattatttctgcaaaatattttgctaatacaatgactagcaacaaaccaaagtaacaacacacttttaaaaaaacaagccaagatgagtaaaygacaaatagaaacggaactgagcaaccacaggggctccagatattagagtcatcaaaaacaggctttaaaacaattatgctttttttttttttctcttcaagatgactgactagggacattgtatactagttcctcagaaggaagattaaagttattagtgaattgctaagttttgagtggaaaacggagggaggagagctaggacccaccagagagcacatgcaaaga

SEQ ID NO: 748985 - DNA, 529 bp, Homo sapiens
caacagtgtgagatcctgtctcaaaaaaataataataataacagctgttttgaaatagaattcacataccgcccaattcactcatttaaagtgtacaatttacagccaactgatcttcaacaaagcaaacaaaaacataaagtggggaaaggacacacttttcaaaaaatggtgttgggataattggctagccacaaggaggacacactttttcaacaaatggtgttgggataattggctaaccacaagaaggagaatgacactggatcctcatctctcaccttacacaaaaarcaactcgagatgtattaaggacttaaatctaagaccaggaactataaaaattctagaagataacattggaaaaacccttctagacattggcttaggtaaggatttcatgaccaagaaccaaaagcaaatgcaataaaaacaaagataaattgccaggacttaattaaactgaagagcttttgcatgacaaaaggaacagtcagcagagtaaatagaaaacccacagagtgggaaa

SEQ ID NO: 748986 - DNA, 528 bp, Homo sapiens
  misc_feature 454: n = A,T,C or G
tgggagaagcaggcttggcataacctgtctccctcattactagaattctggggtctctgccgaagaagcttggaaatcgcccttaactttagcagacccatttgcccttggcgtagaccagagtgagctcctaggcagtaagaagctgatggccaggggaaagcagactgttcrgtgctgagggagatagaaacagggagttcacaggatgcacaagggtgttggggtttccctgtagggaaagggctggccagggagagggaggggtggagcttctcccagctcgccctctgccccctgggaaccatggcattcagatgtcaagtaaaatatatttccctagttcagctgcaaccttaggggcctgtgaggctgtcattgccagagcagcaccttggttctcctgcacctgccaggcagacgcattgtcagtgcaggctgctctcacagtggnctggccagcctgggtgggcctggcctccgctgaggagctgcaccctgctgagagactaccccaccttccccacc

SEQ ID NO: 748987 - DNA, 528 bp, Homo sapiens
  misc_feature 454: n = A,T,C or G
tgggagaagcaggcttggcataacctgtctccctcattactagaattctggggtctctgccgaagaagcttggaaatcgcccttaactttagcagacccatttgcccttggcgtagaccagagtgagctcctaggcagtaagaagctgatggccaggggaaagcagactgttcggtgctgagggagatagaaacagggagttcacaggatgcacmagggtgttggggtttccctgtagggaaagggctggccagggagagggaggggtggagcttctcccagctcgccctctgccccctgggaaccatggcattcagatgtcaagtaaaatatatttccctagttcagctgcaaccttaggggcctgtgaggctgtcattgccagagcagcaccttggttctcctgcacctgccaggcagacgcattgtcagtgcaggctgctctcacagtggnctggccagcctgggtgggcctggcctccgctgaggagctgcaccctgctgagagactaccccaccttccccacc

SEQ ID NO: 748988 - DNA, 518 bp, Homo sapiens
tgtgttgttagggcatcaggttcaaggctcagacaggtaagaaatgaggcttgaacactaagtcagggtcaggtagtggtaggcattgtctacaagatttagtagcttggactttgccatgaagaaaatgatgccatgccttgcaaggattcttaaatatgggagtgatatggccagactaggatttagatgtgttgctcccgagctgggtagcaaaggttcacttgagcaaggytggatgtggagaccaatgagtccaggtgagtagttaactcctactcaccttccactcaggttacatgtcatttagagacatcttcctaatcagcttgagctcattctctcttgcacccccaccccattacaccctgttgtgttcttcttagcacttattccaagtagtaattacacatttatttctgtatttactttttaaatatatacccatccccagcctacctatccctagcctgaaagcttcatgaaggtagaaatcaattctatgtaatcagttctat

SEQ ID NO: 748989 - DNA, 545 bp, Homo sapiens
ccatactgggcatttgggtttggatggcagccagcagttactgaaatgccatcagttataagattgccctttaagccactgatttgttattgtattgagttttgactcttttcctctcaaatttaagtggagatttattgaatataatgttaacctcaatacttcccattcccagttgtcttttcgtaagcgttattttcccctagtttataagtcttcagtcctctgcctgaacttgagagttaagaactaaagacagctgtcatttatggggctcatgactgtctgggaagcgtggtggattatctcataggcatggcccagagtcctcagtcactgatgacatgcacaggtaaactgagaggtctcttagctaatttttcctttttggtaaaattstgctgaaaatttccctctccaggactagaggtattcatataattttttttttttttttttttttttgagacagaagtttgcttttgttgcccagcctggaatgcagtggtgtgatctcggctcactgcaacctccgtctcccaggt

SEQ ID NO: 748990 - DNA, 631 bp, Homo sapiens
aatgagggaaaaattgttcagggcagccagagagaaaggccatttcacataaaaagggaagtccattggactgtcagcagacctctcagcagaaactctacaagccagaaaagattggagaccaatattcagcattcttaaaaacaatgttttcaacccagaatttcatatccaactacactaagcttcataagcaaaggagaaataaaatcctttccagacaagcaaatgctgagggatttcattgccaccatgtctaccctgcaagaactcctgaaagaagcactaaatatggaaagagaaaaccaataccagccactgcaaaaacacaccaaaatataaagaccaatgtcactatgaagaaactgtatcaactagtgttcaaaataaccaaatagcatcatgatracagcattaaattcaaatgtaacaatactaacctctagtgtaaatgggcagaataccccaattaaaagacacagactggcaaatttgataaagagtcaagaaccattgatgcgctatattcaggacactcatcttacatgcaaacacaaatacaggctcaaaataaagagatggaggaaaatttccaagcaaatggtaagcaaaataataataataataatag

SEQ ID NO: 748991 - DNA, 472 bp, Homo sapiens
gatcagcaatacaataacagtagaggacttcaatactccactttcaacaatggatacatcatccagacagaaaatcaatagggatacatcagacttgaaaaacaatttagacctaatggacccaacatacttatacagaacattatatccaatagcaccagaatatacatttctctcaagcacacatggaatatttatcaggatagatcatacgttrggctgcaaaccaagtcttaacaaatttaagaagattgaaaacatctttgtatccaaaatggtatgaaactagaagtcactaacagtaggaaaactggaaaattcacaaatatgtggaacatattactgaaccatcataggtcaaaaaagaattcaaacgggtaaaaatctaaagaaaggtggaaatgtaaacaaaatataccaaaatgtatgggatacagcaaaagcatctctaaaagatggtttcatagcagta

SEQ ID NO: 748992 - DNA, 472 bp, Homo sapiens
gatcagcaatacaataacagtagaggacttcaatactccactttcaacaatggatacatcatccagacagaaaatcaatagggatacatcagacttgaaaaacaatttagacctaatggacccaacatacttatacagaacattatatccaatagcaccagaatatacatttctctcaagcacacatggaatatttatcaggatagatcatacgttaggctgcaaaccaagtcttaacaaatttaagaagattgaaaacatctttgtwtccaaaatggtatgaaactagaagtcactaacagtaggaaaactggaaaattcacaaatatgtggaacatattactgaaccatcataggtcaaaaaagaattcaaacgggtaaaaatctaaagaaaggtggaaatgtaaacaaaatataccaaaatgtatgggatacagcaaaagcatctctaaaagatggtttcatagcagta

SEQ ID NO: 748993 - DNA, 618 bp, Homo sapiens
actttgagtctgaggctgctgagagtcatgtgacagctgcccttgcactcagggcaccccattctagctcctggctcccctactgacccctgggtgccaggtcctttgacagatgggaaatatggggctcagggaggtcaaagatggccattgcccagaatcattataagatgaaaacgagaaagcagctatatgtgctgggtccacccagtcactttagtgtaacstgctttgaattctgaggcaggttcatagtggtgggtgggggggttggtaaccaagggaacagcgagttacccctactacctctttctccggctggaagttcagcattcagaccctctgtctgaggatagcatctcttgcaacacttagggccctcggagggctgcagcccaggtgaggacactctgtgatagcccttcctctgcgggaagatggcaggcagggaagcagcaaataattaaattgatgtcgacattcattgcttgtgaagccagtaaaagcatcacgtggccagctcttgtagccgcacggcctatttacagtctcacgtcatttttctagtaatccaaaccagcaaagcgctctgaagctcctgtgtgttcagctgagaac

SEQ ID NO: 748994 - DNA, 659 bp, Homo sapiens
gtcagcaaagatctgtgattaatcttgtcctgtcaaagtataagaaacttttgtttttttgcccaattctacccctcaggcacatgattagatgataggagatggctgaagctgtctcttgacttgcacaatttggaatggaattggaagagaaaaacttgactaggattttgaattaaattttaacgttaagagttgacagccacacctaaattgtttatgtgaacaaaatagagtcctattcagtttgctacccttatttgtcctcatttttttaatcgggtgtcctagaaacctaaactttcacctcaatgtcaccttacttgctctcagatcaagtgttacaaagacttaattgcaccatttccctaactggtcaaaaaaaacaaaaggtcatataaattttacaatgtttgtcttagatttcatacattattttattataacttagactatcytaacctatattgtcatcaatttagaattctaaataataatataggttaggataatctgaaaaacaaattcttgtcttaaatatattccaaagcatgtaaaataagctaccacagaaataactcacattgtgaactattaaattacctgattcaggtcacagtatgttcttagagaaggcgataattgtaatgctcttgcta

SEQ ID NO: 748995 - DNA, 609 bp, Homo sapiens
ttctttatccactcattgattgatgggcatttgggttggttccacgattttgcaattgtgaattgtgctgctataaacatgcgtgtgcaagtgtctttttcgaataatgacttcttttcctctgggtagatatctagcagtgggaaggctggatcaaatggtagttctacttttagttctttaaggaatctccacactgttttccatagtaactgtactagtttacaatcctgccagcagtgtagaagtgttccctgttcaccccacgcatgcawctattgttttttgattttttgactatggccatttctgcaggagtgaggaggtggcatcgcattgtagttttgatttgcatttccctgatgattagtgatgttgagcattttttcatacctttgttggccatttgtatatctttttttgagaactgtctatccatgtccttagcccactttttggtatttttttttcttactgatttgtttgaggtcattgtagattctgggtattagtcctttgtcagatgtacagattgtgaagattttctcccactctgtgggttgtctgtttactctgctgactgttccttttgccatgcaaaagctcttt

SEQ ID NO: 748996 - DNA, 615 bp, Homo sapiens
tgacaatgtgtctgggcaaagatctttttgcgatgaatttcccaggtcttctttgtgcttcctgtatttggatatctaggtctctagcaaggcctggggagttttccttgattattcccccaaatacattttccaagctttgtgcttcttgtatttggatgtccaggtctctagcaaggctggggaagttttcctcaattatttccccaaatatgttttcctgaggaagaagagaagtctatggtttggtcgtttaasgtaatcccagacttcttggaggctttgttcatattttcttttttccttgtctttgttggattaggttaattcgaagaccttgttttcgagctctgaatttctttcttctacttgttcaattccattgctgaggctttccagaacatttcgcatttctaaaagtgtgtccaaagtttcctcaatttttgattgttttaagctatttccttgaatatttctcccttcacttcttatattgttttttggatttccttgcattgggcttcgcctttctccctgattagcttaataactaatcttctgaattatttttcaggtaaatccaggactacttcttggtttggatccactgctggt

SEQ ID NO: 748997 - DNA, 611 bp, Homo sapiens
aagatagattcacctttcaacattatcactagcttttctaaagacagatggcagagcaaatgataagatcaaataacattacttccaagattgaattggtaccaactcaaatgatattagttttgaagtatgacatctccctgtagaaacagcatgcattctcctaccgataacttttgctcggtaccaaattccatcttcaaatttagctacacaggcttgatcttgaactggacagaggatttccagattttctccatcttcacttttatagaattcctcgattgtctttaatagaaataaaatatccaggccctctatctagyaaataaagggataaagcactgtcatttcacagaaacttaaaatgtaagtgttgaatgaattacaagcactgtcattgaaattatgaaacattaaaacttgaattgaatgtaaatctatcaattgtgttacgtaatttattttacaaaattttattgcagaaccagtatagaaaattagtatagacataaaaataaagtcacattctgctagacaacttagtgtatatattcttcaagatatttttccatacatacacacactcactgtatatgtttttaccaaaa

SEQ ID NO: 748998 - DNA, 488 bp, Homo sapiens
agaggcagcaaaacaaaacacatgaaataaaagcagcattttgttaatcacagataagagtgaatctgtggaactctgcctttattaaggtccacaggcattacctcttaaggctttccagcaggggttgtgaactggctaatttaaagaaaatatgtgtaaaggggggaaattatttgcatgactctggtgttgattctggttttattgtggtaagcagctrtgggatatgttgggtcagtgagatgtagaacaagtgacccacactgcaaacagccacatggggagggaaagttttaactaggccaaagatgaggtggtataactcagttttaaacaacttatgttaggcctaaaaatggatgccaaggcaacaatgatgttaaacaaatttatgataaaaagattatacacctttatctagtgggatttatttttaaaatgcaaggataatgacatatgaaaatcaatgcagcaggcgcagtggc

SEQ ID NO: 748999 - DNA, 661 bp, Homo sapiens
ggatccctccatggcccctctttgcttcatctgcaagctctggcgggaagtagtggttccacccaagagcagagctggtgaaattgtggcttgatggcagcccgcttcccgtggctccctgtccactgtggatgctgctgcagcctggcacgtgcttcgggacgcagagtccagggagcaggctgccactgtcaccgtggctctggtcatcattgccagtgtgtgccacctgccacrgccgcagactctgtccacacattagtagctctgggaacatgggaggtcaaatgtcaattaagagcaacacgcatacttcacactcgttcgcaacagatgtttgcaaagcccttttcaagttgatcctcataaccaaccttagaaatgatctgggcagttcacaggggaagagaatgagttcctgagagaacaatttgcctaaagtcgctcagatagtcagtgactgactcacgcctacctgcctcccttcatgactccagtgcacacctcacttaaagtctttaaaggtggagagactaaaccagaggctgagcaagctgggaatcaggagctcctgttcttgttcctgtgttcaccagatccctccgtggggcaggtgctggtgggcaccattatcatccccatcctgggcaggttgtccagg

SEQ ID NO: 749000 - DNA, 594 bp, Homo sapiens
actttttttttttttttaagacagagcctcactctgttgcccaggctggaatgcagtggcatgatctcggctcactgtaagttctgcctcctgggttcatgccattctcctgcctcagcctcccaagtagctgggactacaggtgcctgccaccacacctggctaatttttgtatttttagtaaagacagggtttcaccgtgttagccaggatggtctcgatttgacctcgtgatccacctgcctcggcctcccaaagtgctgggattacagrcgtgagccaccacgcccggccacaaatgcaataacttaacaaactccaagtgggataaacccaaaaagatccacaccaagaatatcatacttaaagtactgaatgctaaagacaaaaagaatctcaaaagcagcaaaagaaaagcaactcattacatttaaggattcctcaataaaatcatcagcagatttctcagcagaaaccttgcaaaccagaaggcagtgggacgatatatttaaagtgctgaaagaaaagagaaacctgttacctgagatttctataaacagcaaaactgtccttcaaaaatgagggagaaattaa

SEQ ID NO: 749001 - DNA, 594 bp, Homo sapiens
actttttttttttttttaagacagagcctcactctgttgcccaggctggaatgcagtggcatgatctcggctcactgtaagttctgcctcctgggttcatgccattctcctgcctcagcctcccaagtagctgggactacaggtgcctgccaccacacctggctaatttttgtatttttagtaaagacagggtttcaccgtgttagccaggatggtctcgatttgacctcgtgatccacctgcctcggcctcccaaagtgctgggattacaggcgtgagccaccacgcccggccacaaatgcaakaacttaacaaactccaagtgggataaacccaaaaagatccacaccaagaatatcatacttaaagtactgaatgctaaagacaaaaagaatctcaaaagcagcaaaagaaaagcaactcattacatttaaggattcctcaataaaatcatcagcagatttctcagcagaaaccttgcaaaccagaaggcagtgggacgatatatttaaagtgctgaaagaaaagagaaacctgttacctgagatttctataaacagcaaaactgtccttcaaaaatgagggagaaattaa

SEQ ID NO: 749002 - DNA, 669 bp, Homo sapiens
cggtgatgattcaagaaaagaatgacgtttctttaaaaattgtggaagattttttaagtcacattcctccactgattttccatggcctttgtaaataaagcacagccttggatacaatccaaagtggaacttgacagattcagaggaagagtggttttgcccctccctctgcattctttcttcatcctgggagatgatgttcagggacactgttgacagtatatacatcaacttcacaagctaaggtcagtttcactggcgctaattaaaaataaaggtgaatattcatcatcatcagacaaaatgttgttaacacgtgtacaaaaagttaaaataactggatatgcttaattacatataataattggaaaaaaatttcattttggacttgggtggtaagtggattttatacaatattctgctgggaaaaattggggttagcagttttccagacttactgtcttcagactatacaaaggaaagtgattttccctttyggagcagacccttttcaagaaattgttcagtagacagagcccctgggcatacaaataaataaacagagagaatctactctcatatattgcaatagagacacattaattaaccaaccgttgttagaactttttgcattttataaaaattatactcctatcattattaagacac

SEQ ID NO: 749003 - DNA, 505 bp, Homo sapiens
ttcaaatgtgaatgacgtagtagacataccaattaaaaaacagagactgtcagaatggattggatctgactatatgtggcctataagaaacctacactaaatataaagacacagattaaaagtaaagggatggagaaagmtgtatcatgctaacactaatttaaaaaagctgcagtagctatattaatttcagacaaagcagatttgagactaagaaaaattgtcagagacacagagatggtcactacataattttaaaggggacaattctccaagaagacataacaatcctcaatgtgtacacacataacaacagactgtcaaaatatgtgaggcgaaaacagttaagattgcagggagaaatagacaaatccactcttatagctggatagttcaacatcttttcaacaacagactgataaaacaatcagaaaatcagtgaggatatagctaactttaaacagcactggcaatcatcttgatataaatgatatagaattctcca

SEQ ID NO: 749004 - DNA, 588 bp, Homo sapiens
aaaatcagcaatctaagcttccaccttatgacactagagaaagaaaaacaatataagccggaagaaagcagaaaaaaaaaattagagtagaaaccaaaactgctgttagaaaaatagagaaaatgaattaaaccaaaacctgatgtgtgtgtgtgtgtgtggtgtgtgtgtgtgtgtgtggtgtgtgtgtgtgtgtgtgtggcrgggggaggttttggaaaagatcaataagattgataaatctctggccaggttcaccaagagaaaaaacaaggaagatacaaatgactaatatcagagattggggagggtttatcagtactgatcgcaaggcatttaaaggacaataaagaaagagtataaatagctttctgcctacacatttgataacttagatgaactggactaattctttgaaaaacacaaactatcaaaacacacacaaagagaaataaataatttaaagtaggcctatatttactagagaaatgcaataaataataaataaccttccaaagcagatagcaacagactcagatggtttctctggttattgtaccagacagtcaaagaaaaaattataccaat

SEQ ID NO: 749005 - DNA, 588 bp, Homo sapiens
aaaatcagcaatctaagcttccaccttatgacactagagaaagaaaaacaatataagccggaagaaagcagaaaaaaaaaattagagtagaaaccaaaactgctgttagaaaaatagagaaaatgaattaaaccaaaacctgatgtgtgtgtgtgtgtgtggtgtgtgtgtgtgtgtgtggtgtgtgtgtgtgtgtgtgtggcggggggaggttttggaaaagatcaataagattgataaatctctggccaggttcaccaagagaaaaaacarggaagatacaaatgactaatatcagagattggggagggtttatcagtactgatcgcaaggcatttaaaggacaataaagaaagagtataaatagctttctgcctacacatttgataacttagatgaactggactaattctttgaaaaacacaaactatcaaaacacacacaaagagaaataaataatttaaagtaggcctatatttactagagaaatgcaataaataataaataaccttccaaagcagatagcaacagactcagatggtttctctggttattgtaccagacagtcaaagaaaaaattataccaat

SEQ ID NO: 749006 - DNA, 529 bp, Homo sapiens
agcacaagaaagaaaaacaacaaaccaatatcttttatgaaaatgataaaataatccttaagaagatataagcaaactgaatctaacactgtataaaaaaaactacaaccatactctgtgcccaagtggggtttattcaagatttgcaaggcttaatctacatttgaaaattaattaatatgatctatcacattaatacactaaaaaggaagattcatataatcatatcaatcaatgcagaaaaaccatctgacaaaatccaacacccattcatgataaaaactctcagcaaaaactctcagtaaamaggaggaattttctcatcttgataaagaagatctacaaaaggccgacagttaacatcatagttaatggtaagaaactgggtactttctcctcaagattgggaacaaagtatatatgtctcctctcaccagtcttattcaacatcatattggaagtcctgcttagtacaaaacgtccaaaaaaaaaaaaaaaaccaataaaaaaaatgaggaaagaagaaata

SEQ ID NO: 749007 - DNA, 529 bp, Homo sapiens
agcacaagaaagaaaaacaacaaaccaatatcttttatgaaaatgataaaataatccttaagaagatataagcaaactgaatctaacactgtataaaaaaaactacaaccatactctgtgcccaagtggggtttattcaagatttgcaaggcttaatctacatttgaaaattaattaatatgatctatcacattaatacactaaaaaggaagattcatataatcatatcaatcaatgcagaaaaaccatctgacaaaatccaacacccattcatgataaaaactctcagcaaaaactctcagtaaaaaggaggaattttctcatcttgataaagaagatctacaaaaggcckacagttaacatcatagttaatggtaagaaactgggtactttctcctcaagattgggaacaaagtatatatgtctcctctcaccagtcttattcaacatcatattggaagtcctgcttagtacaaaacgtccaaaaaaaaaaaaaaaaccaataaaaaaaatgaggaaagaagaaata

SEQ ID NO: 749008 - DNA, 586 bp, Homo sapiens
atggagcaactgaaattctcatgtattttcaatgggaatgtaaaatggtacagcagtttggcagtttattataaagctaatgtatacttactgtgtgacacaacaatgccactttggggtttttatgtctcccctcccctgcccccaacccaaaataaaaacatgtctgctgaaataattatatgtgatttttttttttacattttttgtgacggactctcgctctgttgcccaagctggaatgcagtggtgcgatcttggctcactgcaacctccacctcccaggttcaagcgattctcctgcctcagcctcctgagtagctgggattacaggaacccgccatcatgcctggctaatttttgtatttttgtagaaacggggtttccccatgttggccaggctggtcttgaactcctgatgtcaggtgatccrcctgcctcggcctcccaaactgctgggattacaggcatgagccactgtgcccagcctgtaagtgaatgtttatttcagctttattcataataatgtcaaactgtaaacaaccccaaacaggtgaatttataattacattatggcatattcaag

SEQ ID NO: 749009 - DNA, 517 bp, Homo sapiens
ggtttatatgagtatcacaagtcatttgtaaataacatgttcattttagatatgtaaagagttctgtcatgccctatgaaataaattatattttattgttgcccgggtgtttcataacttttatttatttactgcaagagtggagaattaagatagagtagtttatttcaccaaaagactgacaaatggctcattagacacttatggagctgaagctaatcgtacaacttttgttgttgttgtattaattgtcattgcttgcttagcatgctcacactggtggtcatcagsacccattttttaccactatcccacaaactactccccaaaagaaagaaataatgaaaagaaaaaaatagataagaaaaaaaaggaaaacagaacttaaaatatgatgtgggttagagaaacgcatgggaggaatgacaaagaataaaagtgatagcctttccccactgggccaccaataaacatcaatcccaaacagcagtcacctcacctaacagcttgagccaga

SEQ ID NO: 749010 - DNA, 609 bp, Homo sapiens
ttgccgaacttttgacagttgaaacctaaagttaacagataaagttttgtaaagaatattaagtaaggcatattaaaatctcattaattaatcactacctctcaagttggctttttattttacctctgtttactaaattcctagagagcatcaaactaggacctggaaaatcatccaggtcggctctctgcctgttctcttttgacagtgccactgatcaggatgggtgacttagtcattaacagaaaatttcctttctttataaacactggtttataattttagttttgtctgtaattcataagaagaaaatgtttgtactgtgcctcatttgttcctgatagcaattactttggtactgttactgtccagtctaggattggcattggtttatattttggtatcaaaatgagttttctacctaaaaagctttgagtacaaaagataatttggggaagggggagaggatrtatgctttttggctaatatattgcgtagagctttcacacagtttttcaactgaaatattcagtttatctccattatttcagtgtcgtaatttttttctccaggagattcaaataaaaatggaagaagaacaagttctac

SEQ ID NO: 749011 - DNA, 572 bp, Homo sapiens
actagagttttaaagtgtatcttcattgaaagtgggtagttacactcccactacaaacaaagctgtttccacattcttcccatattatacttaccacttaaatcatgtattttggaaaagactgctgatacggtttggctctatgtctacacccaaatcttgtgtcatattgtaatccccagtattggaggaggggcctggtgggaggtgactgaatcatggagacggacttcccccttgctgttctcatgatagtgaatgagttctcacaagatctggttgtctgaaagtgtgtagcacctccctctttgctctctctccctcctgccagccatgtacagatgtgcctgtttgcccttcacgttgcccmatgattataagtttcctgaggcctcctgagagggagaagcctgtacagcctgcaaaaccatgagccaattgaacctctttataaatttatgtctttatagcagtgcgagaatgaactaatacaaccgcctttctggaaaaatgttactagttaaactagaaataacttaaatcactacaaagctgttctaaagtttatcaaa

SEQ ID NO: 749012 - DNA, 604 bp, Homo sapiens
acattagtggccatttttaagcttgctaaacgatgatgggcttaaagaggtgggagccgggctatttaagatacagatctatttatatttagaggatgtgctaaatactttgagtggccatcctcttacacataattatactaaactcagattgaaacctgcctacaaatttcattctttaaatattagtcagttctgcttatttaggtcttctatggacaaactgcaaccaaccattcagtattaaaccaayagtccagtattaagccctctgaaaccttaatctttgtctggcaggaaggatttgagatataaaaccaacctctatgtgagcaggatgcattaaatgagttaagctgtttataatgaagcttcattatcttgaagcattataaactcttcgaaatataaaatatctataaatttctatgtacatagtttaaaaatttgaaaatttttctaaaatataaaagaaaactaaaaaaagacagaagaaatgcttcccttaacatgttttcctatcagaaatggactttttccagctaattcacttctattaattaaaccaaggagcttgaaattctaaagtttaaaaaggatcaaa

SEQ ID NO: 749013 - DNA, 657 bp, Homo sapiens
ctgtcacctgctgacaaaagaatccttgggtcagtggtttccaggcagtacttgtcataggccttgggcaagacctggtaccatgctggcttcaggtgtgacccagggcattttcagctgtggtggccatggggagagacaccttctgcttgaggaaaggagagggaagaataaaaagaactttgtcttgcaacttgggtaacagctcagtcacagtaaaataaagtactgagtagattcctacagttcccaactccaggccctagctccttagacggcatttctgaactagccctgagccagaagagaacctgcagtcttacagagaaatgcacaagtytggctggattcaccacttgctgacggaagaacctttgggccttgaataaacatgagtgttggccaaacaatagtcaccacatacctcgggtgagacccagtacttcactggcttcactggcaggtctgactcagcacagtgtcagtgggtagccacaggggtgcttgtgtcgttcctcccccaactgcatgcagctcactgagaagagagagactttatgggagaaagtgagggaagagaacaagagactctgccaggtaatccagggaattctcccggatcttacccaagactaccaaggctgtaccttaacaagc

SEQ ID NO: 749014 - DNA, 607 bp, Homo sapiens
accacaacagacaggaggtacataataagaggtaggggatacagatatggaaagagctaattcctcatgatgcgtaacagcaagccaacaggtcattactagaatttaaaaatcaacaattagcagtaagagcatttgatttaaaatgtgaaaatgattgcctcaggagagggagcaaaagaattcaggagaatgctgtttttcaagagaagccttcagataaaatgactttttcaactagatttatttataaacccgataaaatccgatttttaagatastaccatattaaaatgtctatacactgaagattagcctacacattttacacatgtatactcttgcgtaattaggtaaactaatcccaaggaaataactaaaattttagttagataactttccagtgttccaaacactcatatataatacctggtcccagtctctttctccagatttttttttccaggtatttctccctttggaacttgctatccagtctcatttcagctgcctaagactgtacttgttatcccagatttctaaaatcctgtgtcacagaatccctacatattccttttaactccaccaatatctcccaagaaacatt

SEQ ID NO: 749015 - DNA, 554 bp, Homo sapiens
acacaaatcttctaagggattcatttgtaatacagtactatattttatctgacatttttagtagttctctaccatttttatcaactccacttgaaaaaaaaaaaacagtcaaggtcctccaacactactgctgccatcaccttttcagagtcagggaaacggaaacacagaggtgagtaggctacctgcctacttaaccaactgagatgccagagctgagcgtcttaaacgttttgcttaagttttaaaaagtcttaaacatttgcttaaatattatccctgtcatatttgtcatcacatttctgccttgtattcaattttttttttagacagaatctcactctgtcacccaggctgcagtgcagtggcrtgatcttgggtcactgcagcctctgcctcctgggttcaagtgattctcctgcctcaccctcccgagtagctgggattacaggcacctgccaccatgtccagagctaattttgtatttttagtagagatggagtttcactatgttggccaggctggtcttgaactcctgacctcaggtgattcgc

SEQ ID NO: 749016 - DNA, 623 bp, Homo sapiens
tcccccatttcagcttcccgagtagctgggattacaagcacgtgccatcacacccagttaatcccatctctttaaaaaaataatcagctttgttctagacatttaaaaaattgaaaaattcctgggtttgagctctcaaaatattagtctactgggaaaacaaggtaataaacatctttatgatattataatgctatgttagaaataagcctggttgtttaagaaamgaagaagacacctaccctagtttgggggctttgggtggaagagagtttcaagaacagagaaaaggatgtgctaaggtatgaatcctagaaaacaggagacagttcaggacctaaaaggctttgaggctggtaagtagaacgtgagggaagtaaagaggctggcaatgaaactgcacaaagggaagcagatgccagattgtgcagtgtctcatatgccatgttaaagggtatcaatttttatggtaaatgaatcaagtaacccttcaacgtcaggcattacaatgacatttttaaatacgtacaagaagaaacatggaaatgagcattaatattgcctaataaagtgtatgagcaacttaaaccaatacattaacaactgaaagagatatgttttaa

SEQ ID NO: 749017 - DNA, 550 bp, Homo sapiens
ggcaacatactctaaagctttaaaagataaatctaaaatgcagtacatttaaaggacactgtattccaagtacgcactttcagtaagtcctaggtacttgattaaaatactgattagccgccaactcctcatccagacttaatgcactagacatccttccatactgaagtttacaccttccttttgcccaatcttaaagcattttctttcttcccatgaaaatatcattgtttgtggataaaatcagctccctgtgttgacttatatcaaactcatcatgmctatttattaatgccaggttcccacttgtaattctgatcctcccccaaaaattcacaaaattacagcgctgaaagttgtcacagagattttatgaagttcactatcctaattttatagtttaagaagaaactaaaactttgccagcagaagtaactcgcacatggcaaagtagaactaaaatccaattctgcaccctctgctgcttgttccacaataacatacttactcctctcccttctttctcatctcttaattctccctatccata

SEQ ID NO: 749018 - DNA, 550 bp, Homo sapiens
ggcaacatactctaaagctttaaaagataaatctaaaatgcagtacatttaaaggacactgtattccaagtacgcactttcagtaagtcctaggtacttgattaaaatactgattagccgccaactcctcatccagacttaatgcactagacatccttccatactgaagtttacaccttccttttgcccaatcttaaagcattttctttcttcccatgaaaatatcattgtttgtggataaaatcagctccctgtgttgacttatatcaaactcatcatgcctatttattaatgccaggttcccacttgtaattctgatcctcccccaaaaattcacaaaattacagygctgaaagttgtcacagagattttatgaagttcactatcctaattttatagtttaagaagaaactaaaactttgccagcagaagtaactcgcacatggcaaagtagaactaaaatccaattctgcaccctctgctgcttgttccacaataacatacttactcctctcccttctttctcatctcttaattctccctatccata

SEQ ID NO: 749019 - DNA, 611 bp, Homo sapiens
ctcaaaatgacaagagacttttaaatatatatatttaaaacctagtgttgagggactctaaatgagcactttcaaacacagctgataagaagagtatatttgtatcaaaaccccagtaataatatatttgtatactttctagtgcttctatttctagaaatttatcttgcaaaataatcagacatgtacacaaatatttatttattagcatgttcatcccagcaaaaagttaggggaagaatagggagaagaaacttatatgcccaatggcagggaaattgtttagtaagacaatatacagctgtttaaagacgcaaacattttatttgttttattttttattttttttgtgacagagtctcactctgtckcccaggctggagtgcagtggtacgatctcggctcactgaagcctccacctcctgggttcgagcaattctcctgcctcagcctcctgagtagctgggattacaagcacccaccacaacacctggctaattttttatatttttggtagagatggaattttaccatgttggccaagctggtgtcgaactcttgacctcaggtgttgtccctgcctcggcctcccaaagtgcggggattacagg

SEQ ID NO: 749020 - DNA, 564 bp, Homo sapiens
ttgacctttgggatatgtgcataaaattactgaaatgaagtgaacataataatttattatgttttctaagaagattttaatattattcagagtgaaagcatgtatttattcttcctgaaaaatagtcatgctaagtattttactactttgtgtgaagcaatagtggcacctggtggtttcatttagtaaccacagactttttgttttgcttgaattttgaatgagcccagtcatgggctgcaataactagtgagtctattccacataggtcctcagtatggtttatctaaactggtgacttctatgctcagaaaaacactaatgttcatatgagtaagatatatctgtttttttcaggcttaacaaattgcaagcacagaaaaygtactggctatttgaatatatagaattttcttttcttttcttttttttttttttttttttttttttttgagacagagtcttgtgctgtcacccaggctggaatgcagtggtgtgatctcagctcactgaaacctctgcctcgtgagtccaagtgattttcctgcctcagccttctgagta

SEQ ID NO: 749021 - DNA, 616 bp, Homo sapiens
gtgtaggctggggaattcagtggtaaatttatagacagaatctctggtgagggaaacaaacaataaacataaacaacaattactattaactagtgaaaagtggtgcggggaaggagatggacagtgactctactggggttgctgggagactgttaaagacagaccactgtacttccccctgtccctagcctgggacagtctcagtttatgtttgtttatatttgttgaagtatcttgatttgggcaataaattatatggtcactccagttacagacagaatatagacatggtgtcagggaggtctttctttttctctttttctcttttttttttttgagacagagtttcactcttgtcgcccaggctggagtgcaatggcgcgatctcrgttcactgcaacctccgcctccccggttcaagcaattctcctgcctcagcctcctgagtagctgggattacaggcacccgccaccatgcctggctaattttttttgtatttttagtagagatggggttttaccatgttgtccaggctggtcttgaactcctgacctcagatgatccaccggcctcggcctcccaaagtgctgagccactgtgagccaccatgcccag

SEQ ID NO: 749022 - DNA, 616 bp, Homo sapiens
gtgtaggctggggaattcagtggtaaatttatagacagaatctctggtgagggaaacaaacaataaacataaacaacaattactattaactagtgaaaagtggtgcggggaaggagatggacagtgactctactggggttgctgggagactgttaaagacagaccactgtacttccccctgtccctagcctgggacagtctcagtttatgtttgtttatatttgttgaagtatcttgatttgggcaataaattatatggtcactccagttacagacagaatatagacatggtgtcagggaggtctttctttttctctttttctcttttttttttttgagacagagtttcactcttgtcgcccaggctggagtgcaatggcgcgatctcagttcactgcaacctccgcctccccggttcaagcaattctcctgcctcagcctcctgagtagctgggattacaggcacccgccaccrtgcctggctaattttttttgtatttttagtagagatggggttttaccatgttgtccaggctggtcttgaactcctgacctcagatgatccaccggcctcggcctcccaaagtgctgagccactgtgagccaccatgcccag

SEQ ID NO: 749023 - DNA, 568 bp, Homo sapiens
gattagcaagctcaattcccccttgccataacctaacaaattcacagggttctgggtattagaacatagacatcctggggcaaggggcagttatcctgcctaccacaggatctttgtttatttccagtgttctaaaatttcaggaaaatatgccttgatgatcggtgtttttttttctttttcatttgttcactgtgctaattggtgagcctttcattctagaaactcatgttcttcagtcctggaggttttcttgcatttcttcattgaaagcttcttctattttcttttttgcttccctaccctgcccccagaactcttattagccagaarctacacctcctggtctgtgtcactgattttgttatttgattccataccacctattttctttatttttttattctacctttaatagaagagttccacaattttatcttctattgaatttaaaacttttgttatgaacattttatttccaaaagctctttctaaaataaataagctgggcacagggatgcttgcctgtagtcctagctacttgggaagctgaagcaggaggatccct

SEQ ID NO: 749024 - DNA, 567 bp, Homo sapiens
ttacaataaaagacttccaacaataaacaagtctccttccccactccttgcctacccagccaggctcctctgcagaggcaactcttctagctatttcttctggttcttatctccacatttccaaataatgtgctcactcgtatatttcttcatttaccaattttaggtaatatctgttggttttctgttattggtgggtgaggatttgatgtttttgcacaacctccatcctctgatcacatattttagttaaataaatatttggtgtatagtttattgtgattacgaatcatttcagtctttgccatgtcttaaaaaccactctaggatctggcttctggctccctgtcyccctcacctccagctgtttccctctcactcactcgtctccagcatcactggcctccctggctcctcagacctgagaacactcctacccgaggatctttgcacttgcccttctctccatcagagtgctcgccttcctgacatttcctgtctgcttccttatttcattcccgactctgctaaaatgtcacctgattagcgagaacttcctgctctcct

SEQ ID NO: 749025 - DNA, 618 bp, Homo sapiens
ccaaagagcctgcttatatttccttgttatctaatgacactttatttgtttttgcctttctaacaatatagcatgttcctgaaggccaaggatgtctgattttctgatgtgccctaataccttgcttgcttttttttgggggggggggctctgaaatcatgcttagttttttaaaaaaaataatagaattgctttgttcatgtcccttgggttacttggaaagcctgcctcacaagctctgctttctttattcatgtagatttgacccctttacttatttccctttaaaaagaaagaaaaaggaaaagaaaaaatttgggggaccacagtcaggtcttattgatacataactttatatcagatgcaaacgtcaggctagtattatatcagtgcttcacttcaagaatgccttatacactaatgtgagtacagccaaacagaatactccagcttaatctcaamgttaaaagcaagatggggaagttgtgcaagagggcactagctctcagttcagagatcatcttccctgggaagccttccctgattaactgcacattggttacccctgtgtttatagatggtcttcagtctgtattttgttatttgtatgatgctttt

SEQ ID NO: 749026 - DNA, 597 bp, Homo sapiens
ggagtgaaaggtgtcagggagagaaggatgaaggcaccataaggttattatatataataactggcatataggatatagtacaggcacctcagtagacctattttcagttcgtgctgtggagcatgtgaaactattttaaatagaggcctttgggacttaagtaacttcaactctctgaatgaggtttaaggcaagcttgctgtgggctggatctatcctgtataatccctactgatttgggtgatgtataggtacccttccctgaaattcttccctgagaataattattgttgtcatctactacggaatcctgggcccactttcttccttcttcttgggggaggaaatctcccagacatcttgccaagcatttgcttaagtctttgaaccgctgcactagctaatttctccacctgaaacaatatacaaacccctcctcttctccacccgctaggttcttaygctggcagctcatatttttacaagaaaaagaagttagaatgtattgagcacctgctataagcctggcactttgctagtcactgtgtggcagatgactacatcagtcatgactgataaaacataacttctatcctt

SEQ ID NO: 749027 - DNA, 593 bp, Homo sapiens
ggggacaccgacccaggggtcccaggtctttggagttgccacgaaatgccccaatctacattttcacttacatctctttttaaatgttgcctactaattcgattttaaaaaagttatctcctggctgaatgggtctcacaatcctccagtttgcgacctttacatcattgaaaagattgctgcttccaccttttaagggagaagaaaatgaagacccacttgctttttaagcacgatggcacagatggcagttaaaatgggaggccacttggcccaccattccccagcccaacggaaagggtcctggcagctaggtggcccctstagtcgtagggacaagctgcccaagcctcaggctgggcctcacaggccccttccccacaatctcattggtttcctcgctaaaacacttctgagggaaagttgcttcattcctttggaggcagtcagtagacacacatatctattttctaaatggaccaaattctctcagaccgccaggcattctgaacaatcaaccacagctgaattctatcaggtctgctgtttgacggaattcaactatttcccatctccagtctcattattgtttg

SEQ ID NO: 749028 - DNA, 470 bp, Homo sapiens
aaacataagattagaagtgtgtactataccaacatatcaatcatggtaatcaatgaatggcaagattatagatcttagctttatgttgttatattttgttttttgctgctgttttcttaattttctattatatctgccatcttcagccagacagaaaaaaaaattcgattataaatataacaatttcatgagatgaaaaaataataaaatcaatctttaaatgtatgactttgaggtgctggtgaaaagcagtaaatactggaagcaggtatatttaatcaagagattaaacacttcttgagctaaaaataaaaagawaccctgagaatctgtgagaggctcgaagagcagaaaaatacacaggaacatttcactcccctccccctgccaccctccttctagcattgcttttattttttaaaattagcgtgatgatttgcctgtgtttttcctttcaatagtatcactgt

SEQ ID NO: 749029 - DNA, 586 bp, Homo sapiens
gctgcaaaggacataattttgttctttttttatggctgcatagtattccatggtgtatatgtaccacattttctttatccatttcaccattggtggcacccaggttgattctgtatttgctattataaaaagtgttacaatgaacatacgagtacatgtgccttttgatagaatgatttattttcctttggatatatacccagtagtgggattcctgartcaaatggtagcagttctgttttaagctctttgagaaatcttcaaaccgtcttccacagtggctgaactaatttacattcccatcagcagtgtataagcattctcttttctctgcagctttaccagcattcgttttttggctttttaataacagccattctgattggtgtgagatggtatcttattgtggttttgatttgcatttcactaatgatcattgatgtggaacattttttcatgtttgttggccacttgtaggtctttttttgagaagtgtctgttcatgtcttttgccccaatttttaatggggtcatttgttttttacttgttgaattacgtttcttatatattgtggatattagatct

SEQ ID NO: 749030 - DNA, 611 bp, Homo sapiens
tcgcatcctgtagcctttttgtccaaacaacttgaccttcctgttttaagctggccattatgtctctgtgccgtggtgctgcgccgtaatacttttagaggcccttaaaatcacaaactatgctcaactcactctctacagctcttataatttccaaaatttattttcttcctcacacctgacacatatactttctgctccccggctccttcagctgtactcactcttcgttgagtctcccacaattaccatcgttcctggcccgacttcaatycagcctcccacattattcctgataccacacctgacccccatgactgtctttctctgatccatctgacattcaccccatttccccatatttccttatttcctgttcctcaccctgatcacgcttgatttattggtggcggttccaccagacctaatcgccacacaccagcaaaggcaggctatgctatagtacaagccactagcccgcctctcagaacctctcatttcctttccatcgtggaaatctatcctcaaggaaataacttctcagtgttccatctgctattctactattcctcagggattattcaggccccctcccttccctacacttcaag

SEQ ID NO: 749031 - DNA, 611 bp, Homo sapiens
tcgcatcctgtagcctttttgtccaaacaacttgaccttcctgttttaagctggccattatgtctctgtgccgtggtgctgcgccgtaatacttttagaggcccttaaaatcacaaactatgctcaactcactctctacagctcttataatttccaaaatttattttcttcctcacacctgacacatatactttctgctccccggctccttcagctgtactcactcttcgttgagtctcccacaattaccatcgttcctggcccgacttcaatccagcctcccacattattcctgataccacacctgacccccatgactgtctttctctgatccatctgacattcaccccatttccccatatttccttmtttcctgttcctcaccctgatcacgcttgatttattggtggcggttccaccagacctaatcgccacacaccagcaaaggcaggctatgctatagtacaagccactagcccgcctctcagaacctctcatttcctttccatcgtggaaatctatcctcaaggaaataacttctcagtgttccatctgctattctactattcctcagggattattcaggccccctcccttccctacacttcaag

SEQ ID NO: 749032 - DNA, 623 bp, Homo sapiens
aacatgaagattttgaaagatctcacatctataacattagagactccactattcaaaactgaacaaatttttctcatagaaattatgaggtgacccagagctaagttcctggttactacagggagtgggctaggatgaattttcttccttattcttgaactcagggttaatcttaagcaaaaaaattaaatatattttttattgatttatttagagtgacgctttctgaaagatattgaggtaagcttaagataataagcatgtataaatatatcttaagtttccaaagctcaataagtgaggtaggaaaacctgctgggagacagcagctggaaagaatgaatctctgagagaaatgaactgggtagctggcccatggaagacagcattgtgagtagaatacctatatgggctacaaasgcattctttatgaagccacatctctaatgcccaccaagaccatgtctgggactgggaggacctccggaaggagctcagctaatgtggtccaagaaggaccttttccagcaaaggctgagatgcagctcagagagcccagtggcccctttggagaaatcttccaagaatcctcagggatctctacagagctcctggtgacagct

SEQ ID NO: 749033 - DNA, 582 bp, Homo sapiens
atcagataaatgatttgctaacatttttctcattctctgggctaccctttgatgatgtcctttaatttaaaaattaaaaggttttttggccaggcacagtggctcatgcctgtaatcccagcactttgggaggccaaggcaggtggatcacctgaggtcaggagttcgagaccagcctggccaacatggtgaaaccccatctctactaasaagacaaaaattagctggtcatggtgatggacacctgcaatcccagctactcaggaggctgaggctggaagattgcttgagcccgggaggcagagattgtagtgagccgagattgcaccactgcagtccagcctgggggacagagcgagactccgtctcaaaaaaacaataaaacaaataaaaattaaaaacaaaaagtaaaagatttttatattgatcaagttcagtttatctatttttcttttattgcttgtgcttggagtgttatacctgagaatccactgcgaaatccaaaaatatttacctctttgttttcttaagagttttacagtttgggctcttatatttaatatttaggtcattgatccattt

SEQ ID NO: 749034 - DNA, 592 bp, Homo sapiens
atttcttgccttgtctacaaattgcttcttaaagactttgtttttttctattgtaatatttgtcttagaaatttgaatgattctttcggtgtcacagatactgtctcctttccctgctgttgtatatgtttcagctatgtagaagctgaaaagaataaggtagatttacatgcacaaatatggcaagagctctaagatagacttgtaaggaggaaaaaaaagaaagttgcagaataatatgcagaatgcaatcccattttttttttttttttttttttttgagacggagtctccctgtcgcccaggctggagtgcagtggcgcgatctcggctcactgaaggctccgccccccggggttcacgccattctcctgcctcagcctcccgagtagctgggactacaggcgcccgctacctcgcccggctaattttttgyatttttagtagagacggggtttcactgtgttagccaggatggtctcgatctcctgacctcgtgatccacccgcctcggcctcccaaagtgctgggattacaggcgtgagccatcgcgcccggccgcaatcctatttttaaaaaccgtatatgttta

SEQ ID NO: 749035 - DNA, 661 bp, Homo sapiens
cttctgtttttaaaacattaatttcttcctttacaagacaaaaaaaaagtgttaagaacaacagaaggatttactttaaaaattatattccggcaccaatatttaactatagaaacataatgataatatagaaataaaggggacaaggaaaggaagtgaggctgaagcaaggggaacgagaaagtgagaagctgtcttaaatgtaagctttttttttttyttttgagacagagtcttgctttctgacccaggctggagttcagtggcatgatctcagctcactgcaacctccccctcccaggttcaaacgattctcatgcttcagcctcccaagtagctgagattacacatgcacgccaccatgctcagctaattttgctgtgtttttagtaaagacagggtttcaccatgttggacaggctggtctcaaactcctagtctcagacgatccgcccacctcagcctcccaaaatgctgggattgctggcataagccacaacatccagccttaaatgtaagctcttttctccattttgcacgctacttggctgagagctttagaatcaaccatctcaagttacaattgtctttggcatcaccatagactcttaacaatttagacagtatattggctacactaggaagcaacctgattttattt

SEQ ID NO: 749036 - DNA, 722 bp, Homo sapiens
tccagtacctcccccttccccagcgtgcatcacctggtctatgggctgatgcattgcagtgtattagacagaccactgcctgctgttgccctcagggaccctcaaacttgagcttccatcagaatctcctggagggcttgtcaaaacccagggtgccgggcctcaccactctcaagtttctgattcagtgggtctggagtggaggtctgaaaatctgcatatccaggttcccaggagatgctggtgatgctggtctgaggatcatgtttgagaaccactatttaaaccctgagcaacttgaggttggtcttttattatttttttacctccagtctctgaaagaatctgatttaaggttggtgttcaatcaatacttgaatgaaaggtattgatgcatttgttgcagccaatgagagtgacaggattatgtcttgagactttttttccccaatttgttcactctgcagtgggcattcttctctcttctttccgaagatggtggccaagtcyttgggtcctatgccttgggggcggctggtttcccaggccagtcagaaaatggctgggtctaggaagacagcttaggctgaagcccatgaaggtggctgcagtgtgagcctgcagaggagggcagcagaggcagcaggcttgaggggaggggtggagagtgtttctggagatcagccagattggtaggatccaaaagttacaagctcaggtgc

SEQ ID NO: 749037 - DNA, 506 bp, Homo sapiens
accctcagggagatggaggcgaggtggggggcttgggacacagaacagtgagttattagcttctttccagcctgcacctcgggcacctctggcaaaaagacctgccagttcctttcggcccctggagcctctctcctctgcttagaaaacaaatcsctgcctaagctggggctttttgttggctccaaaaggagagagccacacgggttctttctagggaggaagaaacagccccagggagaggactgagtggttgggtttcagagcacactgtgtgtgcctgggttgtgaagttggcaaatgatgaatctatttttttttccactttgatgaaacccaaggcctcacaaggagttttcaccattgtcctttgctaaatgcatttccccagcaccctttcttccattttctcacttctctagggagttggggaagtcatagagagagggggttaggcaggcaggctcagcaccaggctgatgtgggttcagatcctgctcagctgt

SEQ ID NO: 749038 - DNA, 583 bp, Homo sapiens
cacagacaatatatacccaggcacacagacaagctgtggatgcagatcacacacacacacttatgtgcacatattgatatggccactgatcactttcctgcgtgaatgaactaactatagtgtcatgaaaaagacatycaaagtcatttggccaatgcctctgtgaatatcaagactgtttctcaacagccaaactgaccttattcttacagatctttaggaaggaaggcaacccccacaaccttattcccacgtctcctccttaagtggggaagtccttcctggcatctaacccagattccttcctcctttacatgaatcacaaaacatctctttgcattgattctctgcttcacagccccgaaagccctccgtgtttatgttcttgcttgatccccacaaccgtccagcaaagccagcacagcagagatgattctatttccccaggagtggtgcccagagaagttaagcagtttgcctgagatgacacagccgtgttggagccgtgcttgcttgggatgaactaagtggcgcgcatttgattttactgctgatttcacagctccttcagctaccccaagct

SEQ ID NO: 749039 - DNA, 583 bp, Homo sapiens
cacagacaatatatacccaggcacacagacaagctgtggatgcagatcacacacacacacttatgtgcacatattgatatggccactgatcactttcctgcgtgaatgaactaactatagtgtcatgaaaaagacattcaaagtcatttggccaatgcctctgtgaatatcaagactgtttctcaacagccaaactgaccttattcttacagatctttaggaaggaaggcaacccccwcaaccttattcccacgtctcctccttaagtggggaagtccttcctggcatctaacccagattccttcctcctttacatgaatcacaaaacatctctttgcattgattctctgcttcacagccccgaaagccctccgtgtttatgttcttgcttgatccccacaaccgtccagcaaagccagcacagcagagatgattctatttccccaggagtggtgcccagagaagttaagcagtttgcctgagatgacacagccgtgttggagccgtgcttgcttgggatgaactaagtggcgcgcatttgattttactgctgatttcacagctccttcagctaccccaagct

SEQ ID NO: 749040 - DNA, 640 bp, Homo sapiens
gaactcaaattaacagacattctacaaaataattgactagtactctttaaagtatcaaggccgtgaaagacagagaaagactaaggaattaccacagatttaaagagactaaaataaaatgacagctaaatgcagtmtgtgctcttggattggatcatggaccagaaaaaggatattaatagaaaaactaaaattctggtgaaatttgaataagctctgtagagcagttaacagtatcaatgtcaattttgagatttcaataattattctatggtaatgtaagatgttaacattcagggaagccaggggaaaagtatttgagaactgtcatagtccattttttattgctataacagaatacctgagcctgggtaatttacaaagaaaaaaggtttattctgattcacagttctggagaccgggaagcccaagattgggcagccacaactggttggtttctggtgaaagtcttgtcccacgttgtaacatagcacagaagtcaaaaaggaagtgagcaaaacacaaagggtagcctcactttataacaacttgctctcatggtaccaattcagttctacaatagtgacaactcactcccatgagaattaccgagtcctgcaagagcagcattaatccctct

SEQ ID NO: 749041 - DNA, 539 bp, Homo sapiens
ataattattctatggtaatgtaagatgttaacattcagggaagccaggggaaaagtatttgagaactgtcatagtccattttttattgctataacagaatacctgagcctgggtaatttacaaagaaaaaaggtttattctgattcacagttctggagaccgggaagcccaagattgggcagccacaactggttggtttctggtgaaagtcttgtcccacgttgtaacatagcacagaagtcaaaaaggaagtgrgcaaaacacaaagggtagcctcactttataacaacttgctctcatggtaccaattcagttctacaatagtgacaactcactcccatgagaattaccgagtcctgcaagagcagcattaatccctcttaaccaccttaaggccccacctcccaacactgccataccagggaccatatttccaacacatgaattctggtgacatactcaaaccacagcaggaattatacttattttaaaacttttattcaggaggccgaggtgggaagattgcttgagctcaagag

SEQ ID NO: 749042 - DNA, 493 bp, Homo sapiens
tttctcaaaaaaaagaaaaaaaatacaaatggccaataagcacatgaaaagatactcaacatcattagacaatagagaaatgcatatcaaagccacagtgagatatcacttcatatccactataagggttgtaatattttttaaaaaagaagaaaaattaacaagtgcttcactgataagtatggggagaaactaaaacactcatacattcctagaatataaaatggtacagccctatgaaaaatagttggctattcctcaaaaagttaaacataragataccacatgacccagcaattccactcctgggtacatacccaagagaattaaaagcatatgttcacacaaaaacttgtacatgcatattcatagtggcattattcataatagcccaaaattagaaacaatccaaatgttcatcaactgatgaaaaaaacaaaatacattagccatacagtgggatgccataaaaaaagtatgaggtactgttatg

SEQ ID NO: 749043 - DNA, 590 bp, Homo sapiens
gggactccatttcttaaaacacacacacacacacacacacacacacacacacaaataccctaaggcttttctaatttttaataagtatccttgtgcttaaaaaaagtatgactccatatttcataacaatgcaactgaacatcactttacaaataagtttgggttttttggggtgagttttttttttgtttgatttgagagaggatctcgcttgtcacccaggctggagtgcagtggagcaatcatggctcactgcaaccttcacttcctgggctcaagtgatcctcccacctcagcctcctgtgtagctgggatcacaggtgcacaccaccatgcctggctaatttctgtatacaaataagttattaataacatactcaaattttttttaaaagacagagttttgctcttgttactcaggctggagtgcaatggcrcaatcttggcttaccacaacctctgcctcctgggttcaagcgattctcctgcctcagcctcccaaatagctgggattacaggcatgcgccaccacactcagctaattttttttgtatttttagtagagatggggtttcaccatgttggtcagg

SEQ ID NO: 749044 - DNA, 536 bp, Homo sapiens
acagagtgagactccatctcaaaaaataaaaataaaaaaagtgaacacacccacataatcatcacccagtttaagaaatggaatattagtagcactcctgaagcttcccttgttccctttctctcttccccagaggtaagcattatcctgatttctaacaccacagattggttttgccatcctttggactttatacaaatggaatcatatagyatagtcatctgttgcataaggatgttttggtaagagaaggaccacatatatgttggtcccttcagattataatatcagttttttattgtacccttcctatgtttagatacataaatacttaccattgtgttacagttgcccacagtatccagtacagtaacatgctggagaggtttgtagcctcagagcggcaggctataccacatagcctatgtgtgcagcaggctataccatctaggtttgtgtaagtacactctatgatgttcgcacaacaaaattgcctaaggacacatttctcagaacgtatcgccattgttaagtga

SEQ ID NO: 749045 - DNA, 519 bp, Homo sapiens
tgtgggaagtataggttggaacttggggtttttaacaagatggtctttaaaaggcagaggactgttggatacctcactattttaaagagaaattttatttaaaaaagaaatcttatgcatgatctcatttcagtgttgatttactagaagcatatgatggacctacgaacaggacccttcaaatcaaaatgyatcgtttaggaatattctgaaggggaaagtctgtgactgcattctctgagaaccatctgctcacctacttatgtcccttaaaactgaagctttaggatatcctttgaaacctttttgtttcttatcatataatgtatggtaccataaataccattgcatttgatttttgtgtgaaacaacactaaatcactattaaaaaggaaagaatgaggttatcttgctgacaatttaaagaaaagacttcttcataatatatttacgacatctaaaatgccttttgtcctcagggtagcactgtagttcttcggtgcttgagttgatactgca

SEQ ID NO: 749046 - DNA, 489 bp, Homo sapiens
atacgctttaattatactattctaggcttcagtcctctcatttataaaatgaagaagataaattcaatgacactgaaaggccatcccactcacaacaaaaacctatgaatctataattcttcgttcctagagaacgcrgactcggggactcaatgaactctcaaaatgtataacaatcattctcaggtctcaaaaaagtaaaatgattaactcaatatttaattatatctcataaatcagaacttctatccaaccaacatgagtaatttcttatatttagtaattacatttttttctttgtacattagccaaattcatgttccactacaaagccatttcttataagacttcttccatttagaacctaactactcctgtaaggactaataaaaataatatttgtaagtctgaatgttattttgaatgacaattccatgaagcctggccaacaaaatccaccaggcctacttattccaccactacactcac

SEQ ID NO: 749047 - DNA, 593 bp, Homo sapiens
aagctgtatgtgcacagcaaagcaggttttttatttaggttgtacgtttctttggaatttcggaagtcagtggctgatagaggatagaaaggaataaaagcccttcccaaagctacgcattggcactgcccttaatactgtgagattttaacgcagcactcccgatgcattacagatacgaccactaaataagagactttaaggagttgaaataattattgaatcaacagatctctatgtctgtgtgtgcaagtagacaaatatacataccaaactttgtmctttgcaggataacatccgtattttcaagttacaatcagttgtaaaaattcatcttaaactttaagatccaaaaagtaggaatcacaggagccacacttaacactcttgatgcaatgaaactataaaatgtacaattaaaaattcaactggatattaagaaatactcttccaaaatctactgaaggaggagaaatgttactaggttaacataattgaatagcatcagtcattacaaattacattttcaaatgtttttgatatgggaaaatgttcataatacaactgtgaattaaaaattcataaatatcctt

SEQ ID NO: 749048 - DNA, 593 bp, Homo sapiens
aagctgtatgtgcacagcaaagcaggttttttatttaggttgtacgtttctttggaatttcggaagtcagtggctgatagaggatagaaaggaataaaagcccttcccaaagctacgcattggcactgcccttaatactgtgagattttaacgcagcactcccgatgcattacagatacgaccactaaataagagactttaaggagttgaaataattattgaatcaacagatctctatgtctgtgtgtgcaagtagacaaatatacataccaaactttgtcctttgcaggataacatccrtattttcaagttacaatcagttgtaaaaattcatcttaaactttaagatccaaaaagtaggaatcacaggagccacacttaacactcttgatgcaatgaaactataaaatgtacaattaaaaattcaactggatattaagaaatactcttccaaaatctactgaaggaggagaaatgttactaggttaacataattgaatagcatcagtcattacaaattacattttcaaatgtttttgatatgggaaaatgttcataatacaactgtgaattaaaaattcataaatatcctt

SEQ ID NO: 749049 - DNA, 542 bp, Homo sapiens
tccacaatttcttccagaagatgatagaagcagagagaatacttcctaactcattctatgaggctagcattagcttactaacaaaatcagacattgcaagaaaaaaaaagctacagaacaatatattttatgaagatatatgcaaaaatcctcaacaaaatattagcaaaccaaatccaacaatgtataaaaataactatacaccatgaccaaatgagatttatcccaggttgcaaggmtggttcaacatttgaaaatcaactaatataattcattgcatcaacagactaaagaacgaaaatcacatgatcatgagagtagatgcagaaaaatatatttgacacaattcaacacctgttcataaaaaaaaaaaaaaactcagcaaattagcaatagagggggaacttctggcttagggagaatgtataggaagtgttaggcagggtattgggacattaagctaagcaatttttcaagagcagataacctgctactgagaaaactaagacgcagcccgcttactaagaggataaaataaggtg

SEQ ID NO: 749050 - DNA, 472 bp, Homo sapiens
tggaacaatttggaagaactgacatcttagtgaaattgagtctcatgaatattgtatatctatcaatttatttaggtcttcttcagctgatctcagcaaaatcctgtggtttttagtgaagtggtatttaaatacttttattgatttcattcctaagtagttcatgatttttgatgctaacataaatagatttttaactgattttcgaattatttgcaactatcctataraagttcaattgattttgtacactgacttcattctgcaaacttgctaaatttacttaagaagcagagtggttgctttgtaaatttcttagcattgtgtaaatagaaaaaaacacattatctataaataaagaattttctttttcatctttatgctttaataaatttttcttgcctaattgtactggctaatacaaacttaatcatgttaaacagctcagatgggaacagacattcttgacttt

SEQ ID NO: 749051 - DNA, 582 bp, Homo sapiens
gaggatagtttttgacaaatgattgtaaatgttattagctgtgttgacttgagtggtgatccagtgaaattatatttgaatatgcacccaagttgaagagatgtgagaggaatgtccccagcactccagcctcgcgcaggcctggctctgtcccctcctccccttcctctaacactcactgcctgtcctgtggtgcttayctgatcccacatgcccctggaagcactcccaatttttcaacttggtctctatcctgataaaacctctgtgagactatgagaaccatcttaaactctaacccatcttaaactctaatctgtacaaaatttgatgatctgttacactcttacttcatttcatctgcagacaaatagccccaggcattctaggttttctatctatttttctattatatctacttttctaaaaagcatgttttggatgataacttttatgatcatccttcctcatctatagacagtgtttctagtaattaccaaattatcttcagttcaatgtcgcctggaaagttgtgttttaaaattacaaatttacagatgctccccagtcctcccaaatgaa

SEQ ID NO: 749052 - DNA, 626 bp, Homo sapiens
cagtgcttcagttctctttagatatgggagatattctatcacttgggttccctgtctcaagtttcttgtgccccttggtgtcacaattcagagacatgttctactcagtctctcagaggttccctagcaagatcgagcctggctgtctacaatagtaaccacctcattaacactaaatctttaatgggcttttctccttactcctatctctgcactactctctacaatgctccctgagatcacctcctaaataagttacactgaaatccttgttcaggatctgctattggaggaacctaaaccaagagagtggataaaggtaaaaacaaggacaatatttaccaagttattgcaataatccaggcaagagatgatgatgtatgaatgaaggtggaagcaccaataagaaattgggaggccattagaaygaggcagctccagcaccatggattcccacttaagcaaaccaaaacctacttcagtgtaaacactcttaaccaatctgaaactgtcaactaacatctaatcttaatcaaaagaaccttgggcctttcatcttattaactgtacactggagaaaggataatacagatctttcaagggcttctgaaaatagagaaaaagat

SEQ ID NO: 749053 - DNA, 544 bp, Homo sapiens
aactagatcactttaaccaatcaatttttttaccctgcttcctcatttacctttttttttttttttttgtgagacagagtctcactctgtcaccagattggagggtagtggcactatctgggctcactgcaacctccgcctcccaagttcaagtgattctcctgccccaggctccagagtagctgggacyactggcacatgccaccatgcctggctaaattttgtatttttagtagagacagggtttcaccatgttggccaagatggtctcgatctcttgaacttgcgatcctagcgcctcagcctcccaaagtgctgggattacaggcatgagccaccgtgcccggcgtcgtctaccctttaaaagccttccccttatgcccatttgttggagccccaaattgcttgcagtcttgagctgccccatttgtgaattgtcgtctgttcaaataaactttaaaaaattttaacgtgccaagatttgtcttttaacacactggaggtaattggatgtggtcaagtgtgattgaattttggatgtatt

SEQ ID NO: 749054 - DNA, 544 bp, Homo sapiens
aactagatcactttaaccaatcaatttttttaccctgcttcctcatttacctttttttttttttttttgtgagacagagtctcactctgtcaccagattggagggtagtggcactatctgggctcactgcaacctccgcctcccaagttcaagtgattctcctgccccaggctccagagtagctgggaccactggcacatgccaccatgcctggctaaattttgtatttttagtagagacagggtttcaccatgttggccaagatggtctcgatctcttgaacttgcgatcctagcgcctcagcctcccaaagtgctgggattayaggcatgagccaccgtgcccggcgtcgtctaccctttaaaagccttccccttatgcccatttgttggagccccaaattgcttgcagtcttgagctgccccatttgtgaattgtcgtctgttcaaataaactttaaaaaattttaacgtgccaagatttgtcttttaacacactggaggtaattggatgtggtcaagtgtgattgaattttggatgtatt

SEQ ID NO: 749055 - DNA, 544 bp, Homo sapiens
aactagatcactttaaccaatcaatttttttaccctgcttcctcatttacctttttttttttttttttgtgagacagagtctcactctgtcaccagattggagggtagtggcactatctgggctcactgcaacctccgcctcccaagttcaagtgattctcctgccccaggctccagagtagctgggaccactggcacatgccaccatgcctggctaaattttgtatttttagtagagacagggtttcaccatgttggccaagatggtctcgatctcttgaacttgcgatcctagcgcctcagcctcccaaagtgctgggattacaggcatgagccaccgtgcccggcgtcrtctaccctttaaaagccttccccttatgcccatttgttggagccccaaattgcttgcagtcttgagctgccccatttgtgaattgtcgtctgttcaaataaactttaaaaaattttaacgtgccaagatttgtcttttaacacactggaggtaattggatgtggtcaagtgtgattgaattttggatgtatt

SEQ ID NO: 749056 - DNA, 650 bp, Homo sapiens
taaagcccatttctgactgtaaatccaggaacttttttgctgctttacattgcctgctttttacatttatgataacttctgcagaatatatatggaatagtgattttggccttaatagcacttaactcacttaaatacactttcccaagatagaatacgacatttttccatggatcacttttctagactgaattaattagatgagcacattttgaaagagcagaaatctaatattcattttcttttctatttaagtgggggttaacgttttttaaattgtccttagactctgtgtattaactgtgtatctttccattgtgctttctgctgagaactaattaactgtggaaagaragtaaaatgttttgtatcttcataattggatattagagttgtctttttattgaccagatcatgctattttagtgtgtgtttgtagaagaacgtgttcttgactggcaggatgccatggatgattgataatgctcatataaaattgttagatttctatttttaaatcttttgttcttagaatcctgccatgatgtcttattgtcagctaaagatgaagttgattatacaaaataaataaatgtggcaaaaactttgagtcttaccacaggtccatatttttaagaattagaacttaa

SEQ ID NO: 749057 - DNA, 650 bp, Homo sapiens
taaagcccatttctgactgtaaatccaggaacttttttgctgctttacattgcctgctttttacatttatgataacttctgcagaatatatatggaatagtgattttggccttaatagcacttaactcacttaaatacactttcccaagatagaatacgacatttttccatggatcacttttctagactgaattaattagatgagcacattttgaaagagcagaaatctaatattcattttcttttctatttaagtgggggttaacgttttttaaattgtccttagactctgtgtattaactgtgtatctttccattgtgctttctgctgagaactaattaactgtggaaagaaagtaaaatgttttgtatcttcataattggatattagagttgtctttttattgaccagatcatgctattttagtgtgtgtttgtagaagaacstgttcttgactggcaggatgccatggatgattgataatgctcatataaaattgttagatttctatttttaaatcttttgttcttagaatcctgccatgatgtcttattgtcagctaaagatgaagttgattatacaaaataaataaatgtggcaaaaactttgagtcttaccacaggtccatatttttaagaattagaacttaa

SEQ ID NO: 749058 - DNA, 639 bp, Homo sapiens
atgttatatcccttaggaataagactagtggccactggttttcttcttaaagtaccttaggtttagaactccattccattaaaagttttctttggttctgtaatgtaggtaaagttttatgcagagttcttttcgatttgaatgaagagtgacttaaggaggaaaacaaaatttgggtagtttctttttctctctttttctctgtctctctctctcttctctttctttttaaaataggaataacaaaacatattgtaagaagcctggttggtcagaggagattgtctgtgttaattaggagaatgtttgtcaggcagcatgaaatcatttgttaattactgtttttaatcttatcagattattgttatttttccaactttcctccgtttctaatgttcttctttttctttctttctttctttttttttctgggcctgaaattaccttttgctaatccagtttgtgtggagagatagagtgccagaytgggagttaggggactccttccttctttttgttttaactttagtccttcattgttaaaatgaaagaattagactaaattattttcaagttttcttctagctcttaaaattaattctaacatctcttacgtaaacatttggaaagatttaagag

SEQ ID NO: 749059 - DNA, 506 bp, Homo sapiens
cctaaataatattccttctatggcttatccttgaatgaagttttttttttctttttaactttattattattttaatagagatggggtcttgctttgttgcccaggctggtcatggactcctgggctcaagtgatcctcccactatggcctcccaaagtgctgggattacrgttgtgagccatcactctgtttttttcttttgaatcaacatctcttggatgttctcttagatgatcatgctactccatccaatctcctaaataggagtaggtgtttctgaaagtgcttgcccttccttttctgcatactttctcccagaatgtcctagaaatcagaaaccatgcttttaaattgcttatttatcatttcagagacctttctaaacactttctgaccaaaacaaacaaaaaatcctatttttttgttttaaaaaatcaagtttttaaccaatctaacatgtataatgtgcaaaaatctcagaaggcatttcttattgtattattact

SEQ ID NO: 749060 - DNA, 506 bp, Homo sapiens
cctaaataatattccttctatggcttatccttgaatgaagttttttttttctttttaactttattattattttaatagagatggggtcttgctttgttgcccaggctggtcatggactcctgggctcaagtgatcctcccactatggcctcccaaagtgctgggattacagttgtgagccatcactctgtttttttcttttgaatcaacatctcttggatgttctcttagatgatcatgctactccatccaatctcctaaataggagtrggtgtttctgaaagtgcttgcccttccttttctgcatactttctcccagaatgtcctagaaatcagaaaccatgcttttaaattgcttatttatcatttcagagacctttctaaacactttctgaccaaaacaaacaaaaaatcctatttttttgttttaaaaaatcaagtttttaaccaatctaacatgtataatgtgcaaaaatctcagaaggcatttcttattgtattattact

SEQ ID NO: 749061 - DNA, 553 bp, Homo sapiens
gtaatcactatagcagttttttatccatgatattttccttttatttaatactttttatttctcaagtatcatcaatctttatccattttaaatctatgagattacattgtacacattatatttcttttctatatcttttttctctatagtcacatttgttatattgtaacagtaaattttcaacttattttacaaagcaattaataaacatttatttatgtgtttgctttacagcttaactaatgcttgtgatgtttaacgcctgtcttttcaacttggtctactgagtcttcaatactggtgactgagctgctygaagtgaactctggacaaggtggagagcatcttcttgatttaaggtctgataaaaactagcagtctttcaatttatccagtaaaatgggtcataacaatacaactatatggtatattttgtttccaaaattaaaaacgtcctaacaatcactgtgcttctattttagcagtagtgggtaaatggagctacgatctttattttttttaccttggaagaaatatcacacacatacatgta

SEQ ID NO: 749062 - DNA, 484 bp, Homo sapiens
taattttaaaactgtttatttattgtgaatacatagtagatgtaagaatgtatagggtacatagatattttgatacaggcatacaatttgtaataatcacattcagggtaggtatccatcacttcaagcgttaatcttttctttgtgttacaaataatccaattatactcttatttgttataaaaagtacaataaattattgttgattgtggtcaccctgttctatcaaataatagatcttactgaactctttaaagkcgtccatgagtcttggaatctactttttctaaactcctgttaacgttgatattttgaacaactcctgagaatcacaaaacttcttaatggcatctataaacctttccagaagatttcaattttcttttcccagaggaattactatatatgaaatccctagtattaaaagttatttattaaatgataagtcttgaaagctaaaattcttgatccatggcagcaaata

SEQ ID NO: 749063 - DNA, 598 bp, Homo sapiens
attcattttgttatattctatagaacagcaatgaactaatacatgtaaaacatttagcagatttcctagaacttcgtaagtagtcaatacatgctatctctttgattacctaccatcttctctaccataaaaccgaacaatttaaaatctaaataaaactctgtttctgctctggattacatcatagcctatattgttgttcattaataaagacctacagataataattataatagayactttcccaacacaagtttgctctctactattaaataagataaagaatgagcaacaccttcttcagagcagggaacttgtaattgaatattttaatctttatcagatgcaatcaatgaattaagtctaaaatgatgagtctgagttttatagaagaaatgtagttaagagagatatccttgttttctttttctatctctagaaaccagccggatgacaacaatattaaataaaattgcatatttataagtgctgtattgaaaagaaagagacttgtgaccacatggtggaattaggtactgatggggaattagaaaattataagctctgttaattaacttacctgaatcagcaatctgtt

SEQ ID NO: 749064 - DNA, 645 bp, Homo sapiens
tcctgtctctataaccttggacaggttacttaaatttcttgaatttcactttcttgatttgtaaagtgggaacaataatatacagctttgtgagtttatgtgaaaattatgtgtacaaatcttagaatagctcctggcacatgagaactcaagtgttagccattcctcccatctccaaacctagaatactccattctctactacactgcaagcaatatgagaacagaaatttttgtattcaagtactgggaacaatgactgacacataatagttgtccaataaatgcacagtgaatagaagattgaataagttttgtgcatgtagttaccctcttttagacttatttcatatttatatttgataatttattttactttcatttacctttstatttccttcaagattgacttcaattttcctagcaaggcttcagttgtatttttctttcttgtggaggcttcataatggctgtaagttaataaaattgcatttatatgtttgtttcctagattctctttgcttggtagctctactttcatctttttttaataaaaccatcttgccattagtttctttgagaatctatagaattatttcttgacaattttccgtttcttgggatagttttctgatatccctaaata

SEQ ID NO: 749065 - DNA, 623 bp, Homo sapiens
gttgtctatggagaaaatgttcagtaacactcatgataagaaaatgcatatccacaattaacaaggatgcaatttcccatttatcaaaaattcagaagcttgacaagtcctatagatagttgtgggaaaatcggcactctcatatatcacttgtacatataaaaaatgaatgatgacatttttatttaggagtatttattaatatatagtgaaattatagatgtattttctctgaccaagtaatctcagttttgaaaatctggttttaaaaattctaatatatttaataacataaatatatatgtggtagctctactgaaatagacaagtggagactagaagaagcttgaagacaaatccatcacaaatgcattgracaaaatatggtatgtattttaggataaataaagacttaatgaggaaagtttttaatgtaagattttagctgtattagttttctaaggctgctataaaaaaataccacaaaatggatgacttaaaacaacagaaatatatttatttacaattctggagattagaagtctaataaaggtgttggcaggctcatgttctctctgacggttctaggggaagatacttccttgcctttttccagcatctga
